United States Patent Application Publication US 2005/0153317 A1 - sequence listing, part 14

SEQ ID NO: 60426 - DNA, 600 bp, Chicken  19866894319872_6
tagagaagtttgtgcattgtttttgtttgttggattaagttatttaagtgaaaaaawtatatattttctagcaaaataaggtgktgtactttgtgtgctgtgagcaratgtgctcagagtcctttggatgtgtaactaaatgatgacactgtagtagcttttagatgttgactratgatagacagaaatgtccttccttgtcctcaggagcagtgtaaatgaaatacatccctgccctgaaatgaagatggcagaagcatcagttatactctattgcatctccatcasagaaaatcagarcagcttaaagagaggattttggcatactgaccccattttcaggagtaataatgaagctgtgtttgatggaattgaaggaagtctctcaaatagctacttgtggctcctctctttggttgccagatgagatagcaatgagaggatttgtgtctccacaagttgtgaagtcttaaatgcctccatcttgtagtgttgcctaarctgtattggcaartgtctcctgccagcwycaagcactgagtgtaaacactaaccaaaaggcgaagtgttaaacaaggtcctgcggacaaaaatcactca

SEQ ID NO: 60427 - DNA, 454 bp, Chicken  19866894319872_7
cctcaggagcagtgtaaatgaaatacatccctgccctgaaatgaagatggcagaagcatcagttatactctattgcatctccatcasagaaaatcagarcagcttaaagagaggattttggcatactgaccccattttcaggagtaataatgaagctgtgtttgatggaattgaaggaagtctctcaaatagctacttgtggctcctctctttggttgccagatgagatagcaatgagaggatttgtgtctccacaagttgtgaagtcttaaatgcctccatcttgtagtgttgcctaarctgtattggcaartgtctcctgccagcwycaagcactgagtgtaaacactaaccaaaaggcgaagtgttaaacaaggtcctgcggacaaaaatcactcacgttattcatgtgctattcaagctgagttattcctacatagttatttatggttag

SEQ ID NO: 60428 - DNA, 441 bp, Chicken  19866894319872_8
gtaaatgaaatacatccctgccctgaaatgaagatggcagaagcatcagttatactctattgcatctccatcasagaaaatcagarcagcttaaagagaggattttggcatactgaccccattttcaggagtaataatgaagctgtgtttgatggaattgaaggaagtctctcaaatagctacttgtggctcctctctttggttgccagatgagatagcaatgagaggatttgtgtctccacaagttgtgaagtcttaaatgcctccatcttgtagtgttgcctaarctgtattggcaartgtctcctgccagcwycaagcactgagtgtaaacactaaccaaaaggcgaagtgttaaacaaggtcctgcggacaaaaatcactcacgttattcatgtgctattcaagctgagttattcctacatagttatttatggttag

SEQ ID NO: 60429 - DNA, 426 bp, Chicken  19866894319872_9
ccctgccctgaaatgaagatggcagaagcatcagttatactctattgcatctccatcasagaaaatcagarcagcttaaagagaggattttggcatactgaccccattttcaggagtaataatgaagctgtgtttgatggaattgaaggaagtctctcaaatagctacttgtggctcctctctttggttgccagatgagatagcaatgagaggatttgtgtctccacaagttgtgaagtcttaaatgcctccatcttgtagtgttgcctaarctgtattggcaartgtctcctgccagcwycaagcactgagtgtaaacactaaccaaaaggcgaagtgttaaacaaggtcctgcggacaaaaatcactcacgttattcatgtgctattcaagctgagttattcctacatagttatttatggttag

SEQ ID NO: 60430 - DNA, 600 bp, Chicken  19866894319874_1
aggcatgcagacaaaaattaaccaggcacttcttaggatgtgcataaagagtaaaaaccatttcactacacccttttatcttgttccacagggacacaacacaaaactgggaagtagcaggataaaatgaaggctaaggaaaataaattttaatttaaatgctttcatccttcaaagaccgtttccacttggctgaagcaaatcaaagtctaagcctattataaaagaaacaaagcactaagctacacaggtaaactcttggctctgtttgctttgcattgctacactctggtcttaagytttaagtgagagagtcaagtccaacaggaaagcagtaaataagagattaagtagaagagaggaagttgactgaatgcaaggggagcttcatttccaagcttttggatagcacagtccaactgtattaaaaaagaagctgacttgttaaaaaatagttgcataaaacaacatttccaagaataccaacttagcaccttttgcttctgcttatgtagagaccctctgcaaaatttgcataagctccatctaaagttactcactttgtgtcaattatatctgtcttgagaagattgtattttc

SEQ ID NO: 60431 - DNA, 600 bp, Chicken  19866894319874_2
agcttcatttccaagcttttggatagcacagtccaactgtattaaaaaagaagctgacttgttaaaaaatagttgcataaaacaacatttccaagaataccaacttagcaccttttgcttctgcttatgtagagaccctctgcaaaatttgcataagctccatctaaagttactcactttgtgtcaattatatctgtcttgagaagattgtattttccaccccatctctccagaaattcgatctcctctcccaagatcctacaacgactcaccaccaaagagacatcgtgaagcacctayggaagagatcagaaaaggatttacattgaagctggaaccactgtgtgacacttgaaaacaaagtttaggctagaagacatttaaaatatgcagcttaactactatctcactctgtatacaaaaatgaaattgtacaagcaataaaaacaaatatacatccttctttgccataagtttcttcttttagctttgttaccagggttgcacaaatataggtaacaccggatttgacttaggaatttaaactactaattctcttgaaagcagaatggcaagcagctcgattccctgatttctact

SEQ ID NO: 60432 - DNA, 600 bp, Chicken  19866894319875_1
tcccagagttgctgtccaggattaacactgcacttactatcccagccaaagattcctctcaatcagctgagcagaggcttctgcatgctatcctgaggattcaaacttacatgtgctaagaaaaagaccctctactgcatagttagtgccagtataagccattgactatgcccaacagtgatgtgcttgagaaccaaatgaaagaagagaatgagaagatgttccaagactactaaactcagcaagccacgagtaaaaatgaggtggttactgtgagactgtctcatcaccagttgaccmcacagccattaatgaggtagagacttcatctcaggcccttagcagagggattgttttgacatctcagtcccactcrtcatataacaggctacagtaagataccgattcagagcagaaacagtcaccctgtgacattcaggcaaggaaatgacattggtaggtggtggaaaagaagtagagtactggtaaaatacttactctggggatgattctggggttaaattggacatttcctctggtgtaggtactgcccatgcacacacagccaaagagaggaagggagaaaagaaatcaatgaat

SEQ ID NO: 60433 - DNA, 600 bp, Chicken  19866894319875_2
gcttctgcatgctatcctgaggattcaaacttacatgtgctaagaaaaagaccctctactgcatagttagtgccagtataagccattgactatgcccaacagtgatgtgcttgagaaccaaatgaaagaagagaatgagaagatgttccaagactactaaactcagcaagccacgagtaaaaatgaggtggttactgtgagactgtctcatcaccagttgaccmcacagccattaatgaggtagagacttcatctcaggcccttagcagagggattgttttgacatctcagtcccactcrtcatataacaggctacagtaagataccgattcagagcagaaacagtcaccctgtgacattcaggcaaggaaatgacattggtaggtggtggaaaagaagtagagtactggtaaaatacttactctggggatgattctggggttaaattggacatttcctctggtgtaggtactgcccatgcacacacagccaaagagaggaagggagaaaagaaatcaatgaatcagcacaccttctttttttctggttctataacaatgaaaacattgtgacattgcaccaccctttcatttgcccact

SEQ ID NO: 60434 - DNA, 599 bp, Chicken  19866894319876_1
  misc_feature (1)..(115): n is any nucleotide
nnnnnnnnnnnnnnnnnnnnnnnnnnnnnnnnnnnnnnnnnnnnnnnnnnnnnnnnnnnnnnnnnnnnnnnnnnnnnnnnnnnnnnnnnnnnnnnnnnnnnnnnnnnnnnnnnnntgctccaatttaaataaacctctaaccaaaaaagagcctacagagatttttcaataaaataagtgattttgcaatctgtgattattttttttctcggttgactgtaattctgttccaaatccctggataaccaaggtcaaaactaaaaaccaaacaagattttttttgtcttagtgagcaggaakaaattccagtaatacagacaattctggttgcactttcttctttttacaatattttacattttgttataattattgtaacattctataatattttattttattatttttccagtgtttgtttttacacacatattatcagcacaggcctttatgcttatgtcatcatccaaagtagaattatgtcctttagttttaaacatcccacaactgcaggtctaatcagaaggaatatatggtagaactttctattgaaatgtaataatgacaacaaaatacgctatctacgccaatatattcta

SEQ ID NO: 60435 - DNA, 600 bp, Chicken  19866894319880_1
ctgaaaactgtgcctttggtgctgatggcaaccccaaaccactttttttgccatacttatcactgacactaacagtttgttactgccagtacgacagagccatcagtactgtattagagaaatatcatttgtagcataccagaactgcacccacagaaaatgagaaagcaaaagtagctgctcaataggaaaaaatgacaggaaaatgctttcagatattagcaatcctaataatcaaatacagtacatgaattttaaattaagcttcacggtggtgtcaaacacaactaccatcgctgyattcctgcataaggaaggccttcttcatacgttcccaggccactgaagagaaccccaagtttcctccttcgccactgcagtaaggatcagaaactaaacagttatttgtagccttyatttttttcagttttccagttggttaactcctacaatttctgttgaataaatctatgatttctttttatgagagctgctccaaaaccagctcagatttggacaagcatggcatgcaggctcttgtccactgctggacaaaatgcacagctagtggtggcaactatgttgaaaaacagcatttgg

SEQ ID NO: 60436 - DNA, 600 bp, Chicken  19866894319880_2
gagaaatatcatttgtagcataccagaactgcacccacagaaaatgagaaagcaaaagtagctgctcaataggaaaaaatgacaggaaaatgctttcagatattagcaatcctaataatcaaatacagtacatgaattttaaattaagcttcacggtggtgtcaaacacaactaccatcgctgyattcctgcataaggaaggccttcttcatacgttcccaggccactgaagagaaccccaagtttcctccttcgccactgcagtaaggatcagaaactaaacagttatttgtagccttyatttttttcagttttccagttggttaactcctacaatttctgttgaataaatctatgatttctttttatgagagctgctccaaaaccagctcagatttggacaagcatggcatgcaggctcttgtccactgctggacaaaatgcacagctagtggtggcaactatgttgaaaaacagcatttggtagctgagaatttggtctatcaaataatgttatcgtgctgcttgtatctgctgtagtttccatggaaataaataggaggcattactttcagagcaagccatgtaatatattcacaa

SEQ ID NO: 60437 - DNA, 600 bp, Chicken  19866894319904_1
ccaaagccaaaacaccagattcagcccacacacaccaccacatcatccaagaggctgcaggacagaagtaagacaagaggttggcagtggccacttgcacggccaccacaaggtcacccgtgctctgggatagccaccaacacacagagtgggttgagaaccaaggaacggaaaagcagagcttcagggagtgggaaagagagggctgggagacacaacacaggaggaagaagttgggatttgtcccagctcttcttcctctgctgtatccaagaagctatcactgaaaagtcagccccrggactggaatatttgtgttgttttccccgaagcaaacactttctccagcgttacacaacatgcaggttggggttatttgcactttgaggaactcccagggagaaatgctgacagagccgcaggaagtgcagcaaacatgccgagaggagacatcccctccctgagaaggatctggaacaaacagttccctatcctggccccgagggcccaaagtttcattaaagaagaaagtaaaaccacccaacaactgcaggcggcacttgggtaatgcaaggcgctctgttccgaggccatgtgcca

SEQ ID NO: 60438 - DNA, 600 bp, Chicken  19866894319906_1
tcaaacaattactgcaagacaacattttttaataagtgaacatccaatacattttgtgatttcttgcattaaggcccactctaaagacatttgtcttttgcaattacgcagcaactcagaatcaatgggaagttcaaaaaggtatttattgtttttgaatcttgctaatgtgatttaaaattaccttatcccagtatactttaaatctcaagggagactgtattttaaaggttaccatggctggaaggcttgatccattagaaaaacattaactaaaaatatacaatggacccttttctwctcttttctttgtatttcccacagctattctatattaatattgacatgggtaagacaatttaacaaactttagagtgataacaaggccattttgcagtggctgttttgttgagcaataaggctgcatggagaagggcagattttgtctcctcacttcctgtcattctgatcattttattgcataagacctgggtcaagaaagtttatgtctctaaaaactattgactgcatgttttcagaaataccacaacagagattccagtaaaaatctgtaagagaactttccaccttctgacaagg

SEQ ID NO: 60439 - DNA, 600 bp, Chicken  19866894319920_1
aggaggagatcctggtggcctgtctgcaaatacaacccacagcaaatcatgaagtcttttgtctgttctcccaagaaggtcagcacgaaagcccttatttctcgatctctttttcccaggtttagagccctgaaggaggtgagcagtcccaccatatatattatcaccagaggctaagctgtctgcacagttctttgcaccaggctttaggagcttgagcaagaccaaggtttgccccgtatattctaatgcctgtcacttagagaggctcagagctcaccaagctcctgcctcacactrgtgacctcagaaggcttctgatgacagcatccatcagctcacaccccagtcccccttctgaagtcaacgcctcctaccagcctcctcctggacctctgtgagcagtctgctgtgggtctcttttcattcgggtgagtaaactcgaacaatgctttcaatcactgcctgcctcggctcagagtggtccctcaagtgcaccatgaaaggagaagcacatctgggctggattatagggtggtgcagtggcgtttataactacagattcctgcgtatgtttccgagcaggacgtatatatttct

SEQ ID NO: 60440 - DNA, 600 bp, Chicken  19866894319922_1
agacaagagctttagtatagtacaaaaactgtggaagtgcagccacactggtctgataagtgagcttctttgcatgtttgttgtaggaagaatattcatgttgttagaggaagaattttcatatatatggtaaaaaaacgtgtagaattatggtgagtaggcaagtaaaaaacttcatacagaaagatgatatgagatttattttattttattttattcaggctgcaattggaagtactgtaagagaactatcattagaaacactaattttcagatactgcatccacagttctcattgayttattgggtttggaaactgaacacagctgttaacagcacacttttgactataaacactatttattaagtatgtggagaaggtcttgaaaaaaaataacagtctcagaatataaacaattatgtcagatttctataaattctcagtgagagtgttcagtaggcagaaagcatatttacaacgaggagtagaatgacatctatttggtgctgtgaaatgtatttttatttgatctcttgtcttgtgtgggaagtaggagtctgaaaaaaaatatgtctttaaccatataatgcagttagaac

SEQ ID NO: 60441 - DNA, 600 bp, Chicken  19866894319923_1
atttgattgatatgttagacttggaacataggagtgtgatggagcagaaataccatttattagcttactcacctaataataataatttgtttaaaaatagctcattatattccataaactagattcaaaatgccctcttaactaaacatttccatgtttttaaatgagatccatgatttaaatgcttaaaatttattttggttcacacttcaagttcagcaattcacaaagtgcagataaagctaaaaagccagattgtgctagaatgtgaaatggcaaatacatttcaaatgttagtargcaccaagtccaggggattatactggagctgacatggagttaaacctctgaagcctacagcataaacataaggtcctcagcatatcatgcggtaaaaaagttaattcacaatgagtgaacaaataggtctgtttcactaggagattcaaaactggatgtcgaagggaagaccacggtaaatatagtctggttctgattattctattcagctatatagtaacaaacttctacacaaccacataactgagagaagwaagttggattgattttcgtagatatatcagctgttcacaattcaca

SEQ ID NO: 60442 - DNA, 600 bp, Chicken  19866894319923_2
attgtgctagaatgtgaaatggcaaatacatttcaaatgttagtargcaccaagtccaggggattatactggagctgacatggagttaaacctctgaagcctacagcataaacataaggtcctcagcatatcatgcggtaaaaaagttaattcacaatgagtgaacaaataggtctgtttcactaggagattcaaaactggatgtcgaagggaagaccacggtaaatatagtctggttctgattattctattcagctatatagtaacaaacttctacacaaccacataactgagagaagwaagttggattgattttcgtagatatatcagctgttcacaattcacaaataatgaagatatttgaatttgaacagtctaaatcattccattttccagagtcttctatcaccgcacagtcttcatttttgtgattatttggttctccaggtttccagttgctgtaagttaaaggcccaccactcaggtacatgaatctgccctcagtttgtgcatcagatatcccaatataagcttggcttgaagggtcaattaagtcttttaaagctgtattctcagcctcgttcctaggagaggcaagca

SEQ ID NO: 60443 - DNA, 600 bp, Chicken  19866894319927_1
tttttttcttctggggactaaagggaaagcccagctgactaaaaagcacctaagattatgtaagttgtgtcacgtgctctgtttcagccactgcaaggttgagatcaggacctcatacacagatcaggcagcagaaatgcaggagactgtaggatcttggtttgggatttaaggccctaatttccacctaagtgagctgctgaaagcattttgagcccagcctggtgtacctgggttgagaatcaaagcaggaactgagcgctgttctccttcaaccccgtgcccttacagctatgcaayggctgttcttccttacgtctttgatactgctgggatgggcttctttccctgtcagcatccaacccacttctgtctctatagcagatgtggctgtgcagttcatttcagcttcatacacttgtatttagagggttaattgtaattatgacttattatcttctggggccwgcttgctattttaagattatttttcagcttcaagcccaggctaaatgaactttcccttgctgcacacgtgtgttcagaacaggaaggaacttgactttgtcaagatttatttcccttttaacttaattatat

SEQ ID NO: 60444 - DNA, 600 bp, Chicken  19866894319927_2
ttaaggccctaatttccacctaagtgagctgctgaaagcattttgagcccagcctggtgtacctgggttgagaatcaaagcaggaactgagcgctgttctccttcaaccccgtgcccttacagctatgcaayggctgttcttccttacgtctttgatactgctgggatgggcttctttccctgtcagcatccaacccacttctgtctctatagcagatgtggctgtgcagttcatttcagcttcatacacttgtatttagagggttaattgtaattatgacttattatcttctggggccwgcttgctattttaagattatttttcagcttcaagcccaggctaaatgaactttcccttgctgcacacgtgtgttcagaacaggaaggaacttgactttgtcaagatttatttcccttttaacttaattatatgactatttataacaatgagcttcagttccatttcagttactgaagcatcttctataggcaatgatttgcctcaggctacagtattcactactgaaattcagtgaaatgaaagaacttgtacatacaacattgtgtgtattattgaagtctgtcagtgatgatggtgat

SEQ ID NO: 60445 - DNA, 600 bp, Chicken  19866894319931_1
tcataatgtaatggttaaaataaaacagaatctgagtggcatatctattgttaaactgcttgtaagcattagagctaggaacaggtcaagagtctttgttccaagtcattcttaatagtcttgaaaaatactctagtctgcagattcttgtctttattactgttttatatagcagttcatctaattaaaaatatcttaagcactacacaagagtttcaagtaatataagtcatccattgcttacttactgtttagtggattctctaaacatgtcaggtctcagccacctccaaaaaagayctatcagaaacctctgatctgtctgaaatgcaagatttttcttactgtccattcaatatagatcctttttattcattttccaaacaattttgtatgtatrttcgcattaaaggacagaaatgattcctatatctaaaargaaccccaaacaaatgatgaacaaacgcrtgtaacataagaaaaaaactgctttgatcgtatgagattgacagtggagttgattatccattgttttgtgctttgattcattataatcctcaaaatggagtgaatgtctttaggtagaactgaagtcctccg

SEQ ID NO: 60446 - DNA, 600 bp, Chicken  19866894319931_2
ccaagtcattcttaatagtcttgaaaaatactctagtctgcagattcttgtctttattactgttttatatagcagttcatctaattaaaaatatcttaagcactacacaagagtttcaagtaatataagtcatccattgcttacttactgtttagtggattctctaaacatgtcaggtctcagccacctccaaaaaagayctatcagaaacctctgatctgtctgaaatgcaagatttttcttactgtccattcaatatagatcctttttattcattttccaaacaattttgtatgtatrttcgcattaaaggacagaaatgattcctatatctaaaargaaccccaaacaaatgatgaacaaacgcrtgtaacataagaaaaaaactgctttgatcgtatgagattgacagtggagttgattatccattgttttgtgctttgattcattataatcctcaaaatggagtgaatgtctttaggtagaactgaagtcctccgtaaatcagccacgaatctatgctcggattctgtagtgtctggcactcattttgcactggaactcamatctgagtgtggaaagggaggctcttagcaagag

SEQ ID NO: 60447 - DNA, 600 bp, Chicken  19866894319931_3
gcagattcttgtctttattactgttttatatagcagttcatctaattaaaaatatcttaagcactacacaagagtttcaagtaatataagtcatccattgcttacttactgtttagtggattctctaaacatgtcaggtctcagccacctccaaaaaagayctatcagaaacctctgatctgtctgaaatgcaagatttttcttactgtccattcaatatagatcctttttattcattttccaaacaattttgtatgtatrttcgcattaaaggacagaaatgattcctatatctaaaargaaccccaaacaaatgatgaacaaacgcrtgtaacataagaaaaaaactgctttgatcgtatgagattgacagtggagttgattatccattgttttgtgctttgattcattataatcctcaaaatggagtgaatgtctttaggtagaactgaagtcctccgtaaatcagccacgaatctatgctcggattctgtagtgtctggcactcattttgcactggaactcamatctgagtgtggaaagggaggctcttagcaagagaagtgttttcagagcttcttcctacagttttttttcaac

SEQ ID NO: 60448 - DNA, 600 bp, Chicken  19866894319931_4
atagcagttcatctaattaaaaatatcttaagcactacacaagagtttcaagtaatataagtcatccattgcttacttactgtttagtggattctctaaacatgtcaggtctcagccacctccaaaaaagayctatcagaaacctctgatctgtctgaaatgcaagatttttcttactgtccattcaatatagatcctttttattcattttccaaacaattttgtatgtatrttcgcattaaaggacagaaatgattcctatatctaaaargaaccccaaacaaatgatgaacaaacgcrtgtaacataagaaaaaaactgctttgatcgtatgagattgacagtggagttgattatccattgttttgtgctttgattcattataatcctcaaaatggagtgaatgtctttaggtagaactgaagtcctccgtaaatcagccacgaatctatgctcggattctgtagtgtctggcactcattttgcactggaactcamatctgagtgtggaaagggaggctcttagcaagagaagtgttttcagagcttcttcctacagttttttttcaaccctgtaaatcaatgacttttttttttccc

SEQ ID NO: 60449 - DNA, 600 bp, Chicken  19866894319931_5
ttttattcattttccaaacaattttgtatgtatrttcgcattaaaggacagaaatgattcctatatctaaaargaaccccaaacaaatgatgaacaaacgcrtgtaacataagaaaaaaactgctttgatcgtatgagattgacagtggagttgattatccattgttttgtgctttgattcattataatcctcaaaatggagtgaatgtctttaggtagaactgaagtcctccgtaaatcagccacgaatctatgctcggattctgtagtgtctggcactcattttgcactggaactcamatctgagtgtggaaagggaggctcttagcaagagaagtgttttcagagcttcttcctacagttttttttcaaccctgtaaatcaatgacttttttttttcccctaagattcaaatttcaggaagggaaaaaaagagtctcaaaaatgtgagaaattatttgtcttttttcattaggtcagtggtacattcactaaacatgcagatcatctctagccagagtggctaagtactttttggtttaagttcatttctaaggtggcaaaccttaaggtaactcatggcaaaggaagttttcaaaa

SEQ ID NO: 60450 - DNA, 600 bp, Chicken  19866894319931_6
caaccctgtaaatcaatgacttttttttttcccctaagattcaaatttcaggaagggaaaaaaagagtctcaaaaatgtgagaaattatttgtcttttttcattaggtcagtggtacattcactaaacatgcagatcatctctagccagagtggctaagtactttttggtttaagttcatttctaaggtggcaaaccttaaggtaactcatggcaaaggaagttttcaaaagctctaaggtattgcagcaagccctattacactaagttaaaactcaataaacatcacctagcatataamaaagttgcttacaccactgaaatctctttctgcccttattgtatgtacttttagaaactgagcatcccatctcaaatgacataaccaaaatgcaactgaatacattgatacttggtgaatccaagacaccagcatcatcctctttgagggcagtgcttgtgaactgctggcaatttctgaaaagaagttcaaaagaaattgtgtattaggcagatacacactatctagacagaagcacacatttttatcagatgaattttcagaaataaccagcactgtttcaacctcctctatttatgt

SEQ ID NO: 60451 - DNA, 600 bp, Chicken  19866894319932_1
tctattaatgaatgaaatggatttgcatgagccgcagctggttgaaacttgctcagcagcaaataagggtcagacacgctacagagaagtcacatggaatgtcaaaggatttaaaaaaatatatttccattagaagcagaaatctctcagcgctgcacagaaccgaaagtaggttagctgttttacacaggcagaggagtccactatggagaaacagcttaatcctcaggctcattcattatttacaagggtggtaaaactccaaaggaggaggggaaggcaaggattaatacagagaarggaataagcatttgaaagggtttttcaawattatttatttaaaaaatgatgctgctcaattttgccccttaggtacgaactaaaaatacattaagctcattcaacattggattactaaactgaagcgtaccacatcaatggcctctgtatttaattaaacaccaacaagcacacctattactaaagaacagacaactactgctcagacaacttgtttctaaaatccatgataattttttctctttctatgaaaaaggcactttgattaacattaaagccatggtaccttttgtactgctc

SEQ ID NO: 60452 - DNA, 600 bp, Chicken  19866894319932_2
agccgcagctggttgaaacttgctcagcagcaaataagggtcagacacgctacagagaagtcacatggaatgtcaaaggatttaaaaaaatatatttccattagaagcagaaatctctcagcgctgcacagaaccgaaagtaggttagctgttttacacaggcagaggagtccactatggagaaacagcttaatcctcaggctcattcattatttacaagggtggtaaaactccaaaggaggaggggaaggcaaggattaatacagagaarggaataagcatttgaaagggtttttcaawattatttatttaaaaaatgatgctgctcaattttgccccttaggtacgaactaaaaatacattaagctcattcaacattggattactaaactgaagcgtaccacatcaatggcctctgtatttaattaaacaccaacaagcacacctattactaaagaacagacaactactgctcagacaacttgtttctaaaatccatgataattttttctctttctatgaaaaaggcactttgattaacattaaagccatggtaccttttgtactgctcraagtacaaaatggccatctccagctcag

SEQ ID NO: 60453 - DNA, 600 bp, Chicken  19866894319932_3
gaataagcatttgaaagggtttttcaawattatttatttaaaaaatgatgctgctcaattttgccccttaggtacgaactaaaaatacattaagctcattcaacattggattactaaactgaagcgtaccacatcaatggcctctgtatttaattaaacaccaacaagcacacctattactaaagaacagacaactactgctcagacaacttgtttctaaaatccatgataattttttctctttctatgaaaaaggcactttgattaacattaaagccatggtaccttttgtactgctcraagtacaaaatggccatctccagctcagtttagaaaggcttaataaaaaggtttgaggatgcagggaagaatgacctttcacaggaatatgagatgagaaagcagcagtaggaaggaatgacctcccaggaagaggcaccttaagaggaatctgtattttagctatgttccataggctgcagaagtgcttcccgcagtgcttcacaggtaccttctttcaatgactaaatggagccacacagataacctagagagcatcctacagctatcaagttctaaatgcagaagatgcaagtttgt

SEQ ID NO: 60454 - DNA, 600 bp, Chicken  19866894319937_1
tggctgttaaattacatctataattaaaatgctcaaaaaatgtgaataagattaaaaatgtctgcatttgtttgaagtgcaagatcacttaacatacatttaaaattatattcttattctattttattatgaagccatttgttttatttaaaaatcccttcaggctttatggagacagagatctcatttccagaactttggacctagagcctgtgccatggtgtaaccctctgggaagctcagacccacgcagctggggggaacaaaactgaaagacagaagaactcacggtgatggcarttgagtaggtgaagtgaaagccatgcacacaagcaaaacaaagtaaggatttcgttggcaacttcccatcagcagttagatgctcagcctcctccaggaaagcaaggctcaccacttggggaaacaaacaccatcacaccaaaygttccctctcctcctttgtcccacacttttaaagctggacatgatatcacatggtgtgggatacccttgggccagtctgagtcagctgtgctggctgtgtccctcccagatccttgtgcaccccctgctccttgctggcagtgtgagaagcaaaaa

SEQ ID NO: 60455 - DNA, 600 bp, Chicken  19866894319937_2
tatttaaaaatcccttcaggctttatggagacagagatctcatttccagaactttggacctagagcctgtgccatggtgtaaccctctgggaagctcagacccacgcagctggggggaacaaaactgaaagacagaagaactcacggtgatggcarttgagtaggtgaagtgaaagccatgcacacaagcaaaacaaagtaaggatttcgttggcaacttcccatcagcagttagatgctcagcctcctccaggaaagcaaggctcaccacttggggaaacaaacaccatcacaccaaaygttccctctcctcctttgtcccacacttttaaagctggacatgatatcacatggtgtgggatacccttgggccagtctgagtcagctgtgctggctgtgtccctcccagatccttgtgcaccccctgctccttgctggcagtgtgagaagcaaaaaagtcctgggttcagtgtaagcattgcactgcaacaactaaaacattggtgtgctatcaccactgttttcatcacagatccaaaacatatcattatataaacctctacaaagaaaattaactttatcccagacaaaactgtgaca

SEQ ID NO: 60456 - DNA, 599 bp, Chicken  19866894319939_1
  misc_feature (1)..(117): n is any nucleotide
nnnnnnnnnnnnnnnnnnnnnnnnnnnnnnnnnnnnnnnnnnnnnnnnnnnnnnnnnnnnnnnnnnnnnnnnnnnnnnnnnnnnnnnnnnnnnnnnnnnnnnnnnnnnnnnnnnnnntcagctctttcagcctcgctgccttctgtggcatccttcttcttcctgcacatgagttttctacagctggaggcatctcaccgacttcagcacagtgaacccaaaaaaagacacacaagttgttgaaattcagctctgcaggcggagagctggcacgagattcagccttggcaaaacaatccygacgcttcctttttaagccacattccccaagtctagctccattcctacatggggtttgaaagcaatccgtggcaccagcaggattctcaccagccctatctcccagcccgacagaaacaggcctttaaaaatagttctgtgctgctgggtgggattttcctctgcaggtgctgcgcaatacggggcgagatgagattctaatcatagctccctcgcagagggaagggttcagagttgagcctcattttcacagcaatatcgctatgttctctgggtgtcaggggagcacatattgctgt

SEQ ID NO: 60457 - DNA, 600 bp, Chicken  19866894319939_2
tcctttttaagccacattccccaagtctagctccattcctacatggggtttgaaagcaatccgtggcaccagcaggattctcaccagccctatctcccagcccgacagaaacaggcctttaaaaatagttctgtgctgctgggtgggattttcctctgcaggtgctgcgcaatacggggcgagatgagattctaatcatagctccctcgcagagggaagggttcagagttgagcctcattttcacagcaatatcgctatgttctctgggtgtcaggggagcacatattgctgtcatttcycygtgctgtgtttgggtatcggatgcaaagagtggcaatgatgcacgcagcttcccytccttctcacactgcagccccacctggggctgctgaaaatcccccacgctgtaaaacaaamggtttttcccccagattagtcagaatcagcgcgtttctctgcacacycagttgccaccaactcactgggaggtgtgcgcccttcttggctcctcttgctggctccatcactgccacgccagcagctgaacgcagctcctgccaggtcccttcactgcagagccaacagcccctgggaggagg

SEQ ID NO: 60458 - DNA, 600 bp, Chicken  19866894319939_3
ctttttaagccacattccccaagtctagctccattcctacatggggtttgaaagcaatccgtggcaccagcaggattctcaccagccctatctcccagcccgacagaaacaggcctttaaaaatagttctgtgctgctgggtgggattttcctctgcaggtgctgcgcaatacggggcgagatgagattctaatcatagctccctcgcagagggaagggttcagagttgagcctcattttcacagcaatatcgctatgttctctgggtgtcaggggagcacatattgctgtcatttcycygtgctgtgtttgggtatcggatgcaaagagtggcaatgatgcacgcagcttcccytccttctcacactgcagccccacctggggctgctgaaaatcccccacgctgtaaaacaaamggtttttcccccagattagtcagaatcagcgcgtttctctgcacacycagttgccaccaactcactgggaggtgtgcgcccttcttggctcctcttgctggctccatcactgccacgccagcagctgaacgcagctcctgccaggtcccttcactgcagagccaacagcccctgggaggaggag

SEQ ID NO: 60459 - DNA, 600 bp, Chicken  19866894319939_4
aatccgtggcaccagcaggattctcaccagccctatctcccagcccgacagaaacaggcctttaaaaatagttctgtgctgctgggtgggattttcctctgcaggtgctgcgcaatacggggcgagatgagattctaatcatagctccctcgcagagggaagggttcagagttgagcctcattttcacagcaatatcgctatgttctctgggtgtcaggggagcacatattgctgtcatttcycygtgctgtgtttgggtatcggatgcaaagagtggcaatgatgcacgcagcttcccytccttctcacactgcagccccacctggggctgctgaaaatcccccacgctgtaaaacaaamggtttttcccccagattagtcagaatcagcgcgtttctctgcacacycagttgccaccaactcactgggaggtgtgcgcccttcttggctcctcttgctggctccatcactgccacgccagcagctgaacgcagctcctgccaggtcccttcactgcagagccaacagcccctgggaggaggagagctcagcatctgcatcccctccgcagaacagctgggggtgcctcgaggcgtggg

SEQ ID NO: 60460 - DNA, 600 bp, Chicken  19866894319939_5
ttaaaaatagttctgtgctgctgggtgggattttcctctgcaggtgctgcgcaatacggggcgagatgagattctaatcatagctccctcgcagagggaagggttcagagttgagcctcattttcacagcaatatcgctatgttctctgggtgtcaggggagcacatattgctgtcatttcycygtgctgtgtttgggtatcggatgcaaagagtggcaatgatgcacgcagcttcccytccttctcacactgcagccccacctggggctgctgaaaatcccccacgctgtaaaacaaamggtttttcccccagattagtcagaatcagcgcgtttctctgcacacycagttgccaccaactcactgggaggtgtgcgcccttcttggctcctcttgctggctccatcactgccacgccagcagctgaacgcagctcctgccaggtcccttcactgcagagccaacagcccctgggaggaggagagctcagcatctgcatcccctccgcagaacagctgggggtgcctcgaggcgtgggggaattctgacaaggtctctcatcctgatccagccaacgtgtccaccatctgctgagtgca

SEQ ID NO: 60461 - DNA, 574 bp, Chicken  19866894319939_6
tgcgcaatacggggcgagatgagattctaatcatagctccctcgcagagggaagggttcagagttgagcctcattttcacagcaatatcgctatgttctctgggtgtcaggggagcacatattgctgtcatttcycygtgctgtgtttgggtatcggatgcaaagagtggcaatgatgcacgcagcttcccytccttctcacactgcagccccacctggggctgctgaaaatcccccacgctgtaaaacaaamggtttttcccccagattagtcagaatcagcgcgtttctctgcacacycagttgccaccaactcactgggaggtgtgcgcccttcttggctcctcttgctggctccatcactgccacgccagcagctgaacgcagctcctgccaggtcccttcactgcagagccaacagcccctgggaggaggagagctcagcatctgcatcccctccgcagaacagctgggggtgcctcgaggcgtgggggaattctgacaaggtctctcatcctgatccagccaacgtgtccaccatctgctgagtgcagtgcaagtgggaattgcgtca

SEQ ID NO: 60462 - DNA, 599 bp, Chicken  19866894319943_1
  misc_feature (1)..(13): n is any nucleotide
nnnnnnnnnnnnncatgacagttacgctcctgaagctgctagattcaactatacattcagtgtacagcccaggccagaaacaatgcaggtacagctatgaaattacataaaaaaacttcggtagaaaaaaatgcaggccagctctgggaatagaacagcacttttttactattctactgcactgagatctgctcccaaaactccatgtggcatatttttgagtcagggaggcggtgcaaaaccaagagacattttgatttaaataggatgcattctcagtttgggatctggagcgaacasagggagcarctgatgggatctaattatgaggaatcaaatgaggtaagcggggaaaacagcaatccctgaatctacaaagcacctcggaagtcttcatggctcccacttctgaggaaagcaaggagtcatcttcccttgcacactcccagaccacatacagcaagyggatacaaagccttgttgcatctaaatcttgcagtcaaatactgaagcgctataaggaaggaagtggtggtagtgctaccttcatactgagcatgcccaaagtgagctggaacagcaccagagagccctcatag

SEQ ID NO: 60463 - DNA, 599 bp, Chicken  19866894319943_2
  misc_feature (1)..(4): n is any nucleotide
nnnncatgacagttacgctcctgaagctgctagattcaactatacattcagtgtacagcccaggccagaaacaatgcaggtacagctatgaaattacataaaaaaacttcggtagaaaaaaatgcaggccagctctgggaatagaacagcacttttttactattctactgcactgagatctgctcccaaaactccatgtggcatatttttgagtcagggaggcggtgcaaaaccaagagacattttgatttaaataggatgcattctcagtttgggatctggagcgaacasagggagcarctgatgggatctaattatgaggaatcaaatgaggtaagcggggaaaacagcaatccctgaatctacaaagcacctcggaagtcttcatggctcccacttctgaggaaagcaaggagtcatcttcccttgcacactcccagaccacatacagcaagyggatacaaagccttgttgcatctaaatcttgcagtcaaatactgaagcgctataaggaaggaagtggtggtagtgctaccttcatactgagcatgcccaaagtgagctggaacagcaccagagagccctcatagaagaagagg

SEQ ID NO: 60464 - DNA, 600 bp, Chicken  19866894319943_3
ttactattctactgcactgagatctgctcccaaaactccatgtggcatatttttgagtcagggaggcggtgcaaaaccaagagacattttgatttaaataggatgcattctcagtttgggatctggagcgaacasagggagcarctgatgggatctaattatgaggaatcaaatgaggtaagcggggaaaacagcaatccctgaatctacaaagcacctcggaagtcttcatggctcccacttctgaggaaagcaaggagtcatcttcccttgcacactcccagaccacatacagcaagyggatacaaagccttgttgcatctaaatcttgcagtcaaatactgaagcgctataaggaaggaagtggtggtagtgctaccttcatactgagcatgcccaaagtgagctggaacagcaccagagagccctcatagaagaagaggtcccagatgcgcagcagcagcttgatgtggacaacactagcgaaggaggtgaggaaccagtgcaaggtgatcagggacagctctgtgaatagagacatatgcaggaatcatgatgggatgtcagctaatcagcggagacagactctcctaagtgctg

SEQ ID NO: 60465 - DNA, 600 bp, Chicken  19866894319943_4
tcatactgagcatgcccaaagtgagctggaacagcaccagagagccctcatagaagaagaggtcccagatgcgcagcagcagcttgatgtggacaacactagcgaaggaggtgaggaaccagtgcaaggtgatcagggacagctctgtgaatagagacatatgcaggaatcatgatgggatgtcagctaatcagcggagacagactctcctaagtgctgccctcccagcttacagatgaccatgcactgccctggcctccggagccagaaggtttgctcctggctctgctgctctccctytgtgaaacaagggcagtaacctctgcctgcaaaccacccagaggagccatgggcacastcttaccratgtcatgctcctggagcagcttgtccagacggggtaggtactgtacaatgagctgtcgcaggacacgctggtctgtctgcacccccatcagggtggtactgaagtaggaggcgggaaccagttcctcaatgatagcacacatcatccagaaggcatcttcctcctccaagaagagcagcagagaggcggccacctgggattttgaaggaagattacatgccaarcytgtccta

SEQ ID NO: 60466 - DNA, 600 bp, Chicken  19866894319943_5
gaggtcccagatgcgcagcagcagcttgatgtggacaacactagcgaaggaggtgaggaaccagtgcaaggtgatcagggacagctctgtgaatagagacatatgcaggaatcatgatgggatgtcagctaatcagcggagacagactctcctaagtgctgccctcccagcttacagatgaccatgcactgccctggcctccggagccagaaggtttgctcctggctctgctgctctccctytgtgaaacaagggcagtaacctctgcctgcaaaccacccagaggagccatgggcacastcttaccratgtcatgctcctggagcagcttgtccagacggggtaggtactgtacaatgagctgtcgcaggacacgctggtctgtctgcacccccatcagggtggtactgaagtaggaggcgggaaccagttcctcaatgatagcacacatcatccagaaggcatcttcctcctccaagaagagcagcagagaggcggccacctgggattttgaaggaagattacatgccaarcytgtcctaagaacaggcctccttccccacctcctcacatggtccagtgtctacaagaccaatgtct

SEQ ID NO: 60467 - DNA, 600 bp, Chicken  19866894319943_6
agatgcgcagcagcagcttgatgtggacaacactagcgaaggaggtgaggaaccagtgcaaggtgatcagggacagctctgtgaatagagacatatgcaggaatcatgatgggatgtcagctaatcagcggagacagactctcctaagtgctgccctcccagcttacagatgaccatgcactgccctggcctccggagccagaaggtttgctcctggctctgctgctctccctytgtgaaacaagggcagtaacctctgcctgcaaaccacccagaggagccatgggcacastcttaccratgtcatgctcctggagcagcttgtccagacggggtaggtactgtacaatgagctgtcgcaggacacgctggtctgtctgcacccccatcagggtggtactgaagtaggaggcgggaaccagttcctcaatgatagcacacatcatccagaaggcatcttcctcctccaagaagagcagcagagaggcggccacctgggattttgaaggaagattacatgccaarcytgtcctaagaacaggcctccttccccacctcctcacatggtccagtgtctacaagaccaatgtcttccttcct

SEQ ID NO: 60468 - DNA, 600 bp, Chicken  19866894319943_7
ctctccctytgtgaaacaagggcagtaacctctgcctgcaaaccacccagaggagccatgggcacastcttaccratgtcatgctcctggagcagcttgtccagacggggtaggtactgtacaatgagctgtcgcaggacacgctggtctgtctgcacccccatcagggtggtactgaagtaggaggcgggaaccagttcctcaatgatagcacacatcatccagaaggcatcttcctcctccaagaagagcagcagagaggcggccacctgggattttgaaggaagattacatgccaarcytgtcctaagaacaggcctccttccccacctcctcacatggtccagtgtctacaagaccaatgtcttccttcctctgcagcagctctcctgcagtctctcccagggaagggatttctgtgcagtgtaacgcctcttcctcccccacagagggaccgaattattgcacacctttggacatgtggtgttactctgatccaccctccccacgcaatatgttctgcgtgaaagggacttcccttcagctagtctggaattcatagcatctggcagcattacctcaaattaccccaaaatagct

SEQ ID NO: 60469 - DNA, 600 bp, Chicken  19866894319943_8
ctccctytgtgaaacaagggcagtaacctctgcctgcaaaccacccagaggagccatgggcacastcttaccratgtcatgctcctggagcagcttgtccagacggggtaggtactgtacaatgagctgtcgcaggacacgctggtctgtctgcacccccatcagggtggtactgaagtaggaggcgggaaccagttcctcaatgatagcacacatcatccagaaggcatcttcctcctccaagaagagcagcagagaggcggccacctgggattttgaaggaagattacatgccaarcytgtcctaagaacaggcctccttccccacctcctcacatggtccagtgtctacaagaccaatgtcttccttcctctgcagcagctctcctgcagtctctcccagggaagggatttctgtgcagtgtaacgcctcttcctcccccacagagggaccgaattattgcacacctttggacatgtggtgttactctgatccaccctccccacgcaatatgttctgcgtgaaagggacttcccttcagctagtctggaattcatagcatctggcagcattacctcaaattaccccaaaatagctac

SEQ ID NO: 60470 - DNA, 600 bp, Chicken  19866894319954_1
aatgtgaagttaacacaaaatccatcaggcagtgccacctgttttatggtgttttactggtgaagttaggttttatgagataactacatacatttctacagtcttatacgtgctggcggcgtagaagctgatgtctttccaacactgaatcctgagctctttgatgtccccatggattcttcactcagaaggcagtgaggtactggcactgctgcccagagctgtggtgccccatccctggaggtgctcaaggccaggctgggtgggaccctgggcagcctgagctcctgggggcagccrgtccacagcaggggggttggaaacgggatgggctttaaggtcctttccagcctaagmcattctgtgattatgcaggtggattctgctggaaagctatgtgtgcatgtgatgggggtttgaccatgggtgtgatttctcattagtgtctttttttttttaagttgtccttcttttctttttgcttttgttctgtttgcgaagactctgtagtaaaaagggtttgcagtggggttgctctcattctggatcagaatgtattttgtcacacgtagtggctgcacggtgctgtgtgccaggtgg

SEQ ID NO: 60471 - DNA, 600 bp, Chicken  19866894319954_2
tggtgaagttaggttttatgagataactacatacatttctacagtcttatacgtgctggcggcgtagaagctgatgtctttccaacactgaatcctgagctctttgatgtccccatggattcttcactcagaaggcagtgaggtactggcactgctgcccagagctgtggtgccccatccctggaggtgctcaaggccaggctgggtgggaccctgggcagcctgagctcctgggggcagccrgtccacagcaggggggttggaaacgggatgggctttaaggtcctttccagcctaagmcattctgtgattatgcaggtggattctgctggaaagctatgtgtgcatgtgatgggggtttgaccatgggtgtgatttctcattagtgtctttttttttttaagttgtccttcttttctttttgcttttgttctgtttgcgaagactctgtagtaaaaagggtttgcagtggggttgctctcattctggatcagaatgtattttgtcacacgtagtggctgcacggtgctgtgtgccaggtggaacctgcttgtgcccgtggaaggctgagctgcagtgctgcagcaccagatgagtgct

SEQ ID NO: 60472 - DNA, 373 bp, Chicken  19866894319962_1
atatataagatttgtgtactctttgtttcttacatctactaatccaatacatttttatcagcatgacacatacaattttcatactcgagcatttaattgctgaactgtatttgtttaatgtttcataataagcttgaaattacctatttcataaacgcactgagacacatagatgggttttgtttgatgaaggaaattgataatccatagtttgttcaagatttttcttagataagaaccgataatggtgatctaagtttttttacatcttcttgtttcaaagtctttggaaagcagatyggttttcatccaacagtccagtccattgtgattgaaagtaagaaaaacatatttccgaatcacgcacacattt

SEQ ID NO: 60473 - DNA, 600 bp, Chicken  19866894319964_1
ctcgatagatttcagcacacatgtagcttgagttccaggaaggatagagtcctggagccttgcatattgccactgataagtcacagtattactgaaaccatttgtttggtgttttttgcaacaaaccttcctctcaacaaagacacagtcagacacaaagctctgatcgtaagagtttctagacaggacagtcagtagtctctttctagtctcattttaatgtacttgcaaattacacattcatcgcaaaattacctgatgctggtggtgtatttttaaccttggggttaaaaaaaatgyaaaaaaaaaatctatctttgtgaggttatatttgagtaaaatagctttcattttcaaagctggcaggtaagaataaaggaaacattttccttttacattttttggaggctgggcttgccttctatttcatttttctgattgggtcaaaaatttctttttttttttttttattacagcagtgatgttaraagaagcattagctccttgtgtactccactcccagctgacatcatcactaatgcttcaaatgcaacagcactaatgcttcaccggcaaatgtaagaactgtgatatcaccat

SEQ ID NO: 60474 - DNA, 600 bp, Chicken  19866894319964_2
cagtcagtagtctctttctagtctcattttaatgtacttgcaaattacacattcatcgcaaaattacctgatgctggtggtgtatttttaaccttggggttaaaaaaaatgaaaaaaaaaaatctatctttgtgaggttatatttgagtaaaatagctttcattttcaaagctggcaggtaagaataaaggaaacattttccttttacattttttggaggctgggcttgccttctatttcatttttctgattgggtcaaaaatttctttttttttttttttattacagcagtgatgttaraagaagcattagctccttgtgtactccactcccagctgacatcatcactaatgcttcaaatgcaacagcactaatgcttcaccggcaaatgtaagaactgtgatatcaccataaagaatactgataacatttcataacaggtctgatcttgattaattttcctagtccttccataagatttgggaaccatttatcttctgctgtgactatacactgaatactgaaagtgttaaataaccaaaaattgcatttcttggtaaagagtacaactaccgtaattctccactgtttctgagtttg

SEQ ID NO: 60475 - DNA, 600 bp, Chicken  19866894319964_3
acaggtctgatcttgattaattttcctagtccttccataagatttgggaaccatttatcttctgctgtgactatacactgaatactgaaagtgttaaataaccaaaaattgcatttcttggtaaagagtacaactaccgtaattctccactgtttctgagtttgattgctaatgtcactttcatctcctgagacatcatagcctgtgtctttctccatgcttactgaatgcttatagagttaatttgttcctttcaaaaataaatgacacacaataaaataagaggtccacaagactgargtagtgatttgatagcacaaggtcctcttgatagtaacaggtaaaccctaccactcacaaaagagaaggaaagagacaactgatcgttgtgcatttgcacagcaaatacaaatacccacccaggacacccccaggtgggaagtcatgccagaatttaattctaatctcactggattttttgaccagaaagggtaagtttacattgccagtagacatctccagaaataaagagcttttctaaatatacactaaaatcagacctgacttgacctatgtggtccaagggttcttctgtttaat

SEQ ID NO: 60476 - DNA, 600 bp, Chicken  19866894319972_1
tcagcatcttctattagggccaatgctaaaagtcaacgtttcagggtcaccatctccctggttccccctgttgtgtttgccatacccctccactgccactcagggagatgcatgcactgtgccgctctgctgctctgctccccattgctgcccctatcactttcccctgccaaccaccaagtgcccaactaacattaattaattaaacctcgctgctgcgccagatcacaggagaagggccagagccactcgggtgtaaccagagcctgatcccacagtgctcagcttcccccccccccygctcccagcacatgctgggtggcacagaagggagctggcacctttggttgtcactgctctgtgtgtgttgccatgggtgcacatagccctgcagggacatgtgtgcagagcaggatgaggccagaggagaagtaccttgcagcacgggggaaaccttatgacccaaaagggtgagctggagcacggtgaaggcaggggacaatgaacactggagggacgaatcctgagccctatgcactgcctcacttggttgctgcatggttctgctctgctgttctgggactcactgttgagttctgg

SEQ ID NO: 60477 - DNA, 600 bp, Chicken  19866894319972_2
agcactgctcacagccccatgccatcctgctggtggctgtgctggggtcaggagcacaagcccagctcctcagcagtagcaaaaaagaagggaagagactacctaagatgacaaaatgcctttgggggtttttgagcttttataacccgaagtccccccagcagaaagtgtcttgcccatccctgcagcacagcagagtggtgcacacagggtgcaatcaccttggtgccaagggaccaaaggcagcacagaaggccggagggatggagagagccagaccacaggtagtcattgcagcaycctgcacacacccagcactgctcatcctggtgccccttgccacccagtgggacagaagccaggaactacctggaggagttggctcctttgcaacaagtccagcatctccgagcagcctgcagggctgggaaacacctgacttggtcccaaacctgaacgggcacctgggaaccccagtgtgcccagcagccccaacatgtccatgcatggagctgggtgaggggctctgactaccagccccagcctcaggcatgggaggggagagggctcccacagtgctcccttccctggggacacggc

SEQ ID NO: 60478 - DNA, 600 bp, Chicken  19866894319973_1
ctcacctggttttggtgctgctgctttctttgatttttacaacaaaaatgagcagaattttctttagagattggcttgccaaaaaaagtcacgttattaaggatcacgaacgttctattaagcgtaactccagcattttgcaaacctgctggacagtccaggttggcttcaaattggatgcagatttctcaggaaagttcatgaactttgataatacctttataaccaggccagcttcagaaatacttctggggaaaattaagtgcctaaaggctaaaccgcatcctcttacagagctcycatgttaaggtcatattgatagggcataaattaccttcgtctgttattagctgcctgacctttaaggcttcagtgtaaaaccctgtagcttttgacttaaagcaaactcataaaaacaggccaggtagttaaatggataaaatgatacagcagcagcagcactcaggtgttgttgtgctcctgcaagtactgtcttttgtaattctcaggctatctgttctactcattctccaaaacctgcttcatatttaatgccaaaaygagagactgtagtgatgggcacctttgcccatctgtttc

SEQ ID NO: 60479 - DNA, 600 bp, Chicken  19866894319973_2
agtgcctaaaggctaaaccgcatcctcttacagagctcycatgttaaggtcatattgatagggcataaattaccttcgtctgttattagctgcctgacctttaaggcttcagtgtaaaaccctgtagcttttgacttaaagcaaactcataaaaacaggccaggtagttaaatggataaaatgatacagcagcagcagcactcaggtgttgttgtgctcctgcaagtactgtcttttgtaattctcaggctatctgttctactcattctccaaaacctgcttcatatttaatgccaaaaygagagactgtagtgatgggcacctttgcccatctgtttctcctccaaagttctcagtactttaggaaaccaataaaaataagaatgataggaaacaaacatctttcagaagggattggtattttggatctgttctaagacaacaagactcttcccaacaaggtgtgtataacagtccaccatgtgcttgttggtgtgtaacaacatacagccttgccagcaagtctacagagtcaataaagctcctggaacatactgcaaacagcttggggccaaagctgtgcttaatgtgcacctccta

SEQ ID NO: 60480 - DNA, 600 bp, Chicken  19866894319978_1
tgtgagccacctttggattaatttggttttgttcctaatttattgtaaattcagctgagtttactgcaaatcttacaggaactagagttgtgttgtgcttcagtaacatatcttccttaatgttttggaaagcaaaatatttaagtgtttttaaatgtgttgtttctgtctctccagctgagtaaatgaaataggcagttaatgttgtagaactgttgtttcaagctgttcgtgcttctaatgtatgatgtatggtttatcatgacagattggaaagatttagagctctcaacatgagcytggagttgaatgagatgtggctgcagtaccgcagtgattcctcccttccttttcacaggagctttagggccacaggtcatcctgtactgcgttccccacttaactctgaaccatttggtttggaggatgctgggctggagatgtgaagagcagtggaaatgtgagcatcatgcattttcaaggagttcccatgaagaagcccaaacgattgttaacrtgttcagatgtcgcaggcatttgcttgtttcttaaatagattagcaacttatttttcttttaagtcagaacaaaattgatgtg

SEQ ID NO: 60481 - DNA, 600 bp, Chicken  19866894319978_2
gtttcaagctgttcgtgcttctaatgtatgatgtatggtttatcatgacagattggaaagatttagagctctcaacatgagcytggagttgaatgagatgtggctgcagtaccgcagtgattcctcccttccttttcacaggagctttagggccacaggtcatcctgtactgcgttccccacttaactctgaaccatttggtttggaggatgctgggctggagatgtgaagagcagtggaaatgtgagcatcatgcattttcaaggagttcccatgaagaagcccaaacgattgttaacrtgttcagatgtcgcaggcatttgcttgtttcttaaatagattagcaacttatttttcttttaagtcagaacaaaattgatgtgcctgctgatctgtttatttgttttcctcccggtgctatagataaatttcactgaaattaggcaggcagtaacaaatgaggttcgtctttcaaagattcacagacaaaaagtattgtaaaacaaattgagtatcttcagcaaagccggcaaatgtcctacaatgttctgtagaagtcttggagtttgcttctgtttatggttgatagatggcaaggac

SEQ ID NO: 60482 - DNA, 600 bp, Chicken  19866894319978_3
gtggcctggagtcttctaagcagtgggacaacgtgacatttcaaagccttgctctggaaaaaataaaaatctcttcatttgaactctgttagctaatgacgaaatgtgcttggcaagaacttgttggcataccttaagttatcactgtgctctgaagtctcttatgctgtaacttgtgccttggcagtccttttgtggaattatttgcatcaaagagcaacaacaagatctcttgctgttcctccagatgtagcaatttaggaatcaagccaacagataatgatgcagggatgttgaackcattctgtagcgagtgccaaattacattttccactataaaacatcacaagaggcatgttttatatatttctctaacttcaggctgtgctcctttagctcatgatgttaaatattgcacttggacagatttccttttaaattaaatagttctgtttgtagcacaacctcttagtcctttaacttgtcccttttcggctatagccattttaccttctgtagccacatgcttattgcccctctttttaactaattgaccaaaatcccaactgctgctggctttcaaaggagcagtctgaatct

SEQ ID NO: 60483 - DNA, 600 bp, Chicken  19866894319978_4
tgggttctgaacatccatttgagtccatgggttgctcgtgtgtttatgcaagtgagcttctaaattgctgttgtttcatcaggttttgttttcctggagctctggaagccttccagtgagctactactatacctttcattataatccgcagacctgccttgcttagttgggtgtatttaaatacttgatgatggttgctctttccttcctccagcaaaactgccggtttatttctctgctgtcccagaagcccacctgtggttggagtaaggcttcacgttcggagtctgccctcggttkggttcrgttgcccttgyccttctgtagcgtcttctctttcagtaacaaagagcaatagtgttgcaagcattgctttagcaaatgaatagcaagcaggtgtaggttttttgaaatagtctaaatcctgtggaatgctggctgtcagagcttgtttcctgaagaggacaaaagcaacagttgtaaaagtcctgagagaaaacatctgtgaggctttttccccccttcttcaagcygttgcatgcgtgtgggcatgacggaactgaaggaagattttaagatttcttttaatgaataataacc

SEQ ID NO: 60484 - DNA, 600 bp, Chicken  19866894319978_5
ctgaacatccatttgagtccatgggttgctcgtgtgtttatgcaagtgagcttctaaattgctgttgtttcatcaggttttgttttcctggagctctggaagccttccagtgagctactactatacctttcattataatccgcagacctgccttgcttagttgggtgtatttaaatacttgatgatggttgctctttccttcctccagcaaaactgccggtttatttctctgctgtcccagaagcccacctgtggttggagtaaggcttcacgttcggagtctgccctcggttkggttcrgttgcccttgyccttctgtagcgtcttctctttcagtaacaaagagcaatagtgttgcaagcattgctttagcaaatgaatagcaagcaggtgtaggttttttgaaatagtctaaatcctgtggaatgctggctgtcagagcttgtttcctgaagaggacaaaagcaacagttgtaaaagtcctgagagaaaacatctgtgaggctttttccccccttcttcaagcygttgcatgcgtgtgggcatgacggaactgaaggaagattttaagatttcttttaatgaataataaccacattt

SEQ ID NO: 60485 - DNA, 600 bp, Chicken  19866894319978_6
tttgagtccatgggttgctcgtgtgtttatgcaagtgagcttctaaattgctgttgtttcatcaggttttgttttcctggagctctggaagccttccagtgagctactactatacctttcattataatccgcagacctgccttgcttagttgggtgtatttaaatacttgatgatggttgctctttccttcctccagcaaaactgccggtttatttctctgctgtcccagaagcccacctgtggttggagtaaggcttcacgttcggagtctgccctcggttkggttcrgttgcccttgyccttctgtagcgtcttctctttcagtaacaaagagcaatagtgttgcaagcattgctttagcaaatgaatagcaagcaggtgtaggttttttgaaatagtctaaatcctgtggaatgctggctgtcagagcttgtttcctgaagaggacaaaagcaacagttgtaaaagtcctgagagaaaacatctgtgaggctttttccccccttcttcaagcygttgcatgcgtgtgggcatgacggaactgaaggaagattttaagatttcttttaatgaataataaccacatttctataagagaa

SEQ ID NO: 60486 - DNA, 600 bp, Chicken  19866894319978_7
ctctgctgtcccagaagcccacctgtggttggagtaaggcttcacgttcggagtctgccctcggttkggttcrgttgcccttgyccttctgtagcgtcttctctttcagtaacaaagagcaatagtgttgcaagcattgctttagcaaatgaatagcaagcaggtgtaggttttttgaaatagtctaaatcctgtggaatgctggctgtcagagcttgtttcctgaagaggacaaaagcaacagttgtaaaagtcctgagagaaaacatctgtgaggctttttccccccttcttcaagcygttgcatgcgtgtgggcatgacggaactgaaggaagattttaagatttcttttaatgaataataaccacatttctataagagaaatcaaaccattttttaaaacgcgatctcttgctttaccaaaagaaggaattttatcctcggttgctcagtttctgggtgcaagtcttgactgacaaaactgctcttatcttctctctgtgttttctgtagtcaggttgtcttgtgcaaatgccttctggaagtccaagtaggtgtttgtttttcttccagtgatgacaaaacagaggatgatgcag

SEQ ID NO: 60487 - DNA, 600 bp, Chicken  19866894319981_1
tcatagcttaacatccccttcccctttccttggatgactggatatttcctactttttgatttcttattgttatgaagattgccctttcccgttccattcctctttcatgaactgtgtactttaatcaggtcagtgccctcctgctgtgtgctggtgcagatgaatctatgtatcattattaggatttcagctggcgcagcaggctgactgggtgcaaaaggttgcacttgagggtggtaacaccacactgctaattgcttgccctgcatctgcctgcactgtagacttgcccagctgccrttacacctcagtgctgtgagcaagtgtgctccgttcctgctgtgatagtctcttttggcatgcaccttcgatacctgctgtrgtctcttcaggcagaaatcagtctgctccttctgcatgtctcatctgttccacctcagatttgcttttctcatccatgtcttgatctgcagtgcttgatccttgtgtacactgctgtcttggagtgcacagtgcagaagtgggagaggacaggctactgtatcctatgtagcctcgtattagtcaggttgaagacaaagcattgcaggagaaaaaatg

SEQ ID NO: 60488 - DNA, 600 bp, Chicken  19866894319981_2
cctttcccgttccattcctctttcatgaactgtgtactttaatcaggtcagtgccctcctgctgtgtgctggtgcagatgaatctatgtatcattattaggatttcagctggcgcagcaggctgactgggtgcaaaaggttgcacttgagggtggtaacaccacactgctaattgcttgccctgcatctgcctgcactgtagacttgcccagctgccrttacacctcagtgctgtgagcaagtgtgctccgttcctgctgtgatagtctcttttggcatgcaccttcgatacctgctgtrgtctcttcaggcagaaatcagtctgctccttctgcatgtctcatctgttccacctcagatttgcttttctcatccatgtcttgatctgcagtgcttgatccttgtgtacactgctgtcttggagtgcacagtgcagaagtgggagaggacaggctactgtatcctatgtagcctcgtattagtcaggttgaagacaaagcattgcaggagaaaaaatgacccattttgaaaggaaatcagatgcaaaaagatgtggtgtatatacttgacctcatgcttgcctttgtagtgactgttcta

SEQ ID NO: 60489 - DNA, 600 bp, Chicken  19866894319981_3
actgtaacctttgtgaggttgccatgtgagcactgcatgggtctgtacctgaatgtagtggacagcatgccagtagctttattaataagcagtaagtaactgcttgagcttgtttgtatgttacatataaaagcataaccaaaagagcaggaggaatagagagtgaaaggaaacgtagtttgggttcgtagctgccactgtagctagtagaagagccaagtacttgtaagggaactggatgatttgttccacttaaacacgtggggaattcatttctgcactgcgtacccactgatccakctgtttgtcccatagaaggactgattttaatttcagccttcattgtacattggcctgtactgtgcctgtggagcatctttctcattggaaaaagcctgcaaaagctacaaaagggaagccactttcccacactgattttgggctcccctgaggcaggtaccaggatgctctcctggccccattggctcaktcctcctatgcctcctggtccaagcagccctcaccaggacactggaaagggcagtttggccaacgcagcagatacgcatccttcccrcaggaaatccctcttgctcccca

SEQ ID NO: 60490 - DNA, 561 bp, Chicken  19866894319981_4
gctgccactgtagctagtagaagagccaagtacttgtaagggaactggatgatttgttccacttaaacacgtggggaattcatttctgcactgcgtacccactgatccakctgtttgtcccatagaaggactgattttaatttcagccttcattgtacattggcctgtactgtgcctgtggagcatctttctcattggaaaaagcctgcaaaagctacaaaagggaagccactttcccacactgattttgggctcccctgaggcaggtaccaggatgctctcctggccccattggctcaktcctcctatgcctcctggtccaagcagccctcaccaggacactggaaagggcagtttggccaacgcagcagatacgcatccttcccrcaggaaatccctcttgctccccatgaggattcagcacatgccactgaatgtgattccatgtgttacgtcagacgcactatctaaacaaggatgtagatgtacattttaaacacagggcaccctttgtgtgcgtgtacaagtgtgtaacataaacacagagcttgcagagccgat

SEQ ID NO: 60491 - DNA, 474 bp, Chicken  19866894319981_5
gcactgcgtacccactgatccakctgtttgtcccatagaaggactgattttaatttcagccttcattgtacattggcctgtactgtgcctgtggagcatctttctcattggaaaaagcctgcaaaagctacaaaagggaagccactttcccacactgattttgggctcccctgaggcaggtaccaggatgctctcctggccccattggctcaktcctcctatgcctcctggtccaagcagccctcaccaggacactggaaagggcagtttggccaacgcagcagatacgcatccttcccrcaggaaatccctcttgctccccatgaggattcagcacatgccactgaatgtgattccatgtgttacgtcagacgcactatctaaacaaggatgtagatgtacattttaaacacagggcaccctttgtgtgcgtgtacaagtgtgtaacataaacacagagcttgcagagccgat

SEQ ID NO: 60492 - DNA, 600 bp, Chicken  19866894319982_1
caatcctgaagattcagttatttatgtgattttaatttcgttcaaattctaaactaaggtttaattataattgcacctaattcacccagaggacgaaagggcccatttaacaaaggacaccctggcttcattaaatgattacgaaaggaactagaaattgatggtattttacaatattgttccaaatctcagaggatctgcatcagatatgcattgtaacatttaaggaaatcaattctggaatcccagtaaagggatccataattaccctttaatatctcaaagctctgccttcctcasatggaacttgtcaytcccaggatcaataacgtgttgcattggtaacacattcctgctcagtccagcagatatccccatcatggagtgaagtctgggtataacactgtgctacaggttaatcctcagtttcagaggaagtcayggaaacattaacccagcttgacaaatacacatgcatgagcaacactcataaaaattactgcaataccgaacaatttgtgtagtggctgtcatagtctcagcacacagaaatcaaagtgaatacacatttttagcactaactcattaagcaaattatca

SEQ ID NO: 60493 - DNA, 600 bp, Chicken  19866894319982_2
cagttatttatgtgattttaatttcgttcaaattctaaactaaggtttaattataattgcacctaattcacccagaggacgaaagggcccatttaacaaaggacaccctggcttcattaaatgattacgaaaggaactagaaattgatggtattttacaatattgttccaaatctcagaggatctgcatcagatatgcattgtaacatttaaggaaatcaattctggaatcccagtaaagggatccataattaccctttaatatctcaaagctctgccttcctcasatggaacttgtcaytcccaggatcaataacgtgttgcattggtaacacattcctgctcagtccagcagatatccccatcatggagtgaagtctgggtataacactgtgctacaggttaatcctcagtttcagaggaagtcayggaaacattaacccagcttgacaaatacacatgcatgagcaacactcataaaaattactgcaataccgaacaatttgtgtagtggctgtcatagtctcagcacacagaaatcaaagtgaatacacatttttagcactaactcattaagcaaattatcaaagaagcatgttct

SEQ ID NO: 60494 - DNA, 600 bp, Chicken  19866894319982_3
gaaaggaactagaaattgatggtattttacaatattgttccaaatctcagaggatctgcatcagatatgcattgtaacatttaaggaaatcaattctggaatcccagtaaagggatccataattaccctttaatatctcaaagctctgccttcctcasatggaacttgtcaytcccaggatcaataacgtgttgcattggtaacacattcctgctcagtccagcagatatccccatcatggagtgaagtctgggtataacactgtgctacaggttaatcctcagtttcagaggaagtcayggaaacattaacccagcttgacaaatacacatgcatgagcaacactcataaaaattactgcaataccgaacaatttgtgtagtggctgtcatagtctcagcacacagaaatcaaagtgaatacacatttttagcactaactcattaagcaaattatcaaagaagcatgttctccagagaattrgacaggcaaaattacttatcataggaccatagaatcacagaatggttcgggttggaaggaacctcaaagcccaaccagttccaaccctcgctaagggcaaggacaacacctaccagc

SEQ ID NO: 60495 - DNA, 600 bp, Chicken  19866894319982_4
ataacgtgttgcattggtaacacattcctgctcagtccagcagatatccccatcatggagtgaagtctgggtataacactgtgctacaggttaatcctcagtttcagaggaagtcayggaaacattaacccagcttgacaaatacacatgcatgagcaacactcataaaaattactgcaataccgaacaatttgtgtagtggctgtcatagtctcagcacacagaaatcaaagtgaatacacatttttagcactaactcattaagcaaattatcaaagaagcatgttctccagagaattrgacaggcaaaattacttatcataggaccatagaatcacagaatggttcgggttggaaggaacctcaaagcccaaccagttccaaccctcgctaagggcaaggacaacacctaccagctcaggctgcccagagccaaatccagtttggccttgaacacctccagggatggggcacccacagcttctctgggcagctgtgccagtgcctcaccaccctctgaatgaagaatttcctcctcacatctaacctcagtctcccttcttttactttaagaccactcccccttgtcttgtcactctc

SEQ ID NO: 60496 - DNA, 600 bp, Chicken  19866894319982_5
aacacctaccagctcaggctgcccagagccaaatccagtttggccttgaacacctccagggatggggcacccacagcttctctgggcagctgtgccagtgcctcaccaccctctgaatgaagaatttcctcctcacatctaacctcagtctcccttcttttactttaagaccactcccccttgtcttgtcactctctgcccacatatgtaacaagtcacttacagtagatatctggacattacctgagagcaggtggacagctggtataaaccacaaacaggaagagagcttgtgacacyyctagtgcgtagctccccttgcagcaagagcaggtgccacaggggagcttcctttggcagggttgccacatttttgataggcagtctcccacaaactaataacctcacatcagaggcttttcatgtgggtaatgccaggcaggcctgtggggacagcgggacctgctgccacctctgtgccaacaccaagagttgaacagctaatagcatggggagtcctgcataaaaacagaagatggattgcatcctgcagcttgggaagtgccagtatatatccacgtgtctcattcccataagaag

SEQ ID NO: 60497 - DNA, 600 bp, Chicken  19866894319982_6
acacctaccagctcaggctgcccagagccaaatccagtttggccttgaacacctccagggatggggcacccacagcttctctgggcagctgtgccagtgcctcaccaccctctgaatgaagaatttcctcctcacatctaacctcagtctcccttcttttactttaagaccactcccccttgtcttgtcactctctgcccacatatgtaacaagtcacttacagtagatatctggacattacctgagagcaggtggacagctggtataaaccacaaacaggaagagagcttgtgacacyyctagtgcgtagctccccttgcagcaagagcaggtgccacaggggagcttcctttggcagggttgccacatttttgataggcagtctcccacaaactaataacctcacatcagaggcttttcatgtgggtaatgccaggcaggcctgtggggacagcgggacctgctgccacctctgtgccaacaccaagagttgaacagctaatagcatggggagtcctgcataaaaacagaagatggattgcatcctgcagcttgggaagtgccagtatatatccacgtgtctcattcccataagaaga

SEQ ID NO: 60498 - DNA, 600 bp, Chicken  19866894319983_1
tgctaggccgtccccagtgtgcccaggcctcacattcactggaggcccaaaactggacccagcgctccaggtgtggcctcaccagtgctgagtggaggggaagaatcccctccctggtggaggtgacactcgatgatacctggcctaatgcagtctagaaccttagcctttttaaatggcaacagtacattgcttgctcatgctcaacttgatgcttatcagggctaccaccagctccttttctcctcaagaagcaatcagagctgacccagcacccacagcagtctctggacaacttgycttcagttaaaacattcatcctacctcccttctccctcactacagtgatggtccatagcaagagctgtctgcgggcagacccatggcattgaacaggctgcctagagagatggtgggtgccccaaacctggagacactcaaggtcaagctggatggggctgtgagcacctgatggagctgtggctgtccctgttcacagcaggggagttggccagatgaccttgagggatcccttccaactcaaatgactctatgattctgtgatttaacacacacagcacaagcacgcaagcagcaaga

SEQ ID NO: 60499 - DNA, 600 bp, Chicken  19866894319984_1
atatgcattgcacaaagataaaaggaacactgaaattacaaaaattaatgtcatgtaggaaataaaaatggtgtattagtggcaaaatgtaaatgggattattttagtagtcaaaataaatatttaataaaaagcacacattcatgacaaattatcaaaatgaaaatcttagtatttggaagtaccttatccaaatttccttgcattaaacattgctaaattcagtggtttaaatattatcaaattgctctaagcaatcattgcttaagttagtgtcacaaaaagtcatgagactaaaarttctgtccaatgaacagtaaatccattatactaaacaaagaagaatttcctacaccaaggagtcaatccacagtcattgaaacacagttcacaagaactactgcatagcatactgcttactgtaccaaaagtgcatttgtcagtattcaatgaacataggggaaaaaaaaaccaaaaaaaaaaaccaaaaaaaaaaccaacaacaaaaaaaccaaccaaccaaccaaaaaaaccccactttttttgggggtgtgtacatgtatatatattaaaaaaaaaacaaaaaaaaccaaacaaacc

SEQ ID NO: 60500 - DNA, 600 bp, Chicken  19866894319985_1
ctatatgcacttaacaccagcgggagttacagaagtattacactgcacccagatctgtgctttaaagtgacatgaaggatggtgggagaatttcattcatccttcataagcagtggggattatacatggccttaaatattgttcatgttttctacctgaagaaggaagaccagcgtagaaaatatgcattggaagtgattaacctttttgtaatgtaagcagtaaagattaaaagaagggaaaccactaatagtagaattagcaaatttgcttccaaatgtaggctgctgtcaagcttgytttagtaagaaaaggaatttgtaaaagtaagctgttggcttgtaaaatccaagggatataacagctcattgaaaagcttatctgtacattgcaccagggcagagcgggatgcccaggtgactgaatagcattctcatgtatactaatggcactctggaagccattctcagatctgaagctgaggaagatggtttctttatctcagctctttagacacatctcattgcaagcagataatttaagaatatattttcatctgtacaaatgtggagtttcagcattgtgagaagttcagcagag

SEQ ID NO: 60501 - DNA, 600 bp, Chicken  19866894319997_1
tgaaaatgaattacaaagatttgttctcctttagagcactaagttttctcacttgtgtttatttcattattttaatgagaaaaagcaatcagagtatgttctgttattgacttaaaataacaaccaggaaaaattactgaaggtagctttcagcgtggagtgtattaatgaaaagattctcatgattcaatacattcaatggatacattcaatacaactcagtggactgagtttacctgttagaaatacactggggagtttgtttttcagtttgttttctttacttaaagatttctcaaractttatttctcccatgaactatgttgggaaaacattctttatctttatgcttaaaagtaattgacaaaataggtctgggttcctgaaaacctttagtactgaatattagaaaacatttgattaaatggttgtacaggaaatgttgcaattgtatatctttttcaatatggagcagacaagattgacatttacagaatcatagaagtctctccaaagatgtgttttattccttttgtctactattttataatagagtaaatatttccctctctgtcctgccacataacacagatccgtct

SEQ ID NO: 60502 - DNA, 599 bp, Chicken  19866894320001_1
  misc_feature (1)..(164): n is any nucleotide
nnnnnnnnnnnnnnnnnnnnnnnnnnnnnnnnnnnnnnnnnnnnnnnnnnnnnnnnnnnnnnnnnnnnnnnnnnnnnnnnnnnnnnnnnnnnnnnnnnnnnnnnnnnnnnnnnnnnnnnnnnnnnnnnnnnnnnnnnnnnnnnnnnnnnnnnnnnnnnnnnnnntacctctttgagaagggcgactacaaagacagctccgagttcggcgcccagcaccccccagatccagtcggtgcggcgcatccgggacatgcagtggcaccagcgcggcgcttaccacccctccaactgaagcccycgcactgccgggcayagggggccgagcgctgcccccacctgccgctgcccccacggcctcacttcccatctccctccgtgtgagtcacaccgcaaccgaataaagcttggagttgcaaagtcgctgctctgggcccttccttggygggcaaccagcgctcacctccctgcatgtgggccgtggggatggagatgctcagatcaccgtggggtccgcagggtgcatggctacgggtgggtgtccaaccagcacagctgtcctcagagcaccccggtggccgggtggacacctcagtgctt

SEQ ID NO: 60503 - DNA, 599 bp, Chicken  19866894320001_2
  misc_feature (1)..(149): n is any nucleotide
nnnnnnnnnnnnnnnnnnnnnnnnnnnnnnnnnnnnnnnnnnnnnnnnnnnnnnnnnnnnnnnnnnnnnnnnnnnnnnnnnnnnnnnnnnnnnnnnnnnnnnnnnnnnnnnnnnnnnnnnnnnnnnnnnnnnnnnnnnnnnnnnnnnnntacctctttgagaagggcgactacaaagacagctccgagttcggcgcccagcaccccccagatccagtcggtgcggcgcatccgggacatgcagtggcaccagcgcggcgcttaccacccctccaactgaagcccycgcactgccgggcayagggggccgagcgctgcccccacctgccgctgcccccacggcctcacttcccatctccctccgtgtgagtcacaccgcaaccgaataaagcttggagttgcaaagtcgctgctctgggcccttccttggygggcaaccagcgctcacctccctgcatgtgggccgtggggatggagatgctcagatcaccgtggggtccgcagggtgcatggctacgggtgggtgtccaaccagcacagctgtcctcagagcaccccggtggccgggtggacacctcagtgcttaataaagcagttatt

SEQ ID NO: 60504 - DNA, 599 bp, Chicken  19866894320001_3
  misc_feature (1)..(19): n is any nucleotide
nnnnnnnnnnnnnnnnnnntacctctttgagaagggcgactacaaagacagctccgagttcggcgcccagcaccccccagatccagtcggtgcggcgcatccgggacatgcagtggcaccagcgcggcgcttaccacccctccaactgaagcccycgcactgccgggcayagggggccgagcgctgcccccacctgccgctgcccccacggcctcacttcccatctccctccgtgtgagtcacaccgcaaccgaataaagcttggagttgcaaagtcgctgctctgggcccttccttggygggcaaccagcgctcacctccctgcatgtgggccgtggggatggagatgctcagatcaccgtggggtccgcagggtgcatggctacgggtgggtgtccaaccagcacagctgtcctcagagcaccccggtggccgggtggacacctcagtgcttaataaagcagttattaagcaccgctgatgcttaatagygttgcttaatarctgctttaacccacaataagcctctcatttagcattatcaacactaaataacgctttaatcatttgcactctgagctgagcaaatgcagctgctg

SEQ ID NO: 60505 - DNA, 600 bp, Chicken  19866894320001_4
cctgccgctgcccccacggcctcacttcccatctccctccgtgtgagtcacaccgcaaccgaataaagcttggagttgcaaagtcgctgctctgggcccttccttggygggcaaccagcgctcacctccctgcatgtgggccgtggggatggagatgctcagatcaccgtggggtccgcagggtgcatggctacgggtgggtgtccaaccagcacagctgtcctcagagcaccccggtggccgggtggacacctcagtgcttaataaagcagttattaagcaccgctgatgcttaatagygttgcttaatarctgctttaacccacaataagcctctcatttagcattatcaacactaaataacgctttaatcatttgcactctgagctgagcaaatgcagctgctgagtgccrgctccagtgcagcactgcatgcagggctgcgggggctgcacagctgcagctcttcttggttcccccctgcagcatcagcatggctgtgtgttgcagtgcactcctgcagggctgcaccgggagcgagaggtgcaggatacaagggtgggtggcactgctgggtcgagtgcatcgcttgtacccaaa

SEQ ID NO: 60506 - DNA, 600 bp, Chicken  19866894320001_5
cccacggcctcacttcccatctccctccgtgtgagtcacaccgcaaccgaataaagcttggagttgcaaagtcgctgctctgggcccttccttggygggcaaccagcgctcacctccctgcatgtgggccgtggggatggagatgctcagatcaccgtggggtccgcagggtgcatggctacgggtgggtgtccaaccagcacagctgtcctcagagcaccccggtggccgggtggacacctcagtgcttaataaagcagttattaagcaccgctgatgcttaatagygttgcttaatarctgctttaacccacaataagcctctcatttagcattatcaacactaaataacgctttaatcatttgcactctgagctgagcaaatgcagctgctgagtgccrgctccagtgcagcactgcatgcagggctgcgggggctgcacagctgcagctcttcttggttcccccctgcagcatcagcatggctgtgtgttgcagtgcactcctgcagggctgcaccgggagcgagaggtgcaggatacaagggtgggtggcactgctgggtcgagtgcatcgcttgtacccaaacgtgagcaccaa

SEQ ID NO: 60507 - DNA, 600 bp, Chicken  19866894320001_6
ccagcgctcacctccctgcatgtgggccgtggggatggagatgctcagatcaccgtggggtccgcagggtgcatggctacgggtgggtgtccaaccagcacagctgtcctcagagcaccccggtggccgggtggacacctcagtgcttaataaagcagttattaagcaccgctgatgcttaatagygttgcttaatarctgctttaacccacaataagcctctcatttagcattatcaacactaaataacgctttaatcatttgcactctgagctgagcaaatgcagctgctgagtgccrgctccagtgcagcactgcatgcagggctgcgggggctgcacagctgcagctcttcttggttcccccctgcagcatcagcatggctgtgtgttgcagtgcactcctgcagggctgcaccgggagcgagaggtgcaggatacaagggtgggtggcactgctgggtcgagtgcatcgcttgtacccaaacgtgagcaccaatggggtctgcaggaggcacaggcactgcagccacatccctgtgcatggggatgctctgctgcaggttcggcaccgacgcagccaaatgggggcaccgggggc

SEQ ID NO: 60508 - DNA, 600 bp, Chicken  19866894320021_1
aacaaataaataggaaaaacaaatgcatgaaatcttaacagggatatatggaagagaaagtactttcaaaatcacatttgctgtaagcaaacttcctttagtaaaacctgagaacagttccgagagcctcagaacacttaagatttttctaaaaaaacaaaaacaaaacatggatttcttttttgaaaataaaacaaatttggtcaaatttgtgaagatattaaaaagtcattcaaggtaaaagttacagttgaaatgttgtcatcaacctgttttacttcttttctttctgagaatttwaaaaaaattgtctgtctcccaatttgaaatgaagtcagattttgaaatttcaaattcttgagtagagtgattctcctccaggttgttctgataacacactgtatttcagaagggggagctgaagttactgacctccaaagctgtccaaacacacaatgcccattttcatcctaggagtctgtcctccctgcccacttttccacatgctagctttcagcctggttgaaatttaggagataacctccagctaccattctcagcagacactgggaattttgagagctggcaggatgcctcaac

SEQ ID NO: 60509 - DNA, 599 bp, Chicken  19866894320023_1
  misc_feature (1)..(54): n is any nucleotide
nnnnnnnnnnnnnnnnnnnnnnnnnnnnnnnnnnnnnnnnnnnnnnnnnnnnnnatgccatctcgatgtggctacacccaaccactgttagcctcctcagtttcttaattccactgaagtgacagacactgaaatatagcagtaggtcctattcacagcactcagagtaatggttttccacagagctgcctcactttatccttggagcgcatcagcttcccttacgaaacgaacaaacaaaccaaacacaaatgcataggaagaattagctgatgcacgtagggtattaccaaatccctrtgaaatccacggcctgttgtacaaaaaattctagttgctggcattagtggaggaatttttccaagtattattgcaaatcacaatattccctttagattatcactgacagaattttaaaatatttacattatttatcacttcctgcacctcctcatctaaatgagagctgtaatcaataaatcatcaatacttcactttttctttcattctgcaagatgtaaattatgtagctgtacattgttcctatgcatgtgtgtaatgcccagcctttcctaactcatcagaaagaaacttacttc

SEQ ID NO: 60510 - DNA, 533 bp, Chicken  19866894320024_1
ctgatctgagcaccagaatgatgtgctcctgtcaacctgcgaatcacaggaattgctgctcaaatagagaggaggaaaaaagctccttgtaaattgctcttgaaactgcctcatgcctctttctagcaaggatgggcaaatttgagtgcaaaattcaacacaaacttaaataatgcttagatatcaggaagacagatgccacagaaatacaagttggttgatgattaattgagtttgcctttcacttaggacacactatgataaaaggagttagtgaggggaaaagagaaatttaaatgraaaaaaacacatgaagcacgcataaatatatacatgctgcatataaacaaagcacatttagtccagcttctgagtatttcttcactaatacagagawgatacagaaaagagtgctattcttttgaaacttaccttgatcctctaaaacaaaaatgatctcatagatacagggcaaaaagtttcatctgttcatattaccattgcacgattacagaactgactgcttaattttt

SEQ ID NO: 60511 - DNA, 436 bp, Chicken  19866894320024_2
tcttgaaactgcctcatgcctctttctagcaaggatgggcaaatttgagtgcaaaattcaacacaaacttaaataatgcttagatatcaggaagacagatgccacagaaatacaagttggttgatgattaattgagtttgcctttcacttaggacacactatgataaaaggagttagtgaggggaaaagagaaatttaaatgaaaaaaaacacatgaagcacgcataaatatatacatgctgcatataaacaaagcacatttagtccagcttctgagtatttcttcactaatacagagawgatacagaaaagagtgctattcttttgaaacttaccttgatcctctaaaacaaaaatgatctcatagatacagggcaaaaagtttcatctgttcatattaccattgcacgattacagaactgactgcttaattttt

SEQ ID NO: 60512 - DNA, 600 bp, Chicken  19866894320038_1
cacatgctcagtgtgcaaggtgttgggcatcttctggtacaaccagatacagcaaggtccttggttcagtgttgcaatcccttgttcccagcctctagaactccaagattgagatgtatttcagttagagagttacctaaatatgagttctatctgatctgatgaggtttctctgccttcccttctcagaatggactcagttccctcgggaggtttccacttctctccaatgactgttggactttacatgaccagctctggctgagatgtgttggggaagaatttaattttacccatttrtttctccaagtgtatcagtgtgtaaccatgcctgattgtcagagcttcggctgcaggctgtgtatctggtctgtaggcatggagccagaggctgctagctggaaagctgcatgagatggaccctaccactgctgtttaggcagttgcatttaagagaactgaagagttccccttgtgcctactccagttcagcagcatttgctaactgctcataatgtttccacataggtttcccattgctgattttggaaaataatgtagttaaactcttctgtttatttgtatagtgaagtagaccct

SEQ ID NO: 60513 - DNA, 600 bp, Chicken  19866894320040_1
tcatttttcaaggtttcttatgtacagaaaggagatcctgcccagagcacactggcattctgtgatgtgaagcctccaaagcataaatctcttaattcttacctcatcagcagagtcacaagaactgttagaacaagaacacaagaactattagaacatatgcagagctgcaaagcactgtctcagatttgacagtgaaattagttcctcaagtcaggatgcttcagcctctttcaaagcctctgctgtgaatgctcgtctttgaaaagaaatgaaggatatactgagatgttaaacagwttaatttagttattttcatgtattatgttttcaaagctgtttcttgattccttaataaactgtattgtttagattggtaacgtctgtgtaaataatcgaaaattgctcattttgattgcttstggatgtgagcttttgcttttgtattgtaattatttttgaaacgagaggagcttgtgtrtcaccagaggacagtttaatatagcaatcctccttccaaacgttttaatctagataattcttatgccagctctagggacttcatatcagtgctcatttcagagaaaagcagcatttttt

SEQ ID NO: 60514 - DNA, 600 bp, Chicken  19866894320040_2
aactgttagaacaagaacacaagaactattagaacatatgcagagctgcaaagcactgtctcagatttgacagtgaaattagttcctcaagtcaggatgcttcagcctctttcaaagcctctgctgtgaatgctcgtctttgaaaagaaatgaaggatatactgagatgttaaacagwttaatttagttattttcatgtattatgttttcaaagctgtttcttgattccttaataaactgtattgtttagattggtaacgtctgtgtaaataatcgaaaattgctcattttgattgcttstggatgtgagcttttgcttttgtattgtaattatttttgaaacgagaggagcttgtgtrtcaccagaggacagtttaatatagcaatcctccttccaaacgttttaatctagataattcttatgccagctctagggacttcatatcagtgctcatttcagagaaaagcagcatttttttaattcctcataacttttctgcatcaaacagtgtatcaactgtaaaccagtatttcaaacagatagtccttgttgaaatagtccaaggccttattgtattgtgccccatgattgctcttaca

SEQ ID NO: 60515 - DNA, 600 bp, Chicken  19866894320040_3
ctcagatttgacagtgaaattagttcctcaagtcaggatgcttcagcctctttcaaagcctctgctgtgaatgctcgtctttgaaaagaaatgaaggatatactgagatgttaaacagwttaatttagttattttcatgtattatgttttcaaagctgtttcttgattccttaataaactgtattgtttagattggtaacgtctgtgtaaataatcgaaaattgctcattttgattgcttstggatgtgagcttttgcttttgtattgtaattatttttgaaacgagaggagcttgtgtrtcaccagaggacagtttaatatagcaatcctccttccaaacgttttaatctagataattcttatgccagctctagggacttcatatcagtgctcatttcagagaaaagcagcatttttttaattcctcataacttttctgcatcaaacagtgtatcaactgtaaaccagtatttcaaacagatagtccttgttgaaatagtccaaggccttattgtattgtgccccatgattgctcttacactgggaattcatctttttggaacaagatggatgaaatattttaagagagtaggtcacag

SEQ ID NO: 60516 - DNA, 600 bp, Chicken  19866894320046_1
tgcttaaaaacacaaatgagcagattgacagatttcactctggaagaaaatagcccccaaaatcacatagaaagcagctcttcacctatagtatctttgtaaatactcgctaaaaacttagccctcctgtatgggtcctgcagctactaagattttttttctgcagccagcccagctaaataagtgcaaagggattaggaaagaaatacaactaaccagtgtggcaattttcaaccagaactgccttgtttgcagcagcagttttttgctaggcattaaagaagacttccaactggaccyagtcccatctcccctgttctttgagtctgagaatccgtcyctggtgagccagttagctctctccagatctgagcatgagcatgggcaaaccttccagccgcatgctggggactgtcagaggatctgaaatggatacagaatctatctcctatgagaacatcgcagcatcagaattttctcaggcctggatccattgcagctgaaacaagggagcaggaacagattctagaatgaaacagtgggaggagccggaggactcacagarcagcagccacaaggaatagcttccaggatcagagt

SEQ ID NO: 60517 - DNA, 600 bp, Chicken  19866894320046_2
tggaagaaaatagcccccaaaatcacatagaaagcagctcttcacctatagtatctttgtaaatactcgctaaaaacttagccctcctgtatgggtcctgcagctactaagattttttttctgcagccagcccagctaaataagtgcaaagggattaggaaagaaatacaactaaccagtgtggcaattttcaaccagaactgccttgtttgcagcagcagttttttgctaggcattaaagaagacttccaactggaccyagtcccatctcccctgttctttgagtctgagaatccgtcyctggtgagccagttagctctctccagatctgagcatgagcatgggcaaaccttccagccgcatgctggggactgtcagaggatctgaaatggatacagaatctatctcctatgagaacatcgcagcatcagaattttctcaggcctggatccattgcagctgaaacaagggagcaggaacagattctagaatgaaacagtgggaggagccggaggactcacagarcagcagccacaaggaatagcttccaggatcagagtctaattatctaaaataaaatgacagaacacattatcattt

SEQ ID NO: 60518 - DNA, 600 bp, Chicken  19866894320046_3
ttgctaggcattaaagaagacttccaactggaccyagtcccatctcccctgttctttgagtctgagaatccgtcyctggtgagccagttagctctctccagatctgagcatgagcatgggcaaaccttccagccgcatgctggggactgtcagaggatctgaaatggatacagaatctatctcctatgagaacatcgcagcatcagaattttctcaggcctggatccattgcagctgaaacaagggagcaggaacagattctagaatgaaacagtgggaggagccggaggactcacagarcagcagccacaaggaatagcttccaggatcagagtctaattatctaaaataaaatgacagaacacattatcattttcattacacaggcctcatattattcttcatacagttgtatgagtagagctttcaaaccacttttcttttaatctccattcttttttcttcatcacatttgcctgtgttttcctaatacctttaccagcattagtcacaactggcaggagcccatagagagctttagagaacattattttttgccctctgtgcatacattagtgttgccctttaaagacgcagccc

SEQ ID NO: 60519 - DNA, 599 bp, Chicken  19866894320062_1
  misc_feature (1)..(4): n is any nucleotide
nnnnccagaagataaagtgacagggatatattccctcacagccctaagcagcttgccccacagatcacagtccacatcatgacaaactgcaaagaaaagccattagttttaaaaaaaaaaaaaaaaatcacctgcagaaatgatgggattgtgttgcactttgggaaaaataataacctgcaacatcacctgcccgcctccaccactctgaaggtgccactgttagggctgttttggtaatatgcttgtgctgcaggaggtttctcccatgttattagagtcccgatggactcctgtttrtacatcttccccagcactatggtgaccttttctgcagggtggaaatgctttcagaaactattaatctctcctctggagtggatagagaggacccgtggagagaaaggcttccacactcttcttcatccttgtcaacaaagatcagagccaggaagtaggtttcttgtttggcaatgcagagcaataagcgcagagctattacagggcagggctctgtaaagatgaagggctgaggaacacgaaatggaaaaacaatgctgctcagtaaatattgatagatgttccctgtactcgctcta

SEQ ID NO: 60520 - DNA, 600 bp, Chicken  19866894320062_2
gagagaaatggtaggaaactttccactcaagactttctgctcaaggacagcagcacagacgtaaccccagcttattgcatgagatgaggtgaaaggttttgtcagtgttgatcagtgttcatttcagcagtactgatttcccattttggtagaaagatcaagggctgaatgctgaatggcaggaagactccttcttcccaggagatgatcactgtgggccaggctggaagcacattagccaggtattataaggggaagcaatgctgaaactcccgccgtgcctgtttggcagataaataragaatttcaggctctggggcagacagatcagcaataaattcatattaagaaatgtctgtgagatttgctaacaagacttcaagtacctcaggcagagaccacggcctttcatgtgtttataaagcatttaactaatggagccctggtcctgaacagggcagtgacgcattactgcaatacaggcaagaactgttcaacagttctgtgggcatacaggtgcaaaagmgaacagtatgagtwmaacagtacagatttgaagcaggctttggtgctaagcgttctcttcaktgttctctccct

SEQ ID NO: 60521 - DNA, 600 bp, Chicken  19866894320062_3
gaagcacattagccaggtattataaggggaagcaatgctgaaactcccgccgtgcctgtttggcagataaataragaatttcaggctctggggcagacagatcagcaataaattcatattaagaaatgtctgtgagatttgctaacaagacttcaagtacctcaggcagagaccacggcctttcatgtgtttataaagcatttaactaatggagccctggtcctgaacagggcagtgacgcattactgcaatacaggcaagaactgttcaacagttctgtgggcatacaggtgcaaaagmgaacagtatgagtwmaacagtacagatttgaagcaggctttggtgctaagcgttctcttcaktgttctctccctcctcctaccraaaaaggcagctgctccccagagatagccagacagaggggtttaaagtcatggaggaaagccatgggctcagctggggtctggctgccatgaactctagaataagtctagttcctgctttgccacaaacatttttctcaaccaagggggaggaatttgggatgggattctctgaaaatgcctaaaccccttaaaagcaagaggagtgacttcaatc

SEQ ID NO: 60522 - DNA, 600 bp, Chicken  19866894320062_4
aggtattataaggggaagcaatgctgaaactcccgccgtgcctgtttggcagataaataragaatttcaggctctggggcagacagatcagcaataaattcatattaagaaatgtctgtgagatttgctaacaagacttcaagtacctcaggcagagaccacggcctttcatgtgtttataaagcatttaactaatggagccctggtcctgaacagggcagtgacgcattactgcaatacaggcaagaactgttcaacagttctgtgggcatacaggtgcaaaagmgaacagtatgagtwmaacagtacagatttgaagcaggctttggtgctaagcgttctcttcaktgttctctccctcctcctaccraaaaaggcagctgctccccagagatagccagacagaggggtttaaagtcatggaggaaagccatgggctcagctggggtctggctgccatgaactctagaataagtctagttcctgctttgccacaaacatttttctcaaccaagggggaggaatttgggatgggattctctgaaaatgcctaaaccccttaaaagcaagaggagtgacttcaatcattgtgtgctcgta

SEQ ID NO: 60523 - DNA, 600 bp, Chicken  19866894320062_5
ggtattataaggggaagcaatgctgaaactcccgccgtgcctgtttggcagataaataragaatttcaggctctggggcagacagatcagcaataaattcatattaagaaatgtctgtgagatttgctaacaagacttcaagtacctcaggcagagaccacggcctttcatgtgtttataaagcatttaactaatggagccctggtcctgaacagggcagtgacgcattactgcaatacaggcaagaactgttcaacagttctgtgggcatacaggtgcaaaagmgaacagtatgagtwmaacagtacagatttgaagcaggctttggtgctaagcgttctcttcaktgttctctccctcctcctaccraaaaaggcagctgctccccagagatagccagacagaggggtttaaagtcatggaggaaagccatgggctcagctggggtctggctgccatgaactctagaataagtctagttcctgctttgccacaaacatttttctcaaccaagggggaggaatttgggatgggattctctgaaaatgcctaaaccccttaaaagcaagaggagtgacttcaatcattgtgtgctcgtaa

SEQ ID NO: 60524 - DNA, 554 bp, Chicken  19866894320062_6
gcagataaataragaatttcaggctctggggcagacagatcagcaataaattcatattaagaaatgtctgtgagatttgctaacaagacttcaagtacctcaggcagagaccacggcctttcatgtgtttataaagcatttaactaatggagccctggtcctgaacagggcagtgacgcattactgcaatacaggcaagaactgttcaacagttctgtgggcatacaggtgcaaaagmgaacagtatgagtwmaacagtacagatttgaagcaggctttggtgctaagcgttctcttcaktgttctctccctcctcctaccraaaaaggcagctgctccccagagatagccagacagaggggtttaaagtcatggaggaaagccatgggctcagctggggtctggctgccatgaactctagaataagtctagttcctgctttgccacaaacatttttctcaaccaagggggaggaatttgggatgggattctctgaaaatgcctaaaccccttaaaagcaagaggagtgacttcaatcattgtgtgctcgtaag

SEQ ID NO: 60525 - DNA, 532 bp, Chicken  19866894320062_7
gctctggggcagacagatcagcaataaattcatattaagaaatgtctgtgagatttgctaacaagacttcaagtacctcaggcagagaccacggcctttcatgtgtttataaagcatttaactaatggagccctggtcctgaacagggcagtgacgcattactgcaatacaggcaagaactgttcaacagttctgtgggcatacaggtgcaaaagmgaacagtatgagtwmaacagtacagatttgaagcaggctttggtgctaagcgttctcttcaktgttctctccctcctcctaccraaaaaggcagctgctccccagagatagccagacagaggggtttaaagtcatggaggaaagccatgggctcagctggggtctggctgccatgaactctagaataagtctagttcctgctttgccacaaacatttttctcaaccaagggggaggaatttgggatgggattctctgaaaatgcctaaaccccttaaaagcaagaggagtgacttcaatcattgtgtgctcgtaag

SEQ ID NO: 60526 - DNA, 600 bp, Chicken  19866894320064_1
cagaacagatgcctgcatcagtgaattaaattgtggttcatggccaaagaatgaatgcctcttattcatctgttcatttcaagaactcagacaaactctgaatgagtatggcaaacacactgctgccagaatgaaatgctttgtcctctgtcttctgttccaggcatctttgtcagatacttcctcccaggaagtcaatctgctcgttgtattttgctgggtggtatctgcctagcacagatgctatttggcaactcaaacagcagctgaaagtgcactgcgtatccatcctgctgacaygttccataccaggcaggggtagttttctactaagtaaattctgctcaagtcttaatatctttgtcagcatggctgcataacttatgttggagaggtctttgcaccaactgtataacttcaagtttacactaccttttttgccatgattgtgatgctgttttgatatctagtatctgtggcagggagttcccgctgttgccaaattaattttaacaaggcttctacgttttatctccgtgctttagttcttgtcacacgtatggtacccaactcaaatctgctacagtgatgtttaccaga

SEQ ID NO: 60527 - DNA, 600 bp, Chicken  19866894320064_2
tttagttcttgtcacacgtatggtacccaactcaaatctgctacagtgatgtttaccagattgtctttcttattcaataaagataactctcctgcggtggcctgatgcaacacagggcctgatgcctgttgacagctgggccaagcggttgatcattgcatctggactgacgtcagctgaactgccagcactgccagagcaacacagctctgcgcacatagggcggctgggagttgcacaacagcagaagggcagtggggcacagggcagcctgctgcctgcaggcaaacagcacagggyttggcttcctgaaggaaccagtataagcttttgaattgtgaatccttcaaagccttgccagtttggatgtctttacaatgagttatctgcatatgaatatttttctacctaatttaaggtactgagaactttacaaggcagaacgtgctctaaactgtgtatttcctctattctagtggctgaaatcaacatagatggtttcccataccggcatactcctgttcatatgcagcctaacagttttaaaggcttggctttaaaacatggggttgggggcagtgcgaataacagaagagtgaa

SEQ ID NO: 60528 - DNA, 600 bp, Chicken  19866894320066_1
tggaaagcaaaaagaactggtgaggggcacggcggcgaggagaccctctgtgccagcagtgccatcccgtgtgccccagccacgtgtttccattgctttgtgtggctttgagtcctcacagctggcagcagccatggcagagctggcatcagcattccggactgggggtgcaagaagggagaatgacattcttgatcagttaacgaatggattcgatgccatctttaaagagtgttcttgaagaagccacgctaaaaatcacatttaagctccaaaactccaaacctcctgcagaatgayggagagggttgcgcgaggaaagctcagtgggcttctccaaactgcagtgkttcctatgggcatacaggaggtggccacccaaggcaktcccatgtagagtattatcagttacactcaatgttctgtgctgacgtggtgataataaattggctccagcaattttttgtggtggttttgagttccttacccaggacatcctcctccatcaggatggattcataccgtggttatgtttaaagtttggcacgttgggttaaaatgtttccttagagctttttctcctcctgcccaatggaggcc

SEQ ID NO: 60529 - DNA, 600 bp, Chicken  19866894320066_2
tgccagcagtgccatcccgtgtgccccagccacgtgtttccattgctttgtgtggctttgagtcctcacagctggcagcagccatggcagagctggcatcagcattccggactgggggtgcaagaagggagaatgacattcttgatcagttaacgaatggattcgatgccatctttaaagagtgttcttgaagaagccacgctaaaaatcacatttaagctccaaaactccaaacctcctgcagaatgayggagagggttgcgcgaggaaagctcagtgggcttctccaaactgcagtgkttcctatgggcatacaggaggtggccacccaaggcaktcccatgtagagtattatcagttacactcaatgttctgtgctgacgtggtgataataaattggctccagcaattttttgtggtggttttgagttccttacccaggacatcctcctccatcaggatggattcataccgtggttatgtttaaagtttggcacgttgggttaaaatgtttccttagagctttttctcctcctgcccaatggaggccagcagtccgtgctcctgctgtgggtcaccgaggctgcggagcaggaaagg

SEQ ID NO: 60530 - DNA, 600 bp, Chicken  19866894320066_3
ttccattgctttgtgtggctttgagtcctcacagctggcagcagccatggcagagctggcatcagcattccggactgggggtgcaagaagggagaatgacattcttgatcagttaacgaatggattcgatgccatctttaaagagtgttcttgaagaagccacgctaaaaatcacatttaagctccaaaactccaaacctcctgcagaatgayggagagggttgcgcgaggaaagctcagtgggcttctccaaactgcagtgkttcctatgggcatacaggaggtggccacccaaggcaktcccatgtagagtattatcagttacactcaatgttctgtgctgacgtggtgataataaattggctccagcaattttttgtggtggttttgagttccttacccaggacatcctcctccatcaggatggattcataccgtggttatgtttaaagtttggcacgttgggttaaaatgtttccttagagctttttctcctcctgcccaatggaggccagcagtccgtgctcctgctgtgggtcaccgaggctgcggagcaggaaaggaaggaacagcgattgcattttgaatacagaaccaatg

SEQ ID NO: 60531 - DNA, 600 bp, Chicken  19866894320071_1
acatcaacctttttaacatgttaaaatcatgagacgttcatttccctttgtgggacaagaagaggaaatacgttccatgtaacaggatgtgtttttaaaaaaaaaaaaaacacaaaactttatctgagggattctgatgttgtctctttccttttctgttacttccttaaaaaattatgggttataaaaatgtgcatacacttcatgtctggtctttctcctaagtcatagccttgggcacagcttgtctctttttttagttgggttcaacacaaactttagtgtgtctagtttggttgkttttttttttgtctgttcaaaattagctgtttcaacagctcactaatttaattccagttacagaataatcttatctctgtatttctaaagctctggctgctgtaatgtgattggtctggctggattatagggcacgttccttgctaaaagttgggtagtgtgaggttgtaggaggtccttctgttgtggctttgacttccccttgtggtgccaatgtaagataacaaagaatatgaaacaggcagcggtttagctgaacacaaaagctgaggttgtaattcttaattatgttttcctaat

SEQ ID NO: 60532 - DNA, 600 bp, Chicken  19866894320073_1
tgccttccagccctgctcaggctgccttcccgtgtctgtctggccttgggctggctgtggctgtctcaggattgccccgcgctgtttccttgccccctccccagcagaacctgctgtgcattgctccggtgctggcagctgcgtggccttgctgccattttccacagtggctttacgaggtgctgacactccctgtacatagcataggtgttatttttggcattttgcttcggactgagattctcatcttttggctgggaggcctggctcctgcctttcaacttggaggaggagaggagratttgaatctgaaggctgcagctacctggagagccttgacagacagcatattttgccacttacataaatgccatattttctgactgtataaaaggctttggttccttctcccatgtacgttcctttgagtggtctgaaaccaagggttgtctgaagtgggcgtgagctgccacgtcactctgcagccatcaccggagcgtgggaggctgcagcagaggggaggctgctgagttctcagggctcctcatgccttgcacggaaggtcactgaggaggtgctgacatctcgtcacctgggtcg

SEQ ID NO: 60533 - DNA, 600 bp, Chicken  19866894320073_2
ggagagccttgacagacagcatattttgccacttacataaatgccatattttctgactgtataaaaggctttggttccttctcccatgtacgttcctttgagtggtctgaaaccaagggttgtctgaagtgggcgtgagctgccacgtcactctgcagccatcaccggagcgtgggaggctgcagcagaggggaggctgctgagttctcagggctcctcatgccttgcacggaaggtcactgaggaggtgctgacatctcgtcacctgggtcgggtgcccctggcctctccttactgccytccttgctgagcggccgccgtgctggatggtgaatgcttcagaaagccaaatggctgggatagagagtttccrtgagcacatctcccagtgcaagaagttcagtcatccttctaagatgtctctgtagctttctgttagggaagcagaggtgcaggaggagctttgcagggaaggaggactgctggagccagcagcggtgtgcagccagcgatgcccatcctggtctctggccaaggcttaaataaagtctcgctttggagctgctgcgagctgcctttcctttcaagcaggcacagagc

SEQ ID NO: 60534 - DNA, 600 bp, Chicken  19866894320073_3
gttccttctcccatgtacgttcctttgagtggtctgaaaccaagggttgtctgaagtgggcgtgagctgccacgtcactctgcagccatcaccggagcgtgggaggctgcagcagaggggaggctgctgagttctcagggctcctcatgccttgcacggaaggtcactgaggaggtgctgacatctcgtcacctgggtcgggtgcccctggcctctccttactgccytccttgctgagcggccgccgtgctggatggtgaatgcttcagaaagccaaatggctgggatagagagtttccrtgagcacatctcccagtgcaagaagttcagtcatccttctaagatgtctctgtagctttctgttagggaagcagaggtgcaggaggagctttgcagggaaggaggactgctggagccagcagcggtgtgcagccagcgatgcccatcctggtctctggccaaggcttaaataaagtctcgctttggagctgctgcgagctgcctttcctttcaagcaggcacagagctcgagttgtcttgggagcggatgagttacagaagtggtcgttcctttgccttgaaacgaacccgctggatcag

SEQ ID NO: 60535 - DNA, 600 bp, Chicken  19866894320076_1
attgctcatcagaatttccacaggcgcagtgaattaagtgtgacctctgaacacacgcagccaccatcatcagaaattaatacttaaaatcactggcttaattgttgcttagctcagaattctattgtctttgagaaaacaggaacttgtaattgaataatacaagaacagcactctgtacttcattgtactcttcattttactcttgccccactgatagctacagaaggcaaacatgggtagcttggccttgaatgcctccagggatgggacaccccacaatctctccagcctgtccargtccctctggatggcttcccttccttccagtgtatcgactgcactgctcagtttgtatcatctgcaaacttgctgagggtgcactcgatgccactgtctgtgtcactgatgaagatgctgaagagcaccagtcccaagaccaacccctgagggacactgcttgtaatcaggcacaaaacctttgatcacaacctttggctgtgtccagccaaccaattcttaatccactgaactgtcyatccttcaaatctatacctctttaatttagaaagaaggatgtgctgagggaccatgtcaaag

SEQ ID NO: 60536 - DNA, 600 bp, Chicken  19866894320076_2
ggtagcttggccttgaatgcctccagggatgggacaccccacaatctctccagcctgtccargtccctctggatggcttcccttccttccagtgtatcgactgcactgctcagtttgtatcatctgcaaacttgctgagggtgcactcgatgccactgtctgtgtcactgatgaagatgctgaagagcaccagtcccaagaccaacccctgagggacactgcttgtaatcaggcacaaaacctttgatcacaacctttggctgtgtccagccaaccaattcttaatccactgaactgtcyatccttcaaatctatacctctttaatttagaaagaaggatgtgctgagggaccatgtcaaaggctttgtagaagtccaggtagatgacatccaccgcccttcccccatcgaccaaagccatcactccaccacagaaggccaccagattggtcaggcacratccgctcttggtgaagccatgctggctgtctcggatctctttgtctcgtatgtgccttaacgtagcttctaggtggatctgctccatgatcttcccaggcacagaggtgaggctagccggcctgcagttccccaggtcct

SEQ ID NO: 60537 - DNA, 446 bp, Chicken  19866894320076_3
ctgtgtcactgatgaagatgctgaagagcaccagtcccaagaccaacccctgagggacactgcttgtaatcaggcacaaaacctttgatcacaacctttggctgtgtccagccaaccaattcttaatccactgaactgtcyatccttcaaatctatacctctttaatttagaaagaaggatgtgctgagggaccatgtcaaaggctttgtagaagtccaggtagatgacatccaccgcccttcccccatcgaccaaagccatcactccaccacagaaggccaccagattggtcaggcacratccgctcttggtgaagccatgctggctgtctcggatctctttgtctcgtatgtgccttaacgtagcttctaggtggatctgctccatgatcttcccaggcacagaggtgaggctagccggcctgcagttccccaggtcctccttc

SEQ ID NO: 60538 - DNA, 599 bp, Chicken  19866894320078_1
  misc_feature (1)..(93): n is any nucleotide
nnnnnnnnnnnnnnnnnnnnnnnnnnnnnnnnnnnnnnnnnnnnnnnnnnnnnnnnnnnnnnnnnnnnnnnnnnnnnnnnnnnnnnnnnnnnnaaactgaggtttccgaacttcctgtcaccctatctgttaatgttggccattactgaaatagtgttgatgagagactcattgaattgtaatcaaaaagaatacacagctataaatgtgaatgcaattgtagtcttcttgagccagtatcttcacgagcaccacatgcttaatttgaacatcgcatctgccacagggccttacctcatygtattgcactgtagaattctacatttgtaaaatgtattctggccagagacatttcctagtatactgggaaacatagtaccatatgatatttgttagatattttttaaaggaatatgatggtattttcttgaagactatgatttcttttctggacttcaaaaaataaatcaagcgtgctgtggtcaagaataagtcacttgagtatccacagtaactagttgagtaagagtcttgagaagtcattgagaatatgctaaacttactcctgagtcttcatttaagtgttcttttttggtatt

SEQ ID NO: 60539 - DNA, 553 bp, Chicken  19866894320078_2
agaattctacatttgtaaaatgtattctggccagagacatttcctagtatactgggaaacatagtaccatatgatatttgttagatattttttaaaggaatatgatggtattttcttgaagactatgatttcttttctggacttcaaaaaataaatcaagcgtgctgtggtcaagaataagtcacttgagtatccacagtaactagttgagtaagagtcttgagaagtcattgagaatatgctaaacttactcctgagtcttcatttaagtgttcttttttggtattattattttttttwaagatcatttacctgatcatgcagtgggaaatagagcgttatattctacttaatgctgatccacattcagggacaatcaaagatagtgaaacagatcaagaatatcattactctaagttcaccttcaagagataggatgtggctttccaatgtattattctttcttcccccttgaaagatatttatttacttctgttatggtacttttgctgtatcggttttatatatcatttatatttttagtatttattaa

SEQ ID NO: 60540 - DNA, 599 bp, Chicken  19866894320084_1
  misc_feature (1)..(82): n is any nucleotide
nnnnnnnnnnnnnnnnnnnnnnnnnnnnnnnnnnnnnnnnnnnnnnnnnnnnnnnnnnnnnnnnnnnnnnnnnnnnnnnnnntgtttatgcttttgagaatgaggaaatccttggagttttcttagtgcggttgagtgctgcggtagcctgtcaggtgagctgggaagccgaggctccaaagtgctttctttgctgtagggttcagctgccgtttttgggccaggcttgctgcagtgagcgtgggctgtgggctggggagatgcttgtgctgcgaggcgctggcaggcgggtgtagggcygggcgstgttgggctgtgcgcggatgtttgcccgcgggagctgtwcwacacgggctgcatgctaatagcctgggtcacgggcaccagggagagcttaactcctgagtacttggagggatttgaaaggatggcagcctgcagtactgcaagtcatgtgctttcttcrctgctcacacctcggaggaggagatgctttggttagagtgatgcagctccgctgtgtgtttttttatttgagagacagcttgataggaaaaaggaggaggaatgagttagaatttgtgcaacatarccctctg

SEQ ID NO: 60541 - DNA, 599 bp, Chicken  19866894320084_2
  misc_feature (1)..(76): n is any nucleotide
nnnnnnnnnnnnnnnnnnnnnnnnnnnnnnnnnnnnnnnnnnnnnnnnnnnnnnnnnnnnnnnnnnnnnnnnnnnntgtttatgcttttgagaatgaggaaatccttggagttttcttagtgcggttgagtgctgcggtagcctgtcaggtgagctgggaagccgaggctccaaagtgctttctttgctgtagggttcagctgccgtttttgggccaggcttgctgcagtgagcgtgggctgtgggctggggagatgcttgtgctgcgaggcgctggcaggcgggtgtagggcygggcgstgttgggctgtgcgcggatgtttgcccgcgggagctgtwcwacacgggctgcatgctaatagcctgggtcacgggcaccagggagagcttaactcctgagtacttggagggatttgaaaggatggcagcctgcagtactgcaagtcatgtgctttcttcrctgctcacacctcggaggaggagatgctttggttagagtgatgcagctccgctgtgtgtttttttatttgagagacagcttgataggaaaaaggaggaggaatgagttagaatttgtgcaacatarccctctgagtgct

SEQ ID NO: 60542 - DNA, 599 bp, Chicken  19866894320084_3
  misc_feature (1)..(37): n is any nucleotide
nnnnnnnnnnnnnnnnnnnnnnnnnnnnnnnnnnnnntgtttatgcttttgagaatgaggaaatccttggagttttcttagtgcggttgagtgctgcggtagcctgtcaggtgagctgggaagccgaggctccaaagtgctttctttgctgtagggttcagctgccgtttttgggccaggcttgctgcagtgagcgtgggctgtgggctggggagatgcttgtgctgcgaggcgctggcaggcgggtgtagggcygggcgstgttgggctgtgcgcggatgtttgcccgcgggagctgtwcwacacgggctgcatgctaatagcctgggtcacgggcaccagggagagcttaactcctgagtacttggagggatttgaaaggatggcagcctgcagtactgcaagtcatgtgctttcttcrctgctcacacctcggaggaggagatgctttggttagagtgatgcagctccgctgtgtgtttttttatttgagagacagcttgataggaaaaaggaggaggaatgagttagaatttgtgcaacatarccctctgagtgcttacagcgtacgttaagaaaagcagagacaatcaaagact

SEQ ID NO: 60543 - DNA, 599 bp, Chicken  19866894320084_4
  misc_feature (1)..(35): n is any nucleotide
nnnnnnnnnnnnnnnnnnnnnnnnnnnnnnnnnnntgtttatgcttttgagaatgaggaaatccttggagttttcttagtgcggttgagtgctgcggtagcctgtcaggtgagctgggaagccgaggctccaaagtgctttctttgctgtagggttcagctgccgtttttgggccaggcttgctgcagtgagcgtgggctgtgggctggggagatgcttgtgctgcgaggcgctggcaggcgggtgtagggcygggcgstgttgggctgtgcgcggatgtttgcccgcgggagctgtwcwacacgggctgcatgctaatagcctgggtcacgggcaccagggagagcttaactcctgagtacttggagggatttgaaaggatggcagcctgcagtactgcaagtcatgtgctttcttcrctgctcacacctcggaggaggagatgctttggttagagtgatgcagctccgctgtgtgtttttttatttgagagacagcttgataggaaaaaggaggaggaatgagttagaatttgtgcaacatarccctctgagtgcttacagcgtacgttaagaaaagcagagacaatcaaagacttt

SEQ ID NO: 60544 - DNA, 600 bp, Chicken  19866894320084_5
agccgaggctccaaagtgctttctttgctgtagggttcagctgccgtttttgggccaggcttgctgcagtgagcgtgggctgtgggctggggagatgcttgtgctgcgaggcgctggcaggcgggtgtagggcygggcgstgttgggctgtgcgcggatgtttgcccgcgggagctgtwcwacacgggctgcatgctaatagcctgggtcacgggcaccagggagagcttaactcctgagtacttggagggatttgaaaggatggcagcctgcagtactgcaagtcatgtgctttcttcrctgctcacacctcggaggaggagatgctttggttagagtgatgcagctccgctgtgtgtttttttatttgagagacagcttgataggaaaaaggaggaggaatgagttagaatttgtgcaacatarccctctgagtgcttacagcgtacgttaagaaaagcagagacaatcaaagactttggttggcgtagaaagccattatgcagttacaggattaggtgagggcgatcacgtcccacgctaaatccagatatgctttgtgtcatgtgctgcatcgtacagcacagaaagcaaagtgga

SEQ ID NO: 60545 - DNA, 600 bp, Chicken  19866894320084_6
gtagggcygggcgstgttgggctgtgcgcggatgtttgcccgcgggagctgtwcwacacgggctgcatgctaatagcctgggtcacgggcaccagggagagcttaactcctgagtacttggagggatttgaaaggatggcagcctgcagtactgcaagtcatgtgctttcttcrctgctcacacctcggaggaggagatgctttggttagagtgatgcagctccgctgtgtgtttttttatttgagagacagcttgataggaaaaaggaggaggaatgagttagaatttgtgcaacatarccctctgagtgcttacagcgtacgttaagaaaagcagagacaatcaaagactttggttggcgtagaaagccattatgcagttacaggattaggtgagggcgatcacgtcccacgctaaatccagatatgctttgtgtcatgtgctgcatcgtacagcacagaaagcaaagtggatgagaagctccagtygttgaggtgatacatttttccctktgagcttttcagcagctttgtggatcgtgttttcttaagattagttacccgtgataaatactcagaagtgcataatacaaatttctt

SEQ ID NO: 60546 - DNA, 470 bp, Chicken  19866894320084_7
aggaggagatgctttggttagagtgatgcagctccgctgtgtgtttttttatttgagagacagcttgataggaaaaaggaggaggaatgagttagaatttgtgcaacatarccctctgagtgcttacagcgtacgttaagaaaagcagagacaatcaaagactttggttggcgtagaaagccattatgcagttacaggattaggtgagggcgatcacgtcccacgctaaatccagatatgctttgtgtcatgtgctgcatcgtacagcacagaaagcaaagtggatgagaagctccagtygttgaggtgatacatttttccctktgagcttttcagcagctttgtggatcgtgttttcttaagattagttacccgtgataaatactcagaagtgcataatacaaatttctttttaaagagcctggccagcatgctgttttggccagccacccaccctaccaccataggca

SEQ ID NO: 60547 - DNA, 446 bp, Chicken  19866894320084_8
gatgcagctccgctgtgtgtttttttatttgagagacagcttgataggaaaaaggaggaggaatgagttagaatttgtgcaacatarccctctgagtgcttacagcgtacgttaagaaaagcagagacaatcaaagactttggttggcgtagaaagccattatgcagttacaggattaggtgagggcgatcacgtcccacgctaaatccagatatgctttgtgtcatgtgctgcatcgtacagcacagaaagcaaagtggatgagaagctccagtygttgaggtgatacatttttccctktgagcttttcagcagctttgtggatcgtgttttcttaagattagttacccgtgataaatactcagaagtgcataatacaaatttctttttaaagagcctggccagcatgctgttttggccagccacccaccctaccaccataggca

SEQ ID NO: 60548 - DNA, 600 bp, Chicken  19866894320086_1
cacaacgagagcgagccactggtgacactcgttcaaacacagctacaagtgcgacacttgtccaaacacaccagccgacgcacatatgttcactgcacatgcttcggcatacaacgtaaacacgctgggcagcatgctcccatagtctaatatgtgaacagagtgattcagatgcacacaagaacaaaagacacaaaatgcctaaatccagaaatgcttatgatcccaaagcaagggacagggtgcagacctctttttcacccttcacctgggtatatctagccagggatacctgaactygtggggctttgaggtgagaggaaaccaggtggcagagaagggagacagagcaaaaaaaggagtagtgaagagaaggacggttcagagtctgtgatatgggaaagagctgaagggtgtctatgcctggggaacaacgttcaaagaacacttgggttgcgaaagttgtgtccagcaaagcgtgcttcatcgccaagctcctcctcaatcctgcaggaaagagagacagcaaaagtcaggaaagacactagagtacctgagggataacatacggccaggaagctgaaatgggacagaggggcc

SEQ ID NO: 60549 - DNA, 600 bp, Chicken  19866894320091_1
attcagtcctacttcacagtccgtttattttacatgtttatttaacatctgcatgaatcaaggcaatattatttcacaaaaacagaaaacttggcttcgcttattcaaacatttggacaaggaaggaagaaagcccagcacaggatttggctggttaaagaataggaatatgcagttattaccctgctgtcagtgattcaaaaatcagcctgattggaggaactggctgtgattgccatctggcagctgtttggagaacctccctagaagaagtcacagccccagctcagatccaagcarataagaggacagggagcaaggcaatgcattgacagttcctgcagaaygagggaaccaagytggggaacrcgtggamtggtmgagatgtgaatgtcacagyacaacgctgcttatacagctcttgtggcacccatatgggacagtggcaactcccaacatgtttaagtgcccagaatgacaaacacccagaatgagggctggtcagggaaatactgctcaatgctgggtggtaccaccaacagcacrgggtcataaaccagagctgccaggttctttaaagccaattggggttgctggttt

SEQ ID NO: 60550 - DNA, 600 bp, Chicken  19866894320091_2
tctgcatgaatcaaggcaatattatttcacaaaaacagaaaacttggcttcgcttattcaaacatttggacaaggaaggaagaaagcccagcacaggatttggctggttaaagaataggaatatgcagttattaccctgctgtcagtgattcaaaaatcagcctgattggaggaactggctgtgattgccatctggcagctgtttggagaacctccctagaagaagtcacagccccagctcagatccaagcarataagaggacagggagcaaggcaatgcattgacagttcctgcagaaygagggaaccaagytggggaacrcgtggamtggtmgagatgtgaatgtcacagyacaacgctgcttatacagctcttgtggcacccatatgggacagtggcaactcccaacatgtttaagtgcccagaatgacaaacacccagaatgagggctggtcagggaaatactgctcaatgctgggtggtaccaccaacagcacrgggtcataaaccagagctgccaggttctttaaagccaattggggttgctggtttatgctccctcctccaagtaacttttaacactggggcagctgcagcag

SEQ ID NO: 60551 - DNA, 600 bp, Chicken  19866894320091_3
aggcaatattatttcacaaaaacagaaaacttggcttcgcttattcaaacatttggacaaggaaggaagaaagcccagcacaggatttggctggttaaagaataggaatatgcagttattaccctgctgtcagtgattcaaaaatcagcctgattggaggaactggctgtgattgccatctggcagctgtttggagaacctccctagaagaagtcacagccccagctcagatccaagcarataagaggacagggagcaaggcaatgcattgacagttcctgcagaaygagggaaccaagytggggaacrcgtggamtggtmgagatgtgaatgtcacagyacaacgctgcttatacagctcttgtggcacccatatgggacagtggcaactcccaacatgtttaagtgcccagaatgacaaacacccagaatgagggctggtcagggaaatactgctcaatgctgggtggtaccaccaacagcacrgggtcataaaccagagctgccaggttctttaaagccaattggggttgctggtttatgctccctcctccaagtaacttttaacactggggcagctgcagcagaagctttactttt

SEQ ID NO: 60552 - DNA, 600 bp, Chicken  19866894320091_4
tatttcacaaaaacagaaaacttggcttcgcttattcaaacatttggacaaggaaggaagaaagcccagcacaggatttggctggttaaagaataggaatatgcagttattaccctgctgtcagtgattcaaaaatcagcctgattggaggaactggctgtgattgccatctggcagctgtttggagaacctccctagaagaagtcacagccccagctcagatccaagcarataagaggacagggagcaaggcaatgcattgacagttcctgcagaaygagggaaccaagytggggaacrcgtggamtggtmgagatgtgaatgtcacagyacaacgctgcttatacagctcttgtggcacccatatgggacagtggcaactcccaacatgtttaagtgcccagaatgacaaacacccagaatgagggctggtcagggaaatactgctcaatgctgggtggtaccaccaacagcacrgggtcataaaccagagctgccaggttctttaaagccaattggggttgctggtttatgctccctcctccaagtaacttttaacactggggcagctgcagcagaagctttacttttccagatgtt

SEQ ID NO: 60553 - DNA, 600 bp, Chicken  19866894320091_5
caaaaacagaaaacttggcttcgcttattcaaacatttggacaaggaaggaagaaagcccagcacaggatttggctggttaaagaataggaatatgcagttattaccctgctgtcagtgattcaaaaatcagcctgattggaggaactggctgtgattgccatctggcagctgtttggagaacctccctagaagaagtcacagccccagctcagatccaagcarataagaggacagggagcaaggcaatgcattgacagttcctgcagaaygagggaaccaagytggggaacrcgtggamtggtmgagatgtgaatgtcacagyacaacgctgcttatacagctcttgtggcacccatatgggacagtggcaactcccaacatgtttaagtgcccagaatgacaaacacccagaatgagggctggtcagggaaatactgctcaatgctgggtggtaccaccaacagcacrgggtcataaaccagagctgccaggttctttaaagccaattggggttgctggtttatgctccctcctccaagtaacttttaacactggggcagctgcagcagaagctttacttttccagatgtttccaagc

SEQ ID NO: 60554 - DNA, 600 bp, Chicken  19866894320091_6
acagaaaacttggcttcgcttattcaaacatttggacaaggaaggaagaaagcccagcacaggatttggctggttaaagaataggaatatgcagttattaccctgctgtcagtgattcaaaaatcagcctgattggaggaactggctgtgattgccatctggcagctgtttggagaacctccctagaagaagtcacagccccagctcagatccaagcarataagaggacagggagcaaggcaatgcattgacagttcctgcagaaygagggaaccaagytggggaacrcgtggamtggtmgagatgtgaatgtcacagyacaacgctgcttatacagctcttgtggcacccatatgggacagtggcaactcccaacatgtttaagtgcccagaatgacaaacacccagaatgagggctggtcagggaaatactgctcaatgctgggtggtaccaccaacagcacrgggtcataaaccagagctgccaggttctttaaagccaattggggttgctggtttatgctccctcctccaagtaacttttaacactggggcagctgcagcagaagctttacttttccagatgtttccaagccagct

SEQ ID NO: 60555 - DNA, 600 bp, Chicken  19866894320091_7
ttattcaaacatttggacaaggaaggaagaaagcccagcacaggatttggctggttaaagaataggaatatgcagttattaccctgctgtcagtgattcaaaaatcagcctgattggaggaactggctgtgattgccatctggcagctgtttggagaacctccctagaagaagtcacagccccagctcagatccaagcarataagaggacagggagcaaggcaatgcattgacagttcctgcagaaygagggaaccaagytggggaacrcgtggamtggtmgagatgtgaatgtcacagyacaacgctgcttatacagctcttgtggcacccatatgggacagtggcaactcccaacatgtttaagtgcccagaatgacaaacacccagaatgagggctggtcagggaaatactgctcaatgctgggtggtaccaccaacagcacrgggtcataaaccagagctgccaggttctttaaagccaattggggttgctggtttatgctccctcctccaagtaacttttaacactggggcagctgcagcagaagctttacttttccagatgtttccaagccagctaccatcccctgcctctaaa

SEQ ID NO: 60556 - DNA, 600 bp, Chicken  19866894320091_8
ctgtttggagaacctccctagaagaagtcacagccccagctcagatccaagcarataagaggacagggagcaaggcaatgcattgacagttcctgcagaaygagggaaccaagytggggaacrcgtggamtggtmgagatgtgaatgtcacagyacaacgctgcttatacagctcttgtggcacccatatgggacagtggcaactcccaacatgtttaagtgcccagaatgacaaacacccagaatgagggctggtcagggaaatactgctcaatgctgggtggtaccaccaacagcacrgggtcataaaccagagctgccaggttctttaaagccaattggggttgctggtttatgctccctcctccaagtaacttttaacactggggcagctgcagcagaagctttacttttccagatgtttccaagccagctaccatcccctgcctctaaatcaaggttggatgggtttttggaagagatgcttttgtcaaatgcaagttattgggttcaataagggatggaattctctggcctgtgctgtacaagaggtcacagctaagatgatttaaagtcatttttggtcctgatatctatgga

SEQ ID NO: 60557 - DNA, 600 bp, Chicken  19866894320092_1
ttatgtggctgttggtgcaaaggtagttggatctgtaggacttggttttgatccctactttgtcttcctttgatatgatcaaagggaatggcctcaagctgttccacgggaggtttacgttggatattagcaaaaatttctcctctgaaagagtggtgatgcattggcatgggctgcccagggaggtggtagagtcaccatacctggaggtgttcaagaaccatggggatgtggcactgagggacgtcatttagcgggcaatactggtggtagctggacagttggactgttggactggaytgatcttagaggccttttgtggccttaatgatactatgattcctattggaaacacacctcatgccaccacctcttggcagtagataagaaatcttcatagtgstttggactaacacccgggtgcctgtccttkcagaggggaaggaacaggaggctgccttgggtcaagtcatctggcccaacgacacgtgcaatcacagaagaacatggagcacatctttccatcagcaatggcttgtgttggatcaggcccaggatgcatcatcgcggctgtgatgtgtggtaggattcttttgtata

SEQ ID NO: 60558 - DNA, 600 bp, Chicken  19866894320092_2
ccacgggaggtttacgttggatattagcaaaaatttctcctctgaaagagtggtgatgcattggcatgggctgcccagggaggtggtagagtcaccatacctggaggtgttcaagaaccatggggatgtggcactgagggacgtcatttagcgggcaatactggtggtagctggacagttggactgttggactggaytgatcttagaggccttttgtggccttaatgatactatgattcctattggaaacacacctcatgccaccacctcttggcagtagataagaaatcttcatagtgstttggactaacacccgggtgcctgtccttkcagaggggaaggaacaggaggctgccttgggtcaagtcatctggcccaacgacacgtgcaatcacagaagaacatggagcacatctttccatcagcaatggcttgtgttggatcaggcccaggatgcatcatcgcggctgtgatgtgtggtaggattcttttgtatacacaactgtgttaccaagtaaggtttcttttcagaatggaactggttgtgcagcaaggctgtaggcttacagggaggggcaacataagctggtcagtgttttt

SEQ ID NO: 60559 - DNA, 600 bp, Chicken  19866894320092_3
aaatttctcctctgaaagagtggtgatgcattggcatgggctgcccagggaggtggtagagtcaccatacctggaggtgttcaagaaccatggggatgtggcactgagggacgtcatttagcgggcaatactggtggtagctggacagttggactgttggactggaytgatcttagaggccttttgtggccttaatgatactatgattcctattggaaacacacctcatgccaccacctcttggcagtagataagaaatcttcatagtgstttggactaacacccgggtgcctgtccttkcagaggggaaggaacaggaggctgccttgggtcaagtcatctggcccaacgacacgtgcaatcacagaagaacatggagcacatctttccatcagcaatggcttgtgttggatcaggcccaggatgcatcatcgcggctgtgatgtgtggtaggattcttttgtatacacaactgtgttaccaagtaaggtttcttttcagaatggaactggttgtgcagcaaggctgtaggcttacagggaggggcaacataagctggtcagtgtttttcaagctagaaacccccacccctttcccctt

SEQ ID NO: 60560 - DNA, 600 bp, Chicken  19866894320094_1
aacgagacaagagacattttgcaccacgttcacttggagcttttgttactgcagcaccaattcaaagttctcatgcagtgtaacaatttcttctccttcagcatatgtaacttgttatattttttattaagtgccattgccaaaatggctatatggtgtgctgcttgaaaatttaatttacacagtctctgtgacagaaaattacatactagccatttttaaagtttccaaattctacttattgatgtacctagacaagtatccgttacaaagcttattagacaaatgaaatagcttttwtttwtttttttttcccatcagcattgtgataaagaaaagattaaaagaacacatggctagctgggcactttgtcaagatgtttcttcagtgttactctaaagaattgtttcagtcaawttttttgtcagtaaatgaaagaatgttgaaaattcgcatgaaaagtctccagaacactatatattccttacctgtgggcagtctttgatgtagtgtcccttgttaaagcagaggtggcacaggtagttgggaggtggcctcttgctgggttttctggcttctgaagaaagggacaggtcaga

SEQ ID NO: 60561 - DNA, 600 bp, Chicken  19866894320094_2
agacaagagacattttgcaccacgttcacttggagcttttgttactgcagcaccaattcaaagttctcatgcagtgtaacaatttcttctccttcagcatatgtaacttgttatattttttattaagtgccattgccaaaatggctatatggtgtgctgcttgaaaatttaatttacacagtctctgtgacagaaaattacatactagccatttttaaagtttccaaattctacttattgatgtacctagacaagtatccgttacaaagcttattagacaaatgaaatagcttttwtttwtttttttttcccatcagcattgtgataaagaaaagattaaaagaacacatggctagctgggcactttgtcaagatgtttcttcagtgttactctaaagaattgtttcagtcaawttttttgtcagtaaatgaaagaatgttgaaaattcgcatgaaaagtctccagaacactatatattccttacctgtgggcagtctttgatgtagtgtcccttgttaaagcagaggtggcacaggtagttgggaggtggcctcttgctgggttttctggcttctgaagaaagggacaggtcagaaaaa

SEQ ID NO: 60562 - DNA, 600 bp, Chicken  19866894320094_3
attttttattaagtgccattgccaaaatggctatatggtgtgctgcttgaaaatttaatttacacagtctctgtgacagaaaattacatactagccatttttaaagtttccaaattctacttattgatgtacctagacaagtatccgttacaaagcttattagacaaatgaaatagcttttwtttwtttttttttcccatcagcattgtgataaagaaaagattaaaagaacacatggctagctgggcactttgtcaagatgtttcttcagtgttactctaaagaattgtttcagtcaawttttttgtcagtaaatgaaagaatgttgaaaattcgcatgaaaagtctccagaacactatatattccttacctgtgggcagtctttgatgtagtgtcccttgttaaagcagaggtggcacaggtagttgggaggtggcctcttgctgggttttctggcttctgaagaaagggacaggtcagaaaaatgctcagtgagggaacttaacccatccactatgttgttaagagagccataaggagatgcgctcttatacagactgctgctcagagcctgcaaaagaaaagaaaattttacatga

SEQ ID NO: 60563 - DNA, 600 bp, Chicken  19866894320107_1
ggcagcctgttccaacctattttgttaatagatttcatttgtttctttgcacagcggctgaaggtgtgtgttgtattaacacaatacacactatagtaacaggggaacaatgtggtgtggatgggagagaaatgggagggaaagttggagtgcagcatcaggggatgtgtgaaggaagtgtgtgctctacttaggtcagctcagaacagctgtctcctctctttcacatcatttgaagacatgcatgcatttaagcttgtcttgggtaatctttttggctactctgtcacctatggagcycagtaagagcaggccaagtcttgcataacggcagtctgttctcatcatcyccagcgtgactggcacttccgacagcacagcccttcgaccgggcagattgcatgatggagagctcagtggaaatcctccgagctgtcagcatacgtgctcattatggatgtcacagataacaaacaaatcaaagtgattgtaggtagctactgtaattaattatccacgtggyaggcaatttctatggcaaactgtattactctatctgatgaaagttctttgtctatgattcttgctgttgaaaaaaag

SEQ ID NO: 60564 - DNA, 600 bp, Chicken  19866894320107_2
acagcggctgaaggtgtgtgttgtattaacacaatacacactatagtaacaggggaacaatgtggtgtggatgggagagaaatgggagggaaagttggagtgcagcatcaggggatgtgtgaaggaagtgtgtgctctacttaggtcagctcagaacagctgtctcctctctttcacatcatttgaagacatgcatgcatttaagcttgtcttgggtaatctttttggctactctgtcacctatggagcycagtaagagcaggccaagtcttgcataacggcagtctgttctcatcatcyccagcgtgactggcacttccgacagcacagcccttcgaccgggcagattgcatgatggagagctcagtggaaatcctccgagctgtcagcatacgtgctcattatggatgtcacagataacaaacaaatcaaagtgattgtaggtagctactgtaattaattatccacgtggyaggcaatttctatggcaaactgtattactctatctgatgaaagttctttgtctatgattcttgctgttgaaaaaaagacatgtttgcagcaggcagaaatttagaaaggtagaaaacatgagacatc

SEQ ID NO: 60565 - DNA, 600 bp, Chicken  19866894320107_3
tcacatcatttgaagacatgcatgcatttaagcttgtcttgggtaatctttttggctactctgtcacctatggagcycagtaagagcaggccaagtcttgcataacggcagtctgttctcatcatcyccagcgtgactggcacttccgacagcacagcccttcgaccgggcagattgcatgatggagagctcagtggaaatcctccgagctgtcagcatacgtgctcattatggatgtcacagataacaaacaaatcaaagtgattgtaggtagctactgtaattaattatccacgtggyaggcaatttctatggcaaactgtattactctatctgatgaaagttctttgtctatgattcttgctgttgaaaaaaagacatgtttgcagcaggcagaaatttagaaaggtagaaaacatgagacatctgggcactgaggaaagctttgaatgctatgtaactgtatatattcacatacataacgtattcttcttacagctgataaaaagaaaccccttctttacacagttctcatgtgatttttaaaacatacttctctgtacactcgtgaccgatacataaatatgccactgtgcctca

SEQ ID NO: 60566 - DNA, 600 bp, Chicken  19866894320107_4
tgttttcatggagctgccttcatgtaagtgcagaaacagaactctttgctttagaactgctgcatcactgcagctcaaattccatataagtactactatgtaattatttctacttgctcagaatgtgtgtgtgagagagagatagaatgtggaataataaggtacatagaataaaatgcagcagatggagtaaaatatatctcagctatgtaggtagttgagaaccattttaaccaggtttctccaaatcatttatgtgcttgtgaaatcaggatctctaacaaaaacctgcttggcttytcaacagtttcaaagtttccaaaggttttatttgaatttgccctccaacttacgtcaaagattrgtccataaaataggacaggtgatttgttttccttaaacaaagcttttgcacagagaagatttagactgctcctccttagactctggaagaaatgcttttcttacacatttagtacaaaatcaatacaactctcattcaaaagccattacagtcagtgaagaggctttcttcacactgatggtgtttggcttcagacagtgcttttgttacacagttcagagtacagatctgttttt

SEQ ID NO: 60567 - DNA, 600 bp, Chicken  19866894320107_5
tcactgcagctcaaattccatataagtactactatgtaattatttctacttgctcagaatgtgtgtgtgagagagagatagaatgtggaataataaggtacatagaataaaatgcagcagatggagtaaaatatatctcagctatgtaggtagttgagaaccattttaaccaggtttctccaaatcatttatgtgcttgtgaaatcaggatctctaacaaaaacctgcttggcttytcaacagtttcaaagtttccaaaggttttatttgaatttgccctccaacttacgtcaaagattrgtccataaaataggacaggtgatttgttttccttaaacaaagcttttgcacagagaagatttagactgctcctccttagactctggaagaaatgcttttcttacacatttagtacaaaatcaatacaactctcattcaaaagccattacagtcagtgaagaggctttcttcacactgatggtgtttggcttcagacagtgcttttgttacacagttcagagtacagatctgtttttgtctccttgttaatacattctctatctagttctgttctgcttgcagaacaggcagaacaatgca

SEQ ID NO: 60568 - DNA, 600 bp, Chicken  19866894320108_1
ttcaaatatgcactacacaaaataaattctagttgacttgttcactcacacagacagatgaataagaagagagatcaagatttctttggttctactagcaagccatgaatgtaaataagaaaattgtaaataagagaattctaataagaaaatgtattttaaatccatagagaatgaaaagaaagaagaaatagaaaggaaaagaaagaaagaaataggtcctgttaattaatttattagcttttaatgcactttgatatttttaatccctgttttttaattgcattcccaaacatatayaaacaagactggctctcctgtctgcatttaatctgattcaatattatttgtctcccattttcttgacttatgttctttttttctttcctcatctcatattctgacttagaatttctaattactttctctctctctctttatttgttaatttacattttactccaaatagaaaattggtcaggagttagttccttaaagagacctgggatcagtaaagacaatggggatttggtttttacaccttcaatagacagtgagtgtctccaatagcttactggagctcaactttgggcacatggg

SEQ ID NO: 60569 - DNA, 600 bp, Chicken  19866894320110_1
tagtctaaacaggatgaagatatttctgccagccgttttgaagataatgaagagctgaggtactccttaagatcaatagagagacatgctccttgggtgcgacatattttcattgtcactaatgggcagattccttcctggcttaacctggataatccccggataaccatagtgacccaccaggtaaaaacaaaaaacaaacctccagagataagcaacaaaaaacctccaaccctggggggagaaaaagcaaagcaacaaaaaagccacaaaaccaaccaaaaaaaccctacccaacarcaataaagaaaaaagcacaaaagtaccattaataaagattctgttctgaactgcagttatcccctttcagttgaaggctgcttttattaggaacgatcaactctcccccttcccatgtactgttttgttaaaccccaatgttttggtacttcagatacagatatctcaggttaagcaggtaactgcagatatatcaagccttcactgagttcatttctccaaatactgagatttcagccaatgtgtactgatttccttataaaagtatatttattaaaaaacaacaacaaaaaagtgcgg

SEQ ID NO: 60570 - DNA, 600 bp, Chicken  19866894320117_1
tgcaggtgggtagcaaggtgttggtggtgggaggcagcaggggaggcctctgcaaggacctatcactgcccaaagttgagcccacaacaagtggggcacctcgggggaaatgtagccaaaaagggcagaaatgctggacagcattctgtgagaaagaggagtgaggaaaaaaagtgtgagaaatagctctgtaggcaccaaggttggtgaagaaggaggggaggacactcaccccctgctctgcttagtgaagagaagaggagtcagggatgaaagagtggagatgagtcagggaagggrggaggaaaggagttcttttaatatttgcctttttatttttcactaccaaaccagtaatcacatatttattttaatcagacgtgtgctaagacgtgtgctaattttcctcaagttaagtctgttttgcccacaaagtcaattagtaagcaacccccctgcctcatatctccacccatgagctttctcattcctctccttcctattttctccacagtcccactgtgaggggtggtaagtgagaggccagayggagttgagmtgccaactgaggcttacccaccacacactccttgacatgag

SEQ ID NO: 60571 - DNA, 600 bp, Chicken  19866894320117_2
gaagagaagaggagtcagggatgaaagagtggagatgagtcagggaagggrggaggaaaggagttcttttaatatttgcctttttatttttcactaccaaaccagtaatcacatatttattttaatcagacgtgtgctaagacgtgtgctaattttcctcaagttaagtctgttttgcccacaaagtcaattagtaagcaacccccctgcctcatatctccacccatgagctttctcattcctctccttcctattttctccacagtcccactgtgaggggtggtaagtgagaggccagayggagttgagmtgccaactgaggcttacccaccacacactccttgacatgagcctctatgaaaccaaggcattccctccaggaaaaagagtaatgtcaagaaagtaattgaaatgataagaaatataagactgcagtggaacatctagacattatcattactttttgaactgtcaaatggcaataaatctgsaagggatttcccatagctttaaatgaatcggacaggatcatctctgtctcatatgatcttatgctactgctgtctgtggttggataaaacagtaactagctgtatgaaa

SEQ ID NO: 60572 - DNA, 600 bp, Chicken  19866894320117_3
ggagtcagggatgaaagagtggagatgagtcagggaagggrggaggaaaggagttcttttaatatttgcctttttatttttcactaccaaaccagtaatcacatatttattttaatcagacgtgtgctaagacgtgtgctaattttcctcaagttaagtctgttttgcccacaaagtcaattagtaagcaacccccctgcctcatatctccacccatgagctttctcattcctctccttcctattttctccacagtcccactgtgaggggtggtaagtgagaggccagayggagttgagmtgccaactgaggcttacccaccacacactccttgacatgagcctctatgaaaccaaggcattccctccaggaaaaagagtaatgtcaagaaagtaattgaaatgataagaaatataagactgcagtggaacatctagacattatcattactttttgaactgtcaaatggcaataaatctgsaagggatttcccatagctttaaatgaatcggacaggatcatctctgtctcatatgatcttatgctactgctgtctgtggttggataaaacagtaactagctgtatgaaaaaaaaagtca

SEQ ID NO: 60573 - DNA, 600 bp, Chicken  19866894320117_4
tagtaagcaacccccctgcctcatatctccacccatgagctttctcattcctctccttcctattttctccacagtcccactgtgaggggtggtaagtgagaggccagayggagttgagmtgccaactgaggcttacccaccacacactccttgacatgagcctctatgaaaccaaggcattccctccaggaaaaagagtaatgtcaagaaagtaattgaaatgataagaaatataagactgcagtggaacatctagacattatcattactttttgaactgtcaaatggcaataaatctgsaagggatttcccatagctttaaatgaatcggacaggatcatctctgtctcatatgatcttatgctactgctgtctgtggttggataaaacagtaactagctgtatgaaaaaaaaagtcaatttcatgaaattcaatcacagattttcttcacagctaaaaattcctgatttaatataaaggaagaattttttttttcttaraagtattgtaagcaaaaatacatatctcaaaaatatttagaaaataatttgaagagtaactaaatcttcatgaagctctttcagtttatttttgcaaar

SEQ ID NO: 60574 - DNA, 600 bp, Chicken  19866894320117_5
tgtcaagaaagtaattgaaatgataagaaatataagactgcagtggaacatctagacattatcattactttttgaactgtcaaatggcaataaatctgsaagggatttcccatagctttaaatgaatcggacaggatcatctctgtctcatatgatcttatgctactgctgtctgtggttggataaaacagtaactagctgtatgaaaaaaaaagtcaatttcatgaaattcaatcacagattttcttcacagctaaaaattcctgatttaatataaaggaagaattttttttttcttaraagtattgtaagcaaaaatacatatctcaaaaatatttagaaaataatttgaagagtaactaaatcttcatgaagctctttcagtttatttttgcaaarttcagaaatgcttcttttttctatctccaaaatgttacatttttcctgagaaataagccgaattctggcataaaacctcatggaaatcaagagatgttgtgcacagatgtaaagtgagacacaactcaaagcctgcatccttgatgagtttgtttctttcttacagaagcttcatgcactgaaggagatcctttttattat

SEQ ID NO: 60575 - DNA, 600 bp, Chicken  19866894320117_6
aagggatttcccatagctttaaatgaatcggacaggatcatctctgtctcatatgatcttatgctactgctgtctgtggttggataaaacagtaactagctgtatgaaaaaaaaagtcaatttcatgaaattcaatcacagattttcttcacagctaaaaattcctgatttaatataaaggaagaattttttttttcttaraagtattgtaagcaaaaatacatatctcaaaaatatttagaaaataatttgaagagtaactaaatcttcatgaagctctttcagtttatttttgcaaarttcagaaatgcttcttttttctatctccaaaatgttacatttttcctgagaaataagccgaattctggcataaaacctcatggaaatcaagagatgttgtgcacagatgtaaagtgagacacaactcaaagcctgcatccttgatgagtttgtttctttcttacagaagcttcatgcactgaaggagatcctttttattatttattattattattcagatacacgataacgcgaagctggagtttgtgtttattttcttcttcacatgtgaaatgaaagtctttcttcatccacataaaa

SEQ ID NO: 60576 - DNA, 492 bp, Chicken  19866894320119_1
ctgcccagtaaaaacagaactcacttccgagtcaaccccaaagaccttgcttggaacacaagcctctgttagagaagtttccattcttctgtatatctgcaaaagcatttggtcaaagcgtttgcaatgcaacaagtctttaagcaaagaagtgtcatttgttcctctcctacttgtcatttccccatgcaggtggctgctgtgccagtacctccacagaatgctgttctatgagagtatggaggtgcattaaatcacctctctgtaacagctgatgtgcccctgctggatttattcacrtatgctattkatgtacagcatcgttcagagataggagaaattttcaccctagctgaagattctagcactacaaagggcaaacacattctgatcttctactcaacctcctccaaaatatttcaatatgtagctttgattggtcttaaaaacattgagcaagaaggcaaaatgacaccattcttaggaaaaaaa

SEQ ID NO: 60577 - DNA, 482 bp, Chicken  19866894320119_2
aaaacagaactcacttccgagtcaaccccaaagaccttgcttggaacacaagcctctgttagagaagtttccattcttctgtatatctgcaaaagcatttggtcaaagcgtttgcaatgcaacaagtctttaagcaaagaagtgtcatttgttcctctcctacttgtcatttccccatgcaggtggctgctgtgccagtacctccacagaatgctgttctatgagagtatggaggtgcattaaatcacctctctgtaacagctgatgtgcccctgctggatttattcacrtatgctattkatgtacagcatcgttcagagataggagaaattttcaccctagctgaagattctagcactacaaagggcaaacacattctgatcttctactcaacctcctccaaaatatttcaatatgtagctttgattggtcttaaaaacattgagcaagaaggcaaaatgacaccattcttaggaaaaaaa

SEQ ID NO: 60578 - DNA, 600 bp, Chicken  19866894320123_1
accatccctgtgagccagctgctgtgccccaggcacacattccctgcacggccaagccctgcctgtgtctgacggaggcgatgcggagttggcatgaaaatcaaaagcagcttcaaaatgtactctggctttttcaagtacaaactaatatttacctgcgagtctacttccctccttgttccctctgcttggcaagctctagggctgtttctgttctaagtttcacacttcagtatgtatccagtgaggttcccagggcgtgaatattaaatattctttttattttggagagaggggggrggtggatgacaacaggaaagctgcttgaaatgtctctctgttgcctaaaggtgagttttgatgcaattggtattttcagcagttcgtgatggacacctcatggaaaacttttggaaaacatctcatttaggaaccactgtctgctgtggtggttgaatggggacttgtttttgtgttggtcgttggtttttttttcctggactgttctttaatcacttgcctcaagtttttattactactgacatttacataaaaataaggtatttgtttatgttgaatgcggctgttctggccgcttgc

SEQ ID NO: 60579 - DNA, 600 bp, Chicken  19866894320123_2
ggctgttctggccgcttgctttttcctgctcctctttgtgtcataccggctggatttccacacaagaaatagtaacaactaaacctttacaggaaaggtagtgtgcacgcacatgctggagatcctgtttggatgataagactgacgtagcacgatatggagacgtgctctgccgagctgttattcatgcccctctgctgcgctcccacacatcctgcattagtcagagctaagcactgaaattatacatccctgttcccagccgtatcgccacgcagggctggtacagcttcaggcagratgaagggtggggggaaaacatctgtgcttgcactgctttgcttcagatagagtgaagcagatgtctcgtggggaaaatggtgcgtcctggctagagggagcagcactgtgtgcaagtcaggcttgggtgagcaaaggaattcctggtgccttgcagcattggaggaaatactaagattgaggattattattgtatttatttatttattcaaaataacctgttatgtaaggatgtagaactgggcaggatagttatgtggactgcaggtggctggggcagtgacgttctcttgctgcatg

SEQ ID NO: 60580 - DNA, 600 bp, Chicken  19866894320123_3
agagtgaagcagatgtctcgtggggaaaatggtgcgtcctggctagagggagcagcactgtgtgcaagtcaggcttgggtgagcaaaggaattcctggtgccttgcagcattggaggaaatactaagattgaggattattattgtatttatttatttattcaaaataacctgttatgtaaggatgtagaactgggcaggatagttatgtggactgcaggtggctggggcagtgacgttctcttgctgcatggcacgagtgctgtgctgctgagctgtgagtggcagcctgagcaaactcygtcactgatgtgcagatttactagaagaaaggaagctctcaggtaggccacatccacagcttcctctttttgctgttaagtgcttttggtgggaaaaaataaatatttcagctgaagcgttttccgtctctctggcacaaataaccctcttctcttactgtaccaaagcatcccacaaaatagaactaacaaccccagagcccatagcacacccttcccttgtccctgccctcctcagctgtgctgtaaaacctgattatgagagggagaagttcacaaagctgttcccccccacgtata

SEQ ID NO: 60581 - DNA, 600 bp, Chicken  19866894320125_1
catttgtcctgctgtggagcagcgagaacgttccgtgtggaacgttccatgtggagaatgaatccctgtggtgggtcctgccctgcagcacagggaagtttcagaattcaaagggaagaccaggatccctgctttgctgaggctggaagcgggtttgcacaacatctgtggaaggattctgcagctgatgaaaagaggcatgggtttgggctccgagaagtgtgatgaatgcagagggtagagccccatcaaacgtataggtggataaacactatcaatgttttgttttgttttgttttwaaaaaaagtgtatggagaatgaagtatagaaaatcacygactttgtcatcaccatttgaaattccagtaggaaaacatgttgctctttcaaaacacagaagacttcaaagggttcaatctgtcactagagcagaaaatgccaacgcaagcatcactgctttgccgtttgccatggaagctccttccaatttggctggccttggccttgcagggtagygggagccaaggaactttcccctttctcgcaggtccaggggtctgagccaagctaggagggagagggcttttttgtcttcctaa

SEQ ID NO: 60582 - DNA, 600 bp, Chicken  19866894320125_2
ggaacgttccatgtggagaatgaatccctgtggtgggtcctgccctgcagcacagggaagtttcagaattcaaagggaagaccaggatccctgctttgctgaggctggaagcgggtttgcacaacatctgtggaaggattctgcagctgatgaaaagaggcatgggtttgggctccgagaagtgtgatgaatgcagagggtagagccccatcaaacgtataggtggataaacactatcaatgttttgttttgttttgttttwaaaaaaagtgtatggagaatgaagtatagaaaatcacygactttgtcatcaccatttgaaattccagtaggaaaacatgttgctctttcaaaacacagaagacttcaaagggttcaatctgtcactagagcagaaaatgccaacgcaagcatcactgctttgccgtttgccatggaagctccttccaatttggctggccttggccttgcagggtagygggagccaaggaactttcccctttctcgcaggtccaggggtctgagccaagctaggagggagagggcttttttgtcttcctaagacatttggttttcagttttgcgaaacctcaagaattt

SEQ ID NO: 60583 - DNA, 600 bp, Chicken  19866894320125_3
aagtgtgatgaatgcagagggtagagccccatcaaacgtataggtggataaacactatcaatgttttgttttgttttgttttwaaaaaaagtgtatggagaatgaagtatagaaaatcacygactttgtcatcaccatttgaaattccagtaggaaaacatgttgctctttcaaaacacagaagacttcaaagggttcaatctgtcactagagcagaaaatgccaacgcaagcatcactgctttgccgtttgccatggaagctccttccaatttggctggccttggccttgcagggtagygggagccaaggaactttcccctttctcgcaggtccaggggtctgagccaagctaggagggagagggcttttttgtcttcctaagacatttggttttcagttttgcgaaacctcaagaatttaaaaaaaatagctaatgaagttcacaaaacctcaaattctactgcatttactcattccccccactacattaagttagtctttatatatgtggctgtgcaatgcattttccacaggactttgaacaggactggcataattgtattcaggaatctgctctggstttacacttgaagaggag

SEQ ID NO: 60584 - DNA, 600 bp, Chicken  19866894320125_4
ttggccttgcagggtagygggagccaaggaactttcccctttctcgcaggtccaggggtctgagccaagctaggagggagagggcttttttgtcttcctaagacatttggttttcagttttgcgaaacctcaagaatttaaaaaaaatagctaatgaagttcacaaaacctcaaattctactgcatttactcattccccccactacattaagttagtctttatatatgtggctgtgcaatgcattttccacaggactttgaacaggactggcataattgtattcaggaatctgctctggstttacacttgaagaggagagggcagcaaagactttcagaggcctagraggtatctgagatagtacagttcactcttactacatgcatatgaaaacactttttacagtgcagattttcaagtcagtaaaaagacagcacaaagcagagataaattttgtcctgattgcttttaaccagcaaccccataataaaacccttctttccatctctgtgtgtgttgcaggaatgaaagattgatagcatattgtttcaagctgagtgatttgcatagaagatgatgacctttgaggagacagattt

SEQ ID NO: 60585 - DNA, 600 bp, Chicken  19866894320125_5
aggtccaggggtctgagccaagctaggagggagagggcttttttgtcttcctaagacatttggttttcagttttgcgaaacctcaagaatttaaaaaaaatagctaatgaagttcacaaaacctcaaattctactgcatttactcattccccccactacattaagttagtctttatatatgtggctgtgcaatgcattttccacaggactttgaacaggactggcataattgtattcaggaatctgctctggstttacacttgaagaggagagggcagcaaagactttcagaggcctagraggtatctgagatagtacagttcactcttactacatgcatatgaaaacactttttacagtgcagattttcaagtcagtaaaaagacagcacaaagcagagataaattttgtcctgattgcttttaaccagcaaccccataataaaacccttctttccatctctgtgtgtgttgcaggaatgaaagattgatagcatattgtttcaagctgagtgatttgcatagaagatgatgacctttgaggagacagatttgcttctcttctctctgactgtgaaagtgctcactgcttactttcccc

SEQ ID NO: 60586 - DNA, 600 bp, Chicken  19866894320132_1
aatgttactcagctcagtgcatcattctgcagtttcattttgctttgtagagttaagcaaacacctctgaaaattgtccctgcgtatttgtcctgtcacaaacgcccatcccttttgttgctgcttgtaagctttccagaaagtgcttttcacagcagatgtttgctaatgcagaagatgttagaggaatagttgtggaaagggattttagtatgttttcttttcataccagatgtgattactgtatataaagattaagcaaagaaattgctggagttgagagagtcttcatgtctattkaaaatgaaatgctgtccaggtattaactgtaaattttgtgcaagaacagatcaatccaatatgtgccagaaagcctggcacaggtgctaatgcaagggaatctttgacagatggaagaggggataarttgaggcaacgtrtaggtaatccactggattaagaccagacaaaygaagaatgtgtggctgcaactkctctgaactaatggggggatattggtaaaaactcccacaaagtcagtgtgtttgaacagagcatgggaaaatcaattgaaaagcataatattaaatgagtaatagg

SEQ ID NO: 60587 - DNA, 600 bp, Chicken  19866894320132_2
taagctttccagaaagtgcttttcacagcagatgtttgctaatgcagaagatgttagaggaatagttgtggaaagggattttagtatgttttcttttcataccagatgtgattactgtatataaagattaagcaaagaaattgctggagttgagagagtcttcatgtctattkaaaatgaaatgctgtccaggtattaactgtaaattttgtgcaagaacagatcaatccaatatgtgccagaaagcctggcacaggtgctaatgcaagggaatctttgacagatggaagaggggataarttgaggcaacgtrtaggtaatccactggattaagaccagacaaaygaagaatgtgtggctgcaactkctctgaactaatggggggatattggtaaaaactcccacaaagtcagtgtgtttgaacagagcatgggaaaatcaattgaaaagcataatattaaatgagtaataggtaggctgtctgttctttctcaagtctacgaatgtactgttgcttgcagataggctttgttttctcatagcaacttgttttgtgctggggagtaggcagtcagtcattcttatatgccctaggtgggg

SEQ ID NO: 60588 - DNA, 600 bp, Chicken  19866894320132_3
aagtgcttttcacagcagatgtttgctaatgcagaagatgttagaggaatagttgtggaaagggattttagtatgttttcttttcataccagatgtgattactgtatataaagattaagcaaagaaattgctggagttgagagagtcttcatgtctattkaaaatgaaatgctgtccaggtattaactgtaaattttgtgcaagaacagatcaatccaatatgtgccagaaagcctggcacaggtgctaatgcaagggaatctttgacagatggaagaggggataarttgaggcaacgtrtaggtaatccactggattaagaccagacaaaygaagaatgtgtggctgcaactkctctgaactaatggggggatattggtaaaaactcccacaaagtcagtgtgtttgaacagagcatgggaaaatcaattgaaaagcataatattaaatgagtaataggtaggctgtctgttctttctcaagtctacgaatgtactgttgcttgcagataggctttgttttctcatagcaacttgttttgtgctggggagtaggcagtcagtcattcttatatgccctaggtggggtgtttttctattt

SEQ ID NO: 60589 - DNA, 590 bp, Chicken  19866894320132_4
agaagatgttagaggaatagttgtggaaagggattttagtatgttttcttttcataccagatgtgattactgtatataaagattaagcaaagaaattgctggagttgagagagtcttcatgtctattkaaaatgaaatgctgtccaggtattaactgtaaattttgtgcaagaacagatcaatccaatatgtgccagaaagcctggcacaggtgctaatgcaagggaatctttgacagatggaagaggggataarttgaggcaacgtrtaggtaatccactggattaagaccagacaaaygaagaatgtgtggctgcaactkctctgaactaatggggggatattggtaaaaactcccacaaagtcagtgtgtttgaacagagcatgggaaaatcaattgaaaagcataatattaaatgagtaataggtaggctgtctgttctttctcaagtctacgaatgtactgttgcttgcagataggctttgttttctcatagcaacttgttttgtgctggggagtaggcagtcagtcattcttatatgccctaggtggggtgtttttctatttctagtgatttgctgtttcaaat

SEQ ID NO: 60590 - DNA, 568 bp, Chicken  19866894320132_5
gtggaaagggattttagtatgttttcttttcataccagatgtgattactgtatataaagattaagcaaagaaattgctggagttgagagagtcttcatgtctattkaaaatgaaatgctgtccaggtattaactgtaaattttgtgcaagaacagatcaatccaatatgtgccagaaagcctggcacaggtgctaatgcaagggaatctttgacagatggaagaggggataarttgaggcaacgtrtaggtaatccactggattaagaccagacaaaygaagaatgtgtggctgcaactkctctgaactaatggggggatattggtaaaaactcccacaaagtcagtgtgtttgaacagagcatgggaaaatcaattgaaaagcataatattaaatgagtaataggtaggctgtctgttctttctcaagtctacgaatgtactgttgcttgcagataggctttgttttctcatagcaacttgttttgtgctggggagtaggcagtcagtcattcttatatgccctaggtggggtgtttttctatttctagtgatttgctgtttcaaat

SEQ ID NO: 60591 - DNA, 599 bp, Chicken  19866894320136_1
  misc_feature (1)..(106): n is any nucleotide
nnnnnnnnnnnnnnnnnnnnnnnnnnnnnnnnnnnnnnnnnnnnnnnnnnnnnnnnnnnnnnnnnnnnnnnnnnnnnnnnnnnnnnnnnnnnnnnnnnnnnnnnnnctttctcttgcttcccatatatatatatttcaatcttttttaaacattaaggtaagcctttcaaaacaactgacatctgacactattatctcacttagcagcagaagcaatgcagttttatgtgcagctggtgtagtaggtttagaataaattcttgtgtatatgaagtctcagaggtattcatgagcactttmaggaatgcgttaaacaacatgactaacatctgtcacgtgctgcgtctttcatccccttcccaggaagagaagggyatgtgcagaggagtgttatgtttagaaacctttcaaataattgcatgtacacatttacacattggtctctgyttatgttagggaaggcatggtcataaaaatgtatctacatttgttgctgaaggtggcaaggttttctgatgaagatctttggtctttgctatgatcgtgatcttggataagccctaaagaaagtgctttcccttctgttgacaagctgtatc

SEQ ID NO: 60592 - DNA, 599 bp, Chicken  19866894320136_2
  misc_feature (1)..(31): n is any nucleotide
nnnnnnnnnnnnnnnnnnnnnnnnnnnnnnnctttctcttgcttcccatatatatatatttcaatcttttttaaacattaaggtaagcctttcaaaacaactgacatctgacactattatctcacttagcagcagaagcaatgcagttttatgtgcagctggtgtagtaggtttagaataaattcttgtgtatatgaagtctcagaggtattcatgagcactttmaggaatgcgttaaacaacatgactaacatctgtcacgtgctgcgtctttcatccccttcccaggaagagaagggyatgtgcagaggagtgttatgtttagaaacctttcaaataattgcatgtacacatttacacattggtctctgyttatgttagggaaggcatggtcataaaaatgtatctacatttgttgctgaaggtggcaaggttttctgatgaagatctttggtctttgctatgatcgtgatcttggataagccctaaagaaagtgctttcccttctgttgacaagctgtatctcttattaaatatatattacattactatatcatattaaaagatgaggactagttggaatagctgatggtaagcca

SEQ ID NO: 60593 - DNA, 600 bp, Chicken  19866894320136_3
aaacattaaggtaagcctttcaaaacaactgacatctgacactattatctcacttagcagcagaagcaatgcagttttatgtgcagctggtgtagtaggtttagaataaattcttgtgtatatgaagtctcagaggtattcatgagcactttmaggaatgcgttaaacaacatgactaacatctgtcacgtgctgcgtctttcatccccttcccaggaagagaagggyatgtgcagaggagtgttatgtttagaaacctttcaaataattgcatgtacacatttacacattggtctctgyttatgttagggaaggcatggtcataaaaatgtatctacatttgttgctgaaggtggcaaggttttctgatgaagatctttggtctttgctatgatcgtgatcttggataagccctaaagaaagtgctttcccttctgttgacaagctgtatctcttattaaatatatattacattactatatcatattaaaagatgaggactagttggaatagctgatggtaagccaagctatggaaggctctgatgtagtttgaaaccatgctgagtttattgtgtagaactgaaggcagtgtgaggaa

SEQ ID NO: 60594 - DNA, 600 bp, Chicken  19866894320136_4
gagcactttmaggaatgcgttaaacaacatgactaacatctgtcacgtgctgcgtctttcatccccttcccaggaagagaagggyatgtgcagaggagtgttatgtttagaaacctttcaaataattgcatgtacacatttacacattggtctctgyttatgttagggaaggcatggtcataaaaatgtatctacatttgttgctgaaggtggcaaggttttctgatgaagatctttggtctttgctatgatcgtgatcttggataagccctaaagaaagtgctttcccttctgttgacyagctgtatctcttattaaatatatattacattactatatcatattaaaagatgaggactagttggaatagctgatggtaagccaagctatggaaggctctgatgtagtttgaaaccatgctgagtttattgtgtagaactgaaggcagtgtgaggaagctgtttcctgcagcaaatgctgctggcaccccagaagcttttgatattttcagaaagtgaaaaggactttctttagcctttcataaaggttgtactttattgtggttgagacaacagctagaggagatgacagcttacatat

SEQ ID NO: 60595 - DNA, 600 bp, Chicken  19866894320137_1
atatggcataaaaccattggcttttcctcctcactctgtaagatgactctgtggatgttgtctgctgtgactcttactgttcagtcctgaactcttctggtgctttcttttagggagttaggggataaattaggatttttctggaagctccctgctggcactgggattatacctgctcctgcccctgtcagcttcttgaaggataaaagctcgattcttcctaatattcaaatatggaagaattataaccaaacatagcctaaatggttgatgacttcatgaataattatgttagatagrgctcagctctgtgctttggtctggcctattctaccaacttctccttgccagattaaatttgcctactaaaaaagcatccttcagttcatttaaaaaattctcagaacaattggattttttcctacattaattagcacttgttgtgctttatgagtcttacatagagagaagctggggaaatatatagcttaagagaaaatattagaacttgtcaagatctttggttctgctgttgttgttgtcatagtactatgctctattaatgcagatgagcaacaaacgtgcttctataaattgaat

SEQ ID NO: 60596 - DNA, 494 bp, Chicken  19866894320140_1
tgccatgattttaacatctatcacatttctggaagtggcaaatgttcttttggctgtgcctgctctggagggagaaaaaatattcttcttcaaaggaatatattcctttaggaaacaatataaagttagaaaactttataaaagtgaggtcataacaccacactgggagtctccataagaaacagtctcagaattcaggatttgtattcagtcacataagctgacagcaactaggcagtgtacaacattgtttactactctacgaattaaattaagacacgagctataaatgaatcaacrggagaaagaaatgctacacataaaatactgacaaagatattttgaaaacactgagaaaatttcagcactagcatcacgtgtgcattttcagtaagaaaaaataaaataaaatcactgcagatacaaaacaattcccctgccttacataacacaaccaaaactgaacatagcaaaaaaaatctccttccataaaa

SEQ ID NO: 60597 - DNA, 600 bp, Chicken  19866894320144_1
agtttctcagtaaccaggaaaaggtatgagtgagggacacgtggactctatttgtagataaatagaaggaaatttgcagaggtgaagtagtttggggttgcccagcttgttggtagaatattaagaagaatccagaccagaaatggaacctcacaaggctacggggcccattctttttgtacaactcgtggcttttccacagtaagttttgttctcagttgatttttaactattgaccagctggggccctggagaactcacagccatgagatcatggggcagaaagccagaaagtctcayccgctgagcaaagtctcgtgcgtgcaaggtggtggggactcactgaggtgagcagttaacgacacatcagagcagaggaacacaggatctgcagctcttaaggagtgcattgcctccctgtgcagggaggagccgggctttgccggagcgctctataacacagagagaacagcgccctctagcggycgtcagcggcactgcagaccccgccgggcaccgcttaacctctcctttcctacacagggatagaaaccaatgattgctctctctttatgcttctttctttgtataaagttaata

SEQ ID NO: 60598 - DNA, 560 bp, Chicken  19866894320144_2
cgtggcttttccacagtaagttttgttctcagttgatttttaactattgaccagctggggccctggagaactcacagccatgagatcatggggcagaaagccagaaagtctcayccgctgagcaaagtctcgtgcgtgcaaggtggtggggactcactgaggtgagcagttaacgacacatcagagcagaggaacacaggatctgcagctcttaaggagtgcattgcctccctgtgcagggaggagccgggctttgccggagcgctctataacacagagagaacagcgccctctagcggycgtcagcggcactgcagaccccgccgggcaccgcttaacctctcctttcctacacagggatagaaaccaatgattgctctctctttatgcttctttctttgtataaagttaatagaacgactaaaacgcagagagctgtagcagaatacctagccaggagaaggcgcttgcttgggtggttgaagttccctttggtaaatggtagttttgaaagcaagagagacttttaacagattcaaagctctgtgcaacttgcctta

SEQ ID NO: 60599 - DNA, 599 bp, Chicken  19866894320146_1
  misc_feature (1)..(20): n is any nucleotide
nnnnnnnnnnnnnnnnnnnnttgatctctaaaatagctgctgaaaccttcataattatattctattgtggagattaactcttacttgtattgctgcatggagatttgctgttagttctttgttatgaacagtgttagttttaaagtctaagttttttaagtttcctttcttggtctgggactggtgagctctgtgtgagacatgctgcttggtccatcttttgatcagttacatccctcattcattcagcatcactcaaaacagtcaaagccaaatgtgagaattaagcaaaatggtggyaagcagaagtcttgtgaatcccaaacctgttacggaatttgacagtgtttgctacaacttgatcttaaatattctattttgctaaactactaattacttctatttcataacttatctttcagcctttagggcttttactatctagaaaaaaaccctgtgtattttgattgtgtctttgttaaaataaaggcaacagtaatcaaagtgcatcccccacatctcaagaggttgtgttctgtctcctccaagtcacagaaaataataaaagaccattagaaacaagttcaacaatagtaaca

SEQ ID NO: 60600 - DNA, 595 bp, Chicken  19866894320146_2
ttgattgtgtctttgttaaaataaaggcaacagtaatcaaagtgcatcccccacatctcaagaggttgtgttctgtctcctccaagtcacagaaaataataaaagaccattagaaacaagttcaacaatagtaacagcaaaaattttgagagagaatgtatgagctgtttgattatcctgtatccattttcttaacagtaatgacaaatagcctcctttttaaagaacataagcacaggaggtgaagttttctttcatttacactgatgcaacttgttgcttcatgtgaatcctgcaatrtaactaagaagagattttggatcaaaagccagaactatcatgatacaggaaaatgttaaacctcttctgaagtctaggtacttgatataaagatactcatggtctgcaaaaggttgtgacagctttcaacattccaaatcccacaggagaaagctttgacattattttgagctaacatcagcatcgttgaaagtcccactacggtgatatcaggagcaaactgtatagcgatttttgtagagtgcagcagtgttttttacccatacctgtagtaatggctctggtttttcaactc

SEQ ID NO: 60601 - DNA, 600 bp, Chicken  19866894320175_1
aatgggctgccctgggaggtggtggagtcaccgaccctggtggtgtttaaagagtgtttggatgttgtgttaagggacatggtttagcgggaaccattgatgaagggcgaatggttggactggatgatcctgtgggtcttttccaaccttagcgattctatgattctatgattctatgaatggctttgaccagtttgaatgcaccgcaagaaggtcagaccgaggaagacgttgagccttcgcgaggaatccttctgacttcatccccacgaccaccagagggagactcctactatggayaacgcatgtgccaggggaggggcagtatgtaaatgaatttccggaagattaatgagtaagtagatgggttccaaaaattctgctgaatatgtatggacttggcttataaatttgtagcgtttttgcttgctggtgtgcaagtttggtggagtgattccccttgcaccyggccagccgaataaaccatacctgctttataacctaactgggttatagagtttgattccgcacgtcagcactagagacacagctgtcagcaacctgaagaatatcaagaaggactacaaggagctgggaaca

SEQ ID NO: 60602 - DNA, 600 bp, Chicken  19866894320175_2
tgattctatgaatggctttgaccagtttgaatgcaccgcaagaaggtcagaccgaggaagacgttgagccttcgcgaggaatccttctgacttcatccccacgaccaccagagggagactcctactatggayaacgcatgtgccaggggaggggcagtatgtaaatgaatttccggaagattaatgagtaagtagatgggttccaaaaattctgctgaatatgtatggacttggcttataaatttgtagcgtttttgcttgctggtgtgcaagtttggtggagtgattccccttgcaccyggccagccgaataaaccatacctgctttataacctaactgggttatagagtttgattccgcacgtcagcactagagacacagctgtcagcaacctgaagaatatcaagaaggactacaaggagctgggaacagcagtgaagaactcaggagtacaggtagtcttctcagcagtcctccaggtaaggggaatgggaaacaaaaggactgtcagaattaagaaaatcagttaatggataagcgagtggtgtgatgacatgataatgtctaagtaaatatacctttttgtgtttctttgatta

SEQ ID NO: 60603 - DNA, 600 bp, Chicken  19866894320176_1
tgtgcctcctgcccatgcattgcttctctatgaccactacatttgtcacttctttctgtttaataacgctcctcctggctttacatatcaaatctgggtgatgtgctggagtgtgacactcagtgcatttgttaacaaaagatgtcagaaaagttacccagaaagataataaggaaactcaagtcctattcagtcctttgtctgcttgggattacccacagccatacccttctgtcttttcctgttgtcagtcacattttatcatattttgatcttcatggtgttttgtgaccttcacamactttttttcctgatgatggtgtcccaaagcctaacactgtttttaggacaggagatacaggcttgccagactgcatttgaatctgttactttatagataattggagtctctcggttatatacaagagctgaaatgcacaactcttttagtgttcagctatatttgtatctaagaacactatagctaagaaactgtttgaatcaccacagtgatctatgatgtgaggccatcttctaacccagcacacctgcaatcctggtgctgctggcagagcagtgtgagtgcaggtcagggctggg

SEQ ID NO: 60604 - DNA, 600 bp, Chicken  19866894320178_1
tgtgcaacagcacatcaccacatccaaaacacaactgattcactggcagctttcagaatacattatgtacgttttaaacagatgtcgcacaattggaaaggactggaaaagagctgtgagaactgtagatttgaaaacgcttctatagtaagactaattcttttgcctgtattcacagaatcataggatcattggaggtggaagggacccttaaaggccatctggtccaactccctgcactgagcagggacacccacagctccatcagtgctcagagcccatccagcctgaccttgggtrtctgcagggatggggcaccaccacctctctgggcaacctctgtcactgcctcactgcccstgttgtaaaaacacctcccctatatccaacctaaatctcccatcttttagtttgaaaccgtttcccctcatcccatcacagcagactctgcttcagagtctgtcccctcctttcttacagcctctgtagatacctacagggctctcagccctccccagagccttcccttccccatgctgcagttccagctctcaacctgtcctcacagggaggcgttccatccccaggatcatttttgtg

SEQ ID NO: 60605 - DNA, 600 bp, Chicken  19866894320178_2
cattatgtacgttttaaacagatgtcgcacaattggaaaggactggaaaagagctgtgagaactgtagatttgaaaacgcttctatagtaagactaattcttttgcctgtattcacagaatcataggatcattggaggtggaagggacccttaaaggccatctggtccaactccctgcactgagcagggacacccacagctccatcagtgctcagagcccatccagcctgaccttgggtrtctgcagggatggggcaccaccacctctctgggcaacctctgtcactgcctcactgcccstgttgtaaaaacacctcccctatatccaacctaaatctcccatcttttagtttgaaaccgtttcccctcatcccatcacagcagactctgcttcagagtctgtcccctcctttcttacagcctctgtagatacctacagggctctcagccctccccagagccttcccttccccatgctgcagttccagctctcaacctgtcctcacagggaggcgttccatccccaggatcatttttgtggccttcctctggacacgctccaacaagccaacaatattaggtagcttaattgttttaagt

SEQ ID NO: 60606 - DNA, 600 bp, Chicken  19866894320182_1
ctaactctgaaaggtgcaaattctaaaacccccattctaaatgttgtccccctttgtcaggaggaagcagtcatctgtggcaagacagtggcaacagccatctgataacaaactgttacatggaattaagagcacgtgtttaatgcttcacatgagaagggggaagaacgcatgaaaaagacgatattcccaatttcatcaaaatctccacttccagagaaagacaaggctgtgaaaatacaaccaacacaggtttatttgctacagaagaatcagttcacacctcactgagaagacagytccatccgaatggccaatccagtttctgaatacatttcctaatttttcactgcaagactatgggcagaaaatttaagtgtttcatggagctgcagaggccactgcaaaaccaatattattttgccaaggctgatctgctggtacaccgggcaacaccacctgacttagctacaccagttaatctgtctagagagctattttttttgtctgataccaatcctaccattactgtttttgtacatgacgaaaggcaccaggtatctgagcataagcttgctctttttagccaaaataggaata

SEQ ID NO: 60607 - DNA, 404 bp, Chicken  19866894320182_2
tgtttaatactacaaacacttacatgggagcaaaggaatttaatgaaaccatgttaaaagagaggagaataacctttctgttgccttgcccagtggatggcaggggcaatgctggaaaggtgcaaatgggaaggaagagagagaaagcagtgcaggtgcgtcttattgcatggtgttgcaccacatcagctttctgtgcatcagttcagatacagtcagggcagaaacgttctctgcttcttcaaagtttgacttgggttaaaacaagagaaaacacacgaggagttagacagaaatccktttggtgcaagttaactcctgacagaaaagtacagctcccgagtccaaaaaccacaaaacccatgtttgtccaaacattcagaatagggctcagaacattcatt

SEQ ID NO: 60608 - DNA, 600 bp, Chicken  19866894320187_1
tagttgtcagctcttaggataatgttcactgcttgttattagccctgtcactagcatatggatgcagatgggaaagtacttaaattaataaagaactttgagtaacttaggccagggaagcccatctgcctatcagtacaatggggaacttcctcagtattgggtctatctcccagctaaagtcctatcttgaaaaaactgtgttccaaatctgcagtataaacttgcttgaaaatctgatcttccccatgaagaacctacctgaagcttgttgggaaatttttggcagaattggtttgrggttctctttttgcatcgggaaatgtcaaaatataattttcctgaagaaataattatgtcatcaccctgctgaaatagcctgtcttctgctggactgccagtccacaagatagaagaaatatgtgacaggtaatacagtgcatctcatctggtatatgcagcragtcttaagagagtatcatttccagtcataggtaaaactgagacatttctttgtcctttaaaattaaaacagaccttgattattatactgctaaatgttatggcgttctatgttctatggagagacaaaataagaaa

SEQ ID NO: 60609 - DNA, 600 bp, Chicken  19866894320187_2
gtctatctcccagctaaagtcctatcttgaaaaaactgtgttccaaatctgcagtataaacttgcttgaaaatctgatcttccccatgaagaacctacctgaagcttgttgggaaatttttggcagaattggtttgrggttctctttttgcatcgggaaatgtcaaaatataattttcctgaagaaataattatgtcatcaccctgctgaaatagcctgtcttctgctggactgccagtccacaagatagaagaaatatgtgacaggtaatacagtgcatctcatctggtatatgcagcragtcttaagagagtatcatttccagtcataggtaaaactgagacatttctttgtcctttaaaattaaaacagaccttgattattatactgctaaatgttatggcgttctatgttctatggagagacaaaataagaaaaaaaaatttataggagatgtaccttctaaaaggatcatctattttcttcattgtttagacaaatatggattactagctctctaacgagcttgtttgctaaataaatgtattgataccctgcttaaaccgtgggataaactaaaacccaacagatacctggatt

SEQ ID NO: 60610 - DNA, 599 bp, Chicken  19866894320205_1
  misc_feature (1)..(33): n is any nucleotide
nnnnnnnnnnnnnnnnnnnnnnnnnnnnnnnnnctgagctggagggaggtctcaatgtgacaccccaatgcaggcacaagggctgctcaggagagggagaagttaacacaggaagcatttactacaggaagcaaaagcacacacagatcacactgcctggtagaaacttttctctgctcgtcttcctcctgtaatcaaaatgtcccaaaagaaacaaccaaacaaaaaaacaagaagtgagaggaccagggtcagtgcagagagagatgatctatacacaccatcacctaccagaagcgragaaaggtaaattccctctgactttggaagtcacccttttaagacctgttgagtgacagagaattagggaatacaggtgcttagagggaagcaggtttaaataacaccattcctagcacaatgcatacaaacacctactcaggctctgaacaccagcacccagcatcacagcactttgcagaacactgacagtctgtacaggagttacctctgactcttgatgaaatgtctgctgtagcattttctccccattgtgctttgcagatgctcccctttttaatctgtcagagacaagcagc

SEQ ID NO: 60611 - DNA, 599 bp, Chicken  19866894320208_1
  misc_feature (1)..(141): n is any nucleotide
nnnnnnnnnnnnnnnnnnnnnnnnnnnnnnnnnnnnnnnnnnnnnnnnnnnnnnnnnnnnnnnnnnnnnnnnnnnnnnnnnnnnnnnnnnnnnnnnnnnnnnnnnnnnnnnnnnnnnnnnnnnnnnnnnnnnnnnnnnnnnttttgtgtggtaatgtaggctgagtttaagacttaccttgaattgttttttaaatctgcagaatagtctgttttgtctttaaaatattttttagaaactaaaggatataaaatgttgcctttaaactttgggtcttggttttagtgccactgtctaccyacaccaattagattctgattcttcctgtggcatctcttaacaaatttctatttggatatggactgttctcacctcctccatgtattttaactgaataggttgagccccatacatcttttaagaaggaaaatatttttgatactatctttattttcttggtttctctttgaacccgtctcactttatcagtacagttacctacatatgagcattcacatgggacctgtccttcattctctgtgcctgtaactgctttatttttgtcatatttatatacaacagttttgaagggctgttga

SEQ ID NO: 60612 - DNA, 600 bp, Chicken  19866894320208_2
catacatcttttaagaaggaaaatatttttgatactatctttattttcttggtttctctttgaacccgtctcactttatcagtacagttacctacatatgagcattcacatgggacctgtccttcattctctgtgcctgtaactgctttatttttgtcatatttatatacaacagttttgaagggctgttgagagacttgtcatctacatttgtgcataattttcccccaaacctcctcttatctgcaagctttttgggtaagttttgttgtcatcttttgttgtctagcctatctggtraaagtctcrtagggcagggatgggattccatatggatctcagtagaaacaaacccactcactgatgttatcttcctttactgctgtccatgagccrtgtttatctcacattttgaatgaatcacaataatttcaattgttctaaattcctaatgaaaataccrgtttgctgttaagtcttgcagaagctgaaatatgttatattataccaatattgctactttcataagccaawattacagtttcatcaaaacaaaatactaggttagtcagacaaggtctgtttcataaatttgattgg

SEQ ID NO: 60613 - DNA, 600 bp, Chicken  19866894320208_3
tttaagaaggaaaatatttttgatactatctttattttcttggtttctctttgaacccgtctcactttatcagtacagttacctacatatgagcattcacatgggacctgtccttcattctctgtgcctgtaactgctttatttttgtcatatttatatacaacagttttgaagggctgttgagagacttgtcatctacatttgtgcataattttcccccaaacctcctcttatctgcaagctttttgggtaagttttgttgtcatcttttgttgtctagcctatctggtraaagtctcrtagggcagggatgggattccatatggatctcagtagaaacaaacccactcactgatgttatcttcctttactgctgtccatgagccrtgtttatctcacattttgaatgaatcacaataatttcaattgttctaaattcctaatgaaaataccrgtttgctgttaagtcttgcagaagctgaaatatgttatattataccaatattgctactttcataagccaawattacagtttcatcaaaacaaaatactaggttagtcagacaaggtctgtttcataaatttgattggaattttcaa

SEQ ID NO: 60614 - DNA, 600 bp, Chicken  19866894320208_4
tatgagcattcacatgggacctgtccttcattctctgtgcctgtaactgctttatttttgtcatatttatatacaacagttttgaagggctgttgagagacttgtcatctacatttgtgcataattttcccccaaacctcctcttatctgcaagctttttgggtaagttttgttgtcatcttttgttgtctagcctatctggtraaagtctcrtagggcagggatgggattccatatggatctcagtagaaacaaacccactcactgatgttatcttcctttactgctgtccatgagccrtgtttatctcacattttgaatgaatcacaataatttcaattgttctaaattcctaatgaaaataccrgtttgctgttaagtcttgcagaagctgaaatatgttatattataccaatattgctactttcataagccaawattacagtttcatcaaaacaaaatactaggttagtcagacaaggtctgtttcataaatttgattggaattttcaattaacatcccatttgtctttattagttcaatcttatatttgtttctccattattttatccaggttgtcaggattagagttacctggc

SEQ ID NO: 60615 - DNA, 600 bp, Chicken  19866894320208_5
tatatacaacagttttgaagggctgttgagagacttgtcatctacatttgtgcataattttcccccaaacctcctcttatctgcaagctttttgggtaagttttgttgtcatcttttgttgtctagcctatctggtraaagtctcrtagggcagggatgggattccatatggatctcagtagaaacaaacccactcactgatgttatcttcctttactgctgtccatgagccrtgtttatctcacattttgaatgaatcacaataatttcaattgttctaaattcctaatgaaaataccrgtttgctgttaagtcttgcagaagctgaaatatgttatattataccaatattgctactttcataagccaawattacagtttcatcaaaacaaaatactaggttagtcagacaaggtctgtttcataaatttgattggaattttcaattaacatcccatttgtctttattagttcaatcttatatttgtttctccattattttatccaggttgtcaggattagagttacctggctcaattaatttaccattttctagcaccggcacagtcttaacttactttctgtctaactttcctcact

SEQ ID NO: 60616 - DNA, 600 bp, Chicken  19866894320208_6
tcctcttatctgcaagctttttgggtaagttttgttgtcatcttttgttgtctagcctatctggtraaagtctcrtagggcagggatgggattccatatggatctcagtagaaacaaacccactcactgatgttatcttcctttactgctgtccatgagccrtgtttatctcacattttgaatgaatcacaataatttcaattgttctaaattcctaatgaaaataccrgtttgctgttaagtcttgcagaagctgaaatatgttatattataccaatattgctactttcataagccaawattacagtttcatcaaaacaaaatactaggttagtcagacaaggtctgtttcataaatttgattggaattttcaattaacatcccatttgtctttattagttcaatcttatatttgtttctccattattttatccaggttgtcaggattagagttacctggctcaattaatttaccattttctagcaccggcacagtcttaacttactttctgtctaactttcctcactgtaacgaggcttctttaaaatttgcattgtgttaatattttgcaaactcttaatcaaatcccctttatact

SEQ ID NO: 60617 - DNA, 600 bp, Chicken  19866894320210_1
aaaggtaaatatattactagaacattccaatggatgatctaatcattccagtttcagtggcttgtatgtctttactaaggtgagatgctgtgaacactgaagcttatgggaaaatcttccagagtttaggagtgaaaaagattttttgttttaatttactactgtgaagatctcctaacggatgataatggatgggagaggataaggagctaattgggcatggcaggagtgcaggtgatggagagagtcagtgcatgagctgcccactaatctcacctgattatttgctttgtaaacaastctgtggttgttgctttacctttcaccatatatgtaaaacaaatagaataaatgctagcagatgatcaaaatatgaaaaagggataaagacgttcatttaatgttcatctcattgatttatgttctctgtgtttacagagaatttaaaagcataaatatggtagtgaacagcagctctcattttcattgttttgaggaagcagcatgtataggaattttggctccttaccataacgtatctcagtcaaatatttctgtttactacttaaagatcttcttttccttgatgtaaaagattaa

SEQ ID NO: 60618 - DNA, 600 bp, Chicken  19866894320210_2
ttttgaggaagcagcatgtataggaattttggctccttaccataacgtatctcagtcaaatatttctgtttactacttaaagatcttcttttccttgatgtaaaagattaaataatcaaagaatcacagacttgaaagattcctgttctgcttttagccaaatgtcttgggagcctttgaggacaggattgatatatcttttggaataactgtaaacaaattttgttttccaaagccaaaatagttttcaaatgttggtaattaaatggagccaataaagaagctacaatattaatatcraggataagtatttcaatattaggagataatagcttgcaagattcattaggaatgtgattcaaaactattgtggctatacctttcaccctcacctttaacattttactatcataattgagctcataagcaatacatgagtagggcttgctaatggcctgtattttactgtataacaaggagttttcagtacactctaagtattactatagttgactcagtctattattaattgatccagtttatttggacaatgttttaatacatctaataatctttagtacttcgtcacatcattcaaag

SEQ ID NO: 60619 - DNA, 600 bp, Chicken  19866894320216_1
cccaaatcaagagctgtgtctttccaagcaactacattttattcttattcacatggaacaacgcagagtcccaacagccttggaattagcctgaaaacaaaatcctgacaggaatgatccttggcgacaccgtgggagggagagagcaaaaatgagaaaaatccctgacaggtgcacatcagcttgagacaaaaccctgcctgctcggtgataaacagactgtgacaaggtgcaatgtgcctgatggaccctacctgcagagagcagcgttaccagccacctccgtgttgtgcgcttccyagacctaatggcagttaatatcactcaggtgttgcagctataatgttttgatgtgaattaaatagatgcatcgcatcaaaggcactcatataaatggaataagaaaggaaaagatacttgtttgctgcctgctgttctttatatgcaaatcttagtatatcacatggcaacatacttgccttccatagccacataaatgttttactgttttatgagatgtttgcaataaatgtgattgatgatgattttttttttcataattgcctattagaaatacactattttggtgacaaaaccttt

SEQ ID NO: 60620 - DNA, 600 bp, Chicken  19866894320236_1
ctagaggaagcctgttaattttcatataaaataaattttacagatttttgggggcccttcaaacgtatcagtatgtttctgaaccacagtcacagttaaataaatagttaaataaactgtcaaatacctcttagcctttcaatccagtaccacagcattagaattcacaagcattcttgttaatctaggaatcatatacccactgatacatattccgtagtgtttgctagaatttatattcatgctacagtcaatattaactaatctaagcttctctttttacttcagtcattagatcayactttccctttgccaacagtccattacagagcaactagttctaaagcagaagtattatcataaataacaaaaataaacacgatctgcgtattcattttggaggaatcacaaataaatgaaatgctaaaattaacctctctgaagtcttcagtactcttggctttgcaaaatataggtgctaatctcataaggacagacttcttaatgatttctcatacwayacatttctaattgtttcagaacaagttgcatacagacaataaaacctcttcttgctatagtaaacaaaataaaytgggc

SEQ ID NO: 60621 - DNA, 600 bp, Chicken  19866894320236_2
gtgtttgctagaatttatattcatgctacagtcaatattaactaatctaagcttctctttttacttcagtcattagatcayactttccctttgccaacagtccattacagagcaactagttctaaagcagaagtattatcataaataacaaaaataaacacgatctgcgtattcattttggaggaatcacaaataaatgaaatgctaaaattaacctctctgaagtcttcagtactcttggctttgcaaaatataggtgctaatctcataaggacagacttcttaatgatttctcatacwayacatttctaattgtttcagaacaagttgcatacagacaataaaacctcttcttgctatagtaaacaaaataaaytgggcagcagatattctttgtgctgttatacaaacagatggagactttctggagtttaataattctcattttacatgctgttgccatcgtttaaaaccacagctagggtactgctaggcaaaatggcaagcaaatagatctggcagaccaaacagtcaagtcagtgactgaaaggaaaaatgcaaaactgcctatggatggtcagttttagaatcaagagttca

SEQ ID NO: 60622 - DNA, 600 bp, Chicken  19866894320236_3
gtttgctagaatttatattcatgctacagtcaatattaactaatctaagcttctctttttacttcagtcattagatcayactttccctttgccaacagtccattacagagcaactagttctaaagcagaagtattatcataaataacaaaaataaacacgatctgcgtattcattttggaggaatcacaaataaatgaaatgctaaaattaacctctctgaagtcttcagtactcttggctttgcaaaatataggtgctaatctcataaggacagacttcttaatgatttctcatacwayacatttctaattgtttcagaacaagttgcatacagacaataaaacctcttcttgctatagtaaacaaaataaaytgggcagcagatattctttgtgctgttatacaaacagatggagactttctggagtttaataattctcattttacatgctgttgccatcgtttaaaaccacagctagggtactgctaggcaaaatggcaagcaaatagatctggcagaccaaacagtcaagtcagtgactgaaaggaaaaatgcaaaactgcctatggatggtcagttttagaatcaagagttcaag

SEQ ID NO: 60623 - DNA, 600 bp, Chicken  19866894320236_4
atcayactttccctttgccaacagtccattacagagcaactagttctaaagcagaagtattatcataaataacaaaaataaacacgatctgcgtattcattttggaggaatcacaaataaatgaaatgctaaaattaacctctctgaagtcttcagtactcttggctttgcaaaatataggtgctaatctcataaggacagacttcttaatgatttctcatacwayacatttctaattgtttcagaacaagttgcatacagacaataaaacctcttcttgctatagtaaacaaaataaaytgggcagcagatattctttgtgctgttatacaaacagatggagactttctggagtttaataattctcattttacatgctgttgccatcgtttaaaaccacagctagggtactgctaggcaaaatggcaagcaaatagatctggcagaccaaacagtcaagtcagtgactgaaaggaaaaatgcaaaactgcctatggatggtcagttttagaatcaagagttcaagtccacttatacatcaagagctgtgagttaatatgagctcagacagcacttggatgaaaaaaaagccttgccttc

SEQ ID NO: 60624 - DNA, 600 bp, Chicken  19866894320244_1
atgtagttgagttttgcagtgtctttataattcactgtcgactgtgttactttggaaagagcaatttgagcagtcgcacagtattaactgcgtacctggaccagcaaagcacagacgggataagcgtgcaagttgttggctatttaatgcagctgctttgttttatatctgctaaccgcgtgaacaggtgattatgctgaaacatgccatttttgatgccgtatctctctgttcttttcacttttcaaacctcatctttgaagccccaatcctgcgaatacaaacgcatttgcataactygatacaagcagagtgttgctgtctgttcctgctaggagttgagctgtttggtcctggctcagccaagcacttttaatgagaccccacagctctgagggagaaaatcaaaggcagtaggctggtttttactcccgttctgtcctgtggcattttgaaaacgggatgatgtgcccctgtggcaaaatatagagattttcagagcctgccaagtcagacagtctctctggctacccacgtggctgtcctggctagcactgggacctttatgctacttctcagctgccttgaggaagggatggg

SEQ ID NO: 60625 - DNA, 513 bp, Chicken  19866894320245_1
cgatccccaaaggtccattccaacccccacaactctgtttatcagtgaactcatgagcaaaaataaaaatggagattctgaagagaactaaaaaagcatgaaaaaggggctatcataatacagcagcagcatagctaatacctcctgtaatataaccaacggtcatgagaagggctactattgttacaaggtatggattatgtcaaggacagagggaaactatttgtagcaacaagcacctgagctacattcgttcttttaaagaacaaagcagagcatctgcaaatacaaaggctacartttctaaggattattgtatttaataattgcccttcttacattgagttctgtcttcattaaaatgattcaatgatactatttcacataggtctgtttctgtgtttcttcagtgtgtgtctgcacatacgtgagttgggaaaccatagaaaaatacgatctgcaacaaagattagagaagtgtttttctttaacctgaccttcatcttcctctcc

SEQ ID NO: 60626 - DNA, 600 bp, Chicken  19866894320249_1
tcacagtcatcaaatatttcatagagagtctccttgaagaagtttaacaagattgtccaaaacttttcttaaaacagttcagtgaaggtatgcatttcaatttcttatgctcatgactgtctttcaaaatatgccacattgaatgaaacaatagaaatctaaatagcagataaataaaatgttcagcttaagttcaaatgaatggacaagtggatacaaaaaaaaaaaaagtagaaaaaactcttgaacccatagtacagggaatatgaaaagacattagtgaatgaaaaaataacaagrcttgtgaaacaaaataagaacaaataaatggtatttgttactagatgggattttcaaaagcaggctgtgtgcaggctttattgtgcttacatggaagccaacaataagactctcactgaattaaaagtgagtagatttaagccaacactgagcactttcaatatcccaccaccaaccatacartaaacttccaaatgccaaaagaaagctttcgtattccttccgatagtgcacaacaatcttactaaataagtatcagaaaaaaaattaaggtcagatattacttcaagtatatttttt

SEQ ID NO: 60627 - DNA, 571 bp, Chicken  19866894320249_2
cagcttaagttcaaatgaatggacaagtggatacaaaaaaaaaaaaagtagaaaaaactcttgaacccatagtacagggaatatgaaaagacattagtgaatgaaaaaataacaagrcttgtgaaacaaaataagaacaaataaatggtatttgttactagatgggattttcaaaagcaggctgtgtgcaggctttattgtgcttacatggaagccaacaataagactctcactgaattaaaagtgagtagatttaagccaacactgagcactttcaatatcccaccaccaaccatacartaaacttccaaatgccaaaagaaagctttcgtattccttccgatagtgcacaacaatcttactaaataagtatcagaaaaaaaattaaggtcagatattacttcaagtatattttttacataaagcaccaatgttcagtacgtttagtttttttaataaaaatggcttgtagagtaaatctgaaatcgtctttgagtttgaaacctaataatacggctaggatgaactgtagcagcaactgccacaatacacaaggtggcctgaattttat

SEQ ID NO: 60628 - DNA, 600 bp, Chicken  19866894320251_1
tgccttacatctaatctaaatctcccttcttttagtttgaagccattctctctggtcctatcgctatgagaacatgtaaaaagttggtcctcttcctgtctgtaagcttccttcatgtactggaaggctgcaatgagatctccccagagccgccttttctccaggctgagcaagcctacctccctccaacctatctttgttagagaggtgctccagcactctcataaaatttgtagcccacctctggactctctccagcagctctgtatccttcttgtgctgagaaccccagacctggayacggtactccagatgtggcccyacgagtagagtagagggagactatccgctccctctccctgcttgctgcccttcttgttgcagcccagggtacaggtgtttttctggactgcaagcgcgtgctgctggctcatgtccagctttttgatctactacaaaccccaagtgcttatccacagggctgctctcaagttcttctctcaatctgtggacatatctgggaatgcccttatgcaagcacaacaccttgcgcttggccacgctggacttcattaggttcacactaagcctgctttttga

SEQ ID NO: 60629 - DNA, 600 bp, Chicken  19866894320251_2
tcccttcttttagtttgaagccattctctctggtcctatcgctatgagaacatgtaaaaagttggtcctcttcctgtctgtaagcttccttcatgtactggaaggctgcaatgagatctccccagagccgccttttctccaggctgagcaagcctacctccctccaacctatctttgttagagaggtgctccagcactctcataaaatttgtagcccacctctggactctctccagcagctctgtatccttcttgtgctgagaaccccagacctggayacggtactccagatgtggcccyacgagtagagtagagggagactatccgctccctctccctgcttgctgcccttcttgttgcagcccagggtacaggtgtttttctggactgcaagcgcgtgctgctggctcatgtccagctttttgatctactacaaaccccaagtgcttatccacagggctgctctcaagttcttctctcaatctgtggacatatctgggaatgcccttatgcaagcacaacaccttgcgcttggccacgctggacttcattaggttcacactaagcctgctttttgagcttgcccaggtatctctgaat

SEQ ID NO: 60630 - DNA, 599 bp, Chicken  19866894320252_1
  misc_feature (1)..(32): n is any nucleotide
nnnnnnnnnnnnnnnnnnnnnnnnnnnnnnnngaacctgaagcatttctgttggcacttgccctgtgctttgaccaaacacctctgttaatagcaatgtcagctacgtagtataggatactgacaactttctcgcaatgcctaaaagcagtgagatagcaaaatatctgctctcacatgatgcatgcaggtagtcaggtcactgtagatagactgctttgtggactgcacctttaattcaggactgggttaccgactgacctgattgtgcattcagcaacattttaaaaaagcacttcasaatttcttttagaatcctttagatgtggcaaaggctcagctgcacacttgtctcatcacagtcraatggcaagtgtcttgatgctctctggtggagatgagtctttgaaagggtttgggagtacaatggtggcttttcattcagatatttttcccctactgagagttgctaatttccaggcaaaaacattacaygttacgttttttttccatgcattaagacaaccctctcaactatttatttgtacaactttttaaagtgatgctcggatccgccatttgaggttcagaatagcaact

SEQ ID NO: 60631 - DNA, 600 bp, Chicken  19866894320252_2
gtgctttgaccaaacacctctgttaatagcaatgtcagctacgtagtataggatactgacaactttctcgcaatgcctaaaagcagtgagatagcaaaatatctgctctcacatgatgcatgcaggtagtcaggtcactgtagatagactgctttgtggactgcacctttaattcaggactgggttaccgactgacctgattgtgcattcagcaacattttaaaaaagcacttcasaatttcttttagaatcctttagatgtggcaaaggctcagctgcacacttgtctcatcacagtcraatggcaagtgtcttgatgctctctggtggagatgagtctttgaaagggtttgggagtacaatggtggcttttcattcagatatttttcccctactgagagttgctaatttccaggcaaaaacattacaygttacgttttttttccatgcattaagacaaccctctcaactatttatttgtacaactttttaaagtgatgctcggatccgccatttgaggttcagaatagcaactgcaacgtagcatcaccatcaccacagaattaattgttagatcagtgcctaaagaaaaacctgaag

SEQ ID NO: 60632 - DNA, 600 bp, Chicken  19866894320252_3
caggtcactgtagatagactgctttgtggactgcacctttaattcaggactgggttaccgactgacctgattgtgcattcagcaacattttaaaaaagcacttcasaatttcttttagaatcctttagatgtggcaaaggctcagctgcacacttgtctcatcacagtcraatggcaagtgtcttgatgctctctggtggagatgagtctttgaaagggtttgggagtacaatggtggcttttcattcagatatttttcccctactgagagttgctaatttccaggcaaaaacattacaygttacgttttttttccatgcattaagacaaccctctcaactatttatttgtacaactttttaaagtgatgctcggatccgccatttgaggttcagaatagcaactgcaacgtagcatcaccatcaccacagaattaattgttagatcagtgcctaaagaaaaacctgaagtaagtgtcttccttaaagcttacattaaagaagtgagaaattgttggtgaattaaagtatggcattctacttagtactggagaaaatgcaggccaagagactggaccataggaggaagtgagattatagg

SEQ ID NO: 60633 - DNA, 600 bp, Chicken  19866894320262_1
cacaaagagcatctctttttcaccaaaccaaactagatgtgctaagtaccatatagagcaaaaccacatcgaaacaaatcaatcactgtaactggcagttctttcagatttcttacaaaaactaaaactttttcccttctaactccttatgtaatttatcttggtttagattttcctcaagtatagagaaacattagaccttactgattcctatgttgacttcctaattacttcacagctttcttctagttacagattacctagtgttcaatcactcttgtataatgactacagagtacrtgcgtcaggtccataaatgtgactgatgaaacagatgaagraggtgttgttttttgccttctcggtatctcgtatttctgttacacacagaagagagaatgttttttctgaaggttgtgttttaaggtgatattataagcaaactggagctatgaactctgttgccttctgcaaaagaatggtggaaaaaggaagaaaaaaaaaaaaagaccaagacatccttcacagtgtataagttctcaaattcaggagttttagtaatgcgtttgacagctaactaagattttggtttctttcaaa

SEQ ID NO: 60634 - DNA, 600 bp, Chicken  19866894320262_2
ctaagtaccatatagagcaaaaccacatcgaaacaaatcaatcactgtaactggcagttctttcagatttcttacaaaaactaaaactttttcccttctaactccttatgtaatttatcttggtttagattttcctcaagtatagagaaacattagaccttactgattcctatgttgacttcctaattacttcacagctttcttctagttacagattacctagtgttcaatcactcttgtataatgactacagagtacrtgcgtcaggtccataaatgtgactgatgaaacagatgaagraggtgttgttttttgccttctcggtatctcgtatttctgttacacacagaagagagaatgttttttctgaaggttgtgttttaaggtgatattataagcaaactggagctatgaactctgttgccttctgcaaaagaatggtggaaaaaggaagaaaaaaaaaaaaagaccaagacatccttcacagtgtataagttctcaaattcaggagttttagtaatgcgtttgacagctaactaagattttggtttctttcaaagtatgcttttgagcagctatttcgctatctgagcaaaggaa

SEQ ID NO: 60635 - DNA, 600 bp, Chicken  19866894320263_1
gttctactaactgtcctgaaaatacccacacatcacagacaacttggtcagtgacaaagcttcaaacttggaatgatagaatactgacaggggaaaataaatggaaaaaaaaatgtcttctggctcttctgctttagatgtacacagtattagacctccaaggctttgtttagttactttgtacgggggattggaattctctgtctttgtgtgcatgtaagagtataaacacatggcaaaatccagtagcgtacacaaaaaggacttttaaactattgaaccattcctcagcttcaattrtttccactccttgtccttaaaattcaatatcaaagcattaagcaattctgtatttgcttcaaagaaaatctgactgatgagaagaatgacacgacggcacactcaagaagccacttgcagggcaacatgcttcatccttcctgcagggcaacggtagtgctgaaatgacaacagcactgtctagcaataacagaccctcagagtagaaattctaggatgccactcctgtattagcgacctgtttgagggctgcataaatctgctgttttttatctcccccaagtggtcaagagagtttta

SEQ ID NO: 60636 - DNA, 600 bp, Chicken  19866894320263_2
caaagaaaatctgactgatgagaagaatgacacgacggcacactcaagaagccacttgcagggcaacatgcttcatccttcctgcagggcaacggtagtgctgaaatgacaacagcactgtctagcaataacagaccctcagagtagaaattctaggatgccactcctgtattagcgacctgtttgagggctgcataaatctgctgttttttatctcccccaagtggtcaagagagttttaagtctgccttagagaagcagcttctctaggacaacttctccagaatcagatgtaaaggytagtggtggaattgaaaaactgctcagctaaaccaaataaaaaggttattaagaaggcagaaagctcaggaaacattcagtctcagaagtaacacagttaatccacatatccccatctaacacctaaacttaattcctgactccctctccaatatacaacagtctaaagcacaacctgagatagtacccgtgtttgacagtttacaagtaggtttaatcaccttagtacrgatttgctaataatttataatccaattcatctttgaaataactaatatttcaagtgcctgacaccagagg

SEQ ID NO: 60637 - DNA, 600 bp, Chicken  19866894320263_3
agagagttttaagtctgccttagagaagcagcttctctaggacaacttctccagaatcagatgtaaaggytagtggtggaattgaaaaactgctcagctaaaccaaataaaaaggttattaagaaggcagaaagctcaggaaacattcagtctcagaagtaacacagttaatccacatatccccatctaacacctaaacttaattcctgactccctctccaatatacaacagtctaaagcacaacctgagatagtacccgtgtttgacagtttacaagtaggtttaatcaccttagtacrgatttgctaataatttataatccaattcatctttgaaataactaatatttcaagtgcctgacaccagaggtatccaaactagtataatctcatcacaattaatagcttcaaaccattcaattgcaatctatcactacttctcaaacagcactgattgcaattacattccacttttccttaatgtctcctgtaaattttagtaagtaagcaactgtgcttcaccctttcagttacacatatttgttttcaaagggtttggaagagtatggaaaaagaagaggaaatttttactggtatttt

SEQ ID NO: 60638 - DNA, 599 bp, Chicken  19866894320268_1
  misc_feature (1)..(18): n is any nucleotide
nnnnnnnnnnnnnnnnnnatcaacctgtgtcctttctcctctttcacctttggaaaggtgcccaggagcaggttcttagcaactcgtctatgccagtggtcatggtttgtaacatgaaagtgactgcctgactccaaccctcccaccatgatgtgccgtgatctgtccccagccaccaaccatttgtgtcattgatgcttagaaaagatgtgtagacccaaccctctgctaagcaagggattttcttggctgtagaaggagcaaggaaacagcaagctggcaaaaactgaaggcatgaargttggtctggaagggcattgatccatcagaagagagacagagatgttccctcattcatgagcagcatagtaagccatgtcgatacaatacattagtaataaatggtgggagaataggaagaaatagcacatccaaaggggatacccaagtacaagttctaagtgtttcttctaccagaactgtgtcaatcatcttctttaatgaggcttcaaacaaagtctgtctgcagcatctgaaagtcactgtagcagcaaacgcagtacaggtgagggctcacttctgtgtcactaacttgattc

SEQ ID NO: 60639 - DNA, 594 bp, Chicken  19866894320273_1
attctgagtactaagaaactaaaaccaaaagttcatggaattacccacatcatttttcttcccatttcttcatccacccactttcatacagttctgccttagcgcaattgcgtccaaagtagctgcctgaagaagtttgattatgcatgcatacttattccacctgagtatttcacaaggcccagaaaaatgggtgatagcaccacagctccaccagcacgagctggggagtgccacatcagggcgccaccacgccacaggcaggcaaggccactccagcaaggcacatcagctccatastgactaaacycacactctctcactgcctaccacgcagccagtacctccaggcagttatgccaaggttggggtgaaccagaaactctgtttttatatttwtgttcaggtttcaccagatagcactatagcaagtacacagccaaaggtactgacacagtgaaaatcatatataaagaattatggtgcagagtgacgatggtatttgccagcacgtcacttaaacgtgcttgtcctcttgttccttactattctctcttcctcttcttgagcgattcagaaagaaaagcagtactt

SEQ ID NO: 60640 - DNA, 584 bp, Chicken  19866894320273_2
ctaagaaactaaaaccaaaagttcatggaattacccacatcatttttcttcccatttcttcatccacccactttcatacagttctgccttagcgcaattgcgtccaaagtagctgcctgaagaagtttgattatgcatgcatacttattccacctgagtatttcacaaggcccagaaaaatgggtgatagcaccacagctccaccagcacgagctggggagtgccacatcagggcgccaccacgccacaggcaggcaaggccactccagcaaggcacatcagctccatastgactaaacycacactctctcactgcctaccacgcagccagtacctccaggcagttatgccaaggttggggtgaaccagaaactctgtttttatatttwtgttcaggtttcaccagatagcactatagcaagtacacagccaaaggtactgacacagtgaaaatcatatataaagaattatggtgcagagtgacgatggtatttgccagcacgtcacttaaacgtgcttgtcctcttgttccttactattctctcttcctcttcttgagcgattcagaaagaaaagcagtactt

SEQ ID NO: 60641 - DNA, 495 bp, Chicken  19866894320273_3
tagcgcaattgcgtccaaagtagctgcctgaagaagtttgattatgcatgcatacttattccacctgagtatttcacaaggcccagaaaaatgggtgatagcaccacagctccaccagcacgagctggggagtgccacatcagggcgccaccacgccacaggcaggcaaggccactccagcaaggcacatcagctccatastgactaaacycacactctctcactgcctaccacgcagccagtacctccaggcagttatgccaaggttggggtgaaccagaaactctgtttttatatttwtgttcaggtttcaccagatagcactatagcaagtacacagccaaaggtactgacacagtgaaaatcatatataaagaattatggtgcagagtgacgatggtatttgccagcacgtcacttaaacgtgcttgtcctcttgttccttactattctctcttcctcttcttgagcgattcagaaagaaaagcagtactt

SEQ ID NO: 60642 - DNA, 420 bp, Chicken  19866894320277_1
gatgtcccaggccgggctccaggcttctgctgtgtcccgttcaggcaatggagatgctgcgggcagggagctgcgtgcctgccggcaccgggaacgcgggacacacaagtgtgagcgcctgccgccatctgatggcggctcccaggcagctcgtagctaggaagccccccccgggccccgcctgtcccatcctgctggggctgctttgccccttgctggggaggacttagtgcccaccttttctctcgggcgatcccatcccgcggggagaccccagcgccggggctgggtgcagaggaycccggcggccgctaggctgtgctcccgcatctcccaccgccgcgctcagccccgctcccctttgcccgctgcaggacccggtggcgctccgcggcccgagccgtgacaccccgggcgggg

SEQ ID NO: 60643 - DNA, 600 bp, Chicken  19866894320286_1
ggggtaagagggattgattaaggtttagggcttctttgcactgttatacttggcagtgcctaggagaccagtcttttactcaagtcccacatatgcagtcagcacagccatcacaggcaccacgttctaatctgactgggtcttgtgctgactctgagaaggcagaaaggcaaagaaacagtaaatcccagtaaggtcagtggatgcgcagctgaagcatccgcggtgctctctggtcacattccaaggctttttcatcttttggcctctgaaggcagataaacagccctataaaaagcrcacaggrgtgtggggaggggaagaccttgaattcaagctgaattgttggtcagggccacaagtattcattggtcctgctatcatgcatctagcagcacagaaataacatttccctcaagaaagccagcctccccagtgcctgggaggaagcctggttccttcatccctccatcatttcaggacaattcaggctatggccctgtcrgctttttttctcatgcttttttgtaggcccaaggaagtggtgcagagcaggatggaggatatgccaggtactctatctgggagacacttgtgccc

SEQ ID NO: 60644 - DNA, 600 bp, Chicken  19866894320286_2
gagggattgattaaggtttagggcttctttgcactgttatacttggcagtgcctaggagaccagtcttttactcaagtcccacatatgcagtcagcacagccatcacaggcaccacgttctaatctgactgggtcttgtgctgactctgagaaggcagaaaggcaaagaaacagtaaatcccagtaaggtcagtggatgcgcagctgaagcatccgcggtgctctctggtcacattccaaggctttttcatcttttggcctctgaaggcagataaacagccctataaaaagcrcacaggrgtgtggggaggggaagaccttgaattcaagctgaattgttggtcagggccacaagtattcattggtcctgctatcatgcatctagcagcacagaaataacatttccctcaagaaagccagcctccccagtgcctgggaggaagcctggttccttcatccctccatcatttcaggacaattcaggctatggccctgtcrgctttttttctcatgcttttttgtaggcccaaggaagtggtgcagagcaggatggaggatatgccaggtactctatctgggagacacttgtgccccaaggaa

SEQ ID NO: 60645 - DNA, 600 bp, Chicken  19866894320286_3
gcgcagctgaagcatccgcggtgctctctggtcacattccaaggctttttcatcttttggcctctgaaggcagataaacagccctataaaaagcrcacaggrgtgtggggaggggaagaccttgaattcaagctgaattgttggtcagggccacaagtattcattggtcctgctatcatgcatctagcagcacagaaataacatttccctcaagaaagccagcctccccagtgcctgggaggaagcctggttccttcatccctccatcatttcaggacaattcaggctatggccctgtcrgctttttttctcatgcttttttgtaggcccaaggaagtggtgcagagcaggatggaggatatgccaggtactctatctgggagacacttgtgccccaaggaacacgtggggaaatgggctcctacctacctctctttgtagaggttcaagtgaaatgagagttcaggatttttcttgaaccgcctcatgggcatattctcagctgcctgagttggaaatgtcagtagttaatcatgaattgaactccctggaaaaagaaaagaaaagacacgtgtgcccttaaaagaattcttgcagttt

SEQ ID NO: 60646 - DNA, 600 bp, Chicken  19866894320289_1
tcttccccattcttttgcacatgtaatgtagtagactttattcacaagggagaacacctcttgcatttcataagctgaacgttaatcacaatatttgcctgcaacatttcattttgttgtcatccttagaactgtgaactaatgttttattattcatagcaactcttggaaataaattacttcttctgatagttcatatgttgttcctttaaataacatccttaaatatgttttattggctgtttttttcttttttcttccacagaagggaagaaaagtaggcacaaagagcaatagttygcaatttaatcacctctctctaaggcttactatcctccaaaatggacagctcaaaaacataaaggatctgaggaatataaataagaattatccataccagagcaagtaatgtaaaggctgcttcataactttggtactactgtgtacatagcatacatgtttctgtctcaatagaaaatgagagaacgtgattattagtttakagagggaagctggagtatttgccaagaaagatcttcagatggaagatctgtaggtgagaaaatggacttgataaayttgatctaacatcagacactc

SEQ ID NO: 60647 - DNA, 600 bp, Chicken  19866894320289_2
ttcctttaaataacatccttaaatatgttttattggctgtttttttcttttttcttccacagaagggaagaaaagtaggcacaaagagcaatagttygcaatttaatcacctctctctaaggcttactatcctccaaaatggacagctcaaaaacataaaggatctgaggaatataaataagaattatccataccagagcaagtaatgtaaaggctgcttcataactttggtactactgtgtacatagcatacatgtttctgtctcaatagaaaatgagagaacgtgattattagtttakagagggaagctggagtatttgccaagaaagatcttcagatggaagatctgtaggtgagaaaatggacttgataaayttgatctaacatcagacactcaccaggtatcattactggttccttctttagtcaaggcagagacataagtaatcaaggaataattcaacgcaatttaaccttgtctgcagaggggccccacctcatatacctccatttaacatgccagctgaaataaactcagacccttgtaactactctctaatttatttccttgtgctttacttggttgaacttttatgttt

SEQ ID NO: 60648 - DNA, 600 bp, Chicken  19866894320289_3
aggcacaaagagcaatagttygcaatttaatcacctctctctaaggcttactatcctccaaaatggacagctcaaaaacataaaggatctgaggaatataaataagaattatccataccagagcaagtaatgtaaaggctgcttcataactttggtactactgtgtacatagcatacatgtttctgtctcaatagaaaatgagagaacgtgattattagtttakagagggaagctggagtatttgccaagaaagatcttcagatggaagatctgtaggtgagaaaatggacttgataaayttgatctaacatcagacactcaccaggtatcattactggttccttctttagtcaaggcagagacataagtaatcaaggaataattcaacgcaatttaaccttgtctgcagaggggccccacctcatatacctccatttaacatgccagctgaaataaactcagacccttgtaactactctctaatttatttccttgtgctttacttggttgaacttttatgtttcctgagactgattagctttcaggcactgtgtctggagtttaaactttaggcataactctttttccccttctgagac

SEQ ID NO: 60649 - DNA, 599 bp, Chicken  19866894320291_1
  misc_feature (1)..(121): n is any nucleotide
nnnnnnnnnnnnnnnnnnnnnnnnnnnnnnnnnnnnnnnnnnnnnnnnnnnnnnnnnnnnnnnnnnnnnnnnnnnnnnnnnnnnnnnnnnnnnnnnnnnnnnnnnnnnnnnnnnnnnnnnncacttaaactgaaggtagaaaaacagatcccctctactctgttaaaagcagatttctgtaactactcctgtaagcactatgacactcattcttccagagctacggagacttgctatcagcaactacaaaatacctgtattctgagaaatcgggtgctcaaatgtatggagtggctactstgcagcgtgcatctctgccttctcctttygagtcagaaaaagatgacatgatctagyttttgaggctcttgttttctacaaggaaaaaaaaagaagatacaaataaaaaaaagggagcaacatacttgcacagcaatggtgggcatatccaggcccacttcaaactttatgtaaagatttgatcctctaactgcatgtactcacagcatcacaaatgaaaacatctctggaactgagcctcagtcagtggaagttgccacaggcattccagagcaactatgaaaagctcaaaaaagaaa

SEQ ID NO: 60650 - DNA, 599 bp, Chicken  19866894320291_2
  misc_feature (1)..(92): n is any nucleotide
nnnnnnnnnnnnnnnnnnnnnnnnnnnnnnnnnnnnnnnnnnnnnnnnnnnnnnnnnnnnnnnnnnnnnnnnnnnnnnnnnnnnnnnnnnnncacttaaactgaaggtagaaaaacagatcccctctactctgttaaaagcagatttctgtaactactcctgtaagcactatgacactcattcttccagagctacggagacttgctatcagcaactacaaaatacctgtattctgagaaatcgggtgctcaaatgtatggagtggctactstgcagcgtgcatctctgccttctcctttygagtcagaaaaagatgacatgatctagyttttgaggctcttgttttctacaaggaaaaaaaaagaagatacaaataaaaaaaagggagcaacatacttgcacagcaatggtgggcatatccaggcccacttcaaactttatgtaaagatttgatcctctaactgcatgtactcacagcatcacaaatgaaaacatctctggaactgagcctcagtcagtggaagttgccacaggcattccagagcaactatgaaaagctcaaaaaagaaaaagaaaaatagtggtgctactattctgaa

SEQ ID NO: 60651 - DNA, 599 bp, Chicken  19866894320291_3
  misc_feature (1)..(64): n is any nucleotide
nnnnnnnnnnnnnnnnnnnnnnnnnnnnnnnnnnnnnnnnnnnnnnnnnnnnnnnnnnnnnnnncacttaaactgaaggtagaaaaacagatcccctctactctgttaaaagcagatttctgtaactactcctgtaagcactatgacactcattcttccagagctacggagacttgctatcagcaactacaaaatacctgtattctgagaaatcgggtgctcaaatgtatggagtggctactstgcagcgtgcatctctgccttctcctttygagtcagaaaaagatgacatgatctagyttttgaggctcttgttttctacaaggaaaaaaaaagaagatacaaataaaaaaaagggagcaacatacttgcacagcaatggtgggcatatccaggcccacttcaaactttatgtaaagatttgatcctctaactgcatgtactcacagcatcacaaatgaaaacatctctggaactgagcctcagtcagtggaagttgccacaggcattccagagcaactatgaaaagctcaaaaaagaaaaagaaaaatagtggtgctactattctgaagtgaggttacctccttcaacatctgtgg

SEQ ID NO: 60652 - DNA, 600 bp, Chicken  19866894320292_1
caatatcatcggttcttctgtataccagccatggattgcatctctcccttaggtgtttcatccagagcaattctgtgggagagagttccagagtagttactctgaagttcttgctcatcttttttcagaatactgttagtattagtaagtactcggcaattcctacgtgaacagtagtagtgtgcccaaaagaagacgttggtcttctctgtgaggaaggggaaaaggctaaaacttcctggcatgaatgtgcactagtaacagatgcaagcatactggctgcattgtatttcccatatrcttataatgaaaggtgtcagtggtawatgaaacttgcatgctgtttaagtgccaagcatcatatgtctttagagtatctcaatggctatgcygtctgcatattctcggtacctctaacatatctggacagcaatttattagtgttttcacactgagaactaaattgagcttatttatgtgttttaaatcatgcgtaaagatgctaagaaaccaagtaatctaaaaagtgtgatcaacagaaacaatggacctgatgcaaggccaccttagcatttaccttgctgttgccatgatacttca

SEQ ID NO: 60653 - DNA, 600 bp, Chicken  19866894320292_2
agccatggattgcatctctcccttaggtgtttcatccagagcaattctgtgggagagagttccagagtagttactctgaagttcttgctcatcttttttcagaatactgttagtattagtaagtactcggcaattcctacgtgaacagtagtagtgtgcccaaaagaagacgttggtcttctctgtgaggaaggggaaaaggctaaaacttcctggcatgaatgtgcactagtaacagatgcaagcatactggctgcattgtatttcccatatrcttataatgaaaggtgtcagtggtawatgaaacttgcatgctgtttaagtgccaagcatcatatgtctttagagtatctcaatggctatgcygtctgcatattctcggtacctctaacatatctggacagcaatttattagtgttttcacactgagaactaaattgagcttatttatgtgttttaaatcatgcgtaaagatgctaagaaaccaagtaatctaaaaagtgtgatcaacagaaacaatggacctgatgcaaggccaccttagcatttaccttgctgttgccatgatacttcattatcacactgaaaaaaacctcatat

SEQ ID NO: 60654 - DNA, 593 bp, Chicken  19866894320292_3
gtagttactctgaagttcttgctcatcttttttcagaatactgttagtattagtaagtactcggcaattcctacgtgaacagtagtagtgtgcccaaaagaagacgttggtcttctctgtgaggaaggggaaaaggctaaaacttcctggcatgaatgtgcactagtaacagatgcaagcatactggctgcattgtatttcccatatrcttataatgaaaggtgtcagtggtawatgaaacttgcatgctgtttaagtgccaagcatcatatgtctttagagtatctcaatggctatgcygtctgcatattctcggtacctctaacatatctggacagcaatttattagtgttttcacactgagaactaaattgagcttatttatgtgttttaaatcatgcgtaaagatgctaagaaaccaagtaatctaaaaagtgtgatcaacagaaacaatggacctgatgcaaggccaccttagcatttaccttgctgttgccatgatacttcattatcacactgaaaaaaacctcatatatactgaacctgtttgtgcttttcctatgctcagctagctgcgtcaagggaatggaaaa

SEQ ID NO: 60655 - DNA, 600 bp, Chicken  19866894320298_1
ttgttgctgttatttctgaaaataagctgcaaaggcaaaaatggaagtaaaccttttgtgagaacaaaaccatatcgtgcaaagttcaggcaagatcagcactggctgaaataagatacagatctgaatgccatcagttctttcatcatctctttgaacctcaagtactagcaattccttacatcagcacagcagtagattgggaagtgagaagttctagagtctgaactctaggactgacaggagtccccagtaatgaagtctatttcctcaaatccacagcagaattctgcagagcayctcctccacatccctgckccttctgtggctgctggcagaacggatcaggccaggcctctgtccttccttagaggtgcccccattgtcagggctctgaaaaacctatttgaaatgaaggctgtggtggataacaagtaccccaggartgaagcaccaccacggttcctgctgcctgcagtgttacctgcagggtatgttgtcacctttcttctcaaacatgagctcagagtggcacaaatattcaaaatcaagcagagaacsaaagttctctgctttgtgaacagaggacgcagccagagc

SEQ ID NO: 60656 - DNA, 600 bp, Chicken  19866894320298_2
aaaataagctgcaaaggcaaaaatggaagtaaaccttttgtgagaacaaaaccatatcgtgcaaagttcaggcaagatcagcactggctgaaataagatacagatctgaatgccatcagttctttcatcatctctttgaacctcaagtactagcaattccttacatcagcacagcagtagattgggaagtgagaagttctagagtctgaactctaggactgacaggagtccccagtaatgaagtctatttcctcaaatccacagcagaattctgcagagcayctcctccacatccctgckccttctgtggctgctggcagaacggatcaggccaggcctctgtccttccttagaggtgcccccattgtcagggctctgaaaaacctatttgaaatgaaggctgtggtggataacaagtaccccaggartgaagcaccaccacggttcctgctgcctgcagtgttacctgcagggtatgttgtcacctttcttctcaaacatgagctcagagtggcacaaatattcaaaatcaagcagagaacsaaagttctctgctttgtgaacagaggacgcagccagagccaaggctccttcaaacaa

SEQ ID NO: 60657 - DNA, 600 bp, Chicken  19866894320298_3
catctctttgaacctcaagtactagcaattccttacatcagcacagcagtagattgggaagtgagaagttctagagtctgaactctaggactgacaggagtccccagtaatgaagtctatttcctcaaatccacagcagaattctgcagagcayctcctccacatccctgckccttctgtggctgctggcagaacggatcaggccaggcctctgtccttccttagaggtgcccccattgtcagggctctgaaaaacctatttgaaatgaaggctgtggtggataacaagtaccccaggartgaagcaccaccacggttcctgctgcctgcagtgttacctgcagggtatgttgtcacctttcttctcaaacatgagctcagagtggcacaaatattcaaaatcaagcagagaacsaaagttctctgctttgtgaacagaggacgcagccagagccaaggctccttcaaacaaaggataagattaacaaactcatgacgtatttatcatacctctcaaggcactactgtaagacactcagaactgcagtaatgagagatatgcaaggaatgggagagaagattttaaaggggctaagaact

SEQ ID NO: 60658 - DNA, 547 bp, Chicken  19866894320298_4
tctatttcctcaaatccacagcagaattctgcagagcayctcctccacatccctgckccttctgtggctgctggcagaacggatcaggccaggcctctgtccttccttagaggtgcccccattgtcagggctctgaaaaacctatttgaaatgaaggctgtggtggataacaagtaccccaggartgaagcaccaccacggttcctgctgcctgcagtgttacctgcagggtatgttgtcacctttcttctcaaacatgagctcagagtggcacaaatattcaaaatcaagcagagaacsaaagttctctgctttgtgaacagaggacgcagccagagccaaggctccttcaaacaaaggataagattaacaaactcatgacgtatttatcatacctctcaaggcactactgtaagacactcagaactgcagtaatgagagatatgcaaggaatgggagagaagattttaaaggggctaagaacttcattgggaaacactgatttccatttccaacttagcacagacctcccatatgacaccagcaa

SEQ ID NO: 60659 - DNA, 600 bp, Chicken  19866894320299_1
gtggttgttgtaactgcaaaggaaaagtcctttgctgtgaagtttttcagactgatgagtgtggaccttcccgaggtgatgggtggggaaggagcaccgtgtgcgagcggggagctgcgttacgtgtaacagagaatgtgaagtttgctctgcagcagtccagccgctatctggtgcatggctcaaagactgttgaaccgaattagtgttatctctctgagtgaattttctttttgtttgtggaattctttcaagtaggttaatccactgggggaaatctttcttaatccagaaagaaaragtattgcccaggggtttgtagctccttatgaaacccaagctttggagctgtaacctcttgttgcttgtccccaccccgagatcccatgagctggggaccagagtggaggggctggcgacaaactcatttgctgttggtgaaggagatgtgagcagagatgctgcttatgggttggggtaggctttacatgttggaccgaagccccaacctgctgggctgtcgaagcaaaggctgcttttctcttgaaccactattgtgtgacagcgcgttgttacacctggcaggggaaggtgagctga

SEQ ID NO: 60660 - DNA, 483 bp, Chicken  19866894320302_1
ggggtggcagggcgatgaaacccccccacctcagcaccgtccttctgtccaggtgccgcagccaaaatgagcgcccagatccagagctcccccatagtgccctctatgtaccacagcctggtgctgagctgcaaggtctccggggaccccgggtaaggcatccccccccaacccctccaccccacggcacggccaccccacgggcaaccccaggcctgggtgacaccgagccccacacagccccaaggagttcgtgtgggagaagaaagggatccacaaaccgctgcagaaaggccccaktgatatcctcctcttccgctccttaaacaaaacccacctgggcacctacacctgcaaggtcagcagcccccagggcaccgccgtggccacctacaacctttggatagacggtaaggaggggaaaacctgtccccagccgtgccctccttctcccagctcctcctcgccaccccgtgccaatgt

SEQ ID NO: 60661 - DNA, 600 bp, Chicken  19866894320305_1
caaagggagcagatcagttcaagatctgtggcagtgtgagtgcagtaagcccaattcaactccaccatactgctgacagcaaaataattacttacccttcaattagaaagatttccatctaaaaggaaggatgactgcagctctgctataagacttggtgttccagcccatgtcccatctgttctctgtgggcagcacccagcttgcctctgccaggagactcatacaacgaccacttccagtccagtgcacatccacagggccacgataacagctgctagcagcatcatcatacagatyctctgcacacgtgtaatctgactcagacttcattcttgggttcactttgcttttaatctctgtcagcaaataactgcatctgaagatatgcaattatgggctctttacctcagtgactacagctgtaggagccataccagcaatcctcactcagaggtccccagtgctgagctgcaaggctgggacagctcttctgaagaggagcttctcctggccacccctccccagcctttcacaaaggcagcagggtggtacgcaccgtggcagcacagagagaatgtcccctctctgtccccttgc

SEQ ID NO: 60662 - DNA, 600 bp, Chicken  19866894320308_1
agttggtaaaatctttattatattgttcactattttgatgttagtagctttagctaattataagtaacaagtacggttcattgcatgagattttactgctgacgtacgtatttataaataatttttggtgaaatcgttttggttaccatctgatggctggattgttatttttttgttgctgctgttttgtttaatttgacaaacaaatgaggaaaaacaccttaattgtcagcacttgaaaacctgtgtgctactgttagaacaattgcttcttacaggagctctgaacgtgtttataamatgcctatcacttataggaagaatatggcagtatacagtactgtgttctttctgctagcatggtggatatctttagcacaacatctggtgggatcaaataaacctaaaacattaaaaaaattcaagaagttaaaacatgagcaactgtgaatataactgtagaaatatgattaaaatttgttttctactataggctgttttgcatgaaatcaaatatgtgagagggtgcattcctcatttttttccttagtgaaaaattaattagggaataagagggaagatgtaaccctgaaatatgtt

SEQ ID NO: 60663 - DNA, 600 bp, Chicken  19866894320310_1
cctcaaaattcaaactccgttgctaacatgagcagctctgtgagttcaccggcagcagactcgggctccggcagcatcgccacttttacaaacccactgatgcctctcatgtcagagcaatttaaggcaaagtttccatttggaggactgttggattcgacgccagcgtctgaaacgtcaaaactgcagcaactggtagaaaacatcgacaagaaggcaaccgatcctaacgagtgtatcatttgccaccgagttctcagttgccagagcgcactgaaaatgcattatcgcactcatacyggtgagcggccatttaaatgtaaaatctgtggacgcgctttcactactaaaggcaacttaaagactcattacagcgtccaccgtgccatgcccccactgagagtacaacattcgtgcccgatctgccagaagaaattcaccaatgccgttgtgcttcagcagcacatccggatgcacatgggagggcagatcccaaacaccccggtcaccgaaaactatcccgagtcaatggaatctgatacgggatcttttgatgataagaattttgatgatttagacaacttctcagatgagaacatg

SEQ ID NO: 60664 - DNA, 599 bp, Chicken  19866894320313_1
  misc_feature (1)..(197): n is any nucleotide
nnnnnnnnnnnnnnnnnnnnnnnnnnnnnnnnnnnnnnnnnnnnnnnnnnnnnnnnnnnnnnnnnnnnnnnnnnnnnnnnnnnnnnnnnnnnnnnnnnnnnnnnnnnnnnnnnnnnnnnnnnnnnnnnnnnnnnnnnnnnnnnnnnnnnnnnnnnnnnnnnnnnnnnnnnnnnnnnnnnnnnnnnnnnnnnnnnnnntattaaatctaattctacatatatacagaaaagtacaatttcatttaatcagaatctaaaacaggtttgtatggaaaaaaaaaatagcaaacttttttttctkgattctcattttcttcttttgctaagcttgtatattgcacttgctagcatcaagccaggcaacacaaagcattattgtgcttgtgtagtactattcagaggatgtttcctggctattcccaaagtcagatgagcatgtggcaattcaggttgactgaaaatcagcatgaagggagatgataaaaggtaacagacacttattcctgttgcagagtataataatacaagatgagaacattttttcagctatatagtgagtaatctatactgatcctgttttgttattaaacctttgctgcg

SEQ ID NO: 60665 - DNA, 599 bp, Chicken  19866894320316_1
  misc_feature (1)..(54): n is any nucleotide
nnnnnnnnnnnnnnnnnnnnnnnnnnnnnnnnnnnnnnnnnnnnnnnnnnnnnntgagaaccgcagcccatcgcagtgtgagggatggggagcagctgaacaggagctccgagccctcgaggagcctgggttgaacaagccaagcatgggaccacgggcgtctgtgggcctccccttcagcttgggatgggtaatgaagtgtggctgaaagcatgctgttgcaaaaggcaacgtgtcttgcaaacctccttgtgattgggaatactgccttggttacatcactgggggtccttgttacakccccaaggatcctcattatgtccttagtgctgtcctaagcaggattttttttttttctgtgtaatgtagggcacaaaatgtgatggagcagctgcaggtcaggaacrgaggaatggctgggtttctgcaccagtctgtccctaagtcactgagtaagttagtggtagttcaccaaggagtagttcatcattaataatcttttccatcattgcagccttgagttagtttctcccaagacaaccttatatccatcaaacagtgctgacaataaaaatcctcccttgcccaaagcaaaggaa

SEQ ID NO: 60666 - DNA, 600 bp, Chicken  19866894320316_2
tccgagccctcgaggagcctgggttgaacaagccaagcatgggaccacgggcgtctgtgggcctccccttcagcttgggatgggtaatgaagtgtggctgaaagcatgctgttgcaaaaggcaacgtgtcttgcaaacctccttgtgattgggaatactgccttggttacatcactgggggtccttgttacakccccaaggatcctcattatgtccttagtgctgtcctaagcaggattttttttttttctgtgtaatgtagggcacaaaatgtgatggagcagctgcaggtcaggaacrgaggaatggctgggtttctgcaccagtctgtccctaagtcactgagtaagttagtggtagttcaccaaggagtagttcatcattaataatcttttccatcattgcagccttgagttagtttctcccaagacaaccttatatccatcaaacagtgctgacaataaaaatcctcccttgcccaaagcaaaggaaccattcatcaccgggtgcctctgctcttctggtgtcccactgcagcccttccctgcagcaacacctcaccttcccgtggccacaacagccagctatttccccactttg

SEQ ID NO: 60667 - DNA, 600 bp, Chicken  19866894320316_3
tccctaagtcactgagtaagttagtggtagttcaccaaggagtagttcatcattaataatcttttccatcattgcagccttgagttagtttctcccaagacaaccttatatccatcaaacagtgctgacaataaaaatcctcccttgcccaaagcaaaggaaccattcatcaccgggtgcctctgctcttctggtgtcccactgcagcccttccctgcagcaacacctcaccttcccgtggccacaacagccagctatttccccactttggtgtagttgtcctggatagcccatacttcrattcctcaagacgtccagctctaaaagaccatcccactgacacctgggctccctgcaccatacacagtcctgttgctagttgcagcactgcccgaacacacctaaaatgagcaccgaggagagaaagctcagccattttgccttcatttatcagtaaacacctcctgagcctccagacccccagaggatgcagcctttgcaaacttggccagaccttcctggctttcagtcccatattgttgcatttaagacttctttttaattttaaaaatctcatcgatattttgcatctttctttct

SEQ ID NO: 60668 - DNA, 600 bp, Chicken  19866894320316_4
tgaggcataccttgggtttatacaattaagagaagtaaggagacaatagcagaatccttcaaggacgaaaagcctattcctgagaaaaaatgcttttctcttcagatccaacctgagagaagctggcaaagccccactcaaagtcatctgtccgtggcagtgagatggatacacatcccacacctacagggcctgcactgagcactgacctggacagggcacctggccgtggggatgggtggtgagggacaggagcttgtcctctttccttcagctgcctgtggtgtgtggggcatgcaytgaccatcctgtctggccccacagtaacaaaggaattcagcagtgggcagacacgggctggagagatagccacagcaatgggggatctcgggggtgtctgggagcaccccagaacccctccccagatctcttaaatacagcagtaaggggagacatcctggagatgtcctgagcctgtccacacttgtttccccattcttggtgccctggtcaagccctacaaaacacttgccatgttcagtctttactggagttctattgggaaacaaattatgctttaggatttaaatcagtgtccat

SEQ ID NO: 60669 - DNA, 532 bp, Chicken  19866894320323_1
ccactcttgtgcatctggataagtgaaataagatagggatttctaacattaatattcagggacaggttctggaatctgagctgtattaatccaatacgcattgataggaggggtgaggtgcttacatttccccccagtgtctgcattccaacgtcagtgcttctgccacttaatgggcgacacatcgaactgtgagccttcgccgtgctgtatgagatgcagtgggcagattgttctttgctattcagagaagctgccatttaaggcagtcagctaattctgtcacacgcatgggcaaarcataatcataacataatcctgattagcttgttaaatataaaatatagttgcagataacttttctaaattatattgaagttggctgaaagggatgactgttctgtttgagaaagaaaatattactgggaagcatattttaaaagtgaagtagctgttttcttggcaaggttgttgtggtaattagtcatgctttagaaaaaataactaaatcagcacagaagttttatccgtg

SEQ ID NO: 60670 - DNA, 600 bp, Chicken  19866894320330_1
aataactgttgaaataagacgttttggatagtgcatttcaaaaaatgttgcattttctacaccatatgtatgacatttctgtgatgttcctcagttatcttctgagctttctctttggaggaagaaaggaatctgaactacaagtttcaaatgccagatcctgatttcaaactttcctgcattcagaagcattcagaactgaaggttttgttttggcccatttctcataataagtaaatatgttaaacaatattggtcttgatgctggtctctagggtgctccactattaatcttctctrtactgagaatgggcaatttattcttagtccttgctacccacctattaaccagcttttagtcactgacaagaatttacctcttacactgtggttactaaatttccttaatagtctcttgtgaggaactttatcaaaagcctttcaaaagtcataagtatattcatcgccttttctttatccactgttttgtttaccatttcaaataatcctagtaggtttgagaagtataattcataccagaaaaagcaatgttttatttctttatcatattatactgtataatacagtcttctttctttt

SEQ ID NO: 60671 - DNA, 600 bp, Chicken  19866894320334_1
atgattgcaattcaagtaaggaagtgtgcaggagaacttacctgaagtagagatgtcaaacaatagcctcagtagatcaaaagcattttaagagctatgagaggaaaactgcgcatgtaattaccaaccaccttatatacaattcagattacaagtctggcacctttcagatgaatggataattactggaggttgatcgataggtataccttaaaactatgtcgacatatcacactttctctggtgtgaaaagctgaatactattgcattttcttcttttttccttttgttttttttttycccctctygattttcttctcaccacataaaacgttattagctacaagtctacatagaacataagagccactgtaagcaaccttaaagcaattattcagttttaacacagtccttatttatgaaaactgttctaaaaatcactgcatggccattttgcaagtaatccttggtaccttatgttcagttctaaccctacaagagacayacagatctttaagcttttatcctgaatcactcataataaggattttttgctctctcccaaaatgttttccaacagatgtgcagccaacacttagg

SEQ ID NO: 60672 - DNA, 600 bp, Chicken  19866894320334_2
aattcaagtaaggaagtgtgcaggagaacttacctgaagtagagatgtcaaacaatagcctcagtagatcaaaagcattttaagagctatgagaggaaaactgcgcatgtaattaccaaccaccttatatacaattcagattacaagtctggcacctttcagatgaatggataattactggaggttgatcgataggtataccttaaaactatgtcgacatatcacactttctctggtgtgaaaagctgaatactattgcattttcttcttttttccttttgttttttttttycccctctygattttcttctcaccacataaaacgttattagctacaagtctacatagaacataagagccactgtaagcaaccttaaagcaattattcagttttaacacagtccttatttatgaaaactgttctaaaaatcactgcatggccattttgcaagtaatccttggtaccttatgttcagttctaaccctacaagagacayacagatctttaagcttttatcctgaatcactcataataaggattttttgctctctcccaaaatgttttccaacagatgtgcagccaacacttaggcctgggag

SEQ ID NO: 60673 - DNA, 600 bp, Chicken  19866894320334_3
ataccttaaaactatgtcgacatatcacactttctctggtgtgaaaagctgaatactattgcattttcttcttttttccttttgttttttttttycccctctygattttcttctcaccacataaaacgttattagctacaagtctacatagaacataagagccactgtaagcaaccttaaagcaattattcagttttaacacagtccttatttatgaaaactgttctaaaaatcactgcatggccattttgcaagtaatccttggtaccttatgttcagttctaaccctacaagagacayacagatctttaagcttttatcctgaatcactcataataaggattttttgctctctcccaaaatgttttccaacagatgtgcagccaacacttaggcctgggagtacaaaattctcagtgctatatgcttggctgcagacattgctcaaggacatacacagattctaaataccattttatttatttttcaattaaaaatacaagacctcgtaatagtttttaaataccaaacagaacttactttgtatttaaattatacagcttccatactaaccaggaaacggcaatacctttatcctgg

SEQ ID NO: 60674 - DNA, 600 bp, Chicken  19866894320341_1
cactcctattaaagaagctaaatagaatggcatgagatgaagaaaagtggaggtcagcagtagtcctgatggaaacagtgaacaaaaacctatacggggacaagaccagcagaagcaaagggtttgtgggaaagaagttaacaagacggttaaggcataggccagttaggagtgagccagctccttatgaggaagcgggcaggactagtaagacagtgttacctttgcttacaagaaagcaatacctttactacaaaaggcacttgctgcagaaatcagctcacagtcagcaagcagagytgcactacagcatcacatgaagcacagagtcctctccaccctggcaaacaaagtgttcactgaagtttgtttcaatcacaaagccctcacggaaagcagttttaattgtgtgaattcatataagcaattatacttgaagctattatgccagttacccccaaataatgtaaacagtcatctcgctgacagataaaacgcacggtgccaaacttcttacaacaagagggcaggtgattaatcatgttcagttttgatgatttaatgccacagaatttctgttcatgttactgacaattaacr

SEQ ID NO: 60675 - DNA, 600 bp, Chicken  19866894320341_2
tgcactacagcatcacatgaagcacagagtcctctccaccctggcaaacaaagtgttcactgaagtttgtttcaatcacaaagccctcacggaaagcagttttaattgtgtgaattcatataagcaattatacttgaagctattatgccagttacccccaaataatgtaaacagtcatctcgctgacagataaaacgcacggtgccaaacttcttacaacaagagggcaggtgattaatcatgttcagttttgatgatttaatgccacagaatttctgttcatgttactgacaattaacrcagcttgcagactgagagaagaaagctttctgttccaggggagtaaaatttccatgtaaatgtgggacaaaggttccaaacggatggcaaccctgaaaaggaaagatttactgctcgacgtgcattttggcaaagaaaatgtttttaatagtagtaatagcagagaaacgtcctgcctgttcactaattgaatttgaggaattcagacaccctcatttatacagaaatggttttcctgccttccctcttctcaagcctggcagatggactaggcaaaaatgtgaaattcatgcagtcatc

SEQ ID NO: 60676 - DNA, 452 bp, Chicken  19866894320341_3
cagagaaacgtcctgcctgttcactaattgaatttgaggaattcagacaccctcatttatacagaaatggttttcctgccttccctcttctcaagcctggcagatggactaggcaaaaatgtgaaattcatgcagtcatcactgctcttagcccacttaattcataggcttttgtcaaaacttctttagtcaagattaagagagagggtaccgtatctatcatagccatctggactgaaatttgccaatctggactgattggacaaaagcctatgttatgctgaagcctatttgggcttygctgaaggaactcaggcacaatggccaccaagtacaccaggagcctggcacatccagccatgctccgcactgctcagctcctcctccayttacacaactggaaacaagtgaaaaatgttcgtaagtctaaaggttagcattttatattcttt

SEQ ID NO: 60677 - DNA, 363 bp, Chicken  19866894320341_4
ctcaagcctggcagatggactaggcaaaaatgtgaaattcatgcagtcatcactgctcttagcccacttaattcataggcttttgtcaaaacttctttagtcaagattaagagagagggtaccgtatctatcatagccatctggactgaaatttgccaatctggactgattggacaaaagcctatgttatgctgaagcctatttgggcttygctgaaggaactcaggcacaatggccaccaagtacaccaggagcctggcacatccagccatgctccgcactgctcagctcctcctccayttacacaactggaaacaagtgaaaaatgttcgtaagtctaaaggttagcattttatattcttt

SEQ ID NO: 60678 - DNA, 599 bp, Chicken  19866894320342_1
  misc_feature (1)..(85): n is any nucleotide
nnnnnnnnnnnnnnnnnnnnnnnnnnnnnnnnnnnnnnnnnnnnnnnnnnnnnnnnnnnnnnnnnnnnnnnnnnnnnnnnnnnnncaacccaggcacaggtgcccaaggagggagggcagtgggactgcaggcctacatctctccctatatcttttccaccaagcttcacttcatttttatgatggtctcaaaacccatcaaaccgcagtgaacatgagaatgaaaaagcttccagccagaagaatgactcagtaaattagattagaactatagcaataaactgttgcttgtggttttcktgtatttttttttycttttccttaattctgcaaatctggcccaccttccttttctctggctcccacctctgacagtaagaagttatgaggtcttaatatccctgcagcatgaaggagaaattgcttgtttccttctccgcatgaggcttttacgaaacatttagacttcaccagctcagcaaacagaatacaaaacactgccgatagcagagaacatcaaggtatgatatacttgatawacagaaagaaaaggcaaggtggtgggttttgttgttgttgttgtttttctgttttgggtt

SEQ ID NO: 60679 - DNA, 599 bp, Chicken  19866894320342_2
  misc_feature (1)..(71): n is any nucleotide
nnnnnnnnnnnnnnnnnnnnnnnnnnnnnnnnnnnnnnnnnnnnnnnnnnnnnnnnnnnnnnnnnnnnnnncaacccaggcacaggtgcccaaggagggagggcagtgggactgcaggcctacatctctccctatatcttttccaccaagcttcacttcatttttatgatggtctcaaaacccatcaaaccgcagtgaacatgagaatgaaaaagcttccagccagaagaatgactcagtaaattagattagaactatagcaataaactgttgcttgtggttttcktgtatttttttttycttttccttaattctgcaaatctggcccaccttccttttctctggctcccacctctgacagtaagaagttatgaggtcttaatatccctgcagcatgaaggagaaattgcttgtttccttctccgcatgaggcttttacgaaacatttagacttcaccagctcagcaaacagaatacaaaacactgccgatagcagagaacatcaaggtatgatatacttgatawacagaaagaaaaggcaaggtggtgggttttgttgttgttgttgtttttctgttttgggtttttttttttctttt

SEQ ID NO: 60680 - DNA, 600 bp, Chicken  19866894320342_3
gaagaatgactcagtaaattagattagaactatagcaataaactgttgcttgtggttttcktgtatttttttttycttttccttaattctgcaaatctggcccaccttccttttctctggctcccacctctgacagtaagaagttatgaggtcttaatatccctgcagcatgaaggagaaattgcttgtttccttctccgcatgaggcttttacgaaacatttagacttcaccagctcagcaaacagaatacaaaacactgccgatagcagagaacatcaaggtatgatatacttgatawacagaaagaaaaggcaaggtggtgggttttgttgttgttgttgtttttctgttttgggtttttttttttctttttctttttttttctttttttttgtagcatgtgatgttatatttcacaaaaggagtactcaagtttttgttacaaattgcatgcttttgttccttttgttactcatcctgaccacaataaaatgcctcattctggactctgaataattaactgtaacaaagagaaatggcagggagaaaaagaaattcacaaaagactaccgaacttctaagcatttattaaggagac

SEQ ID NO: 60681 - DNA, 508 bp, Chicken  19866894320346_1
agagcgactgcctctgcttggaggaggagagcatggccaggaggagcaggaggtgacttcctgcctcccgcagccgtacaacggagatgacaacctgcaggctgctctctcttggaaagctgctgtgcaggagcactggctttgcaacctgctgatgagttaatgcggaacagagccctgcagaacgcaggagtgagagcatcccgggctgcagggataaatcactggggccagggctgggcatcacaaggctgccagctcgtaaaggctgagctcctccactggcccagctgctcactkggatattctggagcgagctgagcttggccccatgagtttgctcttcaaagcattcctgtctttactgtccaacgcaccaaatgtctcgcccagctgcacagtgggtctgtgagccttgttaagagctgggtttattgtgctttcttgaggaatgcacactcccaacaaggagctgggaagtgttaactaaggactttaggctctgtag

SEQ ID NO: 60682 - DNA, 600 bp, Chicken  19866894320347_1
aatacataaatttgccaagaaagcaactttggtactctaataatctcccagccacccatcacttttgtgggactttaaagattacatgtgatttctattaaagtgaaagaaacaagctctcaaacaaaaaagtaattgttttaaattgaagaactttgacactatctatctctcttgtgcagataacttagactttatgaagatgtcagtcacaaaagttgagatttattactgtcatgtaattctacaaaactcagattttcaaaaatttgtatcttgaattcatcaattttacatttwaaaaaaatgaacaaagatttgcattacttttattcatttcatctgacttgatttcctagattaagttaaaaaatatttttaaaaggttgtggtaggttgtggcttttgctgttgttttgtacagtacaactcatcattttgtacttcagcttaagtcatggaaaaattaacatagttcagagatttctggaaagaatctaatcatgttcttagccatatggaagaactagaggatgctcacttcagattttcatattagtcattattcttacatttggctattatcactatttgtctgag

SEQ ID NO: 60683 - DNA, 600 bp, Chicken  19866894320347_2
tggctattatcactatttgtctgagtgtaatgacaaaactgctacaaataggtagcttcacacatggtatgaaatgtctcgctaggatatattcattcttctgagtcgacagttactatttgtagagatttatatcttccttttaacattcaacacaaatgttttaaaatatgcttgtaggagtcctttatgacgtagtccctgtgtcacaggaattaatagaaaaactcctactgacttcagccctgttaccagaagaaacaaacttaaaatccctcccttgtaataacactttttggwgttttggagatttttacatttgtgtgtgtgtgtttcactataaccacatcttttcattttcttttgggtgtaggttagagccaaaaatctatgaaaaagcagagacttcccaaattagtcttctaagctcataccctatatcattctttccttcttcccttccatattctcttcccttccatcagcataataaagaacccttttcatatcattaaagattttcaaatattgagtttgatcataatttcctttttcatgttgaaatatcacatcttcttcaggctatccttcaagcatcag

SEQ ID NO: 60684 - DNA, 559 bp, Chicken  19866894320359_1
aagctctgatttaaaactgagtggcatgcatgctgccatatctggagcaggagctttacttactagaattaaagaagctacatgtatctgaaagacaggttgcactgataaaattttgattttatttccttacctttctctattattattattgttattatttttagtccaaactggaattgtttggtctggagaagagatgctcaggggagaacttaccactccttacctacaatgacctgaaaggcagttgtggtgaggtgggggtcgatcagcctctttccagataacaacagcatratgaaaaggaatggcctcaagttgcaccaggsgaggttcaggctgggtgttaggaagcattccttctcagaaggagcagtgaggcagtggctcgggctgcccagggaggtggtggagtcaccgtccctggaggcgttcaggaagcgtgtggatgtagcactgagggaygtggttagtgggcayggtgggggtaagttagatgttggaccaggtgatcttggtggtcttttccactgtaatgattctattctatactata

SEQ ID NO: 60685 - DNA, 527 bp, Chicken  19866894320359_2
ctgccatatctggagcaggagctttacttactagaattaaagaagctacatgtatctgaaagacaggttgcactgataaaattttgattttatttccttacctttctctattattattattgttattatttttagtccaaactggaattgtttggtctggagaagagatgctcaggggagaacttaccactccttacctacaatgacctgaaaggcagttgtggtgaggtgggggtcgatcagcctctttccagataacaacagcatratgaaaaggaatggcctcaagttgcaccaggsgaggttcaggctgggtgttaggaagcattccttctcagaaggagcagtgaggcagtggctcgggctgcccagggaggtggtggagtcaccgtccctggaggcgttcaggaagcgtgtggatgtagcactgagggaygtggttagtgggcayggtgggggtaagttagatgttggaccaggtgatcttggtggtcttttccactgtaatgattctattctatactata

SEQ ID NO: 60686 - DNA, 391 bp, Chicken  19866894320359_3
ccaaactggaattgtttggtctggagaagagatgctcaggggagaacttaccactccttacctacaatgacctgaaaggcagttgtggtgaggtgggggtcgatcagcctctttccagataacaacagcatratgaaaaggaatggcctcaagttgcaccaggsgaggttcaggctgggtgttaggaagcattccttctcagaaggagcagtgaggcagtggctcgggctgcccagggaggtggtggagtcaccgtccctggaggcgttcaggaagcgtgtggatgtagcactgagggaygtggttagtgggcayggtgggggtaagttagatgttggaccaggtgatcttggtggtcttttccactgtaatgattctattctatactata

SEQ ID NO: 60687 - DNA, 376 bp, Chicken  19866894320359_4
ttggtctggagaagagatgctcaggggagaacttaccactccttacctacaatgacctgaaaggcagttgtggtgaggtgggggtcgatcagcctctttccagataacaacagcatratgaaaaggaatggcctcaagttgcaccaggsgaggttcaggctgggtgttaggaagcattccttctcagaaggagcagtgaggcagtggctcgggctgcccagggaggtggtggagtcaccgtccctggaggcgttcaggaagcgtgtggatgtagcactgagggaygtggttagtgggcayggtgggggtaagttagatgttggaccaggtgatcttggtggtcttttccactgtaatgattctattctatactata

SEQ ID NO: 60688 - DNA, 599 bp, Chicken  19866894320362_1
  misc_feature (1)..(80): n is any nucleotide
nnnnnnnnnnnnnnnnnnnnnnnnnnnnnnnnnnnnnnnnnnnnnnnnnnnnnnnnnnnnnnnnnnnnnnnnnnnnnnnntctacaatggtaacacacttatagtataacagaactttaattgggagttatttctttccatcaaaatttattattgaaaaaataggacagaaataatacaagcgacaaagtgaggagtatgaaatatcttcttcttaactgatggcagatcatctttaatgccacctagctgagcatgtaacaccatccaaagatgttatagagtttcaatactacttcrcaagtgagctctggactgagacactagggctggtgtaccctgctctggctttaagtggatcttactgtgagatctggatggcattcaggtaagaataaggggtgactctactgaagtcaacagagctgtgcctacttatgccaaatgataatctggcccatattgctgttttttattagagttatgtcagagctgctgcttcatacttatcgattaatcaaagtgatacataaaacatatggatccaagaggagcagggtaaaggatgacatcttccagtatcttatcatatgaatact

SEQ ID NO: 60689 - DNA, 599 bp, Chicken  19866894320363_1
  misc_feature (1)..(93): n is any nucleotide
nnnnnnnnnnnnnnnnnnnnnnnnnnnnnnnnnnnnnnnnnnnnnnnnnnnnnnnnnnnnnnnnnnnnnnnnnnnnnnnnnnnnnnnnnnnnnccccaccgatggggacgcaccgcagcactgagggcgttcgagctgaccccgtccccattcctcaccgccccaccgccacccccatgcactcaggacccctctcggacccccccttacccgaggggatgcgccacggtgaagcggcgctgcaggcggatgctctgattcatcctcagcctcctgaacagcacgggggagttacggggrgacccccgcggggaccccaccggcgacgacatccccggggacggcagcatggccccactccgggcaccgcagcgyagcgctgggggtccggacccacggggatgggagcggtgcggagcaggaaatgcgcggccgttccccccgcggccccgggaaactttccatcccccctcccgcccgagcctgagaaattaaacaactgtctggttcggccccccccggcgccccgacggctcctgcagccccacgtgagcacggcctgcaggcacgtggccctgtgccacccgctgccctcccgt

SEQ ID NO: 60690 - DNA, 599 bp, Chicken  19866894320363_2
  misc_feature (1)..(18): n is any nucleotide
nnnnnnnnnnnnnnnnnnccccaccgatggggacgcaccgcagcactgagggcgttcgagctgaccccgtccccattcctcaccgccccaccgccacccccatgcactcaggacccctctcggacccccccttacccgaggggatgcgccacggtgaagcggcgctgcaggcggatgctctgattcatcctcagcctcctgaacagcacgggggagttacggggrgacccccgcggggaccccaccggcgacgacatccccggggacggcagcatggccccactccgggcaccgcagcgyagcgctgggggtccggacccacggggatgggagcggtgcggagcaggaaatgcgcggccgttccccccgcggccccgggaaactttccatcccccctcccgcccgagcctgagaaattaaacaactgtctggttcggccccccccggcgccccgacggctcctgcagccccacgtgagcacggcctgcaggcacgtggccctgtgccacccgctgccctcccgtccccgaggtggcagctgtgcctgtcgggtgaggatgctgtgctgggatgcgggcagcagtgccacgctgagctcc

SEQ ID NO: 60691 - DNA, 600 bp, Chicken  19866894320364_1
caccaaaataagacgactgaatttcacgcaaacagataagcagcaagtgaacaaaacactctttatcagcagtatgcacttcagacaccgatttgcagcccttgtgttgtattgtcatatttttccattccaccaattcacctcgccttccaaatcccttccagcatatcttctagaagccctgatgcactaaagcagtagaactctgatggatgcagagccttgcagaacagagcttaacctgccatcctggcagctgcagtacattactgttagaagatgctgtagagcatggaaacytaaattcttgaagcatgctgtggtattctgtcctgttccttctctcttcacacaaaaggcaaagctaagagtagaaaaaatactgaaaaatgactgtataggaagaactgaaaaaaacaaacaagtcatacaaaagtaagaaacaggcactgctgttcaaatcaattccctcaactaaataggcagtatatctcaaaaaaatctcacagcagcagcactctcctaaggacccacaaaccatcatcrttccagcagccaaaagatgcatttaagccatgctatagctcagtggagctgata

SEQ ID NO: 60692 - DNA, 600 bp, Chicken  19866894320364_2
atcctggcagctgcagtacattactgttagaagatgctgtagagcatggaaacytaaattcttgaagcatgctgtggtattctgtcctgttccttctctcttcacacaaaaggcaaagctaagagtagaaaaaatactgaaaaatgactgtataggaagaactgaaaaaaacaaacaagtcatacaaaagtaagaaacaggcactgctgttcaaatcaattccctcaactaaataggcagtatatctcaaaaaaatctcacagcagcagcactctcctaaggacccacaaaccatcatcrttccagcagccaaaagatgcatttaagccatgctatagctcagtggagctgatatcaggtattgacaaaactaaatgttgccagacatcaatgtaccaccgcatactaattctatacaaaaaataaaaggcgggtgtgaataatttatcatcttttctaaagcaggcgtgagagtgaaagctattagcaaaccagatacaggtaggctcggattgattaaaatggcttcaagctggggggagatttctaacatgcatgatttcttcttcctaaacaaactggattacatgcaaaaagaaa

SEQ ID NO: 60693 - DNA, 600 bp, Chicken  19866894320367_1
tttgaatagctatggatagctcatttattataaaatacttgtatttgtcaagcctgtcatgagagcacgcacccttgaggaaaaatggctttttcctttgctccaccatctcagacagaatttgtcatttgatgggcagtcattattagcctggccttttacactggctagggacctgcctaacttgagaaaccaatcaatccagtgatgctctgatttctttcaaaaaggacaggagattcacattatacataagaaaaaccttttctactgtaagagtcatcaaaacctggcacatgwtgctcatagaagttgtagaatacccatccttggagatattcaaaacctgactggctatggcactgagcaacctactctagttgaccctgtttggagtggaggcgttagaccagatgatctccagtggcttctgccaacctcagccattctgtgagtctgtgaccagagatctagtccatctttagcatgatttaaagagggcccttccctctcatcccatcacgtgcactcaacgcagtgcacatagaacctgataggaagagtcagcagttcacatactgaaaaaatgggagtgtcaga

SEQ ID NO: 60694 - DNA, 600 bp, Chicken  19866894320369_1
cttccttttcatttaaagtatgtgttttcttgctttaaaatacgcttcagaattttgtctctatgaggtttcatacatcctttgtacaatataatcttaatttttacaacttgttagttcatgaaatttacatcttcaaccctgacaatcatgagcagaacattcataatgagtgtgtatgagttttatatcacaagcatgtcaatcatattgctttaaactttgattcagttagatatgaaaattagtttctgaagaggcactagtgtgaaagtcttgcattatcagcattattactaygtttttatagaagctaaataaatgcagattaaaaaaaacagatgaagatttgttagtttatgttctttcattttctgatgaaacttctaaaatgccaacttcctactgtaaaatgctgtaaattcatgggattttgtattgtgattcataacaagtaacatttttctttctgtgtagaatcccttgcatttggagaaatgtagatatttaagagaaaaaaaaaatctccttgggggaaaaaaagcctggcataaaaccagcataaaaatatatataatgtgaaacaattttatgtaaact

SEQ ID NO: 60695 - DNA, 600 bp, Chicken  19866894320369_2
gtttatgttctttcattttctgatgaaacttctaaaatgccaacttcctactgtaaaatgctgtaaattcatgggattttgtattgtgattcataacaagtaacatttttctttctgtgtagaatcccttgcatttggagaaatgtagatatttaagagaaaaaaaaaatctccttgggggaaaaaaagcctggcataaaaccagcataaaaatatatataatgtgaaacaattttatgtaaactaatctaattttttttttgaagttagaaagaaacaaccagtttttcttataatttygtatcattgccactttttcttcatgaaggctgaaattttacattgttttttaactcagatgttttagcatttttaaattatgatctatgttatgttattcctaaatctattacattgtctgtgatgaataacatatcatagcaaatacatatatctgcagatatttttcttaagaaatatctgaagtcaggttaaccagaaattgccatattgaacttgctaatcataaggattttctttcacgtccttaacaacttccaaatagctcaggcactctgcttctgctcagaaaagagtctc

SEQ ID NO: 60696 - DNA, 600 bp, Chicken  19866894320384_1
ggtttttgcaaatacagggctgttctacatgagctcccgcaccaccagcggggggtcttggtaagaaatctctgtatgaccacgtgaaaccacagactgggactggagaggcaccaacctcatccctgggcagatcaaccatggagtgaataggaaacagatggtattttcctcctaaacttaacaagtaatctcaaccaaggtccatgtgtccatgtgcatattcaagttatcaaatctccagtgactttaggaacatgaactctcctgcttaatgatgctaataatgcaacagcttcraatggtcagtgcttgtcagctgggtgagggaagctgcagyagaaaacagcacacagctcctggtacagcctgatgctggttcccattgcaggttggtcctacaaaccccatgcaccattgccagaatcagagtcatagaaccatgaagtcatagagtcaaagtcataagacaatagagtcaaagaattagagtcatagaactatagaactatagaatcatagggtcagagaacaatagagtcaaagagtcacagtcatagaaccatagtcatagaatcatagagtcagaaccatagaacc

SEQ ID NO: 60697 - DNA, 600 bp, Chicken  19866894320384_2
accaccagcggggggtcttggtaagaaatctctgtatgaccacgtgaaaccacagactgggactggagaggcaccaacctcatccctgggcagatcaaccatggagtgaataggaaacagatggtattttcctcctaaacttaacaagtaatctcaaccaaggtccatgtgtccatgtgcatattcaagttatcaaatctccagtgactttaggaacatgaactctcctgcttaatgatgctaataatgcaacagcttcraatggtcagtgcttgtcagctgggtgagggaagctgcagyagaaaacagcacacagctcctggtacagcctgatgctggttcccattgcaggttggtcctacaaaccccatgcaccattgccagaatcagagtcatagaaccatgaagtcatagagtcaaagtcataagacaatagagtcaaagaattagagtcatagaactatagaactatagaatcatagggtcagagaacaatagagtcaaagagtcacagtcatagaaccatagtcatagaatcatagagtcagaaccatagaaccatagagtcatagaaccatagaatcatagaattatagagtc

SEQ ID NO: 60698 - DNA, 600 bp, Chicken  19866894320388_1
gcctaaggtaggaaccaggtaaaaatgtcggaataattgcacagaaaataattaaacaccatgctgcagcttcacactaagaagtcacacttcgctagctgaatacacaacatcatttgggaaccgtatatttatttattgtgagcttcattatgtctgaggaagatacgctctcaggggaataggtgggttgtactggatttatagtacaaacacaaagaccagcaaaggaaagatgtaccgtagatctggtaagacttctgtttgttttaaagaagacctaagatcagatgcactgcraaactgatgttggaggggatgaaaagactatcatttccttgccttgtgagaagaccaagtctcagatgaaccttacaagtcttcaggagtggttagagcagattaccacggagaaaaatggagtcatttctggcattacagttctggcagcctgaattttaagacttgttttgttaaaaaaaaaaacaacaaagtctttacttggaataactacatgtatttttattgctcagcatttattgctaagcctttgaaaaacaataatattagcaataagaatgagaaagaagtgaactttgg

SEQ ID NO: 60699 - DNA, 600 bp, Chicken  19866894320392_1
cattctgagaaatataagaaaagggatgaattcacgaataggaaaatacggtttcaaatgcttcatgttagctcttaccttgtgcctctttgtatttcagcagttcatttgggggttgagttttcagtcaactggcaatgtgcaattgctaaagagaaatggtaaatgcttgcaactgaacagcatcaggctggccacacttcacatctcaaaaggggaaagggtacagcacatctgggaagaaccagtggggcccgtggctccactgcacacaacatttatggatactgattcattacyggctgaccacaagtggaagaactgagtgcagtctgcgtttgcctcaagttgtgctgagtttgagctgctgaggatcaagcagtaccaaatcattcctggtcactccaaactgatctccaaaacccccttgcaatacmgagctgtttctcacctacagaaaagtggtaaatacagtgtttcagtggatagcagacagatctgagagctgttatactatgcagtatgaggcatttcaaatcagtgaggttgagtttaatactggggattcagtgggagactgcatttgactgtaagggctat

SEQ ID NO: 60700 - DNA, 600 bp, Chicken  19866894320392_2
atgtgcaattgctaaagagaaatggtaaatgcttgcaactgaacagcatcaggctggccacacttcacatctcaaaaggggaaagggtacagcacatctgggaagaaccagtggggcccgtggctccactgcacacaacatttatggatactgattcattacyggctgaccacaagtggaagaactgagtgcagtctgcgtttgcctcaagttgtgctgagtttgagctgctgaggatcaagcagtaccaaatcattcctggtcactccaaactgatctccaaaacccccttgcaatacmgagctgtttctcacctacagaaaagtggtaaatacagtgtttcagtggatagcagacagatctgagagctgttatactatgcagtatgaggcatttcaaatcagtgaggttgagtttaatactggggattcagtgggagactgcatttgactgtaagggctataaaacagaccctaaatacaaaatattattactttattatgccttttaaaactgactgttggtactaagaaatatataaatataagcataatttatttttcaacataatggatagctgcagtaagcatatatattttg

SEQ ID NO: 60701 - DNA, 600 bp, Chicken  19866894320393_1
taggtgaaagtcaatagactttccaaacagtattctgttaagaagttttgaggagtcggtagttataagtctagttgattatagatttatctagatacacacttgtgtagagtaaaatgtttcgtgattatgaagattagaaatgagcatcttaaggaaggttcttgtttatgtctgtctgcttttagtcagtagcatgtatttaagagtctcactgctacagggaatggtgttttctgaaagaacagtagtctgaagtacgcatgtaaagttgaactgtaagtattttggggtgagtaytgagtgatgctcatgatgtgttttcttttttggggaaaaaaatgttttaagatttggcraaaaatggaagtgaatgatggtagaagggtaaatgtttgtagttaatttgcaaaaatgacatctgaactataggaacatatgaccacctggctgaaaatttcagtctgatattacttgttttcttgttttcctctaccaagaaattccctgtaggcattccatgtcttcacttagttcagtaagttcctatggtaaattgattacataaataaaaatagagctaattagtgagattatcaa

SEQ ID NO: 60702 - DNA, 600 bp, Chicken  19866894320393_2
tagttataagtctagttgattatagatttatctagatacacacttgtgtagagtaaaatgtttcgtgattatgaagattagaaatgagcatcttaaggaaggttcttgtttatgtctgtctgcttttagtcagtagcatgtatttaagagtctcactgctacagggaatggtgttttctgaaagaacagtagtctgaagtacgcatgtaaagttgaactgtaagtattttggggtgagtaytgagtgatgctcatgatgtgttttcttttttggggaaaaaaatgttttaagatttggcraaaaatggaagtgaatgatggtagaagggtaaatgtttgtagttaatttgcaaaaatgacatctgaactataggaacatatgaccacctggctgaaaatttcagtctgatattacttgttttcttgttttcctctaccaagaaattccctgtaggcattccatgtcttcacttagttcagtaagttcctatggtaaattgattacataaataaaaatagagctaattagtgagattatcaaccaaatgacgtagttatcttagccatgctaaaggaagaaagtcaattgctatgatctga

SEQ ID NO: 60703 - DNA, 458 bp, Chicken  19866894320395_1
gtttgagtaaggaatatgttactctatcaaagttttgcagaactgggaaaaatagagtcaacaaaattttggtgaaattaactgctttaatctctttctctcacaattacgtagagaagccaatctctactgatactgcttttattattcttgattttctgattagttgtatatgtgaccatggaacctagaaggcccagaaggattccaactcagttttttgtttgtttgtttgtttgtttttcagtaaaaccttggaatacaaaaccctgattcaaaggacaagttcatgcctttccwggcacttgtagaggaatttctctgtgttgaagaaggaatgtcaggaaagactttagggtgtttgagagcttcatcagcaaacaaggaatgtttgcaggtccaagaccaggaaagttggccaaagaacagtgataagcaacagagagcaccttgcaaat

SEQ ID NO: 60704 - DNA, 600 bp, Chicken  19866894320409_1
agaggatacaggtgtctttctctaggttaatctatgagggttggttctagccttttgtggtgcttgtgcagccattaagttgatttcgttggcccaaatgtttgatgaaaacatttggtgtgggttttttttatgcatcagtattcacgaaaaacaaaactgcaaatttctgcctctgactctaatgtgaaaggagtcaagaagctgttggggaattttccatcagaatacttatatgacagataatctccttctatgagtctggaatagacacagcccagagattaagggtattaaggrcggaaggggcraagcacaaatcctgtgtcagagtggaaccaggcagggaagggcagggtggccagagtttgtaactgaaatggctgtttggagccatccccatcctgtgtgggtcaaggagcaccagtagggcagggggtgggatgctggtctcacacccccacacccagtcaggccagagatgtcactgctttgggcaagaagggagactaagaaaagaggccactgaagttgggtggatgaagggtgtccccgtggacagacagggcccaggatctgctccaggttcgttttcatcac

SEQ ID NO: 60705 - DNA, 600 bp, Chicken  19866894320409_2
gtgtctttctctaggttaatctatgagggttggttctagccttttgtggtgcttgtgcagccattaagttgatttcgttggcccaaatgtttgatgaaaacatttggtgtgggttttttttatgcatcagtattcacgaaaaacaaaactgcaaatttctgcctctgactctaatgtgaaaggagtcaagaagctgttggggaattttccatcagaatacttatatgacagataatctccttctatgagtctggaatagacacagcccagagattaagggtattaaggrcggaaggggcraagcacaaatcctgtgtcagagtggaaccaggcagggaagggcagggtggccagagtttgtaactgaaatggctgtttggagccatccccatcctgtgtgggtcaaggagcaccagtagggcagggggtgggatgctggtctcacacccccacacccagtcaggccagagatgtcactgctttgggcaagaagggagactaagaaaagaggccactgaagttgggtggatgaagggtgtccccgtggacagacagggcccaggatctgctccaggttcgttttcatcactcaatggctct

SEQ ID NO: 60706 - DNA, 600 bp, Chicken  19866894320411_1
tccttctattgtaattaaacagaacgttcatttccaagtgttatgacatttaatcagctgtataaaaataataatagtaataagaatgataagcatcatcaccaaagttgttatgagagcaaacggagatcacaagtccagcgtttctaaaagctgttacaagcaaagtgtttcacaccgtaagtactgtccaaagtattttcttgggacatatccagataagcttctttcttcaaagggagaatttgcaacaaattccacaggtattactcattaaacaaaacaactatactctgtcaytgtattgaatcgacatatccacataaacacctgattttttttccggattagaagcaaacttcctttcttctgcagtagagtaattctaaataaactctcttctaataaatgggtgttttaaactttataccccagactgagtaaaacactaaaaatgcaaaaagatgtcaggaatgtaaagtaatgtattagatcagttttcccataatccgtgttctakaaaagaggggggaaaaaaagaaaaaagaaaagatgctagtcctgaaatatttggggtggaaaggaagagatggctctact

SEQ ID NO: 60707 - DNA, 478 bp, Chicken  19866894320411_2
aagcttctttcttcaaagggagaatttgcaacaaattccacaggtattactcattaaacaaaacaactatactctgtcaytgtattgaatcgacatatccacataaacacctgattttttttccggattagaagcaaacttcctttcttctgcagtagagtaattctaaataaactctcttctaataaatgggtgttttaaactttataccccagactgagtaaaacactaaaaatgcaaaaagatgtcaggaatgtaaagtaatgtattagatcagttttcccataatccgtgttctakaaaagaggggggaaaaaaagaaaaaagaaaagatgctagtcctgaaatatttggggtggaaaggaagagatggctctactgacacttacagttcctacagcagggtttgtatctgcttttaagtggctttttatgggcaatcaagcactggcaccatactggaacctttcaagcatct

SEQ ID NO: 60708 - DNA, 600 bp, Chicken  19866894320425_1
cctaactgtttatcctcattgtggatatgctaaataattaatggataaaaagtgggtctatggtagtacagctcactgttatctctctcaggtgtgcatttctcttttataaatacccgtgttgtgaaagagtctgctattacaacagaggtaggtaagagacgccttcttctgagtaagcctcttaaactttaatgacttagaggtcataaatgtacaagcaaaccaggtggctgttgtgaatagccatgttgtgtcagtaccccgatattccaaaaaggtacttttacttccttctartaattcatttctttctttgactgcatgagagaatgataaataaaaatctggaaattgttaattaagtacggtattaatgttcacagtttaccattgtataatatcagtatgacccacaagtctctgcctgaatgtgtagtttgcctgtagtgctgcaagtatggcagctgggaacagtctaacctgtctttgttttgaagtctttaggctacaaggtttggccaatattaagaaagttgttattgcatacaggtatagttgaaattcggagggatccactcattatatgtttcaaggtgg

SEQ ID NO: 60709 - DNA, 600 bp, Chicken  19866894320435_1
ctcttctctcttcatgtcttagtttgaatcttacctgctctgagtacaggattcattaatgtaccttttgttcctctggactgaagaaatattagaactatgtatgatatcatctgtacacataaccaaacagtagcaacactggaatttgcagtacactgaaagttgacaagattcctagaattatgaatcacaatttacttcaaatattacacgctgcagaaagaaccttgattttgagtttgtctgttgctgcttttttttttctatgagggatgtactgcatggcttcaggaaaakaaacactttaaccagaagaaccagcagagaaatggtagtgcagttattcacggtttaaagactcgtggaaggaagaggcaaatgaaaaagtattttcagcagggatttcaaaagaaatggacagggaatgaggatgggaagcaggaaggctttaaagccaattaaaattgctgaagtgaaatacagtgaagaactgtatttgtgttagttaatgaaaaaatacaagtgtatgcatgtctgttgagaaagttaaagtaaaaactagatgtcctgagttgttctttgcagaaatactttact

SEQ ID NO: 60710 - DNA, 599 bp, Chicken  19866894320437_1
  misc_feature (1)..(47): n is any nucleotide
nnnnnnnnnnnnnnnnnnnnnnnnnnnnnnnnnnnnnnnnnnnnnnnaagagcctcctgtgaaaaaacagatataaaggtaatcaactgtaaaattcaaaaaagcaaaaaaggaaggtaaactttccttctgtaatacattaccaaatgttgataaaagtaaaagtgtttcaagaggcagaaatattttgtcaatatttgtactgattacttaagcaattaataacatttgtagatatgaaagattaaaaattacaaggactataacactgtagtattcaaggtcattaatttgaggggraaaaaaaaactgcgttgaggtaaaagaatgaatttgactttcctcttgcattggtcattgctgagagaaaaaaaactcagggaatctcaattgtacatgaatacagtatttcttattttaacatgtaaaatcattttgtgcatttatttatttacagtgaaatttcatcaagccttttgtaatgaaaaatcatcactaacttggtcatttttacttgtcacatgakaattagttgataaacatcatcccaagaggtgactgcttaaaaaaaattaagagtacaagaaattgagatgaaa

SEQ ID NO: 60711 - DNA, 600 bp, Chicken  19866894320437_2
atttgtagatatgaaagattaaaaattacaaggactataacactgtagtattcaaggtcattaatttgaggggraaaaaaaaactgcgttgaggtaaaagaatgaatttgactttcctcttgcattggtcattgctgagagaaaaaaaactcagggaatctcaattgtacatgaatacagtatttcttattttaacatgtaaaatcattttgtgcatttatttatttacagtgaaatttcatcaagccttttgtaatgaaaaatcatcactaacttggtcatttttacttgtcacatgakaattagttgataaacatcatcccaagaggtgactgcttaaaaaaaattaagagtacaagaaattgagatgaaaagttgaattcaaaatgaagcgtttttgcagtctttgctataaccttctttaattatgacctctataattatctcatctatttaattacagtctatgcaattacctggcatttttaaacagtaattcttaagttgaatagagacttaaggagaatgaagacaattttaaaatgcgtgagatgaaaaacaaagaagccaacatccccagacatgccatcctagttgaat

SEQ ID NO: 60712 - DNA, 426 bp, Chicken  19866894320444_1
aagtttcaaaaagttcatgacaaatttttgaagtacactacctacagttcatagttacaacatttccttgagatgttaccttattctgtatctttcatttcttaattcattagataaaacagctatatttactgtcagcaagaccacttttgcatttaggcatgaaaagaacaatggctaaaaaacattaagtaacattaagacataacattgagaacattttccaaagtattatgtcttacaaacaaagattcaaataggtagttcaggataacaaaaagagcacataagtgcctcatraagatatgaaaccttcagttgagatcagtgtgagcatatttttaaagtttagcttaaaacttgaattggttgtagtagctattctttcccccccacttttttttttttttttaataataatctata

SEQ ID NO: 60713 - DNA, 600 bp, Chicken  19866894320445_1
aatatcattattttattaaagaaaaatagacattcttgatcactctgtcttgttctggaaagtatgttgctgtttacaggtgtgcaaaaagctactattcatatctgatctttcttcacacccaattttcactaactttgactcttggcttaaattgctgtataatctgctggagaaaagaactgagaagaaggacatttttccttgtatgatttaatctgactggggcttcgctgtactttgttgtggaggttaacttttcttaggttggtgtaggaaatgaaataccaatgctacaaratgtctgggagttcattctacctagaggattcccacataatatagctgtttataatgatactgttataataggtgatgatccatgtaatggaaatgtagacaaactcttactttgcaatgcttagcttgtttacttcttctgaatttaattgcttcaggcagaagtagacaagaaagttttacttatcatcaaatgtaaggatggaggtatgcacaggactgcagtatggaaacatgacattttgagttttttgtttaggccataaagaagttgttgaagtgaaaggttttcttaggaca

SEQ ID NO: 60714 - DNA, 600 bp, Chicken  19866894320445_2
gaatttaattgcttcaggcagaagtagacaagaaagttttacttatcatcaaatgtaaggatggaggtatgcacaggactgcagtatggaaacatgacattttgagttttttgtttaggccataaagaagttgttgaagtgaaaggttttcttaggacactttagaagataatagattctgaactttaaaaataataattgtcccattagcatataaaggattgatatttgcaaataattctacaacttattgcaaggtaataagtgaagagttattaaaacatttctttttctctaaaraatcaggaaaaatcatgaagagatgacttsaatgcagcaagcaagtcctattattagtttggaaaggtcatttccaatatcaggccatctatcaataatatcagtatctatcaatcattttaaatgttcctaatcaacattatgctactttcttttcagattacttttagttaattaaaaaaaaaaaaatagaaggtcttgggcatactccatgtttattcaaggccccaacacttttcatatggaactttaaaataaaaatggaaagaaaaagtgtttttttttttttcctgattaatc

SEQ ID NO: 60715 - DNA, 600 bp, Chicken  19866894320445_3
agaaagttttacttatcatcaaatgtaaggatggaggtatgcacaggactgcagtatggaaacatgacattttgagttttttgtttaggccataaagaagttgttgaagtgaaaggttttcttaggacactttagaagataatagattctgaactttaaaaataataattgtcccattagcatataaaggattgatatttgcaaataattctacaacttattgcaaggtaataagtgaagagttattaaaacatttctttttctctaaaraatcaggaaaaatcatgaagagatgacttsaatgcagcaagcaagtcctattattagtttggaaaggtcatttccaatatcaggccatctatcaataatatcagtatctatcaatcattttaaatgttcctaatcaacattatgctactttcttttcagattacttttagttaattaaaaaaaaaaaaatagaaggtcttgggcatactccatgtttattcaaggccccaacacttttcatatggaactttaaaataaaaatggaaagaaaaagtgtttttttttttttcctgattaatctgaacaagggggatacaaaagaagtttgtc

SEQ ID NO: 60716 - DNA, 600 bp, Chicken  19866894320445_4
gttttgcatatgaatcactcaaatacttctgccttaaccttctaccctctgcgtgtctgcactgataaagcacaaaggttgcctgcattttcaaaactagtttggaatcttgttaagggtatatgctaccaaatggttttcctaagcaactctctctctaggacatcacttaagagattattttagtatctattcagatttttactctataatgtaagactataagatattaccaaggtagaatcatgtggcaggttattactgtttcactgagtcaataccgtaccatgctatgtttcrttaaatatgaatttgtattttttactaaataatatatttttttaaagaatttgttttaatctggatatgtcaagaaagattgcagcatttatattggcagcttatcagaacatttctgtcctttaagtatctactttgaattgtgcagttccatccttcaggtgattcttgttgttcttcagtgtaattttgaagatttcttcttacctaaatacagaaactcattgcctttattcatgaccctccagtcccaaaaggagaaagagatagtaaaatcatttttttaatcaatatttttgt

SEQ ID NO: 60717 - DNA, 599 bp, Chicken  19866894320447_1
  misc_feature (1)..(18): n is any nucleotide
nnnnnnnnnnnnnnnnnnctggtctgagcctctgctggcacaaagaggatggctgtgctctgagcaggcccagtgcaggtagaaaatcttcaagctggcattcttacaggtgacagacggcatgataggaagaaagcaggattgtaatgagactatcttaatttctgtcgtgctcaaaacactcttgagctggggaggaaaccagatatgtttctttcaaacagcatgaggtgaaggacatcttccttacatgttcacatacacagcagatttgtatgtttgtcctttgtttgaagattwaagttttctaagcatgtgtgaagaggtttgtagaggtatcaacaggggacatcaagcacacgaagtctcagtatgcatgtttggctcctaatgacttgaatctttcactcttaaggataaagcctcctaggctgagtcttgcaccacaaattatattttaaaataggctgttcgtagctgcattgcctcagtagcatcgtctttctcaccaacaatttggtacttagtttgttctccatagaactggatttttcatgtgcttataaaagacacgtgaccattgtagatgggctttaatt

SEQ ID NO: 60718 - DNA, 600 bp, Chicken  19866894320451_1
gggaggtggcatcacgtgcccaaggagttcattgtgccattccctgctcatcaagcctccatcagcatctatgacatcagagacatcaggtgctttgaacaggggtaagcaaaggtttggtttggggtggtacagcctatatcagaggatgcacaaataatgtcatagtcctcaaaagaataaatagggttctgtccgtattcaggccatctcagtgtcacaccgttggctcaatttctggtaaatgtgtgggtggcaactggtgatatatgcatttttgtggacagagaaagggagtaytgaagacactgagctgctgtcaacaaatgaggagtttcacaccagatttccaaaacgtgcttttgatgtctgctaccttgcaatcactcgccctgacacaggctgaactttggaggtgaacttatttatacatgcaggtttgcttctccagagcccttttcataaaagcaatgttttgcagctaagtctcccccaaactgagaactgttcttcctgaaggaatatagggtgtatgaaagcataacagtaagaagctgtttataccctttaatattataattcagcttttgtcataaatct

SEQ ID NO: 60719 - DNA, 532 bp, Chicken  19866894320467_1
aacgggttgcccagagaggtcgtaagtgccccatccctagaggcattcaaggccaggttggatgggacactgggcaacatgatctagtgcctgatttactgtttggcaacccttcccatgtcagaggagttggaactaggtgatgtttgaggtccttttcatcctgagccattctatgactctatgattatgcagctcactgcagactactgggcatctttcagggacaaattttcctgtttcttagtctatatcctagcagttagcatgagagatggagattacttttgttaccttctkcatctacagaaaycttcatcatgatctgagtaccctgataaagtcaattacttgaagcctctattcacgattcagccccatactgcctcccagggcagtatcaggaagggaactgaaaaactaaacaagaaaaaattaatataataaaatataatacaataatcaataggcaaatttgaaaaataagaacattttagattctcttctactttgtgaatccttaaaatttcat

SEQ ID NO: 60720 - DNA, 519 bp, Chicken  19866894320467_2
gagaggtcgtaagtgccccatccctagaggcattcaaggccaggttggatgggacactgggcaacatgatctagtgcctgatttactgtttggcaacccttcccatgtcagaggagttggaactaggtgatgtttgaggtccttttcatcctgagccattctatgactctatgattatgcagctcactgcagactactgggcatctttcagggacaaattttcctgtttcttagtctatatcctagcagttagcatgagagatggagattacttttgttaccttctkcatctacagaaaycttcatcatgatctgagtaccctgataaagtcaattacttgaagcctctattcacgattcagccccatactgcctcccagggcagtatcaggaagggaactgaaaaactaaacaagaaaaaattaatataataaaatataatacaataatcaataggcaaatttgaaaaataagaacattttagattctcttctactttgtgaatccttaaaatttcat

SEQ ID NO: 60721 - DNA, 600 bp, Chicken  19866894320469_1
atacaaacatgttgtgcttcaccattttcagagatctactttttaaaatggggaatagaaacatacagatgaatttggatactagcaatcagataaggaattgatacaatggttgttttaaagctctgtaccgcccctgagttcctgtttattgtcacactgatggcagataatgtatagggtgtgtatcatttgcagtgattaatatgatgtattaaattctgcttgtgtgtatgaataagcatgcatgtgcatacatagatgtttgctataaatgttttctagtacattctaaatgtrtgtatatttgttgttagctccaratgatacagatatatgagaaggagggaaatgaagacttgtattattcttaaatgtgctgagggagagagagagagagggagggagcgagggagggagagagagacaagtaatacagcataaagaacccacaggcatctgggctttcccacttcagtagcaaatagggggaattatgggttggtggtctgctgcacattaagaggacacccctccatctgttttcagtacagcctgtttccaatttaaaacagagatttcagtacaaacctcaattyc

SEQ ID NO: 60722 - DNA, 600 bp, Chicken  19866894320469_2
attttcagagatctactttttaaaatggggaatagaaacatacagatgaatttggatactagcaatcagataaggaattgatacaatggttgttttaaagctctgtaccgcccctgagttcctgtttattgtcacactgatggcagataatgtatagggtgtgtatcatttgcagtgattaatatgatgtattaaattctgcttgtgtgtatgaataagcatgcatgtgcatacatagatgtttgctataaatgttttctagtacattctaaatgtrtgtatatttgttgttagctccaratgatacagatatatgagaaggagggaaatgaagacttgtattattcttaaatgtgctgagggagagagagagagagggagggagcgagggagggagagagagacaagtaatacagcataaagaacccacaggcatctgggctttcccacttcagtagcaaatagggggaattatgggttggtggtctgctgcacattaagaggacacccctccatctgttttcagtacagcctgtttccaatttaaaacagagatttcagtacaaacctcaattycttttctccatttttatatgcgaa

SEQ ID NO: 60723 - DNA, 600 bp, Chicken  19866894320469_3
aatcagataaggaattgatacaatggttgttttaaagctctgtaccgcccctgagttcctgtttattgtcacactgatggcagataatgtatagggtgtgtatcatttgcagtgattaatatgatgtattaaattctgcttgtgtgtatgaataagcatgcatgtgcatacatagatgtttgctataaatgttttctagtacattctaaatgtrtgtatatttgttgttagctccaratgatacagatatatgagaaggagggaaatgaagacttgtattattcttaaatgtgctgaggragagagagagagagggagggagcgagggagggagagagagacaagtaatacagcataaagaacccacaggcatctgggctttcccacttcagtagcaaatagggggaattatgggttggtggtctgctgcacattaagaggacacccctccatctgttttcagtacagcctgtttccaatttaaaacagagatttcagtacaaacctcaattycttttctccatttttatatgcgaagtgaggcttatgaattggtgtcattgccayaaggactcggaccaaatttccccccaaaaattc

SEQ ID NO: 60724 - DNA, 600 bp, Chicken  19866894320469_4
atcagataaggaattgatacaatggttgttttaaagctctgtaccgcccctgagttcctgtttattgtcacactgatggcagataatgtatagggtgtgtatcatttgcagtgattaatatgatgtattaaattctgcttgtgtgtatgaataagcatgcatgtgcatacatagatgtttgctataaatgttttctagtacattctaaatgtrtgtatatttgttgttagctccaratgatacagatatatgagaaggagggaaatgaagacttgtattattcttaaatgtgctgagggrgagagagagagagggagggagcgagggagggagagagagacaagtaatacagcataaagaacccacaggcatctgggctttcccacttcagtagcaaatagggggaattatgggttggtggtctgctgcacattaagaggacacccctccatctgttttcagtacagcctgtttccaatttaaaacagagatttcagtacaaacctcaattycttttctccatttttatatgcgaagtgaggcttatgaattggtgtcattgccayaaggactcggaccaaatttccccccaaaaattca

SEQ ID NO: 60725 - DNA, 600 bp, Chicken  19866894320469_5
rtgtatatttgttgttagctccaratgatacagatatatgagaaggagggaaatgaagacttgtattattcttaaatgtgctgagggagagagagagagagggagggagcgagggagggagagagagacaagtaatacagcataaagaacccacaggcatctgggctttcccacttcagtagcaaatagggggaattatgggttggtggtctgctgcacattaagaggacacccctccatctgttttcagtacagcctgtttccaatttaaaacagagatttcagtacaaacctcaattycttttctccatttttatatgcgaagtgaggcttatgaattggtgtcattgccayaaggactcggaccaaatttccccccaaaaattcacaggctgttcatttgaatacctgcttacagtggtacacaatgggcagctttgagaagaaaaattgataatcttcayggaagagtaatttgaatgaaattacacttgacagcctgtctccaagcaaacaaggagagtgagggagccttgctaagctctgaggacttgcctaagcctctgctgttggagcttcccagggaaaaaaaaaatccac

SEQ ID NO: 60726 - DNA, 600 bp, Chicken  19866894320469_6
gaagacttgtattattcttaaatgtgctgagggagagagagagagagggagggagcgagggagggagagagagacaagtaatacagcataaagaacccacaggcatctgggctttcccacttcagtagcaaatagggggaattatgggttggtggtctgctgcacattaagaggacacccctccatctgttttcagtacagcctgtttccaatttaaaacagagatttcagtacaaacctcaattycttttctccatttttatatgcgaagtgaggcttatgaattggtgtcattgccayaaggactcggaccaaatttccccccaaaaattcacaggctgttcatttgaatacctgcttacagtggtacacaatgggcagctttgagaagaaaaattgataatcttcayggaagagtaatttgaatgaaattacacttgacagcctgtctccaagcaaacaaggagagtgagggagccttgctaagctctgaggacttgcctaagcctctgctgttggagcttcccagggaaaaaaaaaatccacacttattcctacatctgactgaaaacctttgattaattctctgtagccgtttct

SEQ ID NO: 60727 - DNA, 600 bp, Chicken  19866894320469_7
gctttcccacttcagtagcaaatagggggaattatgggttggtggtctgctgcacattaagaggacacccctccatctgttttcagtacagcctgtttccaatttaaaacagagatttcagtacaaacctcaattycttttctccatttttatatgcgaagtgaggcttatgaattggtgtcattgccayaaggactcggaccaaatttccccccaaaaattcacaggctgttcatttgaatacctgcttacagtggtacacaatgggcagctttgagaagaaaaattgataatcttcayggaagagtaatttgaatgaaattacacttgacagcctgtctccaagcaaacaaggagagtgagggagccttgctaagctctgaggacttgcctaagcctctgctgttggagcttcccagggaaaaaaaaaatccacacttattcctacatctgactgaaaacctttgattaattctctgtagccgtttctagtgaagaaaggtagccatggaagagaatatggaagagggacaaacacaaaaaggtattgtgataattgctttgtttgcaaagagataatgattttgcagttccttgttt

SEQ ID NO: 60728 - DNA, 600 bp, Chicken  19866894320469_8
acttgcctaagcctctgctgttggagcttcccagggaaaaaaaaaatccacacttattcctacatctgactgaaaacctttgattaattctctgtagccgtttctagtgaagaaaggtagccatggaagagaatatggaagagggacaaacacaaaaaggtattgtgataattgctttgtttgcaaagagataatgattttgcagttccttgtttgctttagcagcatgctgtaaggttagtgaatgtccttatgcggtagatgggaaagatttctttcctttctgtactgcttacattyatttgtctctctgcagtagcaattagtattaatatagtgattgttgcatgatgtttaatattaaagggatctaaactgtgaattttacatttatacttagaatattgcaagcatttaatgcaggctgcttcccagaccagcctttgttagccttcatttatttcatgttttcacgcttgtctagctgggtcaagggagccgagtgtgaactatgagagagctactcacacagtatttgaagctggttgctgttggatatctaacaatgtagccagtatttacaccttgaatgagagtcca

SEQ ID NO: 60729 - DNA, 600 bp, Chicken  19866894320469_9
gtttatgggtcttcattttgtctagaaacacactacgtaatcatgagaagactgaaggaagatgtatgtatacagaaggtgctcatacaaataatagtccttatataatattggtgatttcagcagtttcttcagttaaattttattatttgcaaatggcagaaataatgggaaaacacaagagttatttctgaatgtaaaatcaatactttcattgcctggtttgtgttacttgcatttagaaattaaagacatcctttttcttagagctagagtaaattgaactgtttggtcactgawtcaaaattcttcattgttattgcctgaagaaactgaaattcaaaatccccaaatccttactacaaaaaaaaaaaaaatcaggaaaaggtgaatctgtttgtattttaaaagcacacgttgttattgatgaactgtgtcctcattgttcatatggtaagcagctgaatgaccaatagccattcaaaatggtgtgattaatagtctgattacagcagctaacactacttactccccctcaccccctttccatttacaatgcaatgttttcggcctttttttcctttagtggtacccaactgc

SEQ ID NO: 60730 - DNA, 600 bp, Chicken  19866894320473_1
aagagcttgtgaaaacagtaagttacagctacaacaatggaatgaatcaagctaaagcatctccgtggtgaaggtaaagtgaggcactaagcaaaaggacatgcaaagccccatgctgggctttgggtcattcccattcagtgtggggtcagcacagtgcttgtaccaggggtaggcagcaggtgaggagctgcatgtcacccactttgcttctttctgttccatttgcaccatgcactgtggccccaggatctcattacttcccaccccaccacttcaatatgtgcagccagagctcartgacttctgtgcctcactggcaatggsatcaccrccgtgttggctcggaggtgtttctcttcctgcctcaaacaccccaatctgaacggggcacactgaggctcctgctctgcaaggggaattttgggaggatctccccatgcttctcactgggcttaatgccaaaggctccaggagcaaagggcacacagggcacggccagggtagtgctggtagccaccaggaagggatgctgctccagtacaggaggaacgaatgagtttcactaagttgcagtgattggctccagacactgtaata

SEQ ID NO: 60731 - DNA, 600 bp, Chicken  19866894320473_2
gctacaacaatggaatgaatcaagctaaagcatctccgtggtgaaggtaaagtgaggcactaagcaaaaggacatgcaaagccccatgctgggctttgggtcattcccattcagtgtggggtcagcacagtgcttgtaccaggggtaggcagcaggtgaggagctgcatgtcacccactttgcttctttctgttccatttgcaccatgcactgtggccccaggatctcattacttcccaccccaccacttcaatatgtgcagccagagctcartgacttctgtgcctcactggcaatggsatcaccrccgtgttggctcggaggtgtttctcttcctgcctcaaacaccccaatctgaacggggcacactgaggctcctgctctgcaaggggaattttgggaggatctccccatgcttctcactgggcttaatgccaaaggctccaggagcaaagggcacacagggcacggccagggtagtgctggtagccaccaggaagggatgctgctccagtacaggaggaacgaatgagtttcactaagttgcagtgattggctccagacactgtaatagtgcttagtggatctaatgcacttctc

SEQ ID NO: 60732 - DNA, 600 bp, Chicken  19866894320473_3
caatggaatgaatcaagctaaagcatctccgtggtgaaggtaaagtgaggcactaagcaaaaggacatgcaaagccccatgctgggctttgggtcattcccattcagtgtggggtcagcacagtgcttgtaccaggggtaggcagcaggtgaggagctgcatgtcacccactttgcttctttctgttccatttgcaccatgcactgtggccccaggatctcattacttcccaccccaccacttcaatatgtgcagccagagctcartgacttctgtgcctcactggcaatggsatcaccrccgtgttggctcggaggtgtttctcttcctgcctcaaacaccccaatctgaacggggcacactgaggctcctgctctgcaaggggaattttgggaggatctccccatgcttctcactgggcttaatgccaaaggctccaggagcaaagggcacacagggcacggccagggtagtgctggtagccaccaggaagggatgctgctccagtacaggaggaacgaatgagtttcactaagttgcagtgattggctccagacactgtaatagtgcttagtggatctaatgcacttctcgtggttg

SEQ ID NO: 60733 - DNA, 600 bp, Chicken  19866894320477_1
tgaactgttagatggaaagccatgtgtgctgaacagcccctgtgcccaaggctgtgagctggtgcacaagggcagagctctgcagggtgcaggagaggactcgaggtcctggtgagccacagctggcagtacttctctgtgagccctctggtgagagacactgagcccgaataagagcagctctttctcttggtatttgcacttggtattgatgtacccttgaggaaataaatacaattttgaaagtctccatatgtgcatgaccaggggtgcaatgggagcagaggagggagtgcatgytctgcccttctcagcaaagccagtgtccacagccttgcccagggcaagattaaaataaagggaaagagaatactcttgaaacctgggccataattattatttatttcaacagcaatttgccttattatggtgcacagcatttgttacccgggcaacagctttctgtagaggcctggctcaaattaaagtcaatcgagcaagatctgaagtcaatactggtattatattttaaaaccaagatacaagggagtcagcaatctcacctgaccgttgtattttttactgttgtcttaggcagac

SEQ ID NO: 60734 - DNA, 600 bp, Chicken  19866894320477_2
aagatacaagggagtcagcaatctcacctgaccgttgtattttttactgttgtcttaggcagacacatgatggtctgtgtccaagtgatacttttctgtgttgtgcctggtcaatctgccctatgcgcatttgcaaataaagtgaattttccagaatcctgctcttgcctgaggctgtaggtgtgagtatggctgagtgatgtgctgcacactgtgaagaatcactatcccagtgcctgacccactgcgcaaggccgcacgccctcacacaggcccagtctcctgtgaaagagatggagmgtaacagatcttctaaggtccaaggcagaacgaaagcaaaacaacaaagctaggcactatgaactataaatatattattctcttcatgaattcaacataaaaatgcaactcagttaaacagagggagcttggaaatgaaacttttggggtctaatcccttctctcatttgtttcttgttggtttttttgtttgtttgtttgtttgttctgtaagtatagggcttttttcacaaatatctacctggaaagattgaaagggcctagaaaaagtaataggaagtttgtagtgaatggcaatgt

SEQ ID NO: 60735 - DNA, 600 bp, Chicken  19866894320480_1
atatttctacaaatatttttatggcaatttcagttaatgatcgacaatgatcttagatttaatgttagaaagtcatagactgagatgaaatttctactgggttgcttgtgttcttatttaatttctgtggagctgcatcagattcacatttttctgctactttcaaaattgccgactactgatatgatgttttattttgagtatctgctcacaggattctacccactctaatgtaaatgaaataattatttatggatattttaaacattaatagctttctgaagttatgatttcaatttragagcatgttctgcatttcttcgaatccacttttatgtgagctgttttatctctgtaggaatttgcctgtaaaatagttgaaagaaatataaaagtatgaacaagttttattttcattaacaaaagatgaaacagcatcttcaggggaactggatgcccccagggtttgctaaatgatacagtgcctgaattcagctgttagagatgaaaagctgttactgcttagcaatgctgatgtgctacttcaagatgtgacgtatctgtctggcagagagtagggctaatgtaatctggagtagg

SEQ ID NO: 60736 - DNA, 600 bp, Chicken  19866894320480_2
atgatacagtgcctgaattcagctgttagagatgaaaagctgttactgcttagcaatgctgatgtgctacttcaagatgtgacgtatctgtctggcagagagtagggctaatgtaatctggagtaggatgagccgggtgtcagacatcaagaaattcacaagagactctctgcagtttgacagtagacagctgaagcagtacagagtttgctccaccctacgtccatacctgtagggctgctgtggctcctgtgctctgactgagccagtagcaaggctgagtgaattttcctggtagcwgtgyacacatgtccacrtgcagatatcctcacaggtcagcacagagacaaaataatgcttcaccagcacacagctaaacagagctcctgcacaaaggcaacactgtggactgcctgatcctgtcattctcctgcatctggtaggactgaagtctgatggtggaatatatacttacatgtacatttacatatacacccctctccagtttttgatcttagccacttgatctacttggtagcttcagatctctggttgcctgttggctgtcctctagacagatgaatgcccctattaagaaag

SEQ ID NO: 60737 - DNA, 600 bp, Chicken  19866894320480_3
tacagtgcctgaattcagctgttagagatgaaaagctgttactgcttagcaatgctgatgtgctacttcaagatgtgacgtatctgtctggcagagagtagggctaatgtaatctggagtaggatgagccgggtgtcagacatcaagaaattcacaagagactctctgcagtttgacagtagacagctgaagcagtacagagtttgctccaccctacgtccatacctgtagggctgctgtggctcctgtgctctgactgagccagtagcaaggctgagtgaattttcctggtagcwgtgyacacatgtccacrtgcagatatcctcacaggtcagcacagagacaaaataatgcttcaccagcacacagctaaacagagctcctgcacaaaggcaacactgtggactgcctgatcctgtcattctcctgcatctggtaggactgaagtctgatggtggaatatatacttacatgtacatttacatatacacccctctccagtttttgatcttagccacttgatctacttggtagcttcagatctctggttgcctgttggctgtcctctagacagatgaatgcccctattaagaaagtagg

SEQ ID NO: 60738 - DNA, 600 bp, Chicken  19866894320480_4
ttcagctgttagagatgaaaagctgttactgcttagcaatgctgatgtgctacttcaagatgtgacgtatctgtctggcagagagtagggctaatgtaatctggagtaggatgagccgggtgtcagacatcaagaaattcacaagagactctctgcagtttgacagtagacagctgaagcagtacagagtttgctccaccctacgtccatacctgtagggctgctgtggctcctgtgctctgactgagccagtagcaaggctgagtgaattttcctggtagcwgtgyacacatgtccacrtgcagatatcctcacaggtcagcacagagacaaaataatgcttcaccagcacacagctaaacagagctcctgcacaaaggcaacactgtggactgcctgatcctgtcattctcctgcatctggtaggactgaagtctgatggtggaatatatacttacatgtacatttacatatacacccctctccagtttttgatcttagccacttgatctacttggtagcttcagatctctggttgcctgttggctgtcctctagacagatgaatgcccctattaagaaagtaggaaagattgcagtg

SEQ ID NO: 60739 - DNA, 599 bp, Chicken  19866894320488_1
  misc_feature (1)..(110): n is any nucleotide
nnnnnnnnnnnnnnnnnnnnnnnnnnnnnnnnnnnnnnnnnnnnnnnnnnnnnnnnnnnnnnnnnnnnnnnnnnnnnnnnnnnnnnnnnnnnnnnnnnnnnnnnnnnnnnagggagaaccctttgtcatggtaatagctctgcattcactgatgaaagagctgtctcagaggagcgggtctttccagctggctgtgggctgctgcaataacaagtattaatagatcctgcaaacagatggattctgtggaacaaaaaacacctctctacacatccttgcaggctgtctcaccttcttcgkgtgtgaagggctgctcccyagtgtgccatcctgctggtcatctggcttcatggcgttggccacacagtagtatttttggggtaggtgagagcggatcaggctgacacagaacagtgatgtggaacagtctgcttgtrggagtaagtgctgcatcttggataacactgaacgtgattcacaaggaatgagattttaactcttgggtgtttcacactgcagaaacatgtttcaaatctattttattttgttggctagaattacagttgttgctgcttctgtggtgacaagtacaatcactc

SEQ ID NO: 60740 - DNA, 599 bp, Chicken  19866894320488_2
  misc_feature (1)..(91): n is any nucleotide
nnnnnnnnnnnnnnnnnnnnnnnnnnnnnnnnnnnnnnnnnnnnnnnnnnnnnnnnnnnnnnnnnnnnnnnnnnnnnnnnnnnnnnnnnnnagggagaaccctttgtcatggtaatagctctgcattcactgatgaaagagctgtctcagaggagcgggtctttccagctggctgtgggctgctgcaataacaagtattaatagatcctgcaaacagatggattctgtggaacaaaaaacacctctctacacatccttgcaggctgtctcaccttcttcgkgtgtgaagggctgctcccyagtgtgccatcctgctggtcatctggcttcatggcgttggccacacagtagtatttttggggtaggtgagagcggatcaggctgacacagaacagtgatgtggaacagtctgcttgtrggagtaagtgctgcatcttggataacactgaacgtgattcacaaggaatgagattttaactcttgggtgtttcacactgcagaaacatgtttcaaatctattttattttgttggctagaattacagttgttgctgcttctgtggtgacaagtacaatcactcttgacacggcattgaaatg

SEQ ID NO: 60741 - DNA, 600 bp, Chicken  19866894320488_3
ctctgcattcactgatgaaagagctgtctcagaggagcgggtctttccagctggctgtgggctgctgcaataacaagtattaatagatcctgcaaacagatggattctgtggaacaaaaaacacctctctacacatccttgcaggctgtctcaccttcttcgkgtgtgaagggctgctcccyagtgtgccatcctgctggtcatctggcttcatggcgttggccacacagtagtatttttggggtaggtgagagcggatcaggctgacacagaacagtgatgtggaacagtctgcttgtrggagtaagtgctgcatcttggataacactgaacgtgattcacaaggaatgagattttaactcttgggtgtttcacactgcagaaacatgtttcaaatctattttattttgttggctagaattacagttgttgctgcttctgtggtgacaagtacaatcactcttgacacggcattgaaatgcttaggaaatagggaataagtcagtgttcaaggtgatggcagacaactccattcttcagactggcactgtgatgcagacatgactagattacactgccttgctgctcagatggactcct

SEQ ID NO: 60742 - DNA, 599 bp, Chicken  19866894320508_1
  misc_feature (1)..(6): n is any nucleotide
nnnnnnttagttaatttcccttggtaatatgtgctagagcatcatccccccaaataattatttgacagtgtttaaattgtttttgttagtagttcagaattactttcaaggcagcatttaatatggctttttttattcttgaggatttgttagaaaggtgaagtacactgaaaaaagtgctgttcatggtgtttcatttcaggaaaggcttgccaaatgccatggttcccagtgtggtttctgtacccctggaatggtgatgtccatatacactttgttaagaaaccacccagaaccaamttcagagcagatgactgcagctctggctggtaagtattgtcatttttaatttgtagttatttcctcaattttcttctgatgttttatgtagctgagtgcaagtctgtgtaagcacacatgcatgtaygtactctaaattgtgcttctgaacakaattactgttattccctgtcattcatttctcttgaaaaattaactatggaactgtagattgtttcagggagaggtgttaaaaacatccttgtttgcatcttttgaagtgttttaaatccaatttgcaaaacatgacagcaggttgc

SEQ ID NO: 60743 - DNA, 600 bp, Chicken  19866894320508_2
tttttttattcttgaggatttgttagaaaggtgaagtacactgaaaaaagtgctgttcatggtgtttcatttcaggaaaggcttgccaaatgccatggttcccagtgtggtttctgtacccctggaatggtgatgtccatatacactttgttaagaaaccacccagaaccaamttcagagcagatgactgcagctctggctggtaagtattgtcatttttaatttgtagttatttcctcaattttcttctgatgttttatgtagctgagtgcaagtctgtgtaagcacacatgcatgtaygtactctaaattgtgcttctgaacakaattactgttattccctgtcattcatttctcttgaaaaattaactatggaactgtagattgtttcagggagaggtgttaaaaacatccttgtttgcatcttttgaagtgttttaaatccaatttgcaaaacatgacagcaggttgcgtatgtagctgtacctggaagtttctcagatcctgttgcatctggagttgagagtatcataagccttacaggaggaaggcccctttgtggtaggaattaaacggtcaaatgaggtgaagacamatgca

SEQ ID NO: 60744 - DNA, 600 bp, Chicken  19866894320508_3
aaaggtgaagtacactgaaaaaagtgctgttcatggtgtttcatttcaggaaaggcttgccaaatgccatggttcccagtgtggtttctgtacccctggaatggtgatgtccatatacactttgttaagaaaccacccagaaccaamttcagagcagatgactgcagctctggctggtaagtattgtcatttttaatttgtagttatttcctcaattttcttctgatgttttatgtagctgagtgcaagtctgtgtaagcacacatgcatgtaygtactctaaattgtgcttctgaacakaattactgttattccctgtcattcatttctcttgaaaaattaactatggaactgtagattgtttcagggagaggtgttaaaaacatccttgtttgcatcttttgaagtgttttaaatccaatttgcaaaacatgacagcaggttgcgtatgtagctgtacctggaagtttctcagatcctgttgcatctggagttgagagtatcataagccttacaggaggaaggcccctttgtggtaggaattaaacggtcaaatgaggtgaagacamatgcaggccatctaaactgcaaacggaaata

SEQ ID NO: 60745 - DNA, 600 bp, Chicken  19866894320508_4
tgtaygtactctaaattgtgcttctgaacakaattactgttattccctgtcattcatttctcttgaaaaattaactatggaactgtagattgtttcagggagaggtgttaaaaacatccttgtttgcatcttttgaagtgttttaaatccaatttgcaaaacatgacagcaggttgcgtatgtagctgtacctggaagtttctcagatcctgttgcatctggagttgagagtatcataagccttacaggaggaaggcccctttgtggtaggaattaaacggtcaaatgaggtgaagacamatgcaggccatctaaactgcaaacggaaatatgttttgyaggtagaatatcctctgttatctattatgccatagagtcactgtggagacagaggcatttcctgttacagtgagatgaactaggtagaggcataatgctcagctcctccactattaagaacagattgaagggatggaaaaacatcttgagagggtgcggaaccttctacaatctcttatctcctgaatagctgtagtcagcattccctctagggaagctcttaaatatttcatattccactttgaaacaaaagcctttttt

SEQ ID NO: 60746 - DNA, 600 bp, Chicken  19866894320508_5
ttattccctgtcattcatttctcttgaaaaattaactatggaactgtagattgtttcagggagaggtgttaaaaacatccttgtttgcatcttttgaagtgttttaaatccaatttgcaaaacatgacagcaggttgcgtatgtagctgtacctggaagtttctcagatcctgttgcatctggagttgagagtatcataagccttacaggaggaaggcccctttgtggtaggaattaaacggtcaaatgaggtgaagacamatgcaggccatctaaactgcaaacggaaatatgttttgyaggtagaatatcctctgttatctattatgccatagagtcactgtggagacagaggcatttcctgttacagtgagatgaactaggtagaggcataatgctcagctcctccactattaagaacagattgaagggatggaaaaacatcttgagagggtgcggaaccttctacaatctcttatctcctgaatagctgtagtcagcattccctctagggaagctcttaaatatttcatattccactttgaaacaaaagcctttttttcttgggagctgcgagatcttaagtatagtgatagtgtg

SEQ ID NO: 60747 - DNA, 421 bp, Chicken  19866894320509_1
accccccagcagaagaaattcatcagaggaggcaggcaacagtcatggctgtgcaaggacctgcagcttaaactgagagaaaagagggaaatgtccagaaagtggaagcagggttgtgtatcctgggaggaatacagggctgctgtctgtgtgtgtagagataggattaggaaagccaaggcacagatggagctgaacttggcaagggatgtgaaagacaacaagaagcagttctacaggtacataggcaggaagagacaggccaaggagagtgttccccctctgatgaaaggtaatggsgagctagcttctcagacagagaaagctgaggtactcagtgagtgctttgcctcagtcttcrtgtgtggtcaggtttcccacgtctggcaggactatgagcctctaggtgagggtgtgggga

SEQ ID NO: 60748 - DNA, 360 bp, Chicken  19866894320509_2
tgcagcttaaactgagagaaaagagggaaatgtccagaaagtggaagcagggttgtgtatcctgggaggaatacagggctgctgtctgtgtgtgtagagataggattaggaaagccaaggcacagatggagctgaacttggcaagggatgtgaaagacaacaagaagcagttctacaggtacataggcaggaagagacaggccaaggagagtgttccccctctgatgaaaggtaatggsgagctagcttctcagacagagaaagctgaggtactcagtgagtgctttgcctcagtcttcrtgtgtggtcaggtttcccacgtctggcaggactatgagcctctaggtgagggtgtgggga

SEQ ID NO: 60749 - DNA, 600 bp, Chicken  19866894320519_1
cggatgtcagtgagtctcctggtttgatgaggctcaccggggtctgtaggaaagctgtaaaatattaaagcctgggatgaaaatatccaggtagatgacaaaggctcagctgcatgagccacttgatgtttctctcatctctttctctcaaattgatgaaaaatttattactatggaaactgtgggaataagtgtatgcacggcaaccctgtaaacaacttttccactttacacagcacagcgtgctcataaacgataggacctttgcttaccagtgtttttttgaacctgacagatctyaaacaaatgtctgcttaagtccatttttattaggaaaaaacaccaacattttgctcggtgaatgtccctgttttagagtgcatttcccctctggtgaggggccaacaccaaccaacttcacggctttgaaactggggattcaagctgagcataaggacaccacttcatgcttctggggttaaaatgcgacttgggcagcctgtccttcctacagggagaaataaagggaggccacggtggagacaggatgtgcagctcagaggggtgatgccgttcttagccaccatatgctaaggaacg

SEQ ID NO: 60750 - DNA, 600 bp, Chicken  19866894320523_1
tcagtctaaagtttgtcagctgtggctgtttgtagtgctgaaatacagtttggccaacagtcttcaaggctctcagctgagtgagatctagttgtaatgtttttttttggcatctgacttacccaggtgatgtaatagttcctgtgtatctacttcagtctgatccagcttctcttcctctctgctagagagaaagtatcattcaggtgctgatccctgtcctacaccttcatccaagttgaagtccaaaacaatgattttattgttcttctctgatacaacctgttcaccaggcacacrctctgaacaactttatcctcaaacatttctgccagttccccagctggtttcttgctttaggtctgtttaaagtattgcttgactccctgtttaaacacgttttgcaaggttttagggcatttctgtttcagggctctaatttacctctttccagttgaccttcaattttagtaagtattccttttcttcctatttgagcaagttcttcattttttagaagccaaactatygcctacagaagtctccttaactatttcaggaagacatgcaggggacatttgtacagctttgktttctttc

SEQ ID NO: 60751 - DNA, 600 bp, Chicken  19866894320523_2
catccaagttgaagtccaaaacaatgattttattgttcttctctgatacaacctgttcaccaggcacacrctctgaacaactttatcctcaaacatttctgccagttccccagctggtttcttgctttaggtctgtttaaagtattgcttgactccctgtttaaacacgttttgcaaggttttagggcatttctgtttcagggctctaatttacctctttccagttgaccttcaattttagtaagtattccttttcttcctatttgagcaagttcttcattttttagaagccaaactatygcctacagaagtctccttaactatttcaggaagacatgcaggggacatttgtacagctttgktttctttctgagttttagcaaacattctacctgggatgcagccttcatgcagaacacagtgtttttgagaaactccatcttgcatttgaaaatctgtctttctttatagctccctttcttgaaatcagatatcaatatgcttgatttatttgtcccattctcttgcaccacactcttaaaaggaattgcactacagtttccattaaagcacacgctgtcccactgatctgtcttggac

SEQ ID NO: 60752 - DNA, 600 bp, Chicken  19866894320523_3
ggcacacrctctgaacaactttatcctcaaacatttctgccagttccccagctggtttcttgctttaggtctgtttaaagtattgcttgactccctgtttaaacacgttttgcaaggttttagggcatttctgtttcagggctctaatttacctctttccagttgaccttcaattttagtaagtattccttttcttcctatttgagcaagttcttcattttttagaagccaaactatygcctacagaagtctccttaactatttcaggaagacatgcaggggacatttgtacagctttgktttctttctgagttttagcaaacattctacctgggatgcagccttcatgcagaacacagtgtttttgagaaactccatcttgcatttgaaaatctgtctttctttatagctccctttcttgaaatcagatatcaatatgcttgatttatttgtcccattctcttgcaccacactcttaaaaggaattgcactacagtttccattaaagcacacgctgtcccactgatctgtcttggaccatgttctgtgcatcttttcagggcaaaaattccaaatattctctttttctatgatctttaa

SEQ ID NO: 60753 - DNA, 600 bp, Chicken  19866894320530_1
tgctgcttggcttcaccagtgtgggcatcccaaataattgtggtctgtattaaacagataaattaacaataaacacatttgcaccaactgctagctccccacaactacctccattcacacataccaaattacctagcctcctccccactgcccacatctacacatgactcaatatttcaagagttttacctagtactgaaggaactaatggcagagtacaggcaacagaagagaacgttaacatgctctaacactaaaaaggtgtttatagtaacatattggggtctggagggaaaaaartgtggttctggttttgttttgttttaattaaacagatttatctactcatttctatttctattcttataatccacactgcacgcctaatttaatttcaagcacacgtatattcaaattgtattttcaaatacctgcctgtccctgtggaaatctttatacaaacactgcctcataaatcaaatctttcagattccttcatttgtaagtatgggtgtaactttgatctgagctgtcctctacattctgctgtctttctcatggaagaaatcttcatgacaaaataggtattttgtcattgct

SEQ ID NO: 60754 - DNA, 600 bp, Chicken  19866894320554_1
ttttcaaaattgattattaattacgatgaactgaagggacttacatgcccatttttgttcttcagctccccatggcacagtaaagctttgcttccctcaatcctcgggtctttctgcttctcatccagatactccagtttgtcgatgtaatattggcactccgactctcccttctttaagttgatgtcagagagaactccttggattatagatatctataaaacaaagcatttaaaaatgattaaataaggacttacacttgaatatcttccatttaagcgctactagaaaaaaatcccyatgatggaatatatgtggattgattgctcctttgctttcagaaggggtcacagccacaggtttaaaccaccccatgaaaccgctgaaggtttaagaaagctttcttttttctcccaaatgccacggctgtatcagaaccacaatcacacaatcactattacttacggcttcttccagaatctgaatatcaggatggtctttgggagtgtgcctcaggatctcctttaggagcagtgggtatttgaccagccgacttcgagggatgtccaagaagctccagaggtccaacttgcggctgaa

SEQ ID NO: 60755 - DNA, 600 bp, Chicken  19866894320556_1
gcagtccgttcccaaagaatgagccttgcagtacagacttatattggaacagcatttgaagagctggagtctgtaggaagtgtgggaagcccacacaggatgagtttgggagcaataaaatcttgtgggagggaccccacactggagcagggacagagaaggactgtagaggagctgaagagacaaagtgttatggactggctgtaacctccattctcctgtgctgcttgtaaggaggtgattgaagaaagggagtgggaagaaggtgtttttcagtcattttatttctcactgctctcwactgttgttcrtttagaatattgtatattctaaaatgttccatatttagaatactgtgtctagttctgggctccccagttcaaaaaagacagggatctcctagaaggacaccaaccacaaasatgacaaagggcctggagcacctcttgtatgaggaaaggctgagtaacctgggtctgttcagcctggggaaaagaagactgagggggaatctgattaatgtttataaatatctaaagggaggtgggagggaaatgtatgaggccaggctcttctcggtgatgcatagcaataggacaa

SEQ ID NO: 60756 - DNA, 600 bp, Chicken  19866894320556_2
ccaaagaatgagccttgcagtacagacttatattggaacagcatttgaagagctggagtctgtaggaagtgtgggaagcccacacaggatgagtttgggagcaataaaatcttgtgggagggaccccacactggagcagggacagagaaggactgtagaggagctgaagagacaaagtgttatggactggctgtaacctccattctcctgtgctgcttgtaaggaggtgattgaagaaagggagtgggaagaaggtgtttttcagtcattttatttctcactgctctcwactgttgttcrtttagaatattgtatattctaaaatgttccatatttagaatactgtgtctagttctgggctccccagttcaaaaaagacagggatctcctagaaggacaccaaccacaaasatgacaaagggcctggagcacctcttgtatgaggaaaggctgagtaacctgggtctgttcagcctggggaaaagaagactgagggggaatctgattaatgtttataaatatctaaagggaggtgggagggaaatgtatgaggccaggctcttctcggtgatgcatagcaataggacaaggagcgatggc

SEQ ID NO: 60757 - DNA, 600 bp, Chicken  19866894320556_3
ttgtgggagggaccccacactggagcagggacagagaaggactgtagaggagctgaagagacaaagtgttatggactggctgtaacctccattctcctgtgctgcttgtaaggaggtgattgaagaaagggagtgggaagaaggtgtttttcagtcattttatttctcactgctctcwactgttgttcrtttagaatattgtatattctaaaatgttccatatttagaatactgtgtctagttctgggctccccagttcaaaaaagacagggatctcctagaaggacaccaaccacaaasatgacaaagggcctggagcacctcttgtatgaggaaaggctgagtaacctgggtctgttcagcctggggaaaagaagactgagggggaatctgattaatgtttataaatatctaaagggaggtgggagggaaatgtatgaggccaggctcttctcggtgatgcatagcaataggacaaggagcgatggcctaaaacttgtacataggaagttccatacaaacatgcagaagaacttctttatggtaagggtgatggagcactggaacaggttgcccagagaggttgtggattctccttct

SEQ ID NO: 60758 - DNA, 558 bp, Chicken  19866894320568_1
aggttagatgaactccacacacagtttttctatagcacactgggacttacaataggacataatcaaaccacgacaatatgaattaaaatattgtatgtctcttactctgaatacaaaacctctgttccctgtgagtaacaataaaagtctataaggtcaaaacagcataatttcctaaaatttgaattttttatctttctattttctacttcagtactataaataattgtaaattaagcaaatcaggactatcagtagtgaatgtgcagttatagtgaactccacaaatgctgctttttwaaatttttaaattgtataagggaagggaagaaaaarctaaatagctggatggaattgtttttattattttccattataattatctatgtcagtttttagccaaatgaccatttccactgtatgtaatatttatgatagtcatgaatcatactggaatgagatgaagtagatgcaaaattttactgataattacaatcttttaacattttatataagcactcatgcacagccactgaaaattgccagtacttctgaggg

SEQ ID NO: 60759 - DNA, 522 bp, Chicken  19866894320568_2
acactgggacttacaataggacataatcaaaccacgacaatatgaattaaaatattgtatgtctcttactctgaatacaaaacctctgttccctgtgagtaacaataaaagtctataaggtcaaaacagcataatttcctaaaatttgaattttttatctttctattttctacttcagtactataaataattgtaaattaagcaaatcaggactatcagtagtgaatgtgcagttatagtgaactccacaaatgctgctttttwaaatttttaaattgtataagggaagggaagaaaaarctaaatagctggatggaattgtttttattattttccattataattatctatgtcagtttttagccaaatgaccatttccactgtatgtaatatttatgatagtcatgaatcatactggaatgagatgaagtagatgcaaaattttactgataattacaatcttttaacattttatataagcactcatgcacagccactgaaaattgccagtacttctgaggg

SEQ ID NO: 60760 - DNA, 600 bp, Chicken  19866894320573_1
gtattttatcatccccacgtagaaactggtcatacaagctaatactgcttggcaattgtaatacagctctacaaacatgctcaggatttcttcactttgaggaaaataaggttgtttttggctttgccccagtgtggaggaatattctctcctctgaaagaggagaccattccttttccgtaggggtatgctctgcaagttgttcttttggaacagatggcctaaggcagttcaggggggctgttttcctgccattagagacaggagtagggaaggcctgaggactgaagttctgtgagygcgctcaccaagaagaggagagttgttaccaaagcctgctcagttctttcctcttgttctctaggcatgtgatgcagaaatcctgtccgtctgtgagaaaggtaaagagcaaaagtttccaagtctcttaatttgcctaaagtcgtagtgtcgcttggtgtttcctctcgcagatgcattaatgagatctggcctgctgttcttaaaggcagatgcttaaagaagtctgactggacagacagcagaagctttgtactagggaagccctcctgactgctgagggttaaaaagctccacagt

SEQ ID NO: 60761 - DNA, 600 bp, Chicken  19866894320581_1
tcttccatgggagtttctccagaactggatggagtgtgaccatttatttatttatttatttggccagagatttttgttttcatgtttggctgttttgaacatgttggttgcttttcttttttttgcttttttttttttttccttccccccctttttaattctatcagctgccatgccagccagtcacttcggatttatttttcttgtgaaaatgtttcattgctcttctgacataatcatcttctaaggagattatcccgtaactcttcttagaaaatccttacaatgaagtcaggacgrgtctctggctcctttactcgtggaaaattgtctttacttccaaactcattttagtttctcaagactgcattttgagctagacaaatcagccagacttccagcatcatgatgttcgtgctgctctgagggtatttatttacaagatttgtatttgttctttttcattaccatcacccctgtttgttgcaccctgtggtgatgtaggcatccagttggtatttctcttcctagataagtttctagtcctcatgtctactgagaaaagcttttaggacatgaacactaaagcttctgctctgt

SEQ ID NO: 60762 - DNA, 600 bp, Chicken  19866894320586_1
attgcaacctaatctctaattcatgaaacaattaggtccaacagagcaagaggaaaataaggatgaaaagaggtctattagcatgttctgccaggaaaaactggatgactcgggttacttaacctaaagtagaaaagagtacagacaagagagaactgcaggattatatttatgatgcatataatgtattaacgtctttttttttccctaaaactcaattgttcttcatgacgatagcaggcagaattggagaaaacacattgctgcacggaagataaagattcaaaataaggaaaaatrtgccctttgaaacggtaggggagcatgtgaatttcaatctccaaaactagaaaaagacatatatatattaggaatgatataaatatggatttctgttgatcatacaataaatgacctctcaagatccatgcagttctatgagtctataatattagaattgcataaataagcatttacaaattatacatgcttttatattaagttgatatttctgaatttattttaaatcagcaaacattaacttaccgcttgacaagaatgcaatacacattttaaacaatggaaaggcaaaaattaata

SEQ ID NO: 60763 - DNA, 600 bp, Chicken  19866894320588_1
tctgcaaagcagaatggggccatggcagccaggtcgagaggcaagcatgaaatcaaaatgcaatgaccccagtgctgagttaatcagagtgagtctggctgtcaggtgctgcatgcagctttgctaacagcggtgtgaaatgctgagaacagagcacaggagcgtgggacggtcctgggatggtccatgggatggtccatgggatggtggggcgtggagcggtccagcaagaccacggatgctcattcctctgatgcacagagctgacggttcatcccggaccaggagctggagagggargttgcagttgtaaattcagcctgaagaagttgcaggctgccacaatgagagatgcttgtgtagcattccttctctctccatccatgaatacgcctgtacagccttcacagcccatagaacaggaggaccaggaggctcccacagtagggacagcaggcttggctggttgtacagcagagggtttctcaccaggagcctgcagggtttcttccccagaaccccggctctcactgctctcatcagaaggtgcgatcacacctgcagcacacccacaggtgtaattttcattccccttccttc

SEQ ID NO: 60764 - DNA, 600 bp, Chicken  19866894320590_1
tgtggaagaatacctgcttggtccatacagaagacgttgttaatggtcatgctacctctgtgaagactgaagcagaacagcattatcacaatgaaagccaaaggtaaatcataccacctctgttatcatttgactggtacattaatattgagtgatggagcaggagcacactaagctgttaaacatcaggcattcaccttgatggaaaagctgcttaaagggtagaaagcaaagagtagtctagcaaagggtaggcttgctagtctcttttgcaataaggaagaattggctttgaggccycacaagtaaatgatggaaccaaagcattcagtattttatcactattccagaagagggcaactcaacaatctcytgggttgtcagtggtggtaagctttttcagagagtcagtgcagcactggtggtaaagaagggatctccccaaactgactggatgastgaagtggtagcaagtgggtttcagtgctctaaagctagaacagtgcatctaggggagacaatctacaagtgtstttatgtgatgttgaactcagaactagcatttgtatacctgaaggagactagagaatctttatggat

SEQ ID NO: 60765 - DNA, 600 bp, Chicken  19866894320590_2
agaacagcattatcacaatgaaagccaaaggtaaatcataccacctctgttatcatttgactggtacattaatattgagtgatggagcaggagcacactaagctgttaaacatcaggcattcaccttgatggaaaagctgcttaaagggtagaaagcaaagagtagtctagcaaagggtaggcttgctagtctcttttgcaataaggaagaattggctttgaggccycacaagtaaatgatggaaccaaagcattcagtattttatcactattccagaagagggcaactcaacaatctcytgggttgtcagtggtggtaagctttttcagagagtcagtgcagcactggtggtaaagaagggatctccccaaactgactggatgastgaagtggtagcaagtgggtttcagtgctctaaagctagaacagtgcatctaggggagacaatctacaagtgtstttatgtgatgttgaactcagaactagcatttgtatacctgaaggagactagagaatctttatggatagggactcttaagtcatcaatgggcagcagttgagaaaagccaacagggtacttcaggagaagtactgacatg

SEQ ID NO: 60766 - DNA, 600 bp, Chicken  19866894320590_3
gcaggagcacactaagctgttaaacatcaggcattcaccttgatggaaaagctgcttaaagggtagaaagcaaagagtagtctagcaaagggtaggcttgctagtctcttttgcaataaggaagaattggctttgaggccycacaagtaaatgatggaaccaaagcattcagtattttatcactattccagaagagggcaactcaacaatctcytgggttgtcagtggtggtaagctttttcagagagtcagtgcagcactggtggtaaagaagggatctccccaaactgactggatgastgaagtggtagcaagtgggtttcagtgctctaaagctagaacagtgcatctaggggagacaatctacaagtgtstttatgtgatgttgaactcagaactagcatttgtatacctgaaggagactagagaatctttatggatagggactcttaagtcatcaatgggcagcagttgagaaaagccaacagggtacttcaggagaagtactgacatgaaggtattgttttcttgttatgtaaaactttagcccacttgcactaaagtttgcttgagtgttacagttcagactccaggctcaag

SEQ ID NO: 60767 - DNA, 598 bp, Chicken  19866894320590_4
gagtagtctagcaaagggtaggcttgctagtctcttttgcaataaggaagaattggctttgaggccycacaagtaaatgatggaaccaaagcattcagtattttatcactattccagaagagggcaactcaacaatctcytgggttgtcagtggtggtaagctttttcagagagtcagtgcagcactggtggtaaagaagggatctccccaaactgactggatgastgaagtggtagcaagtgggtttcagtgctctaaagctagaacagtgcatctaggggagacaatctacaagtgtstttatgtgatgttgaactcagaactagcatttgtatacctgaaggagactagagaatctttatggatagggactcttaagtcatcaatgggcagcagttgagaaaagccaacagggtacttcaggagaagtactgacatgaaggtattgttttcttgttatgtaaaactttagcccacttgcactaaagtttgcttgagtgttacagttcagactccaggctcaagtgagagtgcagataaaaatgcagaaaagaacttgtaaaacaaagaaagggatgaaaagtggtatggaaatga

SEQ ID NO: 60768 - DNA, 600 bp, Chicken  19866894320612_1
tggacagagggcaaggaagggaagggctgaacctgggcaggtaggcatggatggctgtgttgcaacagactgtgtgtcctcctttgtctttgagggccagaggcccagaggaggacatccccccctaatggaactgtcctgtcctttgctgctaggctggagagatgttctgccttctacaaggaaactgatataaagataagtaatcttattaacaccagcctggctgtaatttggccatcagcttctggcaactgccttggtgacaccatggacaagccacaggaggcataacactgkcagttccctgtgtcacacaggcactggcagcatggccggattaggaagatcataagaacagctgccccctttgccagctcatgccagaggagagcaggattgtgagcagaggcagaggtgagtgggcaggggaaagggcatagaaaggaagggcagggcctgggcaagagtggatgtgatgcaacagattgtgtgttttcctccttcatcattgagggccaaaggcccagaggagggcatgaccagaccatggaaccttcctgttctctgctgctcagctggatagttgtttcaccttcc

SEQ ID NO: 60769 - DNA, 571 bp, Chicken  19866894320615_1
  misc_feature (1)..(2): n is any nucleotide
nnacgtgctgcagaagacatgaactagattattacaagactgattttaacttcagattaaggcaattgattagaagtcacctgagtaacacaggacaattttgttcttccctgactaaaaagcagcttgtttccctattcactgctgtactgttagagaaaaaggagggctgtggtttcattcctgggacaaggcactgaattaatcacaacggtaacatgcacatttgttagcacaacaaaccaagatccaccagttggagaacttcatcattaacccgaggccaaagattgggaagtyttggatagttttaacagctgacacacaaggacagaaaatatgaaagcagtaatactgctgcaaacagaacgtgtcaggggctcctgagtagcatggcaggttatcagggcgagggcataataattccagcatgaaaaggtagagaaacctacatagtttcttccatagcaacccatcctgcttagtagcaaaagggacacaaagacatggatgaacgagctgctggttacatggcttccaagcagggtagatttccatgtgatggggacag

SEQ ID NO: 60770 - DNA, 600 bp, Chicken  19866894320617_1
acacctgtttgagcattcccaaactaattcatcagcagtggcaggatacttaagggctgcactgcaagtgcatgtaggaaaagggggagtttagaacaagtttgtgatggttttactgatgagacacaaggctttttctgctctctccagtttattctgcccaggctccgaataattcctctgaccttcccaccctccaccttcttaaaatctgacatcattttaatctgggggagtatcaataaagaacaaaaagaagccaaggctggtacaacaggtgcaactcaatacactctcctrgactcaagttcgctggagcaggaaagctgatctttacgcccattaacatattatatttctaggttacatattacatttctagttatgttccatttccagatcattatgaatatttctgttctttctgttaactttttcatttacagaaaaacctctcctcctttaaactattctgaatctacatatattcttacatttatttatgatgataactagtgcaatgmtccaaaattctttaaaagactgggcctacttatcagctttatagataaatgcatttaagatctgtgcaaacagctg

SEQ ID NO: 60771 - DNA, 600 bp, Chicken  19866894320617_2
aatctgggggagtatcaataaagaacaaaaagaagccaaggctggtacaacaggtgcaactcaatacactctcctrgactcaagttcgctggagcaggaaagctgatctttacgcccattaacatattatatttctaggttacatattacatttctagttatgttccatttccagatcattatgaatatttctgttctttctgttaactttttcatttacagaaaaacctctcctcctttaaactattctgaatctacatatattcttacatttatttatgatgataactagtgcaatgmtccaaaattctttaaaagactgggcctacttatcagctttatagataaatgcatttaagatctgtgcaaacagctgctgactttagccccagagagctcagcagtgagtcaactgttctctgcgccgaataaaacagaaccaacccttctagtaaaggaaactgcataacctgtaaattgcaaaatacattaaagtttatgttatcctctgcaaaagaaacccagaaacagatatcattacctatatatgacgtttagctgttgatcaatctcttgcagcttagaccagtattcatttgc

SEQ ID NO: 60772 - DNA, 600 bp, Chicken  19866894320618_1
ttgaattgctaatggaaccattttttcccttccccatagtgctgacttaaaacttttggaagaagcgaccgtctcagtctgcaaatctttaggtgagaaactgacctcttatcttgtttccatctggttgagcaaaaaagttaagaacatagatgtacacatccacatcttttgtatacataactctgtatgtgttccactggtaagattagaatagtgtcaagtgcgtatatgtattccaagcatttagaaagtcagcttttctcttgtaaaatatgaaatgactgaagagtttaaaaygaataactccatccttgctacctgtttttccatctgccctcaaagataatcggtgagggagaagaattaaccagaggttaaaggaaggaataatacgaatgtggtcagtgatattacacagaggtggcacgtagtggaaacctgtttggtttcctgatagcaagctgttgtgctctttgcaagccttggagagggagacatagaagcttcacagtggaatatttttaatttagaacaaaaattrttttagagaacaatcatggagtagtaaagcatgtactgggaaatcttaaaaataga

SEQ ID NO: 60773 - DNA, 406 bp, Chicken  19866894320618_2
atttagaaagtcagcttttctcttgtaaaatatgaaatgactgaagagtttaaaaygaataactccatccttgctacctgtttttccatctgccctcaaagataatcggtgagggagaagaattaaccagaggttaaaggaaggaataatacgaatgtggtcagtgatattacacagaggtggcacgtagtggaaacctgtttggtttcctgatagcaagctgttgtgctctttgcaagccttggagagggagacatagaagcttcacagtggaatatttttaatttagaacaaaaattrttttagagaacaatcatggagtagtaaagcatgtactgggaaatcttaaaaatagagtaacagctgtttaggaaaatgagtgtcatgctttctacagaaatattta

SEQ ID NO: 60774 - DNA, 589 bp, Chicken  19866894320622_1
tctatcgtgctgctcatcggagcagggatctgactctctggtccgaagaatatttggcagttgaagagaaaatcatttctattccaaaaccgagcagaaaaacaaacaaacgaacacctgtattttctgctaagcaaaacaaaggagggggaaatccagccactgcacaacccacagtcccttcttcatggtctggctgatcacagaaaaatatgcagaataagcatgctttcttctttaaaagctgtgtccatccagacacggctctcttctcctccttgcctgttctgtgctactccrtgctgcaggtgagatttcagctgagttccagagtcacggagcacagtgcttttcttggtcagaaatgatttttcatgaccaggaatgcctctatctggccaaggaggggagagcartcccaaacagaggactgccaagaggacactcacccacagtggtttgccttggcctcctcacagccacgagtgggcaggactggggcttagcagtcaaaaagtccttccttgagggaaccactgggctgcactgtgaatgaggtccatctgtgtggataggagcatgtgggatc

SEQ ID NO: 60775 - DNA, 473 bp, Chicken  19866894320622_2
cctgtattttctgctaagcaaaacaaaggagggggaaatccagccactgcacaacccacagtcccttcttcatggtctggctgatcacagaaaaatatgcagaataagcatgctttcttctttaaaagctgtgtccatccagacacggctctcttctcctccttgcctgttctgtgctactccrtgctgcaggtgagatttcagctgagttccagagtcacggagcacagtgcttttcttggtcagaaatgatttttcatgaccaggaatgcctctatctggccaaggaggggagagcartcccaaacagaggactgccaagaggacactcacccacagtggtttgccttggcctcctcacagccacgagtgggcaggactggggcttagcagtcaaaaagtccttccttgagggaaccactgggctgcactgtgaatgaggtccatctgtgtggataggagcatgtgggatc

SEQ ID NO: 60776 - DNA, 550 bp, Chicken  19866894320623_1
catagagaacactcctatcttctgactgcaatggtaacagaacactgattgcagccacggcaaaggacatatgagggcttgagcccagtcagcagcaccagacccctccacacaccgcagccacagccccacagtcctctccagtaggaggggaacatgggcacgttcctccggcaccagcattccccccacccaggttccccaccacagtgctcagcattcacctttgtcagctggaacatggcctgcattgctgccttgtcctctacaaactcctccttgacgtcagcatcaaatgtkagataggccaggccctccacagcccagcgccgagtcccggcatcaattgcctcattgcacagccacctgcaagatggtccccatcagtccatgctgcagacacccgcccagctcctgctcccatcacaccccacgattctcagcactcacttgcggcactgcttggctaatttcattgtcgagccctcagcaaactgcttcatgctgaagtcggtgcctccagcagatcccagcttgcacagtccctgtg

SEQ ID NO: 60777 - DNA, 599 bp, Chicken  19866894320624_1
  misc_feature (1)..(122): n is any nucleotide
nnnnnnnnnnnnnnnnnnnnnnnnnnnnnnnnnnnnnnnnnnnnnnnnnnnnnnnnnnnnnnnnnnnnnnnnnnnnnnnnnnnnnnnnnnnnnnnnnnnnnnnnnnnnnnnnnnnnnnnnnnttgttcttgtgtacatgagtatttcagaaatgcctaaaatacttgaaccaattattctacctcagctttgcttcagctgccggcaaccattagactgtttgtctcctctttgttgaactggcattgctggaagcaacaccactggcatgacaatgattgacaggagactggctgcatrgagaagcactaattgggtgaaagaggagcagctgaccagagaatactgggcagtctccagcaaaggtgaggggacttgcagagtgctttggagtccccactgacaggggaagggccacrtacacagactgaacaagaaaggaaggaaatgcttccagaatttgtaaccccgagcagtagcaaaagcttatgttatcaagtaagctctcagctgtagaaggaaatgatgtgactgagtattcattctggatcaaaaaaatgagaatcagtaaaggcatgagagagttctttgcatgctct

SEQ ID NO: 60778 - DNA, 599 bp, Chicken  19866894320624_2
  misc_feature (1)..(3): n is any nucleotide
nnnttgttcttgtgtacatgagtatttcagaaatgcctaaaatacttgaaccaattattctacctcagctttgcttcagctgccggcaaccattagactgtttgtctcctctttgttgaactggcattgctggaagcaacaccactggcatgacaatgattgacaggagactggctgcatrgagaagcactaattgggtgaaagaggagcagctgaccagagaatactgggcagtctccagcaaaggtgaggggacttgcagagtgctttggagtccccactgacaggggaagggccacrtacacagactgaacaagaaaggaaggaaatgcttccagaatttgtaaccccgagcagtagcaaaagcttatgttatcaagtaagctctcagctgtagaaggaaatgatgtgactgagtattcattctggatcaaaaaaatgagaatcagtaaaggcatgagagagttctttgcatgctctgtcatctggaacatgctaccttcctttctatccttggaactgtcacatttatcataccatggcttagttcctcctaggaaatctcatggactacttcttcatttatcccttcctgtatg

SEQ ID NO: 60779 - DNA, 542 bp, Chicken  19866894320624_3
taaccccgagcagtagcaaaagcttatgttatcaagtaagctctcagctgtagaaggaaatgatgtgactgagtattcattctggatcaaaaaaatgagaatcagtaaaggcatgagagagttctttgcatgctctgtcatctggaacatgctaccttcctttctatccttggaactgtcacatttatcataccatggcttagttcctcctaggaaatctcatggactacttcttcatttatcccttcctgtatggactacaattctctttctctcggaaaaatactattcagatccctytggcaattacatcagctatttaaagcaaacgaaggtgatacctcttaattcagctgttcaacaaaaatgtgcagctattcattgccctgccaagcatgaaaacacaaaaacaaagtaaaataacaccctcatgaagaatgaggcattaagaacttccatgctaccttgtaatgctataatatgagaaaaacacagggcaatagtagggggcaaagtcttggctgcagcaaaaaaggacaagc

SEQ ID NO: 60780 - DNA, 600 bp, Chicken  19866894320628_1
tgatccaaaataaagaatgtaagtataaaacaagaattgcttctaaagagttatgtgtatcaagacagttgcttcttactgtagaaaaaatgctaagacacagcttgaagcaatgattgagcacctggtgggaaggcagggccaacccagtggagctcaggtgcatgcaatgcacttgagtgactggaaggagtggagccaggatccaatccttctcagacctcatgtaagggttggcagtggaggtaaggatatcttgctggagatccttgcttacataaggccttccaaaggtaagcrgattttcttcctttgtttctgtggctgctgcatttacgcttgtccttatttgtagtagctgaaggctttgctgccccactattattgttgtgcttttggtcctattataaccttgtgcttacgaaactgtggaagtacagaaatggttttttttttttttttttaatttaaatgaaagaacaactttaagatactgaggacttaagtctgggtaatctttaagctgctgaaagaactgactacttattttacaatatgaatgaagtttcatgtttcttgctgcatgcattgtagtgggta

SEQ ID NO: 60781 - DNA, 574 bp, Chicken  19866894320632_1
aacatttgcaatggaaattttccagagacggctaatttaattgtatttttgtgcaacaattaggagggaattacgatagttctttcgacgcggagaagggagtgggcactattgtcattgcaaagcccttggatgcagagcagcggtcaatatataatatgactgtggaggtcaccgatggaacaaacgttgccacaacccaggtagaatatcaccttccttttctgacaagtttttcatttgttagtgaaatatatatgctataaaaattaataattttgctactgagctaaaacctcmtcctttgagaccactgttaactaatggagggatatttttcagagcctttccatctggttgtaaagaatgggctggtgaatgcttcaaagcggtatttctccttttgtcctcttcgtgctcacatgaaagtaatttgccttcctccagctgagggagtccctatctctggcggcactgatagattttgacaattgtatcaccccataattgtccaaaatacaacggtacttctggggagggtggggggaatattgctattggattgtattaaatg

SEQ ID NO: 60782 - DNA, 600 bp, Chicken  19866894320640_1
tgttggtctccttacatgtccacagttctatcaatctttaggcatgttcagtaacataatatactgtactgatccttgtgatcacagagggccagtacaagtcaggttcctagccaagtcaaacctctgaacctaaaacaacaagtcatttctctgtgagaatggcatctgtgtaaaggataatgctcacgatacaagtaagcccaacacaagtctcaactggcactggcatgactgatctcagactcgatggcttcagcacagcgtatctggctccacctgctccactcttcaatatgwacacaccccactgtctccagcacacgttccagaagcattaccagtccacaaggctgggaggatgactatatatgtgtttgttttttttaaatgctgatgacaaatggatggctttgctgttggacaggcagtaaaatccagcagagaagtctgggagggcacagagctgagaccagtggggagcgatgcgcatgcccagggagcagctcacctctggggagaagcaagcaggcaccattgcagaaagcctctggccagttgacccctaactaattctatgagtactgcccatgcattcca

SEQ ID NO: 60783 - DNA, 599 bp, Chicken  19866894320649_1
  misc_feature (1)..(1): n is any nucleotide
ntggaaaagactggaagctctgaagaagatttcaccttcttcatggtttgtgccttccatcaggctcagcacagactgcagtcatctgtacttctctctcagtatagcacatttcataagatggactgacagtatgagcctttaaagcatgttttcatgtatcactgtatacagcatacaggtatacgtcccaagaaatacatgttttacatctagaagtgatgaaacagttattagacagacaaggtgatgtttctaaactgtagaagaaactccacccactcagcctttacaaaccascaagtaagttagggagaaccaaacatcacataaagccttcctttttcatttctaggaaaggcttattgttcaacatgccaaaaccttaacaaaacctttcacagagtaattattacggggttaaatataatagcagatccatgtgtcaaaacactgcgtgcttttgggaaagtacttttttcttcacaatgctgaggacactgaaagactcaactgtaaaacagaaatgtgggtgatttctttttgttacagtatgaatctgctctggatataacacaattcagcacctctggagcagc

SEQ ID NO: 60784 - DNA, 600 bp, Chicken  19866894320655_1
aaggtgccttagaaccaaacttagaacacttgcttcaccctacagttttctatctatcagtcaaacactgagacaggttgccaagagaagctgcctagtctatggaggttttcaagactcagccattcctggaggtcttcttgacccaactgtgcaacatggtgagcaacctggtctgagcttggaaccaaacctgcttccaacaggaggttggtcaagagtcctcctgaggtcccttccaacctgagttattctgtgctgctatcactttcaactctacaacttggagctgggccacartatatattgagaaaagcatctggtcctgatttttataatgtaagcaaggccgtgtttcggatagcacatgaatcattctgcaaccggtctccagtcatacaagaaggaccatatgccatgacatgtggtgctgactggatgggagtgatgggagattattgcaccctctttcatctgcaggataaatcttcttagatggagaatctgtttccttagtgaagttgttccactgattgaattacgcttgccatttttctgtgcacaatttggatctttctggttttcactgctattaaagac

SEQ ID NO: 60785 - DNA, 600 bp, Chicken  19866894320655_2
ttgaattacgcttgccatttttctgtgcacaatttggatctttctggttttcactgctattaaagacattttctgtcactgtctcacacatgaaagagtgtctaaaacatcagataccttttgctcatgtagaactttctcagccaggtctatcctttcttggccttctctgcaatatgtgtgaactccttgatgttctcagcatgagatttggcaataccccaaacccaaaaggacgaggaacactgtgtctcattgcaaagcccccatcggtcaaagtatatgattcacaaatgattygagcaagctagtgctcatcactgagtgttccacccttgatttataggtttaccttcaaaagaaggcagtgtgaatgcaccttgcagttataatctcagagcaaaagctctggcacaagaccagagtgagtttttctgttgcyattcagaagagataagtttcagaagaaaaccycaggacacagtgagagtcgtggagtggagttaccgtgccacagagctgaggtaacaaaggatggaagraatttaatgatggaagaaatttaataaagaatatctgtgttcttccctacaaaagatc

SEQ ID NO: 60786 - DNA, 600 bp, Chicken  19866894320655_3
gccaggtctatcctttcttggccttctctgcaatatgtgtgaactccttgatgttctcagcatgagatttggcaataccccaaacccaaaaggacgaggaacactgtgtctcattgcaaagcccccatcggtcaaagtatatgattcacaaatgattygagcaagctagtgctcatcactgagtgttccacccttgatttataggtttaccttcaaaagaaggcagtgtgaatgcaccttgcagttataatctcagagcaaaagctctggcacaagaccagagtgagtttttctgttgcyattcagaagagataagtttcagaagaaaaccycaggacacagtgagagtcgtggagtggagttaccgtgccacagagctgaggtaacaaaggatggaagraatttaatgatggaagaaatttaataaagaatatctgtgttcttccctacaaaagatctcagatctctcagagagtagaagctgaaatgatgacattgactgagccctttccaccagtgtcagccctaccagtaaaggagatgcagagagacatggccttgacctggagatgcctttctctttctgttcagtacacaggg

SEQ ID NO: 60787 - DNA, 600 bp, Chicken  19866894320655_4
atatgtgtgaactccttgatgttctcagcatgagatttggcaataccccaaacccaaaaggacgaggaacactgtgtctcattgcaaagcccccatcggtcaaagtatatgattcacaaatgattygagcaagctagtgctcatcactgagtgttccacccttgatttataggtttaccttcaaaagaaggcagtgtgaatgcaccttgcagttataatctcagagcaaaagctctggcacaagaccagagtgagtttttctgttgcyattcagaagagataagtttcagaagaaaaccycaggacacagtgagagtcgtggagtggagttaccgtgccacagagctgaggtaacaaaggatggaagraatttaatgatggaagaaatttaataaagaatatctgtgttcttccctacaaaagatctcagatctctcagagagtagaagctgaaatgatgacattgactgagccctttccaccagtgtcagccctaccagtaaaggagatgcagagagacatggccttgacctggagatgcctttctctttctgttcagtacacagggagaggaaaaaggctcccattgtaggtcttcat

SEQ ID NO: 60788 - DNA, 600 bp, Chicken  19866894320655_5
acactgtgtctcattgcaaagcccccatcggtcaaagtatatgattcacaaatgattygagcaagctagtgctcatcactgagtgttccacccttgatttataggtttaccttcaaaagaaggcagtgtgaatgcaccttgcagttataatctcagagcaaaagctctggcacaagaccagagtgagtttttctgttgcyattcagaagagataagtttcagaagaaaaccycaggacacagtgagagtcgtggagtggagttaccgtgccacagagctgaggtaacaaaggatggaagraatttaatgatggaagaaatttaataaagaatatctgtgttcttccctacaaaagatctcagatctctcagagagtagaagctgaaatgatgacattgactgagccctttccaccagtgtcagccctaccagtaaaggagatgcagagagacatggccttgacctggagatgcctttctctttctgttcagtacacagggagaggaaaaaggctcccattgtaggtcttcatctgcaggggtgaagccagaccatacatcaatagatctctttgggtcccattgggataaagaacaatag

SEQ ID NO: 60789 - DNA, 600 bp, Chicken  19866894320661_1
aagacacaaaccaatgaccatggaggtcttctccagcatcatgcctctgctccctgtggaaggagcagtgcagtgcaatgataagaatgccttacctgtccttggtccttgataaccattcctagtagtgtcagttttaatgctgattagagaattccctttaattatgatgaatggaaaactttccctagcctttctgaatagctgctgggggtctgaccctaaaagagctaggatgcccattggacatctctgagtgccaaatgccaacctttgctagaggaggttgagaatgggttsttgctgtgacagaatgcagtagctggcagttgaatatagaacaatacaattatgttcccagatttaatgaattagagtggagccaagatgccccctaggcaaagtgctgggtggttttcagatggaggatcaaagcttttgttaatgtttttctgccatcattatgtgagatatggtcaaattatacaaaagggaaacttttctgctttaggcatctgcagtttttatctgaaatggggccatggaggaccttctctttagggagagttttcccccaaggctcctgcatttgacactgga

SEQ ID NO: 60790 - DNA, 600 bp, Chicken  19866894320661_2
ataacaaagtcatcctcccagaatagcaaatgaggtaagactggcactttgagataagttcctgattactgtctgtggactctgttacattctattatttctcccagatcaaacttcacctttcttaaatgcagacacttcatagttattcctttcacaggtcaattttgtattatttttctaagttttccatacttatttgtttgtttgaacacggtagagaatattcaaaaattctgaagctaaactctttagctaagcactggtctccaacagaccattggaagaacttaaagcaaygagtaaattattaagtagcactaagccaattcataattcatcattattgatatttataccaatggttgctggtgaggaaggagatgagaagaggatggtgctggtcagccaatagggaaagaagagcaatgtacctgaaggactgaagaggtcagaggagtcgagtggatcaggttggcacatgccttgtgatgactgcagctgcagtgccctggaagattcagagcaaggttggcctcgctgggagggagaaaaatgcagggtacatttaagttacagctggatgaaataggaatggag

SEQ ID NO: 60791 - DNA, 600 bp, Chicken  19866894320667_1
agccagatgaatactctccccactcatagtagagttgatgactcaggctttgttgagaaagtgacagagtgtacttaccttgataaattgtccatatgtatgtaagggggtctacagtgtctttacactgatcagtaagaaaagaaggctttcagcttgcaagtccctctgctttctgcatctgtaccgaagtccagaggcccaacccagttgaacagtgccttctgaggtttctgttcgtatcttcatcagtgcaaaagtgtgtgcccacatcaagccagaatgctgtgataaggcccygcaaggagtgctgttgtatatatatgggcctcttggctacaacagctcacaacagtatctttctcccagtgggttgggtggaggattgttattcactcagacctgtggttttgggcttcacaggcaggcattgctgtatgaattacagtgagaacatactttcaaacagattttgttttgagttgttttgtgctttttttctgctatgaataatgttttctgatgtagtcatgcagctgtggtctaaaatatgcttgcataccttcatccctgaactcaaaacgtatctgggtagtctgg

SEQ ID NO: 60792 - DNA, 599 bp, Chicken  19866894320697_1
  misc_feature (1)..(83): n is any nucleotide
nnnnnnnnnnnnnnnnnnnnnnnnnnnnnnnnnnnnnnnnnnnnnnnnnnnnnnnnnnnnnnnnnnnnnnnnnnnnnnnnnnntggaagtgtaaactgatgtctatgtgtgaactgttgaaaacatacagatatgagataggactgaagcccagatatttcacatatatactgagatcagaaagctaaacacaagaccttcgtgatcccacaatgtacgttgtgtctccacacagaaaaccagaaaggtagtggtcacagctgtaaagcaaggtaagattcagtcccttgggtagctgtygcattcccaggagcgtgcacttagccagcttgayaagacccagacctgcagtgcctgagcacgtgttgatgactggctgaaccattctctcccctctttaaagaggagctcgttgacagcattcaaaagcaatcatctggaatcagatttctcttccctgaccagtatcacttcatcccatttcatataatcatgaagatttttgtgcccataagccacaaaatatttgcattgaatggataaagttactgaatacacagggctgtaccagaaaacaagggaatcgctttgtgccatga

SEQ ID NO: 60793 - DNA, 599 bp, Chicken  19866894320697_2
  misc_feature (1)..(49): n is any nucleotide
nnnnnnnnnnnnnnnnnnnnnnnnnnnnnnnnnnnnnnnnnnnnnnnnntggaagtgtaaactgatgtctatgtgtgaactgttgaaaacatacagatatgagataggactgaagcccagatatttcacatatatactgagatcagaaagctaaacacaagaccttcgtgatcccacaatgtacgttgtgtctccacacagaaaaccagaaaggtagtggtcacagctgtaaagcaaggtaagattcagtcccttgggtagctgtygcattcccaggagcgtgcacttagccagcttgayaagacccagacctgcagtgcctgagcacgtgttgatgactggctgaaccattctctcccctctttaaagaggagctcgttgacagcattcaaaagcaatcatctggaatcagatttctcttccctgaccagtatcacttcatcccatttcatataatcatgaagatttttgtgcccataagccacaaaatatttgcattgaatggataaagttactgaatacacagggctgtaccagaaaacaagggaatcgctttgtgccatgattcaaatcaagctcttattagcagccagcactac

SEQ ID NO: 60794 - DNA, 596 bp, Chicken  19866894320705_1
tcatttcagtccagttttgtataaaacttcaaatatctgtcatgcagaagggatgtgaggaaaagatcacaaagttctcttatgagttgtgtactgaaatgtgcccactgtctgctatagtagaggcagatgacttttggcagtaaaccagatcataaacatacttttcattccagtagctttgatattttttttccaaaactgagcactgttttcagtgtttatagttggaaggtttaaactgtgtcatttggagaagatgaaggctgctgctgtttattcccaatgggattcttagtyggggctgaggcaagcaggtgtaactggcttctctccacccctccgcagatagcacatctccttagggctgtacatacaccaaaccaccgtgcttaattacatctaaaatgtgtcttttttcactgataatacagtgtttagcatgccaaggatatagcttcaggtcatagaggccgagaagaaaggcagtgtgttttgcttacggagagcgtgcttggaacttgacaaagctacgtgcaggtagttgagctgaaagctttgctggggggttggacaacttctgacacaacgtaaaa

SEQ ID NO: 60795 - DNA, 600 bp, Chicken  19866894320714_1
ctctgctggctgcaccgtttctgacacaagtcaggatgccgttggccatcttggccacctgggcacactgctggctcgtgttcagcctcatttccaccaacacccccagatccttttcccccacacagcttccagccactctgccccaagcctgtagtgctgcatggggcttgttgtggcccaagtgcaggacccggcacttggccttgttgaacctcatcccattggcctcagcccagctctccagcctgtccaggtccctctgcagggccttcctacccccaggcagatccacacttycccacaacttcttgtcatctacaaacttactgaaggtgcactcagtgcctccatccagatcgtcagtaaagatattaaacaggagaggccccggtattgacccccagggaacaccactcgtgaccagctgccacctgggtgtaactccatccaccgccactctctgggctcagccatccagccagatctttacccagtgaaaagtacacctgtccaagccatgggctgcagcttctgcgggaggacagtgtgggaggcagagtcaaaaggtttgctcaagtctacgttgattacttctcc

SEQ ID NO: 60796 - DNA, 600 bp, Chicken  19866894320736_1
cgtcacctatgcgagagtaattacttcattctgaaatatgcagaaaagttattaggcattactttgaaaaatgttaccagcacatatcccctgcagttttcagtaaataaatgtgttaaatgataggaggaatataaatacagagtgaaaaatatctaatatttctgcaggaaggaaacagtgttttcagtttttatatctgcccttttagatatggtcaaactgctcagtttagtccctgaagactgacttctacagaaagaccattagcaagattctctgtgcctcaggaaagatcckgtggtgaaacaaacactggacagtttatgcccattacaagcatgttctgggaagatcccagatgtagaagacaatcaggaatgtccacatcccagaggagcttagcaaggagctggtcatcttcacagagcccaggcacctccgtgttgtcttcatatcccaggctgcagcttctttggtctgcccacataagagtacctgctctcatagaaacaatttcatctacatgggtacccaaagaggaaaaggagaagggcatttgtcaagttgattatttaccttcctgtctgcttatagaat

SEQ ID NO: 60797 - DNA, 529 bp, Chicken  19866894320736_2
tgcccattacaagcatgttctgggaagatcccagatgtagaagacaatcaggaatgtccacatcccagaggagcttagcaaggagctggtcatcttcacagagcccaggcacctccgtgttgtcttcatatcccaggctgcagcttctttggtctgcccacataagagtacctgctctcatagaaacaatttcatctacatgggtacccaaagaggaaaaggagaagggcatttgtcaagttgattatttaccttcctgtctgcttatagaattgttcttcaaactctcttaaagctttkcgaagccttttcttgtctgctcttgtttctcggagttgttcaagcagaacaggcctgtaaaacagagacaggaccatgaaaccyccatgtgccttgactgactgtaaaagctgtggtttagggtaataggcaggccctgctgtgggccatggcagggggttcatctcagtgcctcaaggcatgacaacatatcccaccagatatggatatggcagttgtacaagcatat

SEQ ID NO: 60798 - DNA, 445 bp, Chicken  19866894320736_3
gctggtcatcttcacagagcccaggcacctccgtgttgtcttcatatcccaggctgcagcttctttggtctgcccacataagagtacctgctctcatagaaacaatttcatctacatgggtacccaaagaggaaaaggagaagggcatttgtcaagttgattatttaccttcctgtctgcttatagaattgttcttcaaactctcttaaagctttkcgaagccttttcttgtctgctcttgtttctcggagttgttcaagcagaacaggcctgtaaaacagagacaggaccatgaaaccyccatgtgccttgactgactgtaaaagctgtggtttagggtaataggcaggccctgctgtgggccatggcagggggttcatctcagtgcctcaaggcatgacaacatatcccaccagatatggatatggcagttgtacaagcatat

SEQ ID NO: 60799 - DNA, 464 bp, Chicken  19866894320740_1
ttactacatgacatcagtagattttggcctttaatcctttgatagtaattcctagcaccacatagattggaagcatccacatctgccatccaaattttcagtaatgtggttttctacagtatcgcattaccaacttgcattagacatacagtgtgctcacctttgacatggaaatattacagcagctatgcctgaagtacaataaggacttcagcctaatctcttctgcacttgctgtgatcttttttgtctgactaccattcattggcttgagtccacactttgctttttaacttacaygaattttagctattatatattcgcattaacttggtctgtgaatttggacccactgtactaggtgcagtaagacatggccattttattcagttcactttcaaagatgagatgattgacgctagcagacaagcagggaaatacaagcaagcaataaggctgaattt

SEQ ID NO: 60800 - DNA, 599 bp, Chicken  19866894320741_1
  misc_feature (1)..(165): n is any nucleotide
nnnnnnnnnnnnnnnnnnnnnnnnnnnnnnnnnnnnnnnnnnnnnnnnnnnnnnnnnnnnnnnnnnnnnnnnnnnnnnnnnnnnnnnnnnnnnnnnnnnnnnnnnnnnnnnnnnnnnnnnnnnnnnnnnnnnnnnnnnnnnnnnnnnnnnnnnnnnnnnnnnnnntaaggtaaaaaaaaaaaacaaaacataaatataagggaaaactagtgctgtttttaacaatctaatagtagcttagcccattcttcaaagaagaacattagatttcattagaactaccaacagtttttatcagartgtatgaagaaataatgcrtatcagtactgcagagtaactaaagacacatctctactcttcattctctgaactctgtatttactagaatgcagaaatcagtgatgctatactgttattgcttttttttattttgatcattcaaatctaattattatgaaacttgaagtcaaatttattaatagtaaaacttccaatcatctaaatgcaaaggaattctgttggcttactgtgtaaattgctttgtgacacagctgagtcataacaggaagaatgacaaggaaaaatatatttgagaggg

SEQ ID NO: 60801 - DNA, 599 bp, Chicken  19866894320741_2
  misc_feature (1)..(146): n is any nucleotide
nnnnnnnnnnnnnnnnnnnnnnnnnnnnnnnnnnnnnnnnnnnnnnnnnnnnnnnnnnnnnnnnnnnnnnnnnnnnnnnnnnnnnnnnnnnnnnnnnnnnnnnnnnnnnnnnnnnnnnnnnnnnnnnnnnnnnnnnnnnnnnnnnntaaggtaaaaaaaaaaaacaaaacataaatataagggaaaactagtgctgtttttaacaatctaatagtagcttagcccattcttcaaagaagaacattagatttcattagaactaccaacagtttttatcagartgtatgaagaaataatgcrtatcagtactgcagagtaactaaagacacatctctactcttcattctctgaactctgtatttactagaatgcagaaatcagtgatgctatactgttattgcttttttttattttgatcattcaaatctaattattatgaaacttgaagtcaaatttattaatagtaaaacttccaatcatctaaatgcaaaggaattctgttggcttactgtgtaaattgctttgtgacacagctgagtcataacaggaagaatgacaaggaaaaatatatttgagaggggaagtgtaagatcagaggg

SEQ ID NO: 60802 - DNA, 600 bp, Chicken  19866894320745_1
acatggtgaatccttgtcctgttttgtttgtagatgaccttgaggatgtatatgttgtgtgtctgccttcatgcctggttccaaagtgcttgtgtgaggctggggggaaggggagagctcctgtcttcctggggtgactgactgtaggagatggtatgggggcattggctggagaagagctcctggctgtccttgtcccgcttgcaggacagggatcaggcagggatccaagcagacagtgctgtagcttctggtggcaggagcagcttccagctattttgatctggctgtttcaacagkagctgcagtaggtaggaaatacagtcagagctctagagcagctgcagggccggtctgtgctccagaacgtgtgctggggaatgaygcaacgagccctgtgacacacagcgctgtcaggtggggatgccacacrcagggctcgtgctggcccaggtttcttctgtttggggggaatgtccttcgtggccctgtccagcagatgggatggagaggggcttccacagaaaagctaggtagatggtattaaacatgtcatcaccttcttgtttcttctctcgctttctggcttgtccccaaaac

SEQ ID NO: 60803 - DNA, 600 bp, Chicken  19866894320745_2
gtgcttgtgtgaggctggggggaaggggagagctcctgtcttcctggggtgactgactgtaggagatggtatgggggcattggctggagaagagctcctggctgtccttgtcccgcttgcaggacagggatcaggcagggatccaagcagacagtgctgtagcttctggtggcaggagcagcttccagctattttgatctggctgtttcaacagkagctgcagtaggtaggaaatacagtcagagctctagagcagctgcagggccggtctgtgctccagaacgtgtgctggggaatgaygcaacgagccctgtgacacacagcgctgtcaggtggggatgccacacrcagggctcgtgctggcccaggtttcttctgtttggggggaatgtccttcgtggccctgtccagcagatgggatggagaggggcttccacagaaaagctaggtagatggtattaaacatgtcatcaccttcttgtttcttctctcgctttctggcttgtccccaaaactgtttgccccaacacgtgctgttctgaaattttgtctgtggcgagcaattgactttaacataacatgttctctttttgcaggata

SEQ ID NO: 60804 - DNA, 600 bp, Chicken  19866894320745_3
gtgactgactgtaggagatggtatgggggcattggctggagaagagctcctggctgtccttgtcccgcttgcaggacagggatcaggcagggatccaagcagacagtgctgtagcttctggtggcaggagcagcttccagctattttgatctggctgtttcaacagkagctgcagtaggtaggaaatacagtcagagctctagagcagctgcagggccggtctgtgctccagaacgtgtgctggggaatgaygcaacgagccctgtgacacacagcgctgtcaggtggggatgccacacrcagggctcgtgctggcccaggtttcttctgtttggggggaatgtccttcgtggccctgtccagcagatgggatggagaggggcttccacagaaaagctaggtagatggtattaaacatgtcatcaccttcttgtttcttctctcgctttctggcttgtccccaaaactgtttgccccaacacgtgctgttctgaaattttgtctgtggcgagcaattgactttaacataacatgttctctttttgcaggatagagaactgcgcccggaagaaattgaaggtaaaacttgtcgctccttct

SEQ ID NO: 60805 - DNA, 599 bp, Chicken  19866894320751_1
  misc_feature (1)..(105): n is any nucleotide
nnnnnnnnnnnnnnnnnnnnnnnnnnnnnnnnnnnnnnnnnnnnnnnnnnnnnnnnnnnnnnnnnnnnnnnnnnnnnnnnnnnnnnnnnnnnnnnnnnnnnnnnnaactccaacaagcgacattcagagaaaggtccttcaaagttatttctacctccgtgaatactgccaggagttacctaaaacaaacatccatcggctggaaaaaaaccagagctccctttatttttttaagcccttttgttctgctcacttggggaaggtgtctcatttgaaaaacacctgcactcatttaaagcrgaatgaatcagtgtaataaatggtacccccttgtcatccattgaactgggaacacttttatttttttttcctccttccaactgttataaaatagaccaaaggagggctattttagatcaataatcttttttccccctctcccttgatattccaggtcagctggcaaatggagaattattctttgcactgttctcaaaagctcctcttatcgcccatctgagacggccacttgccccagataagggaactgctttcggagtgaatgggtaataaagtgaatggcagcagaacgagcagca

SEQ ID NO: 60806 - DNA, 600 bp, Chicken  19866894320751_2
ctcctcttatcgcccatctgagacggccacttgccccagataagggaactgctttcggagtgaatgggtaataaagtgaatggcagcagaacgagcagcaggcaggtttgtccttgatggtgcccacatccttcccgcatcccagccacacacccataggcagtgtccagggatgagcagccccactccccccagctcccgttattcgtcgcttttccacttgctttcagtctgagcctttcctgccgtgctgctctgtgtcagaaattcattaacaaactttgcattttgatggtagayrgggaaatgccatctgctacccaacggctgcgctccttaatctgcccaaatcctgccgaaccccgccaatgtcaccgagagtggttgagctgctgctcgctttcctgttattagcaaattaagatacacttcctgctgttgatttcctcatctaaatactgcgctgggaacagaaataaccctattactgggccaggatataatttagccataacactaatctttgctggtctgagacggggtgttattctgcatctgttgttattctccatagtccttactcctaaagctggggaaata

SEQ ID NO: 60807 - DNA, 600 bp, Chicken  19866894320751_3
tcctcttatcgcccatctgagacggccacttgccccagataagggaactgctttcggagtgaatgggtaataaagtgaatggcagcagaacgagcagcaggcaggtttgtccttgatggtgcccacatccttcccgcatcccagccacacacccataggcagtgtccagggatgagcagccccactccccccagctcccgttattcgtcgcttttccacttgctttcagtctgagcctttcctgccgtgctgctctgtgtcagaaattcattaacaaactttgcattttgatggtagayrgggaaatgccatctgctacccaacggctgcgctccttaatctgcccaaatcctgccgaaccccgccaatgtcaccgagagtggttgagctgctgctcgctttcctgttattagcaaattaagatacacttcctgctgttgatttcctcatctaaatactgcgctgggaacagaaataaccctattactgggccaggatataatttagccataacactaatctttgctggtctgagacggggtgttattctgcatctgttgttattctccatagtccttactcctaaagctggggaaatac

SEQ ID NO: 60808 - DNA, 600 bp, Chicken  19866894320752_1
ttatgcagctactactggcaattaaaatcacttaattttgtgcataaaatgtgttttggttttttttttaggaaaaaaaatgcccacttccatctttgaggtctgtttttttccacacaggccaccatttctaaatctttcagcttgtcagttctgaataacttggttactaagatggtatttaaggggtttagggtttaatgcaggccaataaccttgaatattttaaagaagcaagaaagaagcttagccacacatttcagcaagtctaaagagacatactttgaaaggcgtttatakctagtgcctttccattttcacatctcaggcttttagaacctttggtctaaacctaaaggggaaatttttccctttgaactkggttacttcaaatggaaatttcattactaacctcagagaattcagtctcctccaaacaccatctgctttgagaaaaccaaccatgtttggatataattagtgtggtaacagaagtgacacgatcttgcatccagaggttatagggcatcagccacagatgatgttgcaatgacttacacctatctgctggagagragcatgaagaaaggatggaacatg

SEQ ID NO: 60809 - DNA, 600 bp, Chicken  19866894320752_2
gcccacttccatctttgaggtctgtttttttccacacaggccaccatttctaaatctttcagcttgtcagttctgaataacttggttactaagatggtatttaaggggtttagggtttaatgcaggccaataaccttgaatattttaaagaagcaagaaagaagcttagccacacatttcagcaagtctaaagagacatactttgaaaggcgtttatakctagtgcctttccattttcacatctcaggcttttagaacctttggtctaaacctaaaggggaaatttttccctttgaactkggttacttcaaatggaaatttcattactaacctcagagaattcagtctcctccaaacaccatctgctttgagaaaaccaaccatgtttggatataattagtgtggtaacagaagtgacacgatcttgcatccagaggttatagggcatcagccacagatgatgttgcaatgacttacacctatctgctggagagragcatgaagaaaggatggaacatgcaggactgatcccagcagagaagttcgtctgatgggcagtaaatttgcaagtttaaagtggaatttctcaagatatctcca

SEQ ID NO: 60810 - DNA, 600 bp, Chicken  19866894320752_3
acatactttgaaaggcgtttatakctagtgcctttccattttcacatctcaggcttttagaacctttggtctaaacctaaaggggaaatttttccctttgaactkggttacttcaaatggaaatttcattactaacctcagagaattcagtctcctccaaacaccatctgctttgagaaaaccaaccatgtttggatataattagtgtggtaacagaagtgacacgatcttgcatccagaggttatagggcatcagccacagatgatgttgcaatgacttacacctatctgctggagagragcatgaagaaaggatggaacatgcaggactgatcccagcagagaagttcgtctgatgggcagtaaatttgcaagtttaaagtggaatttctcaagatatctccatatttctgaaaacaacaacaaatctgcaccttgggtatctcccactcctctccctccaaagaattcactagtgcgttcctctgcaattcactgggagagaaccatgtctaatacgtggcatgcaattttagtattttctaatgaaacataagaagtcctctytggtaattctgattatagctctgccttactctt

SEQ ID NO: 60811 - DNA, 600 bp, Chicken  19866894320752_4
gttgcaatgacttacacctatctgctggagagragcatgaagaaaggatggaacatgcaggactgatcccagcagagaagttcgtctgatgggcagtaaatttgcaagtttaaagtggaatttctcaagatatctccatatttctgaaaacaacaacaaatctgcaccttgggtatctcccactcctctccctccaaagaattcactagtgcgttcctctgcaattcactgggagagaaccatgtctaatacgtggcatgcaattttagtattttctaatgaaacataagaagtcctctytggtaattctgattatagctctgccttactcttttgtgtttgccaacagctctacatgagagagctcctcagaaagaacccccgttccaagcattccttctgtcttctgaattccagccacacaaaaattcattcagacgtttactccacactttgtcgaccttaaatagtaaattgccagagataaaaagctgtcttttgccttgcatccatcccccacagtctgaaagaagctgcagaggccactaccaaggagagaaaggctgcaccactgagttccagctaacacagaaagatgtc

SEQ ID NO: 60812 - DNA, 451 bp, Chicken  19866894320759_1
agctgtggactcctgtcttctggcaccatcaccagcccttctgtggtagccacatggccagcaaatctcagacacgtttgcccagacaacacagtatttcagcctgattgggcacaaagaccaagtatggtctgacgtttcctgcctgcactaaattttggacctccctctcggatggggtgcacagacagattgctgtggaggaaggtgctggcagaaatcatctgtcttgctctactggactgtgacttgtaagcagaggactgtgacagtgtttactgcttggaaaactgctcctcrtcttcttcagagaggggcaaaaggccagctgtggcccacgggctaccagcttaacaagatgggataaggcatgctccaaaagtgggaaagcatagtccgcaagtgcagaaatcaacacattaagggaggtggcaacctaaatacatttaat

SEQ ID NO: 60813 - DNA, 600 bp, Chicken  19866894320764_1
ttttcctggtaaaacacgttgtcatatcagagtctttgttattgctgtaacacaatctagtaagatacatgaccatctttgtgcttattattccaaaatttaattctgtacagctgaagcagacagaaaatcttgctggtaggaaatatgtgttgagggcccagtgcatgaactggatattctttatagtagggtgtgttggcttcactttacctcaagagataatgcacaaatcaataatagcaggaataaggaaatctagaaaaaatcaatcagtggggctactttttattttggacrtttagcatgagaatccttgacataatttcagaggcaatgtgctgatttagtagaggagcagacccctctaatggaatctcagatttggcctcctgaagtggagatcataggaagtcattcaaggaagaggtattgtaaacttcaaggttaaatctgtagttcgtatttttggagacaaatctcatcttcattaaaaacatgtatgttggatatgttgcccatcccaataacagcgtcattccagctgcatctccttgaattagtacagactgtgtgacaaatgcagatcttgaagtctca

SEQ ID NO: 60814 - DNA, 600 bp, Chicken  19866894320771_1
tctgttcttcagcaaaatgacaatatgccttctagaaagaaaaccaccttttggctcatttattaccaaaagccattcggacttttttttccttcctaggccatctctacttcacaggagagaatgcacgtaagcctgccctggagtacaaagaaagttattttcccatccagcttttaatatctgcagaagggacagccctaggcagcctacagttcccttgggattgcaggagctttgcagcaatggcagggatccttaacctctctctcctgcagataaggctggtgcacctgtagsctrcagagagctgtggaaatgccttatgcaatcgagcaacaacccacctcaaatttcaaagccgttgtagccacccagccctgtccaggagggtatgaatggggctgttttcatatctctcatgcaaatgtctgttagcacaacaatgttatccgttgttatccgcaaacagtaggattttatctggagctcagtcttggttcctgaccacggaaaatgtatacaaagtatagctgaagaaacttgagccaatagaccgccactcccagtgaaaccacatgctgcaggaatgagaaaaag

SEQ ID NO: 60815 - DNA, 600 bp, Chicken  19866894320771_2
gttcttcagcaaaatgacaatatgccttctagaaagaaaaccaccttttggctcatttattaccaaaagccattcggacttttttttccttcctaggccatctctacttcacaggagagaatgcacgtaagcctgccctggagtacaaagaaagttattttcccatccagcttttaatatctgcagaagggacagccctaggcagcctacagttcccttgggattgcaggagctttgcagcaatggcagggatccttaacctctctctcctgcagataaggctggtgcacctgtagsctrcagagagctgtggaaatgccttatgcaatcgagcaacaacccacctcaaatttcaaagccgttgtagccacccagccctgtccaggagggtatgaatggggctgttttcatatctctcatgcaaatgtctgttagcacaacaatgttatccgttgttatccgcaaacagtaggattttatctggagctcagtcttggttcctgaccacggaaaatgtatacaaagtatagctgaagaaacttgagccaatagaccgccactcccagtgaaaccacatgctgcaggaatgagaaaaagaac

SEQ ID NO: 60816 - DNA, 600 bp, Chicken  19866894320771_3
gagctgtggaaatgccttatgcaatcgagcaacaacccacctcaaatttcaaagccgttgtagccacccagccctgtccaggagggtatgaatggggctgttttcatatctctcatgcaaatgtctgttagcacaacaatgttatccgttgttatccgcaaacagtaggattttatctggagctcagtcttggttcctgaccacggaaaatgtatacaaagtatagctgaagaaacttgagccaatagaccgccactcccagtgaaaccacatgctgcaggaatgagaaaaagaactccrcaggcatcaagtcaacagccagggaaattccaccatttggaaatggctgaggaagatccrctcctgcaaattctaatgcygtacactgctgacctgcagtgcaagggagtgagagggagaggaatcagccagagaaacgagtaacagagctgaaataaataaataagtcactgacaaaacagccgcctggaatgagctgtgtgagatgacagcatctcaaacacccagcagaaagatttgcaagctgtgcaagtatggacagtggcaatgtgagagacacggtggtgaaggaaagatact

SEQ ID NO: 60817 - DNA, 600 bp, Chicken  19866894320771_4
tagccacccagccctgtccaggagggtatgaatggggctgttttcatatctctcatgcaaatgtctgttagcacaacaatgttatccgttgttatccgcaaacagtaggattttatctggagctcagtcttggttcctgaccacggaaaatgtatacaaagtatagctgaagaaacttgagccaatagaccgccactcccagtgaaaccacatgctgcaggaatgagaaaaagaactccrcaggcatcaagtcaacagccagggaaattccaccatttggaaatggctgaggaagatccrctcctgcaaattctaatgcygtacactgctgacctgcagtgcaagggagtgagagggagaggaatcagccagagaaacgagtaacagagctgaaataaataaataagtcactgacaaaacagccgcctggaatgagctgtgtgagatgacagcatctcaaacacccagcagaaagatttgcaagctgtgcaagtatggacagtggcaatgtgagagacacggtggtgaaggaaagatactctgagggctgatgtcacataaacyggctggatgaccacatttccagcaggycgcagtttg

SEQ ID NO: 60818 - DNA, 600 bp, Chicken  19866894320771_5
ggagggtatgaatggggctgttttcatatctctcatgcaaatgtctgttagcacaacaatgttatccgttgttatccgcaaacagtaggattttatctggagctcagtcttggttcctgaccacggaaaatgtatacaaagtatagctgaagaaacttgagccaatagaccgccactcccagtgaaaccacatgctgcaggaatgagaaaaagaactccrcaggcatcaagtcaacagccagggaaattccaccatttggaaatggctgaggaagatccrctcctgcaaattctaatgcygtacactgctgacctgcagtgcaagggagtgagagggagaggaatcagccagagaaacgagtaacagagctgaaataaataaataagtcactgacaaaacagccgcctggaatgagctgtgtgagatgacagcatctcaaacacccagcagaaagatttgcaagctgtgcaagtatggacagtggcaatgtgagagacacggtggtgaaggaaagatactctgagggctgatgtcacataaacyggctggatgaccacatttccagcaggycgcagtttggaggggcaggagattaagct

SEQ ID NO: 60819 - DNA, 436 bp, Chicken  19866894320771_6
aaattccaccatttggaaatggctgaggaagatccrctcctgcaaattctaatgcygtacactgctgacctgcagtgcaagggagtgagagggagaggaatcagccagagaaacgagtaacagagctgaaataaataaataagtcactgacaaaacagccgcctggaatgagctgtgtgagatgacagcatctcaaacacccagcagaaagatttgcaagctgtgcaagtatggacagtggcaatgtgagagacacggtggtgaaggaaagatactctgagggctgatgtcacataaacyggctggatgaccacatttccagcaggycgcagtttggaggggcaggagattaagcttccgcattggattccctcttgctcactgtacacacagccatgaagtgaagtctgaagttctccagtacattgagaatcac

SEQ ID NO: 60820 - DNA, 409 bp, Chicken  19866894320771_7
gaagatccrctcctgcaaattctaatgcygtacactgctgacctgcagtgcaagggagtgagagggagaggaatcagccagagaaacgagtaacagagctgaaataaataaataagtcactgacaaaacagccgcctggaatgagctgtgtgagatgacagcatctcaaacacccagcagaaagatttgcaagctgtgcaagtatggacagtggcaatgtgagagacacggtggtgaaggaaagatactctgagggctgatgtcacataaacyggctggatgaccacatttccagcaggycgcagtttggaggggcaggagattaagcttccgcattggattccctcttgctcactgtacacacagccatgaagtgaagtctgaagttctccagtacattgagaatcac

SEQ ID NO: 60821 - DNA, 600 bp, Chicken  19866894320782_1
caatgagtaacaagcccactgcattaaagtcccataaggagcaaatttgactgcaggactcacaactaatagcttactcccagacaagtttcaggtcatctctattaattatttccaagataacctgcatgattctacagactctacagaggccactcctaaaacacagcgtggatgtaattgtaagttttggcataccccagagtttttcagaaagctctccacccccttgtgatggtgcactccttgcttccccacccagcctggtcattatgcccaaggcttagtgcacacaacgargtgcagaagaccttgtcattgggactaataacaacgagggcttcactgagacagttaacagccaccatattttctaaaactgggtgctcagagaactgataacagacacctagttcaatacatccatttctaagttgtacgactatgagtgaatcgtcttaccttacaaatagcaagcagcctaggaatccctctgagagttcctcttgcaagcagctgtctgtacaccagaatctccccttgattagggacacctctcaaggttacttaacaactctgcagagactaacctgggatgcg

SEQ ID NO: 60822 - DNA, 600 bp, Chicken  19866894320782_2
gggcttcactgagacagttaacagccaccatattttctaaaactgggtgctcagagaactgataacagacacctagttcaatacatccatttctaagttgtacgactatgagtgaatcgtcttaccttacaaatagcaagcagcctaggaatccctctgagagttcctcttgcaagcagctgtctgtacaccagaatctccccttgattagggacacctctcaaggttacttaacaactctgcagagactaacctgggatgcggtaacactttgccgacagatcctcagtaagttgaatrctgtttttaagctatactaccttcctaagctttgatctcagattcattatgcagccctcaccctctgcatagcaaacaggcaaggatatctagccattttgaatcctgttaagttgctgtcatcgttgttcaaattaccacattattttatatcagtaaatatctttctgccttcttcttacaagtgaagcgtgcagtgtttttgtctccatccacaacactcctacatccttctgacatcactggacaaagaggtacatggtggaaaagcagtaaaagttgtgtcctctactaaacata

SEQ ID NO: 60823 - DNA, 575 bp, Chicken  19866894320787_1
accccaactcccctgcttctgtatttcttcattccctgctaaaaaactgtgcagtcttgtaatgcattaagctaggaactaggctacaatccctctcctctcagcttacagtgacatctatctccccagaagactgctggagaaggacagtgctactgtacacacaggaccaacaagcaattccaggtcctgagggggacacagtgttttgtgttttgagcacaagatttcatatgtgaaaagataaatttaaggatttttttttaattttattttatttttttttcctctccagtgagrgtggtgaggcactggaataggttacctagtgttacggttgacaccccgtccctggagactttcagtgcatcaggccctgggcaacctgattgagctgtggatgttcctgttcattacaggggagttgcactagatggccgtcagagatcccttccagctctaaggattctatgattccatgaaatagagaatgcccctttctgtagcctccaatatgaagtgaagataccaaagagaagagtaagttgtctagggaaaaaatatacatttgaaaa

SEQ ID NO: 60824 - DNA, 600 bp, Chicken  19866894320788_1
aatcatagaaccatagaatgaatcatagaacggctcaggttggatgggaccttaaagaccatctagtttcaaccctcctggcatgggttggttgccacccactgaaccaggcaccagctcaggatgcccagagccccatctgtggcctcgggcacctccagggatggggcactcacagctctgggcagtgccaggggctcactgctctctgagtgaataatttcctcctaacatctaacctaaattttccctcttttagtttaaaaccattcccccttgtcctgtcactatcagaccacrttaaaagtcagttcccctcctctcataagctcctttcagtgctggaaggccgcagtgaggtctctgtggattcttctccagactgagcaagcccagctccttcagcctttctccagaggagaagtgctccagccctctgagcatcatcatggcttcctctggacccgctccaacagctccacgccttccttacactgggggacacacagtcccggatttcctaactctttaactggcacttcacagctccattttgaagtgcaacacccagcagtaatgaaataaaaacattcgcttcty

SEQ ID NO: 60825 - DNA, 600 bp, Chicken  19866894320788_2
ttaaaagtcagttcccctcctctcataagctcctttcagtgctggaaggccgcagtgaggtctctgtggattcttctccagactgagcaagcccagctccttcagcctttctccagaggagaagtgctccagccctctgagcatcatcatggcttcctctggacccgctccaacagctccacgccttccttacactgggggacacacagtcccggatttcctaactctttaactggcacttcacagctccattttgaagtgcaacacccagcagtaatgaaataaaaacattcgcttctygagaggcrctgactattgcttccagttgggaattctccatagcaaacactactagttaaaacagtttggaggaagggattaactcgaattaaaaacagattgtttatgaagttttgaaatgatcaaaagcagcctggccatccttttctgaatgcaagtctctctgacaaccagctcttttctggttaaaaaatgattatcctgaagttgacagaaaagttagaagaagatatctaagggctgtgaatggagtggcatgttctgatacaagaaccctacattttcttctgattccgtatg

SEQ ID NO: 60826 - DNA, 600 bp, Chicken  19866894320788_3
cagttcccctcctctcataagctcctttcagtgctggaaggccgcagtgaggtctctgtggattcttctccagactgagcaagcccagctccttcagcctttctccagaggagaagtgctccagccctctgagcatcatcatggcttcctctggacccgctccaacagctccacgccttccttacactgggggacacacagtcccggatttcctaactctttaactggcacttcacagctccattttgaagtgcaacacccagcagtaatgaaataaaaacattcgcttctygagaggcrctgactattgcttccagttgggaattctccatagcaaacactactagttaaaacagtttggaggaagggattaactcgaattaaaaacagattgtttatgaagttttgaaatgatcaaaagcagcctggccatccttttctgaatgcaagtctctctgacaaccagctcttttctggttaaaaaatgattatcctgaagttgacagaaaagttagaagaagatatctaagggctgtgaatggagtggcatgttctgatacaagaaccctacattttcttctgattccgtatgacaaaaga

SEQ ID NO: 60827 - DNA, 600 bp, Chicken  19866894320791_1
taaaaaaattgctctgtttaacacttttatcagtgaagttcaggaggagatggagagtcttctcagcaagtgaacatacgatgctaaactagagggaacagctgataccttcaagagcagaagataccttcaagaacccgcagcatgccccagcaacaaaaccaacacctccagagctataacaacatggcttgtaaatcaagggaaaggattatccccctctcctcaacacttaccaaactacacctagatatttcatacagttttgttcccttggttcagtggaggtccactgagatrgagcacttgcccagggaacagaatttgaagcactaggaagtgttcagaccagagaaggaatcttgcggttctatgaacccctagtatstatgggsaggtcataaagaagatagagtcaagatgttcagtgctgtgtggtgggaggatgagagccaacgggcacaaattgaaagaagagagacggccagatgtgaggaaaaacttaactaygaggacagccaagcagtacagcaggctgctgggagaatttttgctatgctcaccctaaaaggtattcaagattggacctgataatcacct

SEQ ID NO: 60828 - DNA, 600 bp, Chicken  19866894320791_2
ctagagggaacagctgataccttcaagagcagaagataccttcaagaacccgcagcatgccccagcaacaaaaccaacacctccagagctataacaacatggcttgtaaatcaagggaaaggattatccccctctcctcaacacttaccaaactacacctagatatttcatacagttttgttcccttggttcagtggaggtccactgagatrgagcacttgcccagggaacagaatttgaagcactaggaagtgttcagaccagagaaggaatcttgcggttctatgaacccctagtatstatgggsaggtcataaagaagatagagtcaagatgttcagtgctgtgtggtgggaggatgagagccaacgggcacaaattgaaagaagagagacggccagatgtgaggaaaaacttaactaygaggacagccaagcagtacagcaggctgctgggagaatttttgctatgctcaccctaaaaggtattcaagattggacctgataatcacctactcgaagctgatcttgtttaaacgagaacttagacgaaggatgtctttgaggtcccttccaatctgaattatcatattaccctatga

SEQ ID NO: 60829 - DNA, 600 bp, Chicken  19866894320791_3
gaacagctgataccttcaagagcagaagataccttcaagaacccgcagcatgccccagcaacaaaaccaacacctccagagctataacaacatggcttgtaaatcaagggaaaggattatccccctctcctcaacacttaccaaactacacctagatatttcatacagttttgttcccttggttcagtggaggtccactgagatrgagcacttgcccagggaacagaatttgaagcactaggaagtgttcagaccagagaaggaatcttgcggttctatgaacccctagtatstatgggsaggtcataaagaagatagagtcaagatgttcagtgctgtgtggtgggaggatgagagccaacgggcacaaattgaaagaagagagacggccagatgtgaggaaaaacttaactaygaggacagccaagcagtacagcaggctgctgggagaatttttgctatgctcaccctaaaaggtattcaagattggacctgataatcacctactcgaagctgatcttgtttaaacgagaacttagacgaaggatgtctttgaggtcccttccaatctgaattatcatattaccctatgatcacttc

SEQ ID NO: 60830 - DNA, 598 bp, Chicken  19866894320791_4
attatccccctctcctcaacacttaccaaactacacctagatatttcatacagttttgttcccttggttcagtggaggtccactgagatrgagcacttgcccagggaacagaatttgaagcactaggaagtgttcagaccagagaaggaatcttgcggttctatgaacccctagtatstatgggsaggtcataaagaagatagagtcaagatgttcagtgctgtgtggtgggaggatgagagccaacgggcacaaattgaaagaagagagacggccagatgtgaggaaaaacttaactaygaggacagccaagcagtacagcaggctgctgggagaatttttgctatgctcaccctaaaaggtattcaagattggacctgataatcacctactcgaagctgatcttgtttaaacgagaacttagacgaaggatgtctttgaggtcccttccaatctgaattatcatattaccctatgatcacttccttatgcataacaatacagaagtacatactccttatgctataactgtcaccaataagattagagatatttcttttcttcactgcaaaaggcaacttcccccgctgtaagcctg

SEQ ID NO: 60831 - DNA, 600 bp, Chicken  19866894320793_1
gtgtcaaaggttttcatgttccccctctgaaaagcttgaagcaaatgtttctatcgccatggcagcaaactaatacccagcaattaatcaaaactcttctcacttgctttctgtgtgcacgcactcctactctggcattaagtctgagagcgcccggttgctttcctgttaaacgtgtctatgctcagactcaacacaaacacttctcagcaagaagaaattaagcttagaaattaagttcccaaaataactgtgcggcatgaatcaaagacagctgctaatgtggtaaaaaattatttmtttcctccagcacttccacttgccagccagaggcatctggaaggctgctggtgagttcagtgcmtgcttgagctgtggggaaagcacaaatgtggcaagaagttgacagcatccgtttgattgctgacacctccatctgctgcaaaagaagggaggagtgggttccttggatgtcacagcagggtcagtggttgtgacctttctggcaaaccaggaacagtctgggacagtgctgggtccagcattttggtcacaacaaccccatgcaatactacagtcttagggaagagtgactggaaa

SEQ ID NO: 60832 - DNA, 600 bp, Chicken  19866894320793_2
gcaaactaatacccagcaattaatcaaaactcttctcacttgctttctgtgtgcacgcactcctactctggcattaagtctgagagcgcccggttgctttcctgttaaacgtgtctatgctcagactcaacacaaacacttctcagcaagaagaaattaagcttagaaattaagttcccaaaataactgtgcggcatgaatcaaagacagctgctaatgtggtaaaaaattatttmtttcctccagcacttccacttgccagccagaggcatctggaaggctgctggtgagttcagtgcmtgcttgagctgtggggaaagcacaaatgtggcaagaagttgacagcatccgtttgattgctgacacctccatctgctgcaaaagaagggaggagtgggttccttggatgtcacagcagggtcagtggttgtgacctttctggcaaaccaggaacagtctgggacagtgctgggtccagcattttggtcacaacaaccccatgcaatactacagtcttagggaagagtgactggaaagctgcatggaagaaaaggatctgcaggatgttaattgacagttggctgcacatgagcctgcagt

SEQ ID NO: 60833 - DNA, 600 bp, Chicken  19866894320794_1
tttctggatgcttatcgtcagcttccagaatctcatcttgctgattgaaattagttgcatagatttacttacatttcttccttctataagacatttttgtatcattctcacacttattttggtggctcggggacagaatacctgcatataacaccatgtccttggttataaatacctaagacagtagtattttcaatattaaaattaagtggtatatggtcatacagtgggatctgaagattcaggattttttttttttcttattttgacaaaagagagaaagataaaagtattcaaaarctaacatctgaaaaaatactctgagattatttacagctaagtgaaactccatttaaagggcaatatgggatctgttgacaggtaaagggagtttagttctaaagcaagtttaaaaatatatatatgaagatcactgttgagtaaagagactgggcaagtaactaaaaagtgttaatgggatataaacctaaggaaaaaacattcacaaatgtgtgagaagagatatctgcttctaaagcagcaattcattttctttcagtatgaatatagatgcatgcctggtaatcatatcaaagatgt

SEQ ID NO: 60834 - DNA, 514 bp, Chicken  19866894320802_1
agagatgaacgaagaggttttctttgttggaggcaatgttgatgaagagactagaggactgtaagactttcagcctaagagcctgttgtaggatggagcaagggtacgcagcaataaattggggtgctgggatcctagagatctcattaaagttctttaattttgaagtctgacttctttcctgcttcctcttcaccctgagccatgacatggtggccctgcctctcatccccacagctgcctttcggcccaggcaaatcagcatagttcgtccacagcagcaaccacgtagcaacagcytttctcaggccgtggggggacccttgtggcaccacagcagtgggctgtgcccgtgccggctggcaaggctcacactcttgtgctaccaagatcccacctcagtgccccrcgagcacctcaggtgcygcaggaagccgagaaggtcttcaaaacccagagcagaaactcaggatgagatcagtcaataaatccagctccagcgctatattctggg

SEQ ID NO: 60835 - DNA, 405 bp, Chicken  19866894320802_2
agcaataaattggggtgctgggatcctagagatctcattaaagttctttaattttgaagtctgacttctttcctgcttcctcttcaccctgagccatgacatggtggccctgcctctcatccccacagctgcctttcggcccaggcaaatcagcatagttcgtccacagcagcaaccacgtagcaacagcytttctcaggccgtggggggacccttgtggcaccacagcagtgggctgtgcccgtgccggctggcaaggctcacactcttgtgctaccaagatcccacctcagtgccccrcgagcacctcaggtgcygcaggaagccgagaaggtcttcaaaacccagagcagaaactcaggatgagatcagtcaataaatccagctccagcgctatattctggg

SEQ ID NO: 60836 - DNA, 388 bp, Chicken  19866894320802_3
ctgggatcctagagatctcattaaagttctttaattttgaagtctgacttctttcctgcttcctcttcaccctgagccatgacatggtggccctgcctctcatccccacagctgcctttcggcccaggcaaatcagcatagttcgtccacagcagcaaccacgtagcaacagcytttctcaggccgtggggggacccttgtggcaccacagcagtgggctgtgcccgtgccggctggcaaggctcacactcttgtgctaccaagatcccacctcagtgccccrcgagcacctcaggtgcygcaggaagccgagaaggtcttcaaaacccagagcagaaactcaggatgagatcagtcaataaatccagctccagcgctatattctggg

SEQ ID NO: 60837 - DNA, 600 bp, Chicken  19866894320809_1
gaggatgtttgggtgaacaatttgtatcctacagatgcagtatcccaataagctcattgaatactgggtatgtctaggtgcacagtccttctctttggtatagcacctagtgattaattgtttgtgccccagtaatttctttattgtggagggacataagaactaaaaaaactgattggaaattgccaagtttgatttacaaatcaaaccagatttgtaaagtagctactcattaggcatcgtggcatgaagtcactaaggcccttgaggtcaggactagaagttaatattgatatgtcmgtctgatatggaaaagggatgtctgtttatctatgtattttttcctgctccttctcaaatgctgcaaattcacatcacttctattgtctttattttaaagctaagtatgatgctccagttgctgtctactgtgggagcgtcccaaaagtcaaacccagatgcagagctctgcggggtggaagcattgattcaaacttgcagctttgtggcagcagatggattactgaagaaggaggtgaggatggaaggcggtttaatgtgtgatggcaaactcatcccaacagaaatcctgcttttagg

SEQ ID NO: 60838 - DNA, 600 bp, Chicken  19866894320809_2
attcacatcacttctattgtctttattttaaagctaagtatgatgctccagttgctgtctactgtgggagcgtcccaaaagtcaaacccagatgcagagctctgcggggtggaagcattgattcaaacttgcagctttgtggcagcagatggattactgaagaaggaggtgaggatggaaggcggtttaatgtgtgatggcaaactcatcccaacagaaatcctgcttttaggaagaattggtctttagagatcagtcctggtgcttccgtgtcagatcaggtagctgaccgagagatgyggatgatccygccctcctccaaaggtgctcttggaatctcatctcattagttcattacacttcatactttatcaatggtatgcaaatgatgaccactgccagccgtgatagggactgcagccctactggccttaaattgggcgttgtcatgtgttagcagttctgcatctacccatgctgttggtgcttgccttgccattggtaagttccaagttctttttctgcttgcctttcagatctaaccttgaggactggatggtgccactggtgcagtttgcctacttgctaagatgcctctct

SEQ ID NO: 60839 - DNA, 600 bp, Chicken  19866894320809_3
cttctattgtctttattttaaagctaagtatgatgctccagttgctgtctactgtgggagcgtcccaaaagtcaaacccagatgcagagctctgcggggtggaagcattgattcaaacttgcagctttgtggcagcagatggattactgaagaaggaggtgaggatggaaggcggtttaatgtgtgatggcaaactcatcccaacagaaatcctgcttttaggaagaattggtctttagagatcagtcctggtgcttccgtgtcagatcaggtagctgaccgagagatgyggatgatccygccctcctccaaaggtgctcttggaatctcatctcattagttcattacacttcatactttatcaatggtatgcaaatgatgaccactgccagccgtgatagggactgcagccctactggccttaaattgggcgttgtcatgtgttagcagttctgcatctacccatgctgttggtgcttgccttgccattggtaagttccaagttctttttctgcttgcctttcagatctaaccttgaggactggatggtgccactggtgcagtttgcctacttgctaagatgcctctctgctttgaact

SEQ ID NO: 60840 - DNA, 600 bp, Chicken  19866894320825_1
agagaaggaagaacagctgttctgattgggttgcctaacgatctcaatttgaatttttgccaaatcatgaagacttgtggtgaaagctcctgtgctctgttcttctctgtacagtttcaagttagttagaatatttctgagaaggagggtagagaaaaatatgcaattttgctctgttttagaaagtcagcatttcagcaacatatagtgttggctcagtgcaaagtttaacaggataattgtcatctgcattccctcctcacatctcctcatcttccataattactgtgagcattaaayatmagcaaaaaaaccctacattttgcacctatccacatgagccttgacagcaattgcactacatggactgtttgtttcatctcagctgagcagggttatttctgcaacaacatgtggctyaatgcacacctcaccaatggactgggatctggatttggtctgtctaggatgactgagacaatatgtggaggtttggttcatcacatttgcaggaacaagcagactgaaggttcagaatgtgttctatgaatatctgttcacaacttgggaagaacttgcttttatgttatttgaagtaag

SEQ ID NO: 60841 - DNA, 600 bp, Chicken  19866894320825_2
gaaggaagaacagctgttctgattgggttgcctaacgatctcaatttgaatttttgccaaatcatgaagacttgtggtgaaagctcctgtgctctgttcttctctgtacagtttcaagttagttagaatatttctgagaaggagggtagagaaaaatatgcaattttgctctgttttagaaagtcagcatttcagcaacatatagtgttggctcagtgcaaagtttaacaggataattgtcatctgcattccctcctcacatctcctcatcttccataattactgtgagcattaaayatmagcaaaaaaaccctacattttgcacctatccacatgagccttgacagcaattgcactacatggactgtttgtttcatctcagctgagcagggttatttctgcaacaacatgtggctyaatgcacacctcaccaatggactgggatctggatttggtctgtctaggatgactgagacaatatgtggaggtttggttcatcacatttgcaggaacaagcagactgaaggttcagaatgtgttctatgaatatctgttcacaacttgggaagaacttgcttttatgttatttgaagtaaggag

SEQ ID NO: 60842 - DNA, 545 bp, Chicken  19866894320825_3
gttagttagaatatttctgagaaggagggtagagaaaaatatgcaattttgctctgttttagaaagtcagcatttcagcaacatatagtgttggctcagtgcaaagtttaacaggataattgtcatctgcattccctcctcacatctcctcatcttccataattactgtgagcattaaayatmagcaaaaaaaccctacattttgcacctatccacatgagccttgacagcaattgcactacatggactgtttgtttcatctcagctgagcagggttatttctgcaacaacatgtggctyaatgcacacctcaccaatggactgggatctggatttggtctgtctaggatgactgagacaatatgtggaggtttggttcatcacatttgcaggaacaagcagactgaaggttcagaatgtgttctatgaatatctgttcacaacttgggaagaacttgcttttatgttatttgaagtaaggagggtctacaaaggtgggaattggcctcttctcccaggtaacagtgataggatgacaggggatt

SEQ ID NO: 60843 - DNA, 600 bp, Chicken  19866894320828_1
acgctgcccccagcaaggaaagtaaagctacaggtctgtgctcctgcagccattgcttgtcctgcaccatccagcacacggccaaaggagagctttggttcagttctctgagtcgtacatctcaggcaaaggctgctgcagggcaacgtgtggttctgccacaatggaggcaagagggatggccggaaggctcatgggcgggagcgctcgattcttgcacccttcaagtgctctcactgaactgaacgggacagaggataaagccacacactcgtaataaaaacaacccaaaaccaaacmaaacaaacaaaaaccccactgcgttcaaaaggagcaaaccacaccaagttaccaacagtgtttacaagatggcactggtgaaaagaagcgtcagcgaagacaactgtacctccccacgcaccacaactcgcctttcacgtatctgtgccggtgccaccaggtgcccattctgaagccaattcagagcagygctgaggctgacagtggcagtctgcatttcctaattctacctacacttctgttttttttcaaaaaatacaatcgggatggaattttttaataacaaaaggaattccaaac

SEQ ID NO: 60844 - DNA, 600 bp, Chicken  19866894320828_2
ctcatgggcgggagcgctcgattcttgcacccttcaagtgctctcactgaactgaacgggacagaggataaagccacacactcgtaataaaaacaacccaaaaccaaacmaaacaaacaaaaaccccactgcgttcaaaaggagcaaaccacaccaagttaccaacagtgtttacaagatggcactggtgaaaagaagcgtcagcgaagacaactgtacctccccacgcaccacaactcgcctttcacgtatctgtgccggtgccaccaggtgcccattctgaagccaattcagagcagygctgaggctgacagtggcagtctgcatttcctaattctacctacacttctgttttttttcaaaaaatacaatcgggatggaattttttaataacaaaaggaattccaaacacttactgtaactattttgattctgcttctagtacagataaattaaaaatggaagatttgcttgtttgggggatttttacagtactggctacttcttccccctgttgggaaccaatgggaacctacgtgctatttctgaaatcatgtgatatttctgttgtctatttagaaaagatcaactttcttctaa

SEQ ID NO: 60845 - DNA, 600 bp, Chicken  19866894320830_1
attctgataaagcatccgtgttggcttggactctcttgctttgaaacactgcagcatttgtattgaagcagcctcccagggcagagcgagggcaggtctctctattgcactgccagcccactgagcagaggctgattctgggctgtgttcaggaggttcagcaggggatcatcttccacactcacattttcccttctgttatctccgcctggcaagcatgaaaaaaacgtgtagagaagtactgttctagtatgtacaaaatgatagaagtgtaaagaacagtgaagctcagggggaaayggatccagatgtgcaaaatcttcctgcataccctcataggaagagaaagttctaatcttagcagtttcttcagagcaaaagatattttaccattcagtaccaataaaattgtacacagcacaggtatacatgagtgcactgttatgtctgtattcaaatgattaataacctccccagcatctcccggtcctctgcagttctgcattgtgttgcttccatagcaaccagaagtgctcaggatggggccaaagtgctgcagaggtgctcagtgctcagcaagctgcagataaagtgctggaa

SEQ ID NO: 60846 - DNA, 600 bp, Chicken  19866894320835_1
atgcaggcagttcttttcatttttctctaaataatgttacctcaaagctaagcatgaagcaatcattatcaaaaatctcaaagcctgggagacagacaaaacaatttttttctgaaccgtagtttaaaggccaaatgcacatttctgtttacctgcagaaatcccctgaaggcatactcccctccacaccgagcagatacaccactacaagagagcaattactgttagagcatccctcatcctggtgaaatacagcttaagagacagcaagaacatttgtcttgcctgagccttcagtaragtgtttctatgcaagcacatctacttttcattcctgagagttcacttgtggtgagttactgtggctcaggtgatgagtgactcagcctcaatggagaaacagcgtgggtcagctgagtccatccaacatctcactgccactgctgtatcctgcaccccctgttccactcttgcacgcgtgcccttgcttacactgcaccagctccactgcttgttgggagcttctaagaattgatacagaccagtaattcagcagtagattatctcagaaaatgaaactgaattttctgccaggataag

SEQ ID NO: 60847 - DNA, 600 bp, Chicken  19866894320837_1
tttcagagtgcctgtggtatcaatcttttcctgtcttctgggtcacagtgccaaattggataccgcatgatactgattaaaaataattgcttgataattggcacaaagtgaatgtggtgatctacatcttacaggataataaagattgttttaattgctgctctaattaaggtactcattctcacattgtttaaatatttaatcctcatcaatatataaataaaaggaacaatcaagatgaatagaacagtaacagctgtataaaatccaaaactattctatagtgtaatacttgctatytttggtattttattcttttaagtacaacatatttctataggcaacagaawcaggagagtgttctatagtaattcaagtggcttttctggggaaaaaaaaacattagtttctatgtgaaggctggctgcagaggattatgcattcttgtgtgtttggcagaagcacatgacaacagcataaaggatagtatagtaattgactaatacatgtaaattttsctttgcagcagcggtatatttcttgtgagcaataacttgtctgacaacatgatgttacaatgacccgtgttgtaaactctga

SEQ ID NO: 60848 - DNA, 600 bp, Chicken  19866894320837_2
ccaaattggataccgcatgatactgattaaaaataattgcttgataattggcacaaagtgaatgtggtgatctacatcttacaggataataaagattgttttaattgctgctctaattaaggtactcattctcacattgtttaaatatttaatcctcatcaatatataaataaaaggaacaatcaagatgaatagaacagtaacagctgtataaaatccaaaactattctatagtgtaatacttgctatytttggtattttattcttttaagtacaacatatttctataggcaacagaawcaggagagtgttctatagtaattcaagtggcttttctggggaaaaaaaaacattagtttctatgtgaaggctggctgcagaggattatgcattcttgtgtgtttggcagaagcacatgacaacagcataaaggatagtatagtaattgactaatacatgtaaattttsctttgcagcagcggtatatttcttgtgagcaataacttgtctgacaacatgatgttacaatgacccgtgttgtaaactctgattcattgtatagaaacctagaactcatatgtaaaaattccaggagtcatt

SEQ ID NO: 60849 - DNA, 600 bp, Chicken  19866894320837_3
aataaaaggaacaatcaagatgaatagaacagtaacagctgtataaaatccaaaactattctatagtgtaatacttgctatytttggtattttattcttttaagtacaacatatttctataggcaacagaawcaggagagtgttctatagtaattcaagtggcttttctggggaaaaaaaaacattagtttctatgtgaaggctggctgcagaggattatgcattcttgtgtgtttggcagaagcacatgacaacagcataaaggatagtatagtaattgactaatacatgtaaattttsctttgcagcagcggtatatttcttgtgagcaataacttgtctgacaacatgatgttacaatgacccgtgttgtaaactctgattcattgtatagaaacctagaactcatatgtaaaaattccaggagtcattgctcataataggggcagaaatcctggttcagagccataggaagtagaaccaggaagcttaagagactgtttaataaccactttgcgtattcctgaaaagttgatgtatgatttaatgtcagcagacacaaccaggttttcagctgttttgctaggggttcttgttttg

SEQ ID NO: 60850 - DNA, 600 bp, Chicken  19866894320842_1
agcagattggatacttcagaactatacagactgaaataaaggaaaactaacaggaaaaacaaaaacaacaaacaaaagaattttctcagtgaacaaataaatcagcgtggtgtacacagaacacttcaaacagattctttgttttcttagttgtaatgtaataatacaatggtaggaaagtttttgtttgtttgtttttacttttcctttcttagctgttgcaaccagttctcacccatttgtcctgccttactgtaacatcatttaaatcttaacaacttggtaattgtagactttctwggttacctaaggataaattaatgttttaatttgaatgtgccatctatttctattcataaacaatgactagaatttctgaatttattattctaattatatttaggggctaaggattattatgttctatataaaaatactcttatagaggtttcctgacttgctctttctcatcaatccaaatatctgtaagaaacttttgattcacctgctaaatgctaaatctttctgaccttttgtacaatactcagagcacaggccactaaggtgctccatgtgtgcttggggaaaattacagattga

SEQ ID NO: 60851 - DNA, 599 bp, Chicken  19866894320848_1
  misc_feature (1)..(47): n is any nucleotide
nnnnnnnnnnnnnnnnnnnnnnnnnnnnnnnnnnnnnnnnnnnnnnnttactgagcagaagtggtgtgatgccatgtgcatctgccacctggggaagccaatagagtatatccaggcaccaaaaaacacatttctcccctggtgatcgatctggttggagggctcacaaatcccaaagcattcccagtgtatttctccataagcttggctcttcaaagaaaggagaaaatccatattttccagtacacacactatatcaagtttctccaggaagtatttgtttgcactgataaacaaacwtatttatctagcagttcagtttgtctctaatacttgcttacgctctggcacgtggtagggtacgtagcaggccyctagctttttctgcagtgtgcaragttatgcagcagctgaaccatgctgccctcacttggattaatattgctgtcaaccaaaastactttatatattgtttgtattaggtttgtattaggamgtgtgatctgtgcttacctgtcccttgggcatggataacatctggcaaaagggtcgttttgcagtttttgaagcataaagaaatatcttagcagctacttgaa

SEQ ID NO: 60852 - DNA, 600 bp, Chicken  19866894320848_2
tgtgcatctgccacctggggaagccaatagagtatatccaggcaccaaaaaacacatttctcccctggtgatcgatctggttggagggctcacaaatcccaaagcattcccagtgtatttctccataagcttggctcttcaaagaaaggagaaaatccatattttccagtacacacactatatcaagtttctccaggaagtatttgtttgcactgataaacaaacwtatttatctagcagttcagtttgtctctaatacttgcttacgctctggcacgtggtagggtacgtagcaggccyctagctttttctgcagtgtgcaragttatgcagcagctgaaccatgctgccctcacttggattaatattgctgtcaaccaaaastactttatatattgtttgtattaggtttgtattaggamgtgtgatctgtgcttacctgtcccttgggcatggataacatctggcaaaagggtcgttttgcagtttttgaagcataaagaaatatcttagcagctacttgaaatgggaatttcatttacaaactaggttgggtgaaccatgtgaggtcaggaaaaggcaactctagatcctgaatcc

SEQ ID NO: 60853 - DNA, 600 bp, Chicken  19866894320848_3
ccaatagagtatatccaggcaccaaaaaacacatttctcccctggtgatcgatctggttggagggctcacaaatcccaaagcattcccagtgtatttctccataagcttggctcttcaaagaaaggagaaaatccatattttccagtacacacactatatcaagtttctccaggaagtatttgtttgcactgataaacaaacwtatttatctagcagttcagtttgtctctaatacttgcttacgctctggcacgtggtagggtacgtagcaggccyctagctttttctgcagtgtgcaragttatgcagcagctgaaccatgctgccctcacttggattaatattgctgtcaaccaaaastactttatatattgtttgtattaggtttgtattaggamgtgtgatctgtgcttacctgtcccttgggcatggataacatctggcaaaagggtcgttttgcagtttttgaagcataaagaaatatcttagcagctacttgaaatgggaatttcatttacaaactaggttgggtgaaccatgtgaggtcaggaaaaggcaactctagatcctgaatccatagtacctgtgagatatataca

SEQ ID NO: 60854 - DNA, 600 bp, Chicken  19866894320848_4
agggctcacaaatcccaaagcattcccagtgtatttctccataagcttggctcttcaaagaaaggagaaaatccatattttccagtacacacactatatcaagtttctccaggaagtatttgtttgcactgataaacaaacwtatttatctagcagttcagtttgtctctaatacttgcttacgctctggcacgtggtagggtacgtagcaggccyctagctttttctgcagtgtgcaragttatgcagcagctgaaccatgctgccctcacttggattaatattgctgtcaaccaaaastactttatatattgtttgtattaggtttgtattaggamgtgtgatctgtgcttacctgtcccttgggcatggataacatctggcaaaagggtcgttttgcagtttttgaagcataaagaaatatcttagcagctacttgaaatgggaatttcatttacaaactaggttgggtgaaccatgtgaggtcaggaaaaggcaactctagatcctgaatccatagtacctgtgagatatatacatcaagtgcacttgtattggcacagataacatggtttacaccagtgcttctctttctaggct

SEQ ID NO: 60855 - DNA, 600 bp, Chicken  19866894320848_5
ccataagcttggctcttcaaagaaaggagaaaatccatattttccagtacacacactatatcaagtttctccaggaagtatttgtttgcactgataaacaaacwtatttatctagcagttcagtttgtctctaatacttgcttacgctctggcacgtggtagggtacgtagcaggccyctagctttttctgcagtgtgcaragttatgcagcagctgaaccatgctgccctcacttggattaatattgctgtcaaccaaaastactttatatattgtttgtattaggtttgtattaggamgtgtgatctgtgcttacctgtcccttgggcatggataacatctggcaaaagggtcgttttgcagtttttgaagcataaagaaatatcttagcagctacttgaaatgggaatttcatttacaaactaggttgggtgaaccatgtgaggtcaggaaaaggcaactctagatcctgaatccatagtacctgtgagatatatacatcaagtgcacttgtattggcacagataacatggtttacaccagtgcttctctttctaggctgaagacaaagcagatgttctgaacaaagaacttctcct

SEQ ID NO: 60856 - DNA, 600 bp, Chicken  19866894320848_6
gcatggataacatctggcaaaagggtcgttttgcagtttttgaagcataaagaaatatcttagcagctacttgaaatgggaatttcatttacaaactaggttgggtgaaccatgtgaggtcaggaaaaggcaactctagatcctgaatccatagtacctgtgagatatatacatcaagtgcacttgtattggcacagataacatggtttacaccagtgcttctctttctaggctgaagacaaagcagatgttctgaacaaagaacttctcctgaccaaacagaaactggtggagactgargaagagaaacggaagcaggaagaggaaactgcccaggtgagctctcagtctttcccacttagctgaatgcaagcaaaaagttaatcagaagagyaggaatgaactgaagttacagaagggacttttgtcttcaaaatgcagtggcaactgaaaattcagtgccaggctaaaagtatgtgttgtgttttttgagtgtttcctgaatgtccaattttctgtatctgatcctctccccagtgtagtaagaattttcactggtggtgagcaatcacaactaaggaggcacaatcagatggtttt

SEQ ID NO: 60857 - DNA, 600 bp, Chicken  19866894320848_7
actaggttgggtgaaccatgtgaggtcaggaaaaggcaactctagatcctgaatccatagtacctgtgagatatatacatcaagtgcacttgtattggcacagataacatggtttacaccagtgcttctctttctaggctgaagacaaagcagatgttctgaacaaagaacttctcctgaccaaacagaaactggtggagactgargaagagaaacggaagcaggaagaggaaactgcccaggtgagctctcagtctttcccacttagctgaatgcaagcaaaaagttaatcagaagagyaggaatgaactgaagttacagaagggacttttgtcttcaaaatgcagtggcaactgaaaattcagtgccaggctaaaagtatgtgttgtgttttttgagtgtttcctgaatgtccaattttctgtatctgatcctctccccagtgtagtaagaattttcactggtggtgagcaatcacaactaaggaggcacaatcagatggtttttaattacctaaaaaaggttgctggaagaattattgccttggaagaggctgcagcttcactgaaataaagctatgggcattcctttctgaagcta

SEQ ID NO: 60858 - DNA, 600 bp, Chicken  19866894320850_1
tgtaatttattagagttttatgtcaagtaatgaagactaatgttctatgcttggactgttggaatgaaggtgcgggatccaaatcctttgatatcagtaagaattttatcttttgaaatacaattgctgtctcatggcatgggggttggtggcagaaactgtatttcattgtgaggagaaataaagaattgtattccgtgttatgtgttatgaaatattgattatgctgcagaagtctggaacaaagctcagctcacttctctttcctgaccaactttatcaatctatgctttatctccytcttctccccgcatgtttatgctaytgcttgtatttccttgctttccttttccctcttcaggaagttaaatgtgtctacytgttgcccaggagcctgacttgtagcatgaataggaggaaagagaggatccctcttcctgtattctttacttcacattttttttcctcgatttattgatctgttaatgctgttcatgggatttctgtagctgctaacttacactcagtgtgacacagttttatgcagatgacctcttttctcagtatatttaatgtattgtgtgtctttactatgtcagt

SEQ ID NO: 60859 - DNA, 600 bp, Chicken  19866894320850_2
agtaatgaagactaatgttctatgcttggactgttggaatgaaggtgcgggatccaaatcctttgatatcagtaagaattttatcttttgaaatacaattgctgtctcatggcatgggggttggtggcagaaactgtatttcattgtgaggagaaataaagaattgtattccgtgttatgtgttatgaaatattgattatgctgcagaagtctggaacaaagctcagctcacttctctttcctgaccaactttatcaatctatgctttatctccytcttctccccgcatgtttatgctaytgcttgtatttccttgctttccttttccctcttcaggaagttaaatgtgtctacytgttgcccaggagcctgacttgtagcatgaataggaggaaagagaggatccctcttcctgtattctttacttcacattttttttcctcgatttattgatctgttaatgctgttcatgggatttctgtagctgctaacttacactcagtgtgacacagttttatgcagatgacctcttttctcagtatatttaatgtattgtgtgtctttactatgtcagtctgtattgaaaacagaacgttcttc

SEQ ID NO: 60860 - DNA, 600 bp, Chicken  19866894320850_3
aaatcctttgatatcagtaagaattttatcttttgaaatacaattgctgtctcatggcatgggggttggtggcagaaactgtatttcattgtgaggagaaataaagaattgtattccgtgttatgtgttatgaaatattgattatgctgcagaagtctggaacaaagctcagctcacttctctttcctgaccaactttatcaatctatgctttatctccytcttctccccgcatgtttatgctaytgcttgtatttccttgctttccttttccctcttcaggaagttaaatgtgtctacytgttgcccaggagcctgacttgtagcatgaataggaggaaagagaggatccctcttcctgtattctttacttcacattttttttcctcgatttattgatctgttaatgctgttcatgggatttctgtagctgctaacttacactcagtgtgacacagttttatgcagatgacctcttttctcagtatatttaatgtattgtgtgtctttactatgtcagtctgtattgaaaacagaacgttcttctgaagttctaaaagctaattttaatttgaaattagcccttttcacaggaattaat

SEQ ID NO: 60861 - DNA, 600 bp, Chicken  19866894320851_1
cagattgcatcttctctccattatgccatgagctgcaacaggattgctcacagagcaatggattacctaagagcagtgaaacgtatggcaaataatgctgcatgaacaccagggagttcatcctaccaatacaccacaaaggtgcttctagtgatactgagaatggctcaggctgtgggcttgcctctgttcctgtgacagcaagcaatgcactgagctacagacactgaacacagaagcagaactgttggtgggagagcaaaacatccctgccttgagttacagccggttaaacgtgtrgcatgtctggaaagctcccttctcctgcctgcagcttttgtaaagcattagatgtcagtattttatgagtggaccttcctttggtttgtatataagatgcagtaaattatttttttaataaaacgttttacattttgggaaacagtggtgactttcggggagggtgttccatctctggggtttcagacgtgcagaaacaccggctgtgggcttggtgtggaaaggacacctgaaagcagggacagagcctttccccacaggctcccagtgaaatccttctgccccgtcatcgcaggggag

SEQ ID NO: 60862 - DNA, 599 bp, Chicken  19866894320854_1
  misc_feature (1)..(156): n is any nucleotide
nnnnnnnnnnnnnnnnnnnnnnnnnnnnnnnnnnnnnnnnnnnnnnnnnnnnnnnnnnnnnnnnnnnnnnnnnnnnnnnnnnnnnnnnnnnnnnnnnnnnnnnnnnnnnnnnnnnnnnnnnnnnnnnnnnnnnnnnnnnnnnnnnnnnnnnnnnnnttctctgctaactgctggtacacctacctgggacatccacagcaaacaccatctcatgtgttttaaaaaagctctcccagaggaatctcatgagatggtaaaggagcagtgacaaacagcccggcatggccaagccagcactgmgaagcagttggcaactggcatcccagagctatgagcgtgcttctgcwgcaaggagagctgccccagttgaacagtatgtggagcccagtgtatctcacaccatgtgatacaagactgaacacgggcaccaggaattaccyccacatcagtgaggagcagagtgtgtctgctatcaggcagcacgtctctcccatcagaaatgagtgggagcagccgggccatactttggaaataaatatagcatgaaaatctgtttgctccttacctacatgtttcagtgctgataccctcgctccaaa

SEQ ID NO: 60863 - DNA, 599 bp, Chicken  19866894320854_2
  misc_feature (1)..(109): n is any nucleotide
nnnnnnnnnnnnnnnnnnnnnnnnnnnnnnnnnnnnnnnnnnnnnnnnnnnnnnnnnnnnnnnnnnnnnnnnnnnnnnnnnnnnnnnnnnnnnnnnnnnnnnnnnnnnnttctctgctaactgctggtacacctacctgggacatccacagcaaacaccatctcatgtgttttaaaaaagctctcccagaggaatctcatgagatggtaaaggagcagtgacaaacagcccggcatggccaagccagcactgmgaagcagttggcaactggcatcccagagctatgagcgtgcttctgcwgcaaggagagctgccccagttgaacagtatgtggagcccagtgtatctcacaccatgtgatacaagactgaacacgggcaccaggaattaccyccacatcagtgaggagcagagtgtgtctgctatcaggcagcacgtctctcccatcagaaatgagtgggagcagccgggccatactttggaaataaatatagcatgaaaatctgtttgctccttacctacatgtttcagtgctgataccctcgctccaaatagctctcaaactccgttcccacacttctcaagtaattatgttgttt

SEQ ID NO: 60864 - DNA, 599 bp, Chicken  19866894320854_3
  misc_feature (1)..(16): n is any nucleotide
nnnnnnnnnnnnnnnnttctctgctaactgctggtacacctacctgggacatccacagcaaacaccatctcatgtgttttaaaaaagctctcccagaggaatctcatgagatggtaaaggagcagtgacaaacagcccggcatggccaagccagcactgmgaagcagttggcaactggcatcccagagctatgagcgtgcttctgcwgcaaggagagctgccccagttgaacagtatgtggagcccagtgtatctcacaccatgtgatacaagactgaacacgggcaccaggaattaccyccacatcagtgaggagcagagtgtgtctgctatcaggcagcacgtctctcccatcagaaatgagtgggagcagccgggccatactttggaaataaatatagcatgaaaatctgtttgctccttacctacatgtttcagtgctgataccctcgctccaaatagctctcaaactccgttcccacacttctcaagtaattatgttgtttgggtgctttcctttccctctcttcctccacagccggttatayataccgcctaccactcartgtcaataaaagcttggaggcagctcagagggg

SEQ ID NO: 60865 - DNA, 600 bp, Chicken  19866894320854_4
tgtatctcacaccatgtgatacaagactgaacacgggcaccaggaattaccyccacatcagtgaggagcagagtgtgtctgctatcaggcagcacgtctctcccatcagaaatgagtgggagcagccgggccatactttggaaataaatatagcatgaaaatctgtttgctccttacctacatgtttcagtgctgataccctcgctccaaatagctctcaaactccgttcccacacttctcaagtaattatgttgtttgggtgctttcctttccctctcttcctccacagccggttatayataccgcctaccactcartgtcaataaaagcttggaggcagctcagaggggccacacgcagagtgaggaggtagcaatgagctgctggtccccacagagccaaaaatgagcttctcaaaagccatggccagcagccaccttgctgacccgatcaccacgtctraagtcactcctccaaatattattcctttttccctgctaaagtttggatgacacctcaggactgagctcctcactccaatctctcagcaggaacccaaggaagaggaaagttcaattgcagcatcaatagccgtaaac

SEQ ID NO: 60866 - DNA, 600 bp, Chicken  19866894320854_5
atacaagactgaacacgggcaccaggaattaccyccacatcagtgaggagcagagtgtgtctgctatcaggcagcacgtctctcccatcagaaatgagtgggagcagccgggccatactttggaaataaatatagcatgaaaatctgtttgctccttacctacatgtttcagtgctgataccctcgctccaaatagctctcaaactccgttcccacacttctcaagtaattatgttgtttgggtgctttcctttccctctcttcctccacagccggttatayataccgcctaccactcartgtcaataaaagcttggaggcagctcagaggggccacacgcagagtgaggaggtagcaatgagctgctggtccccacagagccaaaaatgagcttctcaaaagccatggccagcagccaccttgctgacccgatcaccacgtctraagtcactcctccaaatattattcctttttccctgctaaagtttggatgacacctcaggactgagctcctcactccaatctctcagcaggaacccaaggaagaggaaagttcaattgcagcatcaatagccgtaaacacctttccaccttagtgc

SEQ ID NO: 60867 - DNA, 600 bp, Chicken  19866894320854_6
tgtttgctccttacctacatgtttcagtgctgataccctcgctccaaatagctctcaaactccgttcccacacttctcaagtaattatgttgtttgggtgctttcctttccctctcttcctccacagccggttatayataccgcctaccactcartgtcaataaaagcttggaggcagctcagaggggccacacgcagagtgaggaggtagcaatgagctgctggtccccacagagccaaaaatgagcttctcaaaagccatggccagcagccaccttgctgacccgatcaccacgtctraagtcactcctccaaatattattcctttttccctgctaaagtttggatgacacctcaggactgagctcctcactccaatctctcagcaggaacccaaggaagaggaaagttcaattgcagcatcaatagccgtaaacacctttccaccttagtgcatcagtgcttcaaagggcctcaaatacttgcccttgtcatcatgtttccatcacaaagcaaagcatcttgaccaagatctcatgttgctcagcttcccttggtctttggtggaagctcttgacgcccagcctttgtaataatgta

SEQ ID NO: 60868 - DNA, 599 bp, Chicken  19866894320856_1
  misc_feature (1)..(77): n is any nucleotide
nnnnnnnnnnnnnnnnnnnnnnnnnnnnnnnnnnnnnnnnnnnnnnnnnnnnnnnnnnnnnnnnnnnnnnnnnnnnntgtgtttcacaatttcagtgtgaaaattggcaatgcatacatacttctgtgaggtatttgtgaacgtatgagcccatttctcaattaaggtgcaggtatctgtactatactctatttgatacagttaggcactgaaaacacacaagtattttgtgataaatcatttaaagaatgagaaagatttaaatgcttacacattgaaagagcagctagcacaaacagyaatgctggaatgctttgtatgggcaagaattctataacatttggaatagataaaatagatgttcatgcaaagatttctgtaccatyagctctgtggtatcttaaataatcaaatcatataattctatytacccattcatcaatacctgtatgaaagatgaactgccttgtctccacagtccccacaccagattttcacagttactctttcaaaggctttcatttttccttaagttttatcctaagtttatttattcacgtttactcatctaaactcatttgttttgagccaacaatgcc

SEQ ID NO: 60869 - DNA, 600 bp, Chicken  19866894320856_2
caatttcagtgtgaaaattggcaatgcatacatacttctgtgaggtatttgtgaacgtatgagcccatttctcaattaaggtgcaggtatctgtactatactctatttgatacagttaggcactgaaaacacacaagtattttgtgataaatcatttaaagaatgagaaagatttaaatgcttacacattgaaagagcagctagcacaaacagyaatgctggaatgctttgtatgggcaagaattctataacatttggaatagataaaatagatgttcatgcaaagatttctgtaccatyagctctgtggtatcttaaataatcaaatcatataattctatytacccattcatcaatacctgtatgaaagatgaactgccttgtctccacagtccccacaccagattttcacagttactctttcaaaggctttcatttttccttaagttttatcctaagtttatttattcacgtttactcatctaaactcatttgttttgagccaacaatgcccttcagtttagccaactcttttcagtccctcttgcccatcttcctgacatatctaaaaatagcaatcatatcctcttccagcctact

SEQ ID NO: 60870 - DNA, 600 bp, Chicken  19866894320856_3
aggtatttgtgaacgtatgagcccatttctcaattaaggtgcaggtatctgtactatactctatttgatacagttaggcactgaaaacacacaagtattttgtgataaatcatttaaagaatgagaaagatttaaatgcttacacattgaaagagcagctagcacaaacagyaatgctggaatgctttgtatgggcaagaattctataacatttggaatagataaaatagatgttcatgcaaagatttctgtaccatyagctctgtggtatcttaaataatcaaatcatataattctatytacccattcatcaatacctgtatgaaagatgaactgccttgtctccacagtccccacaccagattttcacagttactctttcaaaggctttcatttttccttaagttttatcctaagtttatttattcacgtttactcatctaaactcatttgttttgagccaacaatgcccttcagtttagccaactcttttcagtccctcttgcccatcttcctgacatatctaaaaatagcaatcatatcctcttccagcctactttggcaaggctaaataaaccctgctgtgatcttcccttccct

SEQ ID NO: 60871 - DNA, 599 bp, Chicken  19866894320862_1
  misc_feature (1)..(206): n is any nucleotide
nnnnnnnnnnnnnnnnnnnnnnnnnnnnnnnnnnnnnnnnnnnnnnnnnnnnnnnnnnnnnnnnnnnnnnnnnnnnnnnnnnnnnnnnnnnnnnnnnnnnnnnnnnnnnnnnnnnnnnnnnnnnnnnnnnnnnnnnnnnnnnnnnnnnnnnnnnnnnnnnnnnnnnnnnnnnnnnnnnnnnnnnnnnnnnnnnnnnnnnnnnnnnnactctttgcatccgagttgcttttacttaccctcataaagtgaaacagggactgcagcagcatgtagtaaaaaattaatttgtaatgccttacrttatacaaaagtggcacgatggtgcttggtagatccttaagcagaaagctgaggtgtcccattatggaggggtttattctgctcctaaacacaaaggatttctgttcagttaaactttgaattgattttttttgtttgtttttgtttttgttttacctaaggcctgaaatgcagagagttatgacttttcataagaagtaaatgtttgtactgttcagtgaatttcaaattgtttcaaggtaatttcatttgtttgtgattaatgacattgatatagctgatttcttcgttagttacta

SEQ ID NO: 60872 - DNA, 600 bp, Chicken  19866894320865_1
gagtgccaataagtagatatttttcatttgtggaatctgaaaagctatctggcagtcctgctcactgttctgtttttcaagtaaaacaaactgttctagtgactagtatcaatttcaccattaaaagaaaactacccattcataaatattaactgatgatattatctttccatgactactttcttataggcaacaaacgaaatacaatgcatatcctggaaaacaatagctttagcagctacagaatctactcatccaacacatctctaaaatggaaaactggaaggacgttttgggaaratcttccactacagaaaaaactaccataaaagactctgcagtgccacagacaaacttctacaaacacagaagggacacttctaaatatttcaagccttttgatctgatgaaaaatgccctctgtgtttcttatcttctaaaaaaagtttttgtgctctatagttgaaggataaaataaaaaaatcctcttagtgtagtgtgagaaccattacatatgttaagaaacttaacatttagaatctctcacaaaaattatggtttagaacttggaatttgcctatgaagtagaaaattgctcat

SEQ ID NO: 60873 - DNA, 600 bp, Chicken  19866894320877_1
tcactgaaaggcactatttcagaccacgctgcacctctgctagtaaactgagcaagttctgagtgccgtcatgcaccagctccagctggcacagatggagctgtctgctcacaagcttgcatcacctctgggatggggcagctgtgagcaggaaatggcctcaggaggagctgggacattgctcaggagtactgcccaaagtgacaaagagatttcagcagtaactgtcagaaatgaggtagccaatggtatgcagacttattctttggaattggcgacgcagaatgaaaatctctctaytatacaaagaattaatgctgtcaaattccctgtgatcatcagaaaagygtgacagtaaagaggactgtccttcatagcctgtaaacgtgccttgactttagagctggaaaaatatccagtactccagatgtggagctaattgaaaaacattctctgtttgtatttatttattcaatccggtggtgtccttggttgcccagaggagctactgagagtagtttctactgtgctggtggttagagttaggttacacacrctttcagaaattcagctctctgccactaatgaattgttcagcgt

SEQ ID NO: 60874 - DNA, 600 bp, Chicken  19866894320877_2
tgagcaagttctgagtgccgtcatgcaccagctccagctggcacagatggagctgtctgctcacaagcttgcatcacctctgggatggggcagctgtgagcaggaaatggcctcaggaggagctgggacattgctcaggagtactgcccaaagtgacaaagagatttcagcagtaactgtcagaaatgaggtagccaatggtatgcagacttattctttggaattggcgacgcagaatgaaaatctctctaytatacaaagaattaatgctgtcaaattccctgtgatcatcagaaaagygtgacagtaaagaggactgtccttcatagcctgtaaacgtgccttgactttagagctggaaaaatatccagtactccagatgtggagctaattgaaaaacattctctgtttgtatttatttattcaatccggtggtgtccttggttgcccagaggagctactgagagtagtttctactgtgctggtggttagagttaggttacacacrctttcagaaattcagctctctgccactaatgaattgttcagcgtggcttcagggtaatgacgcagttagcagaagcaggccaaatccgtccc

SEQ ID NO: 60875 - DNA, 600 bp, Chicken  19866894320877_3
acttattctttggaattggcgacgcagaatgaaaatctctctaytatacaaagaattaatgctgtcaaattccctgtgatcatcagaaaagygtgacagtaaagaggactgtccttcatagcctgtaaacgtgccttgactttagagctggaaaaatatccagtactccagatgtggagctaattgaaaaacattctctgtttgtatttatttattcaatccggtggtgtccttggttgcccagaggagctactgagagtagtttctactgtgctggtggttagagttaggttacacacrctttcagaaattcagctctctgccactaatgaattgttcagcgtggcttcagggtaatgacgcagttagcagaagcaggccaaatccgtcccaggtgaaacaccactgatgtcagtggttttattctcgatgatgcgcttgttccagtgcgttgtagaaaacatgcagaaagaagagccttgcacaaggacttacacggatttcctctgccttttctaatagtaatcctacagtacactgagagaaatgtaaaattgcaacatttgcgttcgcagcaacagttcatttctgtggaccaac

SEQ ID NO: 60876 - DNA, 600 bp, Chicken  19866894320878_1
taactaacagcagaagtacatagacttaatgtccagtgtccgaaatgccacatcaggagttaatcttaaatttttcagagaagaatgacgttaccacattactttggtgtcactaaaacaactgaaaatactttatctagtgaggtggaatacctttgatcataaagaccacatatttttgtctttctgttgcactgttgcctcaaaactacaatttgcaaaaagtaggcattggagagttcaggttcaaagattagcgcagaccttataagacaaaattgaagctacgtagaagctacrctagtgctttctagtctgcaagggaaagtttcatacatgctactaggtccccactctgaagtaccacagaaaatttctccataaagcctatttcattacgctttgcattgagtagccaaaacttacttttacttctgtccacctttagtttaattcaaaagtatgttataaacaagaagctttagaaagccaaagcatatatctcttctatgggctatttttatttatggcaaggttttgctatgatctccattacaagatttttctattttcctgattttttaaatctaagaagaaaag

SEQ ID NO: 60877 - DNA, 600 bp, Chicken  19866894320880_1
gtgataatagaatatattttattccttccccttgttattaaaaacagccttttcattaaaacttctgatactgacttagtaacatcttccagaagacaggtagagagctgaactaggagacgtgacactttcagtgacatgaacacttttgttttttctgtcaatcctacttctcatcccatcttgcaaggttagaagaaatgaatgttatttgactgcataccatggacactttaagacattgactacttagttttaaagaagtgtgctttcaaataatatttttaattcagaaaaaartgtayattcctattgtgtgtcagcggtgaacattttggtctttgaattcaagctgtatttctccagttatgtgaaattcaytcaaaacacgagtcagctctgtttagcccaagtgtcaaaatgatttttatttgatttctcagcaaacagtaaacgggaaaaataaaataaaacacaatcacaaacttagtttggaaaaatataccttcaaagtttatcactggtaggtcatgatattgaaatcacagcatgctaaartagtagaagataaagcaattgaatttaaaaaaataacaacaa

SEQ ID NO: 60878 - DNA, 600 bp, Chicken  19866894320880_2
aatagaatatattttattccttccccttgttattaaaaacagccttttcattaaaacttctgatactgacttagtaacatcttccagaagacaggtagagagctgaactaggagacgtgacactttcagtgacatgaacacttttgttttttctgtcaatcctacttctcatcccatcttgcaaggttagaagaaatgaatgttatttgactgcataccatggacactttaagacattgactacttagttttaaagaagtgtgctttcaaataatatttttaattcagaaaaaartgtayattcctattgtgtgtcagcggtgaacattttggtctttgaattcaagctgtatttctccagttatgtgaaattcaytcaaaacacgagtcagctctgtttagcccaagtgtcaaaatgatttttatttgatttctcagcaaacagtaaacgggaaaaataaaataaaacacaatcacaaacttagtttggaaaaatataccttcaaagtttatcactggtaggtcatgatattgaaatcacagcatgctaaartagtagaagataaagcaattgaatttaaaaaaataacaacaacaaaa

SEQ ID NO: 60879 - DNA, 600 bp, Chicken  19866894320880_3
acatcttccagaagacaggtagagagctgaactaggagacgtgacactttcagtgacatgaacacttttgttttttctgtcaatcctacttctcatcccatcttgcaaggttagaagaaatgaatgttatttgactgcataccatggacactttaagacattgactacttagttttaaagaagtgtgctttcaaataatatttttaattcagaaaaaartgtayattcctattgtgtgtcagcggtgaacattttggtctttgaattcaagctgtatttctccagttatgtgaaattcaytcaaaacacgagtcagctctgtttagcccaagtgtcaaaatgatttttatttgatttctcagcaaacagtaaacgggaaaaataaaataaaacacaatcacaaacttagtttggaaaaatataccttcaaagtttatcactggtaggtcatgatattgaaatcacagcatgctaaartagtagaagataaagcaattgaatttaaaaaaataacaacaacaaaaaacagcccagtatttgagcgtcacagagattactatgccacatgtaagggcctgacagaagagagagaacagtagc

SEQ ID NO: 60880 - DNA, 540 bp, Chicken  19866894320880_4
aagaagtgtgctttcaaataatatttttaattcagaaaaaartgtayattcctattgtgtgtcagcggtgaacattttggtctttgaattcaagctgtatttctccagttatgtgaaattcaytcaaaacacgagtcagctctgtttagcccaagtgtcaaaatgatttttatttgatttctcagcaaacagtaaacgggaaaaataaaataaaacacaatcacaaacttagtttggaaaaatataccttcaaagtttatcactggtaggtcatgatattgaaatcacagcatgctaaartagtagaagataaagcaattgaatttaaaaaaataacaacaacaaaaaacagcccagtatttgagcgtcacagagattactatgccacatgtaagggcctgacagaagagagagaacagtagcggttcctacaccaaacacactggaatatgaaagattcagtcagctccttcaatatttctgtacttgcctctacaatacagttaagaaaacctgctattacactatacctctgtagtt

SEQ ID NO: 60881 - DNA, 600 bp, Chicken  19866894320882_1
aaactggttcaacagaaccatgttccaaacaacaactgaaaatacaccataattccagaacaatatttttgttacgttttgtccctgaggcttcacttcagattagggtctataatgctcactgctacacaagcacactctttcccaacaagtttgccacccaaatatacgagacttcagcagctgcaataaacaatccctatcttcattacaagtgggaaagcaaagaactattaaactgctcctccttaagcaaactggtcatacaggctatctgtaacagaggcatgaacgtgaacrctgactgttccagtctaccaccttcaccatacagctcttcatcccttacagcttcagtattattaatgcagattcaagaagtgtactgcaggatgggtctggtaagagcaaattgccttatggggaacccataagcaaaagcaccccacttattaggtagatgagcacccagtgtatcgttttgcctatgcacctctaagggttctgaaaggatgctgcctctttgcaataaactcttcccatttgactacagaagtttattggaaaaaaaaaaaaaatcaaacaaaaaccctgctctcc

SEQ ID NO: 60882 - DNA, 600 bp, Chicken  19866894320888_1
tgatgcatgaagcaacacaggaaactcaggtgacgtccaaggattttttttcattaatataggtggccaaatgcaaggacggacctgtttgcagcagggcctggactagatgacccccagaggtcccttctgtcttaaattactgtgtgactccatggaaagatgatcatagggtgattttgttttattccgtctccatagatttgttcactttgacaaatcgaagtttttgccatcagtctcacagactgagtctgagcctcaggaaaaccagactgcctcttcttgcccatcagcagrggggtcccgtagctccagaagcattcccaccttccgtacctcacgctgtatttgtttacagatgcagtggaaacctcagctgctgtaatgctcccaaggacccaccacacttgtgggggcccagtaaccagaccacagaagctgcaggattttgtgctggcaatagccagtcagtgtaatgggagtgctgtaaaaatgaacacttgtacacctgacactaacctaaccttgcttaattccttgaatgacataacataacaaattcatccaacagaacagtctcaatttatttattcccct

SEQ ID NO: 60883 - DNA, 600 bp, Chicken  19866894320890_1
actccagaaaagcaaagaatcattctgaagaaattacaaataatctttcattattaagcaagtatatgttaccagaatagttatcaaagacttgtacccttagagcaaacatgaggtgctgacagaataaaaacatccatagagatcagaaatataattagttcaaaagttctaatcctaattacaaagaactaatagaagatttcataattgagagctttcaattctgataatttttctatgagggactcaggcatctgccattccacacagcaaaatgctacaaaagcacgtattttrccatcacagcatcctcatttcacacagttaccttcacagtgtttaccaatgagaatcactgaaaggcttatcatgcagagaaagaaacaagtcccaacagaaaggaaaacgaattaaaactttgtgggatttaaagcactgttgcactgttttttctctaattgacccagatgcagaaatatgcaaacactgcatgcagggcagcttttctcactcatttactggacaacacaaaaatcagaatgagttctaagtatcctcagattctcctatctttctcacagtgctggaacctgattt

SEQ ID NO: 60884 - DNA, 600 bp, Chicken  19866894320890_2
gatttctactgtagaggtgccagcaaatggagaaaaagcctctatgcagcatatattctgtaacactaagctcttatcataccttatacaatattgatggcataagagatctcatctggatttttttctgcttacaaatatggcgcaaagtacaattttgttttgttttcatatatctaaaaattcagactgagtacactccatgaaacaccaatttgtacaagacaccaaataagtcattgtttaccttctgggcactgacaggtgaatccatggatgttggatgaacaagtacctccrttttggcatggctgctggatgcagtgatcaatctctgactggcacagctctccggtgtaacctacaaaagagcacacagtattcagaaagcgtagggaaaatgagagctcatcgctgtatggtaactcaaacagtactactagctttcttgaacaaaactaaccaaagtaataaatagaaatcagaacagtcttctaatttcttgtaaaattagwttttttaataaaaacttatctttcacaggagaaataaataagtagtggaaatctagtgattatatcaaactgtattttaccatca

SEQ ID NO: 60885 - DNA, 600 bp, Chicken  19866894320890_3
ttgtacaagacaccaaataagtcattgtttaccttctgggcactgacaggtgaatccatggatgttggatgaacaagtacctccrttttggcatggctgctggatgcagtgatcaatctctgactggcacagctctccggtgtaacctacaaaagagcacacagtattcagaaagcgtagggaaaatgagagctcatcgctgtatggtaactcaaacagtactactagctttcttgaacaaaactaaccaaagtaataaatagaaatcagaacagtcttctaatttcttgtaaaattagwttttttaataaaaacttatctttcacaggagaaataaataagtagtggaaatctagtgattatatcaaactgtattttaccatcagcaatattctgacagtactagcataatgaaggttggtgacgggttctcataaggactcatataatcaaaaaaaaaagaagtcctttatgaatggttttcaaatgcatcttgaatcgcaagtgaaaaatctttgggaagactttaaacaggacttgtcatctgaattagctgtacatatgctgaatgactgccatttgctcctacttctgggctcc

SEQ ID NO: 60886 - DNA, 600 bp, Chicken  19866894320891_1
tccctccgagaatccaacagtatttgtgctttctgccacaaaaaaaagatctaacgtacagtcaggaagcaggttcagcagatggcagtttcaataatacgtttcttcgatcggaagttgataaaattgcatcaggcagagtgcctggggtgcttctgaaagaagctttggcctcttcagttacacaaacagtcagaaccactgctaaaatatatcctttaaactaaagatgaaccagggggaggatgagcagttagcgtggcaaatacagggggaagaggttgtatgttagcagcatcyccacttccctttactgttgactcagagacttgcagaggaggggacttgttgctgtgatgggtagtagcactatcccatacctggggcaggtggaggcctcggctgctgctgctctcactgcgaccaaggtgacttctgctttcttcagaactaaaagagcatgagragaaagggacagaaaaactggaaaatgcagatttgtttcctatacgccttctacctgcagccttgctgctggagaaagacaagaagcggtcgccatacgtaaatctggcaatcctttattgccatcaagccatt

SEQ ID NO: 60887 - DNA, 600 bp, Chicken  19866894320891_2
tttggcctcttcagttacacaaacagtcagaaccactgctaaaatatatcctttaaactaaagatgaaccagggggaggatgagcagttagcgtggcaaatacagggggaagaggttgtatgttagcagcatcyccacttccctttactgttgactcagagacttgcagaggaggggacttgttgctgtgatgggtagtagcactatcccatacctggggcaggtggaggcctcggctgctgctgctctcactgcgaccaaggtgacttctgctttcttcagaactaaaagagcatgagragaaagggacagaaaaactggaaaatgcagatttgtttcctatacgccttctacctgcagccttgctgctggagaaagacaagaagcggtcgccatacgtaaatctggcaatcctttattgccatcaagccatttcagaggttggccctgtttcagctttcagtagctgtttctgtcacaacacaggaaagaccaacctggagtttctgactgatttgccaaagtcctggtcaataacaggggaggtgagtacaccacttccctcccaatttgccctggcttatttgatgctgctgattg

SEQ ID NO: 60888 - DNA, 600 bp, Chicken  19866894320899_1
tctcataatcctggaggattcctgtatttcttcccccaagagagggcagggaaatacagctgggggcaagaatttggcattgtgtatcgtacagctcattcagcagtggcagggtaagaaaatcaggaagacaaatgatggtctaggtagaatggtctaaaaaagatggtctaggtagaatgaatcctgtcaacatcagcaccaaaatcatggtaaaccaggactgtgttttatattgcccaagacaagtgaattattcatagcgggaaatttcagtgttcatttcaaaacagtgaaagkaagacaatgcagagagtttctcccttcggagctgatgaaaaaacattatccataatattcttttgtaaagcaggagacaggagttctattcatttgctgtcataagagcctcacagaactgacctagagtctgcatggacaactggagtatgtgcgtatctacccaatctgaatggaaacctccatttctttttaggctgattagccacttcagcagagggatttggtaactagtaaacataatttatagttgctgtagtctaccagtaactccattcagctttaaagattgacatattt

SEQ ID NO: 60889 - DNA, 599 bp, Chicken  19866894320905_1
  misc_feature (1)..(86): n is any nucleotide
nnnnnnnnnnnnnnnnnnnnnnnnnnnnnnnnnnnnnnnnnnnnnnnnnnnnnnnnnnnnnnnnnnnnnnnnnnnnnnnnnnnnnnccactagatgtggttgccccattcagcctggccttgaatgcttccaggtatggagcatccacttctctgggcaacctgttcctgtgccttatcaccctttgagtaaaaaaattctgcctaatacctagcctaagtctcccctgtttgagtttacaatcattgcctttgtcctatcaatatcaaaccgcataaaaagtcagtcctactcctgctygaaagctcccctcaagtactgcaatgctcattgtacctcagtcattgagacctcagcctccctagaaccttctccaggcttctcttctccaagctgaacaaaaccagctctttcagcctttcttcataacagagtttctccacccctgtgatcatctttatggcctgcctttggacctgctccaactgctcaacatctttcttatgatggggcctggcttacgcaaagcctacgacatggtcctgagtagcaacaaaatcctaatgtcagttgttctgtacattcaataacttgttcac

SEQ ID NO: 60890 - DNA, 600 bp, Chicken  19866894320906_1
agtgttgaagatcttaccttgactggcagcctcaggtcctacatctagggataatgctgattgtaggggcatgttttagaacactgaagctataaccgaacaagagtcttacattgcagaattaggtctacactgaaggtcgcatggcagttataggaagttgcttttctaccgcattttccttttgggtgaggtgcatcacaatggattgtgcaagcccaggaacatattgctttggtaaacgacctgaactcttaattccccccgctggcgcttttcagttgttttgctgtactatgyatctcagaagcacaaacagtgaaggaactcaaagcctcacagctgtctgtacagcctgtcctgggagagcycacagaataccctgatctgcctcagctcgkgtgggccctgacctttaatgatcctcttctcactttcatagagtcatagaattgtttgagttggaagggacccttagaggtcaccaaggccagctcccctgcagtgaacattgacagcacagcgagatcaggttgctcagagccccgtccagcctgaccttgaacacctccaaggacagggcatccaccacatctccag

SEQ ID NO: 60891 - DNA, 600 bp, Chicken  19866894320906_2
tgttttagaacactgaagctataaccgaacaagagtcttacattgcagaattaggtctacactgaaggtcgcatggcagttataggaagttgcttttctaccgcattttccttttgggtgaggtgcatcacaatggattgtgcaagcccaggaacatattgctttggtaaacgacctgaactcttaattccccccgctggcgcttttcagttgttttgctgtactatgyatctcagaagcacaaacagtgaaggaactcaaagcctcacagctgtctgtacagcctgtcctgggagagcycacagaataccctgatctgcctcagctcgkgtgggccctgacctttaatgatcctcttctcactttcatagagtcatagaattgtttgagttggaagggacccttagaggtcaccaaggccagctcccctgcagtgaacattgacagcacagcgagatcaggttgctcagagccccgtccagcctgaccttgaacacctccaaggacagggcatccaccacatctccaggcaacacgttcccatgcttcactatccttgttgtaaaaaaaaactccttccatatatccaatctaaacctc

SEQ ID NO: 60892 - DNA, 600 bp, Chicken  19866894320906_3
aagagtcttacattgcagaattaggtctacactgaaggtcgcatggcagttataggaagttgcttttctaccgcattttccttttgggtgaggtgcatcacaatggattgtgcaagcccaggaacatattgctttggtaaacgacctgaactcttaattccccccgctggcgcttttcagttgttttgctgtactatgyatctcagaagcacaaacagtgaaggaactcaaagcctcacagctgtctgtacagcctgtcctgggagagcycacagaataccctgatctgcctcagctcgkgtgggccctgacctttaatgatcctcttctcactttcatagagtcatagaattgtttgagttggaagggacccttagaggtcaccaaggccagctcccctgcagtgaacattgacagcacagcgagatcaggttgctcagagccccgtccagcctgaccttgaacacctccaaggacagggcatccaccacatctccaggcaacacgttcccatgcttcactatccttgttgtaaaaaaaaactccttccatatatccaatctaaacctcccttctcttagtttgaaaccatttcccctt

SEQ ID NO: 60893 - DNA, 600 bp, Chicken  19866894320912_1
cccctttctattccttctgcaggagccaggagagctggggaggaggagcgtagtgaaaatttattgttggttgcttattaccattactgcaagcataagtaccctggagattacgacctacatacatttaatatctgcatccaaacagtttgcattctgattgcagcatgagtggagacagactcatgaccagcaggatttggaacaggaaggagaaagaaagtcactgtgcccttgtgtttcacatggcaacaaaatggaagttgctagaaaacaacctaagcaaagatgctggaaaaygcctcagtgggaacctcagtgccctctggtttccctaaatccagagctctggccaagtctgtggacagaactgccccagagctttcctctgctctcatccaagccctgtgaaatggtgtcagcccagaaccacactcttacctccagcttttgctggtggtgctgctcagggaagagacaaggcagcagagaactggtggagtggagtccaggaggttctaggctgtctgcctgaaggagcacaggcctacccagcattcccaatgtccccaagagatgctgtagggttcagttgtgcat

SEQ ID NO: 60894 - DNA, 599 bp, Chicken  19866894320917_1
  misc_feature (1)..(40): n is any nucleotide
nnnnnnnnnnnnnnnnnnnnnnnnnnnnnnnnnnnnnnnnccttcaatctgttaaaactaagattgagaagtgtatattaccttttcaatccaatacaccctggtatgtgtttgtgcactgtgattcttaggtgtgcagagatacttctgccaatgtgtcatttacccatcatttcactgttttcacaagtatgccttctgaatgtgggatattcacaattcagaccaggtcaatttgagataattgactgctgtgttttctttattttccacacatagcactaatgtgcattgttacaytggaagcctytgaagacctttgaaaaaccagattacatatttaaggtaaaaaatttaatttaacagcaaattcctaagcacataacacttgctagagcttcatgtatatatatagggagaatgaaagaacagtctggtcttctaaagccttaaagatttgtaagccagctttgatagtgctaggaattctaaaactatgactaagcagacagaaaatggtattatctttcccatactgctcagcagagctaaaataaactgtcatattatgtgacctataagtggtattaggttttatt

SEQ ID NO: 60895 - DNA, 599 bp, Chicken  19866894320917_2
  misc_feature (1)..(30): n is any nucleotide
nnnnnnnnnnnnnnnnnnnnnnnnnnnnnnccttcaatctgttaaaactaagattgagaagtgtatattaccttttcaatccaatacaccctggtatgtgtttgtgcactgtgattcttaggtgtgcagagatacttctgccaatgtgtcatttacccatcatttcactgttttcacaagtatgccttctgaatgtgggatattcacaattcagaccaggtcaatttgagataattgactgctgtgttttctttattttccacacatagcactaatgtgcattgttacaytggaagcctytgaagacctttgaaaaaccagattacatatttaaggtaaaaaatttaatttaacagcaaattcctaagcacataacacttgctagagcttcatgtatatatatagggagaatgaaagaacagtctggtcttctaaagccttaaagatttgtaagccagctttgatagtgctaggaattctaaaactatgactaagcagacagaaaatggtattatctttcccatactgctcagcagagctaaaataaactgtcatattatgtgacctataagtggtattaggttttattgccttcttgt

SEQ ID NO: 60896 - DNA, 600 bp, Chicken  19866894320917_3
tttaaagtattgacaggatggcatttatatctctaaacataaaagtatggaatgagatacattttaaaatgactatctaaataattatgataaatataaaacaaatttgtacacacttccttgccatgagtctctttgtatgctgacatgtctgccattactttaacagcttctaccatagtaaattggaaagaaaaatacattagaagagtgattcactgcacaaaaacacatctttagagtcacgttaggcacagcctaagaatatgatctttgctttcataatgcgtttactacttygtggatgttaaggttataaggattctaaatgggaayggaacatttttggttatgggcatcatcagtcttgatgaattgctgtaggtatgacttcggtttagtgatgcaacctgtgttcttgatttccatgtattgatagctcttttgtcttctagatttctgctgtgtccctcactctgctgttcatgtgaatgtggtgactgcccattagctacttcattcccttaaaaactttttaattacagatttggaaaggtatatgtaaatgagaaacaaccttagaaagcaggagacagaaca

SEQ ID NO: 60897 - DNA, 600 bp, Chicken  19866894320917_4
acataaaagtatggaatgagatacattttaaaatgactatctaaataattatgataaatataaaacaaatttgtacacacttccttgccatgagtctctttgtatgctgacatgtctgccattactttaacagcttctaccatagtaaattggaaagaaaaatacattagaagagtgattcactgcacaaaaacacatctttagagtcacgttaggcacagcctaagaatatgatctttgctttcataatgcgtttactacttygtggatgttaaggttataaggattctaaatgggaayggaacatttttggttatgggcatcatcagtcttgatgaattgctgtaggtatgacttcggtttagtgatgcaacctgtgttcttgatttccatgtattgatagctcttttgtcttctagatttctgctgtgtccctcactctgctgttcatgtgaatgtggtgactgcccattagctacttcattcccttaaaaactttttaattacagatttggaaaggtatatgtaaatgagaaacaaccttagaaagcaggagacagaacagaagtctgttcaattttttcattgatatagagaatt

SEQ ID NO: 60898 - DNA, 600 bp, Chicken  19866894320921_1
atattactaattagtctcggaaactgattgaattcacctgaaaaaaggctatcttgttccatgatacgcatattcacaagagcaatctatagaggaactactctggatttagttctcagtaggagaagtcatttcagagtgaggaacacctcgctttttgaaactctcctcatgatgtacccatgaggatggggaatgcttcagattcattgcactttgactgaaactgctctccaaacttttttattctggtatatttcttttccctcaccaaactggaaataattgtctgcgatatcygaattagtctgtgcaatttttatcaagaacatttgtaatttaaattggatctgcaaaaggagggggctaaaaaatagtaacgttcatttcatgctcattatgtatcacggtgagactgatgacattttaatattaacattgttacgagtctcttataaaaaaattaagtctacttaatattccagactccgttgattggaaaccagttacctttgacaatgaaaaatcaattggcattctaattaaaaagaatagcacagaaacaaacaaaagaattaaaaaatgtattctatatattag

SEQ ID NO: 60899 - DNA, 599 bp, Chicken  19866894320937_1
  misc_feature (1)..(13): n is any nucleotide
nnnnnnnnnnnnnacgagcgccctgatttccatgcctctaacataaggacgtctttctaattcctgttaatttcaccacaaagatgtaaagtctgatgtctaacctaaagtctgacgtttatgtatttataggacatacaagcagattatagacatttaaatatggtccttgtgatggtgcttaagctcccttttgactacctttgttataaattctaaaatgggtaaggtaatggaacatcaaattaaccactcattgaaaaaaggcttaaatttaaaaatataattctaaaacatacrcattttctaggtaataggaagaaaatgtatgggcgttttccgtgcttgttactttgagtcccagactctttctgtttagctaatacagtataagattaattctctcacagcacattgcctggagttcagtgcacatgtttactgatgtgtacagctctcaaataagtttagtgcttctttcacccactgttaggaagtatatttaaaagaaattgccttttatagatttaaattacaaaagtactgatatcatgcaaaaagcagttcaactcatgcaagcatacaaatgtgtaaatctt

SEQ ID NO: 60900 - DNA, 600 bp, Chicken  19866894320939_1
ccttagcatactgcttgtctaactggaatttggagatagggaacactgcatccagggctttggaattttatttatttaggttctttttatttgactttgtcctccacgttagtctgcctgtatctttacagtgagctgccaaatgtgcttggaaaacatgatatcatagtgggtggaaaggaaaaccagatgttataaaattttacttttcatgtactgaagcaatgtgagcaactctgtaaaggagcagtgtttttaaccttccagtgttctgttttatagtaacggggtgctttttasagatcccaagttaatgaaattggtaaagatctttatttttaattctggtgcagtatggcagcrtatattattaattacaagaaacattgttaaagagaaatcacaatcagcctgccctcacyagcgtcctacaaatgtggttttatgggacaagtttaaggttgtcccagtttggctgatgaggtttccttcgtgagtgccaaagtgcttggattcggcacagttaattttacatcctgctggcttttccatggaggtgagaataaagttgtttggatctggttctagagaagcaagctg

SEQ ID NO: 60901 - DNA, 600 bp, Chicken  19866894320939_2
aattttatttatttaggttctttttatttgactttgtcctccacgttagtctgcctgtatctttacagtgagctgccaaatgtgcttggaaaacatgatatcatagtgggtggaaaggaaaaccagatgttataaaattttacttttcatgtactgaagcaatgtgagcaactctgtaaaggagcagtgtttttaaccttccagtgttctgttttatagtaacggggtgctttttasagatcccaagttaatgaaattggtaaagatctttatttttaattctggtgcagtatggcagcrtatattattaattacaagaaacattgttaaagagaaatcacaatcagcctgccctcacyagcgtcctacaaatgtggttttatgggacaagtttaaggttgtcccagtttggctgatgaggtttccttcgtgagtgccaaagtgcttggattcggcacagttaattttacatcctgctggcttttccatggaggtgagaataaagttgtttggatctggttctagagaagcaagctgacagcagccttttccatctaatatttagatattgttatggttacgatctgagctttgcaggat

SEQ ID NO: 60902 - DNA, 600 bp, Chicken  19866894320939_3
tctttacagtgagctgccaaatgtgcttggaaaacatgatatcatagtgggtggaaaggaaaaccagatgttataaaattttacttttcatgtactgaagcaatgtgagcaactctgtaaaggagcagtgtttttaaccttccagtgttctgttttatagtaacggggtgctttttasagatcccaagttaatgaaattggtaaagatctttatttttaattctggtgcagtatggcagcrtatattattaattacaagaaacattgttaaagagaaatcacaatcagcctgccctcacyagcgtcctacaaatgtggttttatgggacaagtttaaggttgtcccagtttggctgatgaggtttccttcgtgagtgccaaagtgcttggattcggcacagttaattttacatcctgctggcttttccatggaggtgagaataaagttgtttggatctggttctagagaagcaagctgacagcagccttttccatctaatatttagatattgttatggttacgatctgagctttgcaggatactcggtgaaagtttggggcttttaaatatcaggtctaatcttgctgtttttctgactt

SEQ ID NO: 60903 - DNA, 600 bp, Chicken  19866894320939_4
tttccatggaggtgagaataaagttgtttggatctggttctagagaagcaagctgacagcagccttttccatctaatatttagatattgttatggttacgatctgagctttgcaggatactcggtgaaagtttggggcttttaaatatcaggtctaatcttgctgtttttctgacttccccaaggttgtgagatcccaggttgtttgcaataagatggtatgtcttcacagcatgtgatagcatgagagagaatagcttagaacctgaaagcttcctagtcatattagtgactctatgcytgcattaatttacttgttaatttttaggctgatgtagccccgatgctgtasgttcatcagctggcttgtttccatcctgcttcagtgtgtgtgcactgtgctcccayaggtcayataaatactggacaagctttcaggtgcagaaaggcatttctggtctcactccatgagctttatacttcaagctatctaccaggctttgctggagcatgaagctcataggaaaagacggagccctcagctgtgttcagagacagctctgaatgtttaggtggggactgctgccttcaaaaatgatag

SEQ ID NO: 60904 - DNA, 600 bp, Chicken  19866894320939_5
gctgacagcagccttttccatctaatatttagatattgttatggttacgatctgagctttgcaggatactcggtgaaagtttggggcttttaaatatcaggtctaatcttgctgtttttctgacttccccaaggttgtgagatcccaggttgtttgcaataagatggtatgtcttcacagcatgtgatagcatgagagagaatagcttagaacctgaaagcttcctagtcatattagtgactctatgcytgcattaatttacttgttaatttttaggctgatgtagccccgatgctgtasgttcatcagctggcttgtttccatcctgcttcagtgtgtgtgcactgtgctcccayaggtcayataaatactggacaagctttcaggtgcagaaaggcatttctggtctcactccatgagctttatacttcaagctatctaccaggctttgctggagcatgaagctcataggaaaagacggagccctcagctgtgttcagagacagctctgaatgtttaggtggggactgctgccttcaaaaatgatagksttggctggcttcaacataaagaattatggcttagcctcacacttaactg

SEQ ID NO: 60905 - DNA, 600 bp, Chicken  19866894320939_6
ctttgcaggatactcggtgaaagtttggggcttttaaatatcaggtctaatcttgctgtttttctgacttccccaaggttgtgagatcccaggttgtttgcaataagatggtatgtcttcacagcatgtgatagcatgagagagaatagcttagaacctgaaagcttcctagtcatattagtgactctatgcytgcattaatttacttgttaatttttaggctgatgtagccccgatgctgtasgttcatcagctggcttgtttccatcctgcttcagtgtgtgtgcactgtgctcccayaggtcayataaatactggacaagctttcaggtgcagaaaggcatttctggtctcactccatgagctttatacttcaagctatctaccaggctttgctggagcatgaagctcataggaaaagacggagccctcagctgtgttcagagacagctctgaatgtttaggtggggactgctgccttcaaaaatgatagksttggctggcttcaacataaagaattatggcttagcctcacacttaactgtttttccagtactgagaagtgagggatgttaaatacatttaaattgaaacatccag

SEQ ID NO: 60906 - DNA, 600 bp, Chicken  19866894320939_7
ggatactcggtgaaagtttggggcttttaaatatcaggtctaatcttgctgtttttctgacttccccaaggttgtgagatcccaggttgtttgcaataagatggtatgtcttcacagcatgtgatagcatgagagagaatagcttagaacctgaaagcttcctagtcatattagtgactctatgcytgcattaatttacttgttaatttttaggctgatgtagccccgatgctgtasgttcatcagctggcttgtttccatcctgcttcagtgtgtgtgcactgtgctcccayaggtcayataaatactggacaagctttcaggtgcagaaaggcatttctggtctcactccatgagctttatacttcaagctatctaccaggctttgctggagcatgaagctcataggaaaagacggagccctcagctgtgttcagagacagctctgaatgtttaggtggggactgctgccttcaaaaatgatagksttggctggcttcaacataaagaattatggcttagcctcacacttaactgtttttccagtactgagaagtgagggatgttaaatacatttaaattgaaacatccagaggtttg

SEQ ID NO: 60907 - DNA, 600 bp, Chicken  19866894320939_8
gcattaatttacttgttaatttttaggctgatgtagccccgatgctgtasgttcatcagctggcttgtttccatcctgcttcagtgtgtgtgcactgtgctcccayaggtcayataaatactggacaagctttcaggtgcagaaaggcatttctggtctcactccatgagctttatacttcaagctatctaccaggctttgctggagcatgaagctcataggaaaagacggagccctcagctgtgttcagagacagctctgaatgtttaggtggggactgctgccttcaaaaatgatagksttggctggcttcaacataaagaattatggcttagcctcacacttaactgtttttccagtactgagaagtgagggatgttaaatacatttaaattgaaacatccagaggtttgtgttttcactggggagagggcatgagaatggctgacttgtcgtgcttcaaataaaataaacaaagtagcagtggaagcagactcgagagaaaagtaactaaaacttagaaatgcatttgtgtatttatttctctgcctcatgtctgcttaaataagtagttgggaggtgcaccattgtcactttatg

SEQ ID NO: 60908 - DNA, 600 bp, Chicken  19866894320939_9
cattaatttacttgttaatttttaggctgatgtagccccgatgctgtasgttcatcagctggcttgtttccatcctgcttcagtgtgtgtgcactgtgctcccayaggtcayataaatactggacaagctttcaggtgcagaaaggcatttctggtctcactccatgagctttatacttcaagctatctaccaggctttgctggagcatgaagctcataggaaaagacggagccctcagctgtgttcagagacagctctgaatgtttaggtggggactgctgccttcaaaaatgatagksttggctggcttcaacataaagaattatggcttagcctcacacttaactgtttttccagtactgagaagtgagggatgttaaatacatttaaattgaaacatccagaggtttgtgttttcactggggagagggcatgagaatggctgacttgtcgtgcttcaaataaaataaacaaagtagcagtggaagcagactcgagagaaaagtaactaaaacttagaaatgcatttgtgtatttatttctctgcctcatgtctgcttaaataagtagttgggaggtgcaccattgtcactttatgt

SEQ ID NO: 60909 - DNA, 600 bp, Chicken  19866894320946_1
ttttatcatagcattttgtcactattaatgataacctagcatgaggcaatttaattatgtatgctatcattttcctccttctgaagagtgaaagaaatgaggcagagaagctaaagggtggacttttgaagaattttaggcacctaattcccactgaattcaaggaattccagcccaaatcatgcctgggtcatgtctaaagccatagcaaacgggttgtcaagtacttgatcaaattctgaatctcttagctcagtctcactgccctccaaggctctttgcaacagtgaaacacagackaggattatgaatctatttgtttctgaaaataaggatgaaccagaaaatgagggtactgcagagtgtttagggtagtcatgtttgtctggaaaatgtctttcctatgctgtcataattagtgtttctgtttaaacagcactgcagcactggtttgttttgttgggtggttggtttgttgtttgtttttttactgaagagaacagaactggtctaatggtgtattatcaaatgtttatatggtrcaactacacaagaaagaaaaaaatggtccaaagaaaaccagctgccaggcagccactt

SEQ ID NO: 60910 - DNA, 600 bp, Chicken  19866894320946_2
atctcttagctcagtctcactgccctccaaggctctttgcaacagtgaaacacagackaggattatgaatctatttgtttctgaaaataaggatgaaccagaaaatgagggtactgcagagtgtttagggtagtcatgtttgtctggaaaatgtctttcctatgctgtcataattagtgtttctgtttaaacagcactgcagcactggtttgttttgttgggtggttggtttgttgtttgtttttttactgaagagaacagaactggtctaatggtgtattatcaaatgtttatatggtrcaactacacaagaaagaaaaaaatggtccaaagaaaaccagctgccaggcagccactttcttttaagaataggttgtaagaccgtatcagagtcagcagaagggaacatgcatctgtgccacagcaaatcaagtgcaaagtcttactgaagcttatggaagcttaaatttaggttagtttaaccacagttttgcactatgcactttctagggagatgttttctgctgcctctgttgtgaggtagtgtaatctcactgccacaatcaagcttctgatggagtggggtcagtgctccaggag

SEQ ID NO: 60911 - DNA, 600 bp, Chicken  19866894320948_1
gcgcatctagacgcaatgtgcttgataaaagtacatgactggatctctgctagaaaaatatggatttgaatgaaagcatcaattgcttcaaataaatgaatgttaacggatgtacttaatttaagaaaaagtttttcgagtacattcatcaacatactcatagatatatatttattattatctcttttccatttggattatctctttctccacttggatagcaaggaagtagcagtgtttgatttttctggaaaatccatattttctgcatacagcttgagtcagcgttttggttggagytctgggctgctggtcctgctccaactgaagcttcaagagttctgcttgtgatctgtttgaaagcaggaatagaggatctgtctacgttgcatacaaagaacgggtatgaggcttccttccagaccaggactatcagcagtttgcacagccatgatttcggcatatgtcagtccttcctctgccygagagcagccaggtgggttagcaaactgccagggcagatgatacgcagtgcagyagttgcaacaaaataggaatgaagagaaattgacccaaatgcaccaragtcaatcccaaatt

SEQ ID NO: 60912 - DNA, 600 bp, Chicken  19866894320948_2
ttttccatttggattatctctttctccacttggatagcaaggaagtagcagtgtttgatttttctggaaaatccatattttctgcatacagcttgagtcagcgttttggttggagytctgggctgctggtcctgctccaactgaagcttcaagagttctgcttgtgatctgtttgaaagcaggaatagaggatctgtctacgttgcatacaaagaacgggtatgaggcttccttccagaccaggactatcagcagtttgcacagccatgatttcggcatatgtcagtccttcctctgccygagagcagccaggtgggttagcaaactgccagggcagatgatacgcagtgcagyagttgcaacaaaataggaatgaagagaaattgacccaaatgcaccaragtcaatcccaaattcagatgtttccctccagaaatgataataataattcattatcattttaatctttcttacatctaagaatcatagagtggcttgagttggaagggacctcaaagatcacccagtcccaacctccctgctggggctggctgccccccaccagatcaggctgcccagggccctatttaacctgttctt

SEQ ID NO: 60913 - DNA, 600 bp, Chicken  19866894320948_3
ttgatttttctggaaaatccatattttctgcatacagcttgagtcagcgttttggttggagytctgggctgctggtcctgctccaactgaagcttcaagagttctgcttgtgatctgtttgaaagcaggaatagaggatctgtctacgttgcatacaaagaacgggtatgaggcttccttccagaccaggactatcagcagtttgcacagccatgatttcggcatatgtcagtccttcctctgccygagagcagccaggtgggttagcaaactgccagggcagatgatacgcagtgcagyagttgcaacaaaataggaatgaagagaaattgacccaaatgcaccaragtcaatcccaaattcagatgtttccctccagaaatgataataataattcattatcattttaatctttcttacatctaagaatcatagagtggcttgagttggaagggacctcaaagatcacccagtcccaacctccctgctggggctggctgccccccaccagatcaggctgcccagggccctatttaacctgttcttgatcaccacggatagrgcattcacagtttcttgctcagtctctcaaaaatcagg

SEQ ID NO: 60914 - DNA, 600 bp, Chicken  19866894320948_4
cgttttggttggagytctgggctgctggtcctgctccaactgaagcttcaagagttctgcttgtgatctgtttgaaagcaggaatagaggatctgtctacgttgcatacaaagaacgggtatgaggcttccttccagaccaggactatcagcagtttgcacagccatgatttcggcatatgtcagtccttcctctgccygagagcagccaggtgggttagcaaactgccagggcagatgatacgcagtgcagyagttgcaacaaaataggaatgaagagaaattgacccaaatgcaccaragtcaatcccaaattcagatgtttccctccagaaatgataataataattcattatcattttaatctttcttacatctaagaatcatagagtggcttgagttggaagggacctcaaagatcacccagtcccaacctccctgctggggctggctgccccccaccagatcaggctgcccagggccctatttaacctgttcttgatcaccacggatagrgcattcacagtttcttgctcagtctctcaaaaatcaggggagtgttttggcatgaaatctggggtgcacgtgagtaaatgggatt

SEQ ID NO: 60915 - DNA, 600 bp, Chicken  19866894320948_5
gttagcaaactgccagggcagatgatacgcagtgcagyagttgcaacaaaataggaatgaagagaaattgacccaaatgcaccaragtcaatcccaaattcagatgtttccctccagaaatgataataataattcattatcattttaatctttcttacatctaagaatcatagagtggcttgagttggaagggacctcaaagatcacccagtcccaacctccctgctggggctggctgccccccaccagatcaggctgcccagggccctatttaacctgttcttgatcaccacggatagrgcattcacagtttcttgctcagtctctcaaaaatcaggggagtgttttggcatgaaatctggggtgcacgtgagtaaatgggattcatacttgcagatctgagaagatgatcattaaaagtcactaattttccatcaacagctaaaataacttcttcttcctaccatgtgtgattgtaaattaaataagctgaaacaagccaaaagaaatgtaacatcagagctgtctctaatggaaacagcaagctcttgattttccatctctaataatgaaagatcttgtgtaagaacatagaggtag

SEQ ID NO: 60916 - DNA, 600 bp, Chicken  19866894320961_1
aaactggacagattctgctccatttcatgagattcaaaggctgttacatccgagctcatacacactccctctctccaggtctgcattgcaattctgggttgttaacgaggctctcaagatctgtacagcaacttctatctttaagaggaaaagagagtgaaagcttagctgatctatgcagaaaatctaaggcattaaggattgaatgcaattagacgttgaattacatacatttttattctataagtatgagatttcatagattatgatgtgatatcaatgcaaaaaaaaaaaaactgrtcttcttttcattgtttttttctttttaaaaatttacaaatcaacaacaatcgaaatcaaacacagcatttattttcacagatcacaatcaatctcttgcattcttgtcacttttgactcttatttcttaagaggtgtgtaatacttatgaatttctaggcctgactgacatagatacatgaggccrttcttcacccttatgcctactccatgaggaattcttgtaactcaggctgggtttcgggtatcttttcaaacataagctgaatccaaaatactgcagagaagatgattgaatat

SEQ ID NO: 60917 - DNA, 600 bp, Chicken  19866894320961_2
aactggacagattctgctccatttcatgagattcaaaggctgttacatccgagctcatacacactccctctctccaggtctgcattgcaattctgggttgttaacgaggctctcaagatctgtacagcaacttctatctttaagaggaaaagagagtgaaagcttagctgatctatgcagaaaatctaaggcattaaggattgaatgcaattagacgttgaattacatacatttttattctataagtatgagatttcatagattatgatgtgatatcaatgcaaaaaaaaaaaaactgtrcttcttttcattgtttttttctttttaaaaatttacaaatcaacaacaatcgaaatcaaacacagcatttattttcacagatcacaatcaatctcttgcattcttgtcacttttgactcttatttcttaagaggtgtgtaatacttatgaatttctaggcctgactgacatagatacatgaggccrttcttcacccttatgcctactccatgaggaattcttgtaactcaggctgggtttcgggtatcttttcaaacataagctgaatccaaaatactgcagagaagatgattgaatatg

SEQ ID NO: 60918 - DNA, 600 bp, Chicken  19866894320961_3
actggacagattctgctccatttcatgagattcaaaggctgttacatccgagctcatacacactccctctctccaggtctgcattgcaattctgggttgttaacgaggctctcaagatctgtacagcaacttctatctttaagaggaaaagagagtgaaagcttagctgatctatgcagaaaatctaaggcattaaggattgaatgcaattagacgttgaattacatacatttttattctataagtatgagatttcatagattatgatgtgatatcaatgcaaaaaaaaaaaaactgttrttcttttcattgtttttttctttttaaaaatttacaaatcaacaacaatcgaaatcaaacacagcatttattttcacagatcacaatcaatctcttgcattcttgtcacttttgactcttatttcttaagaggtgtgtaatacttatgaatttctaggcctgactgacatagatacatgaggccrttcttcacccttatgcctactccatgaggaattcttgtaactcaggctgggtttcgggtatcttttcaaacataagctgaatccaaaatactgcagagaagatgattgaatatgc

SEQ ID NO: 60919 - DNA, 600 bp, Chicken  19866894320961_4
taaggcattaaggattgaatgcaattagacgttgaattacatacatttttattctataagtatgagatttcatagattatgatgtgatatcaatgcaaaaaaaaaaaaactgttcttcttttcattgtttttttctttttaaaaatttacaaatcaacaacaatcgaaatcaaacacagcatttattttcacagatcacaatcaatctcttgcattcttgtcacttttgactcttatttcttaagaggtgtgtaatacttatgaatttctaggcctgactgacatagatacatgaggccrttcttcacccttatgcctactccatgaggaattcttgtaactcaggctgggtttcgggtatcttttcaaacataagctgaatccaaaatactgcagagaagatgattgaatatgcttctagaatataaataagaaggtgcaataactactttcccttggctttcaaagtctgtcttttcaaaagcatttatttcctctccaagtaagctttttactgcaataacactatacaagacttctgggaaagtagaccatatataaagacagtgtagaagtctgattttattgaaactaccttgt

SEQ ID NO: 60920 - DNA, 600 bp, Chicken  19866894320961_5
gggtatcttttcaaacataagctgaatccaaaatactgcagagaagatgattgaatatgcttctagaatataaataagaaggtgcaataactactttcccttggctttcaaagtctgtcttttcaaaagcatttatttcctctccaagtaagctttttactgcaataacactatacaagacttctgggaaagtagaccatatataaagacagtgtagaagtctgattttattgaaactaccttgttaaagtttagttcaaatatcaccctataacagaaatacagacaaagtagtcaackctaaagccttgttctctttaatttttctcaaacatgtaagtttgaattataattgtatttcatagaagtttcattgatgaagcctctttctgatgtacaggtacctcaagagaaatcaagactaactaattgcatggagagtgtatggaaatatttctaacttatgttcaactctgtattaatcatgtgtttctgaaatctataaaatatgactttatactctctaatggtaaaatgtgcagaaatgaattaggattcctatcattccatctaaatatagaaatctacatgtatgaaaca

SEQ ID NO: 60921 - DNA, 600 bp, Chicken  19866894320961_6
actaattgcatggagagtgtatggaaatatttctaacttatgttcaactctgtattaatcatgtgtttctgaaatctataaaatatgactttatactctctaatggtaaaatgtgcagaaatgaattaggattcctatcattccatctaaatatagaaatctacatgtatgaaacaatttagtgggaaaactattaacctctttgcctagtattttctgatttaacacacttctgcattattggctgccttactgatgcaaagactgcatgcaacaagcttctctttttttaataaacartttaaamattttaaatcgcagcactgtcttgtttgattttatattatccttattgctactttatttagttttgggcyatttattaaccaccttaagttaaatttactcagagtataaaacattttagaggtaagaagctccatctgctggatatttagttgaacagtctaattcctaagattacaaatagaacaaatctttattaaccatctcccccagttgaaaatctcattctttttaactactgaaaataataatttcccaacaatatttttactcaacataatgtaacagaatata

SEQ ID NO: 60922 - DNA, 600 bp, Chicken  19866894320961_7
gcatggagagtgtatggaaatatttctaacttatgttcaactctgtattaatcatgtgtttctgaaatctataaaatatgactttatactctctaatggtaaaatgtgcagaaatgaattaggattcctatcattccatctaaatatagaaatctacatgtatgaaacaatttagtgggaaaactattaacctctttgcctagtattttctgatttaacacacttctgcattattggctgccttactgatgcaaagactgcatgcaacaagcttctctttttttaataaacartttaaamattttaaatcgcagcactgtcttgtttgattttatattatccttattgctactttatttagttttgggcyatttattaaccaccttaagttaaatttactcagagtataaaacattttagaggtaagaagctccatctgctggatatttagttgaacagtctaattcctaagattacaaatagaacaaatctttattaaccatctcccccagttgaaaatctcattctttttaactactgaaaataataatttcccaacaatatttttactcaacataatgtaacagaatatattaacag

SEQ ID NO: 60923 - DNA, 581 bp, Chicken  19866894320961_8
ataaaatatgactttatactctctaatggtaaaatgtgcagaaatgaattaggattcctatcattccatctaaatatagaaatctacatgtatgaaacaatttagtgggaaaactattaacctctttgcctagtattttctgatttaacacacttctgcattattggctgccttactgatgcaaagactgcatgcaacaagcttctctttttttaataaacartttaaamattttaaatcgcagcactgtcttgtttgattttatattatccttattgctactttatttagttttgggcyatttattaaccaccttaagttaaatttactcagagtataaaacattttagaggtaagaagctccatctgctggatatttagttgaacagtctaattcctaagattacaaatagaacaaatctttattaaccatctcccccagttgaaaatctcattctttttaactactgaaaataataatttcccaacaatatttttactcaacataatgtaacagaatatattaacaggagtcactgataggaaggttactgccccaccttatttttcatttgatttat

SEQ ID NO: 60924 - DNA, 600 bp, Chicken  19866894320963_1
ggtgcatcactctgggaagagcccagaccagtacagtaacctgcactcctaccatccaggtcacgtgagacagcaggatttcatgcacagccatgctaaaatctgcaagggtgagattagaccttgatcctctacaaaaccatgacagtgtatgaaagaagaaaattcattagaacaattacttacttcagttcctcatccttgcatgatccatgttaccccagctctacaatattgtcttccttttaatcaactgataacactaatcattctggtctaacactctgaagtaccaaactrcttctcwtaagttcttgagcagtcttaagttccagataatccacaagaactatgtgaaaatctacaaagtattttatgaaatacgatccaatccatctccacttttcactctcactgcaggtctgctctggttttggtttgaaatgtattcagagacatgtcagtctgcatttacaattgatgtgccgaatagctcaagttctaaaatacaagataaatgagaaatttccttaaaaaaaccctcaaatttggtatggacccaattgtatgctttatgctacacaaagtgctaatgatgcc

SEQ ID NO: 60925 - DNA, 600 bp, Chicken  19866894320963_2
cactctgggaagagcccagaccagtacagtaacctgcactcctaccatccaggtcacgtgagacagcaggatttcatgcacagccatgctaaaatctgcaagggtgagattagaccttgatcctctacaaaaccatgacagtgtatgaaagaagaaaattcattagaacaattacttacttcagttcctcatccttgcatgatccatgttaccccagctctacaatattgtcttccttttaatcaactgataacactaatcattctggtctaacactctgaagtaccaaactrcttctcwtaagttcttgagcagtcttaagttccagataatccacaagaactatgtgaaaatctacaaagtattttatgaaatacgatccaatccatctccacttttcactctcactgcaggtctgctctggttttggtttgaaatgtattcagagacatgtcagtctgcatttacaattgatgtgccgaatagctcaagttctaaaatacaagataaatgagaaatttccttaaaaaaaccctcaaatttggtatggacccaattgtatgctttatgctacacaaagtgctaatgatgccagttaga

SEQ ID NO: 60926 - DNA, 599 bp, Chicken  19866894320966_1
  misc_feature (1)..(28): n is any nucleotide
nnnnnnnnnnnnnnnnnnnnnnnnnnnncaaagtcctgtatatttcggaaacttggagtattagctgcaactaaacaaggaagtaagagccttcctgaaagcacccatggacaggggaggaagaactgttcttcaaatagttctgttctctttagtcacttcagttttccacactgaaaaagtttaaaaacaatttttaactattgtcataccagcgctcttctaggcaactccacctcacaactctgtaggcccatcaaaaagagtatggctaaaggtctaagtaaaaatgcacttaayagctgtgaaaagctaatgagaggttgctgtcctttacctgttctagtacatattcctagaaatcacttgaagctggagctggctagttcagagcagacaaaattgggtgattttttgaagagcatgtaagtaaagtgcagaagtccttgctggatgactttacaaaatgctacctatcaaaacctactgaggatagttaaaaatccagtccttgcagctggcttaggagtcttttgagccacaggctggagtctagaaaaacatatggggaaggtagaaatgcaatttttccccgagct

SEQ ID NO: 60927 - DNA, 600 bp, Chicken  19866894320976_1
ccatttgtctttcagcaagatgccattagatcagaaatatgagaaaggaaaaaaggcttatgaatcaacatattacccaaacataaaagtgtatctttgcataactgatcaacaaacatgcaatgaatacactgttctgtttttactgagctataaaaaagaaatcacatttctttcaatattggaaaacataccataaagaaatgaatcaagtacatacagcacattccccaaagggaatttcttcaggagagagaatcatcaaaagtttgcattaacaaaagaaacagcacaataacrttaaaattgtcagcatagataatatctttccctgagttgtagataatactgatattattaaaggtacatagtaaaagggaacaaaaaagacaaatactgttactttcttaagctttggtatacagagcagtaagggggctcttcctgtaagtctcttccaactcaaatgattctatgattctgtgatcttgtgcctgaaagcacaaactttctatgaattctggaaggtgactgcattgtagcaacctctacaccaaccaataaagcaaaccaggactagattttttggcatgatcctgc

SEQ ID NO: 60928 - DNA, 599 bp, Chicken  19866894320989_1
  misc_feature (1)..(48): n is any nucleotide
nnnnnnnnnnnnnnnnnnnnnnnnnnnnnnnnnnnnnnnnnnnnnnnnctgcacagggcagtttggggacagggtgcagcagcctgctggccctggcagcgtacagccttcctgcgtgggccaggccagtgttttggagacactgggaggggatgcggagcacaggaagctgccgaggcctcctcaccacaaacaggggatttccagcagcggttcagatgtgggctgagcgctagccttgttccagctcctaaagggcagtggggcagggacagcacgtggccccctcctcagccctcrttggtgtgatccaggtgctttattccatgaaaaaggggccaggggttttgcaaaggaggattcacatcactcctctgtgcagtgagatggttccaaggggctgctgccatctcgttggcttgcacaaattggttccaggtcctcaaacttgacgtgcaggacctggggatgcaattagcgtgccagcagggaagatgctcagcagtccgttcccctcctgagctgctccctgcacagggaaggtgaagccgcttaacccttccacttttaatgctgaaatgcctttcaacaaggagtca

SEQ ID NO: 60929 - DNA, 599 bp, Chicken  19866894320991_1
  misc_feature (1)..(71): n is any nucleotide
nnnnnnnnnnnnnnnnnnnnnnnnnnnnnnnnnnnnnnnnnnnnnnnnnnnnnnnnnnnnnnnnnnnnnnntacatcagtgcaaaataacactgatcagtgcagttactcgagtttctggctcagaaacagaactgtattcttgtaattccagaacaagcctaacaatcaaacctggaaaatatttcagtgcaacggagcaccaacacggctggagtgccttcgtgcccactgtgaccaacctcactgagctcctcacggaccgcaccgaggaaagggtcaggaaggctctggaccacaraacatctgtttttttaataaatataaacatacctatatacatttagcatggcgaatcaaacacgtgtttatcttatttttgtatttctcgcacttgatgtttttagcaattaaatttgcagaatgctggatgggtatggccggtggtggtccatccgcacctccctcctgcagcccttcacacagtgcatcttcgcccactctttcctctgctcctttcctctgctccccggaaaaaaagactgtactagcccacaaaagtagctttataagggactgaacagtcgaaataagggagag

SEQ ID NO: 60930 - DNA, 600 bp, Chicken  19866894321006_1
gcctgtcatcctaatgaagaaatgcaaaccccagcacttttctgctggctgaatccttgtttctgataggtgttttaaggtatagaaaaaggattttttgggctgcctaaaaaaatgctgcactgttgtggtaaactgaactacatatcttgacctgacatttcctgtacatctctacgggcttgttcttattccatgctctgctctctcaagataagcccccctttgaacatgggtgggagaaaaaaagggagacaaaaggggatgagaaaaattcactggtgctgcgaaaagactccygtctcccgctgactgcactgtgcttgttcagtgctgaaagcacagagatgagagcaaaacaaaactgagctgctgcgaaagggaagcagtacttgaagagctttctaaattaacacaggtgtctgctgaaaggatctgaagttctgtctgctgagcttatcattacaagaaagtgttcatgcaggacagatggatgcatcaactgctttaaaatcctctaattaaattgtagtttgggttaagatagcaggaaagtccttctgtttaccagaactcagacactagaaggcaggcagcagt

SEQ ID NO: 60931 - DNA, 599 bp, Chicken  19866894321013_1
  misc_feature (1)..(71): n is any nucleotide
nnnnnnnnnnnnnnnnnnnnnnnnnnnnnnnnnnnnnnnnnnnnnnnnnnnnnnnnnnnnnnnnnnnnnnncccccgacccccccatccttttttttttaatgaaaaacatggcagatgataggttaatggaatattcagttcctgaagctatttgaagctgttctgtcaccctgcctaccaagatagctcttgaaattccaaacctgagtctactgtagtgtggttaccacaagtactgactgtgttaattgtaattgctgtcttggaagaaaatctggttggtatgaagtaaagcatwgacggtctcttccttacctgagctatcctctgcagggaaagaatttgcagcatgttgctgtggacaacaaagatatgcagaaacataaacagaatttaatgctagatgtgttaaatgagcttctgccacttgtcagacatttgtgtgatgcaagatggtcatttttgtgttgtcatttttgtaagatggattaacactattaccagagccattcctctgattttccttactctggagatttctctctttgtgttttggtcactttggttttgcatcaaatcttaccatagcatagtaat

SEQ ID NO: 60932 - DNA, 600 bp, Chicken  19866894321018_1
tgacatccccttcacatctcttgcatgctttgttcctcagtggtgaagagacccagctgaaggtagcaatccatccaagtgatggttgagacaaaacgaggtgcacagcatacttaggatcaaacagcacaaaaccaggagcatcaccagccctgctgcaccagagtatgctgtgtcttgaaggcctttggcctctgttcaggatgaaaaaatccttacagtgcaccaaatggctgggatgtgaacacaaggcagctccacgtccctcacaaatcacacaagcaagaaatgtttttcatyttaacagtgcagtcatgaaaacccaggaccttgaagagggctcaggaaaagagactgacagagagcacatcacagggcaggaggatgtgaatctgtgcaaaaaaaagaacagattggcagaaaaagaattattaagtagtacatggtggagtaggggattatctggagaacatgatataagaaccgacagattaaaggaacactaaatatttattacgaagtccttcgtatcatgtgtaataatacatgccatagctgctactgacttgtgcagccaacagccagttggtgagtggatga

SEQ ID NO: 60933 - DNA, 599 bp, Chicken  19866894321019_1
  misc_feature (1)..(127): n is any nucleotide
nnnnnnnnnnnnnnnnnnnnnnnnnnnnnnnnnnnnnnnnnnnnnnnnnnnnnnnnnnnnnnnnnnnnnnnnnnnnnnnnnnnnnnnnnnnnnnnnnnnnnnnnnnnnnnnnnnnnnnnnnnnnnnnctacgctggcaagctaatggtaagagatgcatttatgggctctgaggctttttttgctagggtgtgcagtgctatcctaacacagacttacagagccttgcagggctgttaattaacagcagagctgggaaactatcactgattgtcttgcagacctgggagaggtgagcctkgggacaaggaaccctgaggaggggctcctttctttggagctgctgctgtttctggcctgcagcctgcagcaactctctgtgacatccctctggcaggacacaggcartgggtttgatggcagctttgtcccctcggggctctggtggctttgctgagcagattggctttgccttgttgagagcgcagcatcatttcccgtagcccagctgctctgggaggtgggcagccatacagtccatatctcaagctggggctgatgctttaattggggctggatgtgaggggggtggctggaagg

SEQ ID NO: 60934 - DNA, 599 bp, Chicken  19866894321019_2
  misc_feature (1)..(20): n is any nucleotide
nnnnnnnnnnnnnnnnnnnnctacgctggcaagctaatggtaagagatgcatttatgggctctgaggctttttttgctagggtgtgcagtgctatcctaacacagacttacagagccttgcagggctgttaattaacagcagagctgggaaactatcactgattgtcttgcagacctgggagaggtgagcctkgggacaaggaaccctgaggaggggctcctttctttggagctgctgctgtttctggcctgcagcctgcagcaactctctgtgacatccctctggcaggacacaggcartgggtttgatggcagctttgtcccctcggggctctggtggctttgctgagcagattggctttgccttgttgagagcgcagcatcatttcccgtagcccagctgctctgggaggtgggcagccatacagtccatatctcaagctggggctgatgctttaattggggctggatgtgaggggggtggctggaagggatggcrtgcagctgcatgggcccttgcccagcacagagctggcagcacgctccgtgacacaaaggaggatgaacaaaatctcccttggccaatgaagcaatttgtc

SEQ ID NO: 60935 - DNA, 600 bp, Chicken  19866894321019_3
aggaaccctgaggaggggctcctttctttggagctgctgctgtttctggcctgcagcctgcagcaactctctgtgacatccctctggcaggacacaggcartgggtttgatggcagctttgtcccctcggggctctggtggctttgctgagcagattggctttgccttgttgagagcgcagcatcatttcccgtagcccagctgctctgggaggtgggcagccatacagtccatatctcaagctggggctgatgctttaattggggctggatgtgaggggggtggctggaagggatggcrtgcagctgcatgggcccttgcccagcacagagctggcagcacgctccgtgacacaaaggaggatgaacaaaatctcccttggccaatgaagcaatttgtccccgtgagtcccacttgccaagctgtggctgctgccaggcttttctgcaggcttgtccactcagggagtctctggaaaatgaatctaaattaaccaaaggctggaatttccaaagaaggtacaaaacggccttaaaccctgatgtgaattatgctaggcagaatggagactacattgtgtgagtgctccatgcacccttg

SEQ ID NO: 60936 - DNA, 600 bp, Chicken  19866894321047_1
aagcaaaagcaaaatgatgccaaagcgaaaatgttagggcaggtcctaaaatgtgcatccagaagctctgtggcttagggttggctcctctttggctggcactgctgggttctgagcaactctggcttaggcgccgcatagcagagctcatcgctttcaatccatcctgcagtgtcactctgcgataaatactcagcctaacgactggatgagaatgaatgctttcaaacaaacatttactttgtctacacgtgggtgagcattcagaagagagccccacacgggagctgtgctgcacaytgacctggtactggcacgccaaacccttctgctgaaaggagccggtaaggtttagattgcaaacacacgataaattgtagttgaaatgatgccacgtaaacgaaaggattgaaaaacagctatgtatctctgtcctatttccctttccaggaaggaacatctcttgggtaatctaaaaacaaaacaaagtagcagaaaactttacttaacctcaagctaatttcctatccggactaaatttagctgctcagattctgtttggtgtgtgtgcctcccaacgcactgactttggggatgttt

SEQ ID NO: 60937 - DNA, 600 bp, Chicken  19866894321051_1
ttgccatggtaattaggaagatgcacagggtgtaatttatcgctgcagctcctgctctcaggtctcagctccctgccatcctggtgcaaacaccgagcgggttccttccaggctgcaaggtcaatcgctttccttccaagggaataaatcatcatttaaacccgagggaggaaaggggaattaaataataaacttcagggtttgctttgcagttgcacttattttgctttcttggtgaaggatcagttctgtgcggtgagggaacatttgattgtggtgctatctggagccttcacttcyaatttggcgctgcatttggatgatcaagatatatagatctgcactggacaggttcatctgcgcataaataactttatgactaaacacatacgtactcccttcctcacttcagttcccctgacgttgcagagttgagtaacacgggttttacccacgatgagctgtggttgggctgaaggtggaagtgcgaaatggcatctccgagacaggtttcgttaattgaaagtccatacagacagctcgttagccaaaaaagaaatgaatctgcctgcttttctgcrtttgaaattgagcttttaa

SEQ ID NO: 60938 - DNA, 600 bp, Chicken  19866894321051_2
atctggagccttcacttcyaatttggcgctgcatttggatgatcaagatatatagatctgcactggacaggttcatctgcgcataaataactttatgactaaacacatacgtactcccttcctcacttcagttcccctgacgttgcagagttgagtaacacgggttttacccacgatgagctgtggttgggctgaaggtggaagtgcgaaatggcatctccgagacaggtttcgttaattgaaagtccatacagacagctcgttagccaaaaaagaaatgaatctgcctgcttttctgcrtttgaaattgagcttttaagcagggaaaggctgccctgtgcagaagatgctgggcgggttgttttgggttactgtgtcctctgaggctgaggagcagcagatctcatcagctctcctaattctcatttagaggttkggtggggaaaacaacctcccctgtttgctgagcctccagccaatgtttcagccttggaggtatcagtcttggaactggatgaagtgcgggaagggaaatgttccctccgcagcgacaaattgtgccgcgaagatccccaacagcaataacaaatcatagcctaa

SEQ ID NO: 60939 - DNA, 600 bp, Chicken  19866894321051_3
ctgacgttgcagagttgagtaacacgggttttacccacgatgagctgtggttgggctgaaggtggaagtgcgaaatggcatctccgagacaggtttcgttaattgaaagtccatacagacagctcgttagccaaaaaagaaatgaatctgcctgcttttctgcrtttgaaattgagcttttaagcagggaaaggctgccctgtgcagaagatgctgggcgggttgttttgggttactgtgtcctctgaggctgaggagcagcagatctcatcagctctcctaattctcatttagaggttkggtggggaaaacaacctcccctgtttgctgagcctccagccaatgtttcagccttggaggtatcagtcttggaactggatgaagtgcgggaagggaaatgttccctccgcagcgacaaattgtgccgcgaagatccccaacagcaataacaaatcatagcctaagaaaccagagtggggttgttgactgcaaagcaggagttgggccagcgagcagaagtgcagaaccaagaaattaaaggagagccgataccaatctcccgttccatctgtaattgaggatatctcatcttctggagtg

SEQ ID NO: 60940 - DNA, 600 bp, Chicken  19866894321053_1
ccttttgaaaatcattaagctgtctgcattattgaagcatttctaaatgacaagaagtctagttctgaagagaacatatgaaatataatctaattactgcatgcatttgcatcagtaattgagattcatttcttcttaaaaccacagatttgagtttttactacttcgtcattatctttaagcaaaatgaaatttgattaaaaggccattaacaatttcaaatgtatgcctttttacctaggattttgtatataattaagtaaaaataatgcagatacacagaccacacacaaaaaaaamcagcagatctaaaagaaaatgataaggatatacagcacttggggttccattcctcaatttcttacctttccttatacagctacccaatttgaagaattagaattggtacattttaaacaaatatgctgagttatttacatttttacagagtgactcaccatggtggcatcctcaataattgagtagtttgcttggtgcaggtaatggtgcaatatgttacacagtaaacaagaaggattttcttgcaagaaacgagccactttggtgagtctgttgtacttgcttctcagaggaaagtgc

SEQ ID NO: 60941 - DNA, 600 bp, Chicken  19866894321067_1
ggatacaaaaaataaagactcgtggtacttggcaggaaattgagaaaaagaatgggtactagagatgggaacttcatttaggcagaagtgatggagaagaaagagcaataatccggttgcttaaaacacgtttaacaacacatgtacctactgagaaaccatagtgggtttatgttccatctaaatcaaaataaatacaaagagaatattaagattgcaaggtgaaacaacagaattaagaacaactttacatgttttatttgttaaccttatgaattctaaccttatgaattaggtacrcaactgtatacagtctggtctgcaagaccattacctgagtccttgagcaaatgtatttgaatatcacatttttgcaccattctgcaaagctataggagcaaaacaagtttaccaaatgggattaataatcattcacaactttgcaactcacaaatgaatgaaagctagtaaataaaccctataattacaaaggatttctttccaagaggcccttagttgatagatgagcatcttggacaagcttaataggtaggtaattagaaatgatggatgcaattaccaactttattccacgtatca

SEQ ID NO: 60942 - DNA, 566 bp, Chicken  19866894321070_1
aattcattaactcaaataatatgaaatatgttgatcccattgtttactgtaattgattttctgagctacaaaaagggtttgaattaaggagttattataatacattcaaaataatgtatttacagtggaattcctaggtcacagcccaaaccagtacatgagcacatgagtgcttgggggtgggttcagcctagatccaccctccctctcttcccatctcagcagtgcttccaggagagtgtatgcagtcacagtctgtgtggattttccctccagccttctccttcctgtgtgtcaaasttcaaactgtggaaggctacgttyctcagctcaccttttatatggcaaacaggtacaggaccagtgagataattgtgtttacaaaggagtaatgaaataaagaacttacctgtatcctaggctcacagaagagttccaagagagatggtctccagataaagatccttcctccttgggagccagcccttaaatggggtctaggaggggtggagcctggctccaccttcggtcactcaggtgaaatgcattcacctgtgcccctgcag

SEQ ID NO: 60943 - DNA, 542 bp, Chicken  19866894321070_2
aatatgttgatcccattgtttactgtaattgattttctgagctacaaaaagggtttgaattaaggagttattataatacattcaaaataatgtatttacagtggaattcctaggtcacagcccaaaccagtacatgagcacatgagtgcttgggggtgggttcagcctagatccaccctccctctcttcccatctcagcagtgcttccaggagagtgtatgcagtcacagtctgtgtggattttccctccagccttctccttcctgtgtgtcaaasttcaaactgtggaaggctacgttyctcagctcaccttttatatggcaaacaggtacaggaccagtgagataattgtgtttacaaaggagtaatgaaataaagaacttacctgtatcctaggctcacagaagagttccaagagagatggtctccagataaagatccttcctccttgggagccagcccttaaatggggtctaggaggggtggagcctggctccaccttcggtcactcaggtgaaatgcattcacctgtgcccctgcag

SEQ ID NO: 60944 - DNA, 600 bp, Chicken  19866894321092_1
cctcctcatacccaagaaatgtaggatgtgaacagaaatggttccactcacattgctaatcagcatgatccagatggcattctagtctgtaggaaccaaagaggtcctgaaaggaatagaggagcatttccttgtctaagcgtaagaaagcacaccccagcagtatcaacaaggctggatgaggaggatgtctgagccttgcatgtctacatgcacgaaacgtccagccttacagcagtgatggctcacaccttccccaggagagagcagtggggtctgagcagaccaaccaggaccccrgagcaccatagagaacagaaacagggacccctgctccagatggagctctttgttagggtctcctccagcttccctgctccagttctgagttcactcagtacaaaggaagtctccttcagacatctgtatattcgggttattcattatgaattgattagttcatcctacagtcaccctgatcatattcttcctatgtactaacatctcaatgaatgagcagtcaagtagaaaatgaatgcattagtgcctgattgtgttactaagctcttgtaaatgctaacgagtgcagcagtgtttaat

SEQ ID NO: 60945 - DNA, 600 bp, Chicken  19866894321095_1
cagagcctgaaaatttatctgtctgtggctggtacaactcattattccacatactaccactccataatgtcagggagaaaagatcagggtctggtacctttttcagttgccctatgttcactccctctccttccaggaactggcagctcttcctgtatatgaggcaggagaggtctggccctgaggtgatgctaaagcacacagccagagccaagctttgggctgagagaaaaggggtgggggaaacttagagggcaatagaaaagtaactctgggagttagaagagaaggtgaccatcyggtgcagagaagtccatccaacacccctgtctttcattttgctcttagctacctgtcagtgatacgctgtgkatttacaccaatctacacaacagcagcagctggttcactgtctcccagtggaaacgttaagccccttctcaatcgtctttgtagacagaacaaactgcactggcaaaagcttatttattcctgcaagtaaaaatgtttctgcttttagtcactgagagaaacactgagcctcctaccttatctttcagcttctccatccagcttctcactgaaaaagaagacaaaaaa

SEQ ID NO: 60946 - DNA, 600 bp, Chicken  19866894321095_2
gggagaaaagatcagggtctggtacctttttcagttgccctatgttcactccctctccttccaggaactggcagctcttcctgtatatgaggcaggagaggtctggccctgaggtgatgctaaagcacacagccagagccaagctttgggctgagagaaaaggggtgggggaaacttagagggcaatagaaaagtaactctgggagttagaagagaaggtgaccatcyggtgcagagaagtccatccaacacccctgtctttcattttgctcttagctacctgtcagtgatacgctgtgkatttacaccaatctacacaacagcagcagctggttcactgtctcccagtggaaacgttaagccccttctcaatcgtctttgtagacagaacaaactgcactggcaaaagcttatttattcctgcaagtaaaaatgtttctgcttttagtcactgagagaaacactgagcctcctaccttatctttcagcttctccatccagcttctcactgaaaaagaagacaaaaaaaaagttagaatcatcttacatatattaattagtaacagataataatcacagtattgaaatagatactaatta

SEQ ID NO: 60947 - DNA, 401 bp, Chicken  19866894321095_3
ttgtagacagaacaaactgcactggcaaaagcttatttattcctgcaagtaaaaatgtttctgcttttagtcactgagagaaacactgagcctcctaccttatctttcagcttctccatccagcttctcactgaaaaagaagacaaaaaaaaagttagaatcatcttacatatattaattagtaacagataataatcacagtattgaaatagatactaattaacttgacaagctgataacatttttcattagatttccactcttgtcgttcatgaagaagagaagatgaagcaaatcaasaagagaaactctttttgaaccagcacttctcatccacacactgggatgtcaggtaaccttaccccgtgctgtctccttcactggcctcctccacgcagagg

SEQ ID NO: 60948 - DNA, 599 bp, Chicken  19866894321096_1
  misc_feature (1)..(31): n is any nucleotide
nnnnnnnnnnnnnnnnnnnnnnnnnnnnnnntatttttatttttcctactatattctgtacaaatcgggcaaatgcaagatgaattagtaatatgaatgaacatcacacactgtgcaggaatactgaagaattactggaatgcttaatcaaattccacatctttacccactgacttcactaagattccttatgtgattgaagaattaaatttgatggatcagactcacatctccagctcttagaaaacgtcagatgaacagtaatatatcagccaaaacaatcttgctgaagaagcattmgttaatgcaagcatactgtatggactgccatttcagtaggtatctctctaaaccaaagaagtgaagccaagactcagccagcaaagtgatgagtaccactgaaatgtctgcagtaggaatctgctaaatagcagggacccgcctcattctttttgggtttgttttcccttgcatatgtacttagatgaattcasatgtgatattaggcatgctttagggctccagctggatcacactttacaagagcctgactcatggacattttggtgttcactcttgattcatgtcagcaggacagc

SEQ ID NO: 60949 - DNA, 600 bp, Chicken  19866894321096_2
gattgaagaattaaatttgatggatcagactcacatctccagctcttagaaaacgtcagatgaacagtaatatatcagccaaaacaatcttgctgaagaagcattmgttaatgcaagcatactgtatggactgccatttcagtaggtatctctctaaaccaaagaagtgaagccaagactcagccagcaaagtgatgagtaccactgaaatgtctgcagtaggaatctgctaaatagcagggacccgcctcattctttttgggtttgttttcccttgcatatgtacttagatgaattcasatgtgatattaggcatgctttagggctccagctggatcacactttacaagagcctgactcatggacattttggtgttcactcttgattcatgtcagcaggacagcagaagctcctggcattttaagtaggcagatggaagagtaatataagctgtatattcatttaatgtatgtgagaacacagacatttcactgtagcccaagctcagctgcactgactcagaagcagtccaaaggtgctctctgaggacatcagcaacatccatcacagctgctgtcacacacactggctcagcattg

SEQ ID NO: 60950 - DNA, 600 bp, Chicken  19866894321100_1
tatattctaaatttgtcctttcaggctgcctatctcccatgagaaactcagtaagatgggtggattttggaggggtttcgttttacaattccaactaagcatgtgtctatttcttttggttaattgagcaaacaatgcccttgatagccatttcctttcactagagtcaaaggcaaggcaattaactaattgccagaaggggttgttaactgctgataatgatccactattgagaaaattattattaagtactgatagatagcgtgagcatgagtgaaagggaaaaacacatctgataaygtttctgataattttatacttcttccttcaaatgtgttataacatgtagacttaaagatataacatcttccattcccactaaagaaaaaaataagagaaaaaagatatttactctttagtgcaagaacattcttgctgttaagaattactacttgtggtaagcaatgacataagttttcaagaaaactgcaaattgactcttaacatttcgtgttgaaattagacacttagtctcgaaatatataaactggatgggtatacccgtagtatatataacaatactttactagtacttacaag

SEQ ID NO: 60951 - DNA, 562 bp, Chicken  19866894321103_1
agactgccagtacttgaagcaaacttagaaacaagagggagatcaactttttccattttcagatagtgataggacaagagtaaatggttttaagctaaaagaagggagatttagattagatattacgtggatttttttattattatttttttattttctaaactcagagggtgatgaggcactggcacagactgcccagaacagctgtgggtgcctcatccctggaggcattcaaagcgagatttaacaaggccttgggcagcctgatctggtgagtggcaaccctgcccacagtactgsattggaactcaattaaggtccttcccagcccaagccattctatgattctatgaaaaataccttacttgtgtatttgcttttctagctgttagtccttgttggacttacacattgttggagccacacgttctctgaaagagcacataggacagaatgtttacaagaagattaatgatcaaaaactgcccaaagctcttccatgcaaatttcacaattgcttcaaagttactcagcaatcttatcttactttcataaagctgag

SEQ ID NO: 60952 - DNA, 600 bp, Chicken  19866894321108_1
caccttgaattagcagctaagcatgttgtttttgtgtttgtttgttttaaataccgatcactttgttcatactccatacttcctggtccaagcagagtcccatgcatagcagagagcacttgcagggcacgttcctaacgttgttttagctgtaatgtttgctaccttaatctacagagaagcaggcagtagctgaagtcaggtaaaaaggtaaccttgataggatagtcctcatttaatactgcagttagatactgtaatgggacctgaaaggaaagttcaaaataggaccatgaaagrgaaaccccagcagaaccactgcagcacagaaactggtggtgtattctgacctcatgatattggagacatcttatagtaaagaaccatttttttycccccccactttgttcttgactcatctcagatgaacagcacgctgaattgagccttctcctgcttcagtctgcaccttacsgttgtttttgcagacacttgctatttgcaggctaacatggcttgtgatgggtttcttactaaaacagtctgaagacaataaccacgggaagcatccaaaccctgagatttggctactactcaaga

SEQ ID NO: 60953 - DNA, 600 bp, Chicken  19866894321108_2
gagtcccatgcatagcagagagcacttgcagggcacgttcctaacgttgttttagctgtaatgtttgctaccttaatctacagagaagcaggcagtagctgaagtcaggtaaaaaggtaaccttgataggatagtcctcatttaatactgcagttagatactgtaatgggacctgaaaggaaagttcaaaataggaccatgaaagrgaaaccccagcagaaccactgcagcacagaaactggtggtgtattctgacctcatgatattggagacatcttatagtaaagaaccatttttttycccccccactttgttcttgactcatctcagatgaacagcacgctgaattgagccttctcctgcttcagtctgcaccttacsgttgtttttgcagacacttgctatttgcaggctaacatggcttgtgatgggtttcttactaaaacagtctgaagacaataaccacgggaagcatccaaaccctgagatttggctactactcaagaacaacaatggctcagagttctttggctgcagtactccragagacatgacatgagcaggatcctgagacacatctttgtcttgtagcatgaagca

SEQ ID NO: 60954 - DNA, 600 bp, Chicken  19866894321108_3
agagaagcaggcagtagctgaagtcaggtaaaaaggtaaccttgataggatagtcctcatttaatactgcagttagatactgtaatgggacctgaaaggaaagttcaaaataggaccatgaaagrgaaaccccagcagaaccactgcagcacagaaactggtggtgtattctgacctcatgatattggagacatcttatagtaaagaaccatttttttycccccccactttgttcttgactcatctcagatgaacagcacgctgaattgagccttctcctgcttcagtctgcaccttacsgttgtttttgcagacacttgctatttgcaggctaacatggcttgtgatgggtttcttactaaaacagtctgaagacaataaccacgggaagcatccaaaccctgagatttggctactactcaagaacaacaatggctcagagttctttggctgcagtactccragagacatgacatgagcaggatcctgagacacatctttgtcttgtagcatgaagcatgtaatactgattgcattgttttacccctctcttgcaatttcagcctttaaggtgtggtagtgaggcacactgaacaattc

SEQ ID NO: 60955 - DNA, 598 bp, Chicken  19866894321108_4
gtgtattctgacctcatgatattggagacatcttatagtaaagaaccatttttttycccccccactttgttcttgactcatctcagatgaacagcacgctgaattgagccttctcctgcttcagtctgcaccttacsgttgtttttgcagacacttgctatttgcaggctaacatggcttgtgatgggtttcttactaaaacagtctgaagacaataaccacgggaagcatccaaaccctgagatttggctactactcaagaacaacaatggctcagagttctttggctgcagtactccragagacatgacatgagcaggatcctgagacacatctttgtcttgtagcatgaagcatgtaatactgattgcattgttttacccctctcttgcaatttcagcctttaaggtgtggtagtgaggcacactgaacaattcaggcaccattttttcagcatctcttgatgatgagttgagtagcattttcttggcaacaacacttagaatatgaattcagtgggcttctaccagtgtgcatacgctgagttattggagacaattagctcgtgctctgcaagcacctttatcattcctgacaa

SEQ ID NO: 60956 - DNA, 600 bp, Chicken  19866894321113_1
ttcagaatagagttttgccactttagagataatccatgaaagccctcttcctgcagactgcaataaatcatcccctccactaaaagcctggatgtcatttgaaatttattgcatggagctggtagtggacttaaaagccatttcacatgtcttattactccagtcatctaatttatggatttcagccacaattgtagttggaaaagtactttccttcaactgattaatatgatttctgcttttgcattcatttccctttttatatttttctataatcattgcaggagactttggcacccygggttcagataggaaactgaaagaaaggtgccaagacagactgatgcagattgactacgctttactggctcttagcagcacttgtcaaaaggcatcttagttattgttagttgagcaatctcgccctaggaaagaaaaagctgtcggaagcttccttgtttaacacaagaatctgtagctccaaggaggcagcatgaaagcaacctattaaacacaaatgaggtaagcataagtaacgcacttaacacaaagaatgataagatattgcagcatttttcttttcatttcttagtgtgaaaa

SEQ ID NO: 60957 - DNA, 538 bp, Chicken  19866894321113_2
agattgactacgctttactggctcttagcagcacttgtcaaaaggcatcttagttattgttagttgagcaatctcgccctaggaaagaaaaagctgtcggaagcttccttgtttaacacaagaatctgtagctccaaggaggcagcatgaaagcaacctattaaacacaaatgaggtaagcataagtaacgcacttaacacaaagaatgataagatattgcagcatttttcttttcatttcttagtgtgaaaactagtctgaatttactgccataggtagaatgcctttttgtttctctycaggctgatctctgtaaggaaaggcagtatgaagaagtacggaccttaaccccaagagggaccatttattcattttaggagtttagtcttacgctaaattccattgatatgcatcgtaggtgaactagtagctctgcagcacgtgtgtatgtggtttgcatgtatacttgcataaataatttatgatgcatgttatgaaagtatcaaaaatttgactggcactttccagaaggaaata

SEQ ID NO: 60958 - DNA, 600 bp, Chicken  19866894321115_1
gtaacatgagggtgagtgtgacgctagaccagcaggctcagggcactgcgagggtatccttccagcccaacctccaccccagcactagctggtggcacacagcgagtggtctggggtggcagacactgtggccctaagctgctcctggccactgcaggcagagaggggagggatgctctgaagcactcctatatcccaagcaaacctggtgagacacagaggtggctgcaccttttccatggacgcagagacaccctgtctatactctttccaccacatcttttcattcagtcacagcasttcacttcagcaggtgacatccccacctatgtttgcttgcagtcagggaccccagatcgggcacccagttcccgtaaagcaagaggataactcacccctgagggaggatgcaccatccagcccagctctgctgtggccgttgtggagtccatcagcgtctctgcaggaggaaggggaaacaaggagtcagtccatcactttccagttacatttgcagaaggggaacactttttctttgccttctgcatggtaggcagtatcctcagccatgcagcagcrgtttggaaggaaaagcacttc

SEQ ID NO: 60959 - DNA, 600 bp, Chicken  19866894321115_2
cttttcattcagtcacagcasttcacttcagcaggtgacatccccacctatgtttgcttgcagtcagggaccccagatcgggcacccagttcccgtaaagcaagaggataactcacccctgagggaggatgcaccatccagcccagctctgctgtggccgttgtggagtccatcagcgtctctgcaggaggaaggggaaacaaggagtcagtccatcactttccagttacatttgcagaaggggaacactttttctttgccttctgcatggtaggcagtatcctcagccatgcagcagcrgtttggaaggaaaagcacttcaaggayttgccacacttaaaaattaaaccaacattaaagccaattttccaggcaatttgggcagaaataggtcagatgctgctatcgctaatcagcactgaacagcrgcagaggatggcttaggaaggtcacactgcatgcccaagcaagacacaaacatgaaatccatcttgcagcttcaatttccctgccctcccacttactacagaacaggcaaggaaagagtcctttttttatggctctgcagctctcaagaaaaagcaccatatgtacaaggtg

SEQ ID NO: 60960 - DNA, 600 bp, Chicken  19866894321115_3
tcagcaggtgacatccccacctatgtttgcttgcagtcagggaccccagatcgggcacccagttcccgtaaagcaagaggataactcacccctgagggaggatgcaccatccagcccagctctgctgtggccgttgtggagtccatcagcgtctctgcaggaggaaggggaaacaaggagtcagtccatcactttccagttacatttgcagaaggggaacactttttctttgccttctgcatggtaggcagtatcctcagccatgcagcagcrgtttggaaggaaaagcacttcaaggayttgccacacttaaaaattaaaccaacattaaagccaattttccaggcaatttgggcagaaataggtcagatgctgctatcgctaatcagcactgaacagcrgcagaggatggcttaggaaggtcacactgcatgcccaagcaagacacaaacatgaaatccatcttgcagcttcaatttccctgccctcccacttactacagaacaggcaaggaaagagtcctttttttatggctctgcagctctcaagaaaaagcaccatatgtacaaggtgtgcacccacycagcttcagcttgctca

SEQ ID NO: 60961 - DNA, 600 bp, Chicken  19866894321115_4
atgcaccatccagcccagctctgctgtggccgttgtggagtccatcagcgtctctgcaggaggaaggggaaacaaggagtcagtccatcactttccagttacatttgcagaaggggaacactttttctttgccttctgcatggtaggcagtatcctcagccatgcagcagcrgtttggaaggaaaagcacttcaaggayttgccacacttaaaaattaaaccaacattaaagccaattttccaggcaatttgggcagaaataggtcagatgctgctatcgctaatcagcactgaacagcrgcagaggatggcttaggaaggtcacactgcatgcccaagcaagacacaaacatgaaatccatcttgcagcttcaatttccctgccctcccacttactacagaacaggcaaggaaagagtcctttttttatggctctgcagctctcaagaaaaagcaccatatgtacaaggtgtgcacccacycagcttcagcttgctcaccaggagatcaccgatatagtcaagatgtccagtcaccagcctacagatccaacagacagccctgatatagtcaagatctccaatcaccagcctacagatc

SEQ ID NO: 60962 - DNA, 518 bp, Chicken  19866894321115_5
aaaagcacttcaaggayttgccacacttaaaaattaaaccaacattaaagccaattttccaggcaatttgggcagaaataggtcagatgctgctatcgctaatcagcactgaacagcrgcagaggatggcttaggaaggtcacactgcatgcccaagcaagacacaaacatgaaatccatcttgcagcttcaatttccctgccctcccacttactacagaacaggcaaggaaagagtcctttttttatggctctgcagctctcaagaaaaagcaccatatgtacaaggtgtgcacccacycagcttcagcttgctcaccaggagatcaccgatatagtcaagatgtccagtcaccagcctacagatccaacagacagccctgatatagtcaagatctccaatcaccagcctacagatccaacagacagccctgatacagtcaagatctccaatcaccagcctacagatccaatagacagccataatacaggcaaggcctccagccatcagcctacagg

SEQ ID NO: 60963 - DNA, 600 bp, Chicken  19866894321116_1
atagatgggactaatttttaaaagaattttagttaactgttaccaattttgatggagatgataatgctctttcaaaagaaaatcaggatcttgtcaatggctcagaacttaattcgttgcatttctatggatgcagtgctttcaaacgaaaaagaaatacttttctttctccctccagcccccagcattgggaatgtagcatctcactttgcagtaatgttttccttccaactcgggatattctatgattctatgactccataaagaattcaaaaaggtagaaaattcaaagtttttttktttttttttttttaatctcagtcgttgctcgaaagcctgacttgccatgtatgtttttaccttcagttttgtagatttgaggaaataaaatagaacttggtttttgcaccactgaaaaagacaaaagggaagaaaggagtcacagatttaggacacagaagagatgatacaagccaattcatcactgttattgacatggctctgactctactggcttcgagagacccatttaatgtatctttacaaattctgactcaagtgctaatttgctaaactaggtgtctctgtgaccacwgcctt

SEQ ID NO: 60964 - DNA, 600 bp, Chicken  19866894321116_2
ttttktttttttttttttaatctcagtcgttgctcgaaagcctgacttgccatgtatgtttttaccttcagttttgtagatttgaggaaataaaatagaacttggtttttgcaccactgaaaaagacaaaagggaagaaaggagtcacagatttaggacacagaagagatgatacaagccaattcatcactgttattgacatggctctgactctactggcttcgagagacccatttaatgtatctttacaaattctgactcaagtgctaatttgctaaactaggtgtctctgtgaccacwgccttaaatgttcttcacgcatctctgcacgtagtgtatgttgatcagtataggcttgaagtatgagtctaaacttgatacaattcgttgagaaagaaaggtagggaggctcaaaaagggctaatgcagtctgatgcatcagaaagcaaataggaaaatgcttttgatgtatggagaacagatacttctgaattgtatttctgtcctttttagtttgggaactcttcccatgcttaaggcttgagtgtgtggctttgaaatagggacctcacaacctgcatgggtttttgatttctgatg

SEQ ID NO: 60965 - DNA, 600 bp, Chicken  19866894321118_1
cgctggggaggagagaggcagactgccgacaatgtgctgaaggtcacacaggcaccgcagtgacagagcagggatcagccccacgtcccagctccattcctaagccacgccgcttcccagctcctcttttacacctctctttgcatgccatcaaagcaaaacaagcaaacccggagcaagcggagcgctccccatgggaaggcacgtgcccacctctatgcacacggacagacctcgctccccaccccatgtctgccctgtggatgaaagcagctccgggacgcggctcgcggtgccacrccgtcattcaccgttcggttcattacatggaaatgaactccgctccccggcgtcggggggacagagagtaattgggttctgcgaaaccttcccacttaayttactcaagttgtatttatttctggcagaattcagttttagtggtggatagacaggacttcagaaaaggcaaagggagacggatggaataataaactcgtatcaagaaaagcaacctctctccatctgcccttcctcccagtctcagccatctctctgccattttctcccctttcactacaggaggtgttgggctgctgc

SEQ ID NO: 60966 - DNA, 600 bp, Chicken  19866894321118_2
taagccacgccgcttcccagctcctcttttacacctctctttgcatgccatcaaagcaaaacaagcaaacccggagcaagcggagcgctccccatgggaaggcacgtgcccacctctatgcacacggacagacctcgctccccaccccatgtctgccctgtggatgaaagcagctccgggacgcggctcgcggtgccacrccgtcattcaccgttcggttcattacatggaaatgaactccgctccccggcgtcggggggacagagagtaattgggttctgcgaaaccttcccacttaayttactcaagttgtatttatttctggcagaattcagttttagtggtggatagacaggacttcagaaaaggcaaagggagacggatggaataataaactcgtatcaagaaaagcaacctctctccatctgcccttcctcccagtctcagccatctctctgccattttctcccctttcactacaggaggtgttgggctgctgctaaaacgcccaacrtcgtcacaacgtgcctttgtgaagggtgaccttactatctgggttcatcccaacatgggaagaagggtatttagcgcgggttaaag

SEQ ID NO: 60967 - DNA, 600 bp, Chicken  19866894321118_3
tcggttcattacatggaaatgaactccgctccccggcgtcggggggacagagagtaattgggttctgcgaaaccttcccacttaayttactcaagttgtatttatttctggcagaattcagttttagtggtggatagacaggacttcagaaaaggcaaagggagacggatggaataataaactcgtatcaagaaaagcaacctctctccatctgcccttcctcccagtctcagccatctctctgccattttctcccctttcactacaggaggtgttgggctgctgctaaaacgcccaacrtcgtcacaacgtgcctttgtgaagggtgaccttactatctgggttcatcccaacatgggaagaagggtatttagcgcgggttaaagcgctccctcagaacaatctgctgcgtttaatgaaaccaaaacatgtgcgagaacctattgattgtgttgacattttcagagaaaaaattatcaaaatgttatttttgataaggttgaagtacttcatttcagcatattataattacatctgatatccttatggagagaaatccagaacgtaatatgaaagccagaaaaaaaaaggcctccattt

SEQ ID NO: 60968 - DNA, 600 bp, Chicken  19866894321124_1
cattaccccactacctgcttagcttgctcgctccagtccttctattcctcagtacactctgcacccctctgctttcccattccttcccctgcctccagctcacggacaatcccctcctcagttctcccactgttctcagaaccacacgctattcttctcagcattctcctcctccacaaatgtcagtgtcactcacgatcctagaaaataccaagggacagcacccacaaatccacacagccacaggcactggcatctttcccacttgcctgttttcacaccctgtacctaggcatgagrggagctggctactgcactgctgctgcatgtgacygaaagccagggcagcccttttccagaaggttggccacacmaagcactagttttgctcctttacttcctgctggtaaatctgaacccaaagaagcataccagagtcagacagccctctgggtaattatccagtaaggacttcacctkcctctgctcaagtttgtcatcttgttcatttgtggaaatgataagaagaaacagcagcagcaaactgtgaatttgccttcttttgccagctcatttggaatatacttaagaagacaaggt

SEQ ID NO: 60969 - DNA, 597 bp, Chicken  19866894321124_2
agtccttctattcctcagtacactctgcacccctctgctttcccattccttcccctgcctccagctcacggacaatcccctcctcagttctcccactgttctcagaaccacacgctattcttctcagcattctcctcctccacaaatgtcagtgtcactcacgatcctagaaaataccaagggacagcacccacaaatccacacagccacaggcactggcatctttcccacttgcctgttttcacaccctgtacctaggcatgagrggagctggctactgcactgctgctgcatgtgacygaaagccagggcagcccttttccagaaggttggccacacmaagcactagttttgctcctttacttcctgctggtaaatctgaacccaaagaagcataccagagtcagacagccctctgggtaattatccagtaaggacttcacctkcctctgctcaagtttgtcatcttgttcatttgtggaaatgataagaagaaacagcagcagcaaactgtgaatttgccttcttttgccagctcatttggaatatacttaagaagacaaggtcactgtgatttgataattcttaaatggatat

SEQ ID NO: 60970 - DNA, 557 bp, Chicken  19866894321124_3
tcccattccttcccctgcctccagctcacggacaatcccctcctcagttctcccactgttctcagaaccacacgctattcttctcagcattctcctcctccacaaatgtcagtgtcactcacgatcctagaaaataccaagggacagcacccacaaatccacacagccacaggcactggcatctttcccacttgcctgttttcacaccctgtacctaggcatgagrggagctggctactgcactgctgctgcatgtgacygaaagccagggcagcccttttccagaaggttggccacacmaagcactagttttgctcctttacttcctgctggtaaatctgaacccaaagaagcataccagagtcagacagccctctgggtaattatccagtaaggacttcacctkcctctgctcaagtttgtcatcttgttcatttgtggaaatgataagaagaaacagcagcagcaaactgtgaatttgccttcttttgccagctcatttggaatatacttaagaagacaaggtcactgtgatttgataattcttaaatggatat

SEQ ID NO: 60971 - DNA, 451 bp, Chicken  19866894321124_4
tgtcagtgtcactcacgatcctagaaaataccaagggacagcacccacaaatccacacagccacaggcactggcatctttcccacttgcctgttttcacaccctgtacctaggcatgagrggagctggctactgcactgctgctgcatgtgacygaaagccagggcagcccttttccagaaggttggccacacmaagcactagttttgctcctttacttcctgctggtaaatctgaacccaaagaagcataccagagtcagacagccctctgggtaattatccagtaaggacttcacctkcctctgctcaagtttgtcatcttgttcatttgtggaaatgataagaagaaacagcagcagcaaactgtgaatttgccttcttttgccagctcatttggaatatacttaagaagacaaggtcactgtgatttgataattcttaaatggatat

SEQ ID NO: 60972 - DNA, 599 bp, Chicken  19866894321132_1
  misc_feature (1)..(23): n is any nucleotide
nnnnnnnnnnnnnnnnnnnnnnncagagcttgttcggaacaagatgtgcagagcatgttggaagttctcttcttgttgtgactccaggctcaccaaattcaccacgtccaaaagtcacgtgcattcctgtgtcatttgatgcgtttcagagtctcatcccctgacaaggcagggagctggtaggagccggggcctttgggaagtaggacttgcctttacctacccagctgcttcatacctggtggtgacagcctctggagaggcagctcaggtgtttcactctgggtgcagaccacagcrttgcccttgggaagagcctggatttggtttctctgttacttggcccaatgtgctcctgtcctgggctctcctctggcccagtgtcttgcaccgacccccctcccagctgattcccagtgctttccagcagcgttttccacccktgctgtttctcctgcctttcacttgagggccttctgaggctggcagcgctcagatcacatatctgcctgacaaatgctgcaccagaggttactgcgttcgactctcaaccccactgcccctgggtgggggcacggaggtgtcagtcctctgcccgc

SEQ ID NO: 60973 - DNA, 600 bp, Chicken  19866894321132_2
tttcagagtctcatcccctgacaaggcagggagctggtaggagccggggcctttgggaagtaggacttgcctttacctacccagctgcttcatacctggtggtgacagcctctggagaggcagctcaggtgtttcactctgggtgcagaccacagcrttgcccttgggaagagcctggatttggtttctctgttacttggcccaatgtgctcctgtcctgggctctcctctggcccagtgtcttgcaccgacccccctcccagctgattcccagtgctttccagcagcgttttccacccktgctgtttctcctgcctttcacttgagggccttctgaggctggcagcgctcagatcacatatctgcctgacaaatgctgcaccagaggttactgcgttcgactctcaaccccactgcccctgggtgggggcacggaggtgtcagtcctctgcccgcaggtggggaaggcctgttgcagggtgaggacgtgccagcctttgcacagcccctctgccttctcccttctgcagtaggcctggctgtgcagccgcgtggccttggggcacgccatgctgcagcaatgggtggcgggctgtgcgg

SEQ ID NO: 60974 - DNA, 448 bp, Chicken  19866894321134_1
aggaggacaccccacaacccctgggcagcccatgctgctgctcagccacccgcacagtgaagtgcctcctgatgggcagagggaacctctcatgccacagaggctgctgcctcttgtcctggtactgtgcagtgctgagcagagcctcctccatcctctgtgcccctcccagcagcatccgtgggcactgatgggacccccccaagctgctgcttctccaggctgagcagccccagcattgagccctggggcatgttgctcattcctggcctccaaccagaccttgcaccattgaccacygtcaccggacccatccaggtggttctcagtcttcctctccatctcctccacatcattctgtgcatctgtgatctcttcatccagcccaatgctcaacggcttctctttgaaggtatgtgggggaatgagtgtcacaggcaatactgaa

SEQ ID NO: 60975 - DNA, 600 bp, Chicken  19866894321143_1
ttcaggctcagctctaggaaatgtttcactcctaagttcaaattggtcatgtctttcctcttaagcagccagaatggttttgctcccagggctgagatggagcacctcctgctgctctggggtacctgcaaaggatgctgaaacctatgctaagacaatacattttgcctctgttgtttcaccaggcccactctgtgctattcctactcacattcaggaaataggtccatcacaggtaacaagtcagctcagagattctatggacaccaactttgcaccccattttgagtaccgatgcaragacccatattaaattattctgaaaagtaagtggcctgtattctaaaatccaagaatccaattctaaaatctaaaatttaagacttctctgttagcagaaaagcatgagtgtgcagcaggctgtgcagctcctgtgcccacactcagctgagtagctgaggttcagatgtggcgggggaaagcaccacgatgctgaactgaaacagtcactgggggtccctgtgtcaatcaggcaagtcaagctgttcttcagtagctctgggacctggaaatttggtaccacagagcctcatctgcctc

SEQ ID NO: 60976 - DNA, 600 bp, Chicken  19866894321143_2
tgcactagttatccaaagtcatggtgatgctgattggtacttctaaagcaaaacgaagggcattcctttgttaaagaaatataggggaccaccgagatcatgactgtcactggaaacacagccccgtttctttctacttgggaactattgttcttaacttatatggttaggccaagatctctcacggtgattaatgagtcagggtgtttctgctttcggatgcccagtttgacattcattaaacagactcagatctcagatgatacggatcaggaggcagcctcaaagtttcccagcctrcaagtctggcagccaaaaactgggacatttagaatagcaccaaagaaaatcagccctctggaaattattgtcatcagacgtagcaaacactcacagcccctgcatgaaatctggcttttcatttaattcaaactaagtgtaaaatccattttgagaattttcttattgcctttattcacagttgctgaaataaacatgtcacaaggatcaacatgccaaaatgctttgaaaatttgaaaagtttgttcctgactcaagccaaaatgtgaattgcagtaagcagacatatcttctgttctg

SEQ ID NO: 60977 - DNA, 600 bp, Chicken  19866894321148_1
gtcacatctttgtttttaaacatatcaaaacattctctggatgttcagcatacatttttcaccatgtacaactacaggtaatgtggctagaacatagttttaggaggctgaattaattgtcatggtcagagatcttcagtgctctcagagcagcgtcagtggaaggaaaactcatgcaaatgggaaggttcatctgcaactgtgaaatacagggaatataaaatgagggaatgtcacttcgatcatattccctgaactccataacagtttgcaaactatctagtcagaattccctctccrctttgttggacttagcttaaagaagtgcaatggtaaataaataaataayctctaattgtaggactttttctaaacatagattccttcctgtgaaactgtcagtgccctgtgccttctctccctttcacttcttccattatattgtatcaaagtaatgctatttgcttctgttgtttacgagaagccatttggtccctgccctgaagaataaaaatctgtattataggctgaaaacacttcatggaaaaattctgactgtttgccttccatattttaaaaaggatatttataccaccaggt

SEQ ID NO: 60978 - DNA, 600 bp, Chicken  19866894321148_2
atacatttttcaccatgtacaactacaggtaatgtggctagaacatagttttaggaggctgaattaattgtcatggtcagagatcttcagtgctctcagagcagcgtcagtggaaggaaaactcatgcaaatgggaaggttcatctgcaactgtgaaatacagggaatataaaatgagggaatgtcacttcgatcatattccctgaactccataacagtttgcaaactatctagtcagaattccctctccrctttgttggacttagcttaaagaagtgcaatggtaaataaataaataayctctaattgtaggactttttctaaacatagattccttcctgtgaaactgtcagtgccctgtgccttctctccctttcacttcttccattatattgtatcaaagtaatgctatttgcttctgttgtttacgagaagccatttggtccctgccctgaagaataaaaatctgtattataggctgaaaacacttcatggaaaaattctgactgtttgccttccatattttaaaaaggatatttataccaccaggtatcagacttaggtgggctgatcccagctctaacagcacccatcccattt

SEQ ID NO: 60979 - DNA, 600 bp, Chicken  19866894321157_1
ggagctgcagactttcctccacgctctgagtcccctgtctggttgagagcagcagtcctggcagcagcgtgtggtcttgtcagatattacagaaggtttcatcccaaaactctaggaaaaagagcagaataactccttgatacctcactggtaacttcaacagactgattccagagatgaactgagtacaaaggaagaggaaaaaattgagcaaagtagcaactatataaataatttctgtacatatatttagatatacacataaacataaggtggaattctacaacttaatttgttttwgagtggcactggactagttcactgtggttgctatagtatgaatgtctcctgaacagtacctgtgcacagaraaaattatgttccttcatgcatcaacatttttgagttaatattcctctttattcctaagactgttgattagacccctttcaaactcagtatccactgtctgtgcattatgtgaatagtgttcagcacagggcattgctgaatctctgtcacaaacaacctaggaataaaaagatcagcattttcgggtttatttttcctgcattttgttaaaaaacacgccaggaattt

SEQ ID NO: 60980 - DNA, 590 bp, Chicken  19866894321157_2
tggtcttgtcagatattacagaaggtttcatcccaaaactctaggaaaaagagcagaataactccttgatacctcactggtaacttcaacagactgattccagagatgaactgagtacaaaggaagaggaaaaaattgagcaaagtagcaactatataaataatttctgtacatatatttagatatacacataaacataaggtggaattctacaacttaatttgttttwgagtggcactggactagttcactgtggttgctatagtatgaatgtctcctgaacagtacctgtgcacagaraaaattatgttccttcatgcatcaacatttttgagttaatattcctctttattcctaagactgttgattagacccctttcaaactcagtatccactgtctgtgcattatgtgaatagtgttcagcacagggcattgctgaatctctgtcacaaacaacctaggaataaaaagatcagcattttcgggtttatttttcctgcattttgttaaaaaacacgccaggaattttgaagaaatctaatgcataaatacatattttggtctgattcaataacatatacaattcaaa

SEQ ID NO: 60981 - DNA, 599 bp, Chicken  19866894321164_1
  misc_feature (1)..(73): n is any nucleotide
nnnnnnnnnnnnnnnnnnnnnnnnnnnnnnnnnnnnnnnnnnnnnnnnnnnnnnnnnnnnnnnnnnnnnnnnncatacaacttcttcagcttcagtgcacaaccctatgtacaaacttgatcagagggaatatagagtccataatgaattctacattaggaagttgaaaattgggctattcttcttgcaagactatgtcagcaacagagacatgaaaaacttttcagtagaaatctaaaaaaagtttccagatcatatcagtaagaaaatccccttctaagaacaggaggttgttttgaytgatgcctttgtctactgcagcaaacatcaaggaagatattaaacatttccatacaaaatcttaatcaaactggatgcataatataacaatctgaaaagtaacactatactgggctaatttcactataaaatgacttaatgttactcaaagtttttctttctgaacacaaaatgtttaacartgattctgggaaattcaagtcacactggcaataagacatgagcttctttttgttatgaaatactaaaataaagagaagagccattcctctgtgatagaaagtctcttttcactgatg

SEQ ID NO: 60982 - DNA, 600 bp, Chicken  19866894321164_2
tcttgcaagactatgtcagcaacagagacatgaaaaacttttcagtagaaatctaaaaaaagtttccagatcatatcagtaagaaaatccccttctaagaacaggaggttgttttgaytgatgcctttgtctactgcagcaaacatcaaggaagatattaaacatttccatacaaaatcttaatcaaactggatgcataatataacaatctgaaaagtaacactatactgggctaatttcactataaaatgacttaatgttactcaaagtttttctttctgaacacaaaatgtttaacartgattctgggaaattcaagtcacactggcaataagacatgagcttctttttgttatgaaatactaaaataaagagaagagccattcctctgtgatagaaagtctcttttcactgatgcactaaagaataacacataattcaagtgaaagagattttgataaatccctgtgcatctataggtagtcacttctacagccttgattgtacaaataacagcataattttatttcaggtatgtcaaaattttcacaaaccttgatgcaaattagaaactaaatgattatcagacaaagacgaact

SEQ ID NO: 60983 - DNA, 599 bp, Chicken  19866894321170_1
  misc_feature (1)..(98): n is any nucleotide
nnnnnnnnnnnnnnnnnnnnnnnnnnnnnnnnnnnnnnnnnnnnnnnnnnnnnnnnnnnnnnnnnnnnnnnnnnnnnnnnnnnnnnnnnnnnnnnnnngagctccactatttattctcttcgcttgttctcaaaacataatcttaaaaaggtttgctgtgtatcaagtttccagagctataaaattagcaactaccataacatgtgaaaacacagactggagaagagttgcataaactacgctgctatttgtttccagtggtgtacctgaacacagagtctctctttaagctcagtcacrtacgtttgtatctcttctccttgtagcattctgaagtacaccaaggtacacttttcatcatttcaaatgaataacttctactttttaagtctgagaattatatggtttcaagctgtatttggctacgtccattgagagggtgatctcacttatgcagttttaggaaatcacctggaccagcagctaaggacacagcaggaggaatttctcctccatggtattttaccagccaagttgcaaaggcaatggaaggggcacaatttaaaaaaataaataatrcacagtcttccatttacacg

SEQ ID NO: 60984 - DNA, 600 bp, Chicken  19866894321170_2
ctctctttaagctcagtcacrtacgtttgtatctcttctccttgtagcattctgaagtacaccaaggtacacttttcatcatttcaaatgaataacttctactttttaagtctgagaattatatggtttcaagctgtatttggctacgtccattgagagggtgatctcacttatgcagttttaggaaatcacctggaccagcagctaaggacacagcaggaggaatttctcctccatggtattttaccagccaagttgcaaaggcaatggaaggggcacaatttaaaaaaataaataatrcacagtcttccatttacacgacactgcatttaaaactgtctgtagtagcccacgtgccaggagtatttcagaggatgagtttggataaattacaatcattcttgtgtttctctttatgcccaaaaggaataaacattgaaaaaaaaaagaaaacttactgtcccatagggtaccatcgatgttttgtagtgtaaaacattttgctgagctcttcaattgtaagacctctatcattcttcagcttttcttcattcaatctggatttcagaacttgatcaagagtttcctctttgttattca

SEQ ID NO: 60985 - DNA, 600 bp, Chicken  19866894321174_1
actgtaacttcagttgtgtgttcagtattgtgtcttgccaatttggctattgatccagcccctctaaaaaagaaacaaaacaaaacaaaacaaacaaacaaacaaaaaacagtaaagagattcatatcttttaatcctgatgtttactcatttgatatatatctctcaagaatatacacatttaaggttttcctccatgtttttattgtttgtttgttgaaaaaaattaaagccacatagttcgatgaagattgagtaaaagacataatgtctggctttgagctttggcagtcagactgmtgaatactaygttaagagcattacgggatttatttaatcatttagttcaaaaaggaatagtcttcttggttccactgaaactgaactttctgggatacaagtaagcccaacaaaccacacattctctttgtgyggtgttaaacttccagactaagccatgaattgggaaagacagaattattctttggacagtttatgctcagattaattcttacacagttcagtagccctgttactttggaagaaatctttctgctttaaaatgtttctatgaaatattggtctggagattttggcata

SEQ ID NO: 60986 - DNA, 600 bp, Chicken  19866894321174_2
cagttgtgtgttcagtattgtgtcttgccaatttggctattgatccagcccctctaaaaaagaaacaaaacaaaacaaaacaaacaaacaaacaaaaaacagtaaagagattcatatcttttaatcctgatgtttactcatttgatatatatctctcaagaatatacacatttaaggttttcctccatgtttttattgtttgtttgttgaaaaaaattaaagccacatagttcgatgaagattgagtaaaagacataatgtctggctttgagctttggcagtcagactgmtgaatactaygttaagagcattacgggatttatttaatcatttagttcaaaaaggaatagtcttcttggttccactgaaactgaactttctgggatacaagtaagcccaacaaaccacacattctctttgtgyggtgttaaacttccagactaagccatgaattgggaaagacagaattattctttggacagtttatgctcagattaattcttacacagttcagtagccctgttactttggaagaaatctttctgctttaaaatgtttctatgaaatattggtctggagattttggcataaatcaaaact

SEQ ID NO: 60987 - DNA, 600 bp, Chicken  19866894321174_3
atcctgatgtttactcatttgatatatatctctcaagaatatacacatttaaggttttcctccatgtttttattgtttgtttgttgaaaaaaattaaagccacatagttcgatgaagattgagtaaaagacataatgtctggctttgagctttggcagtcagactgmtgaatactaygttaagagcattacgggatttatttaatcatttagttcaaaaaggaatagtcttcttggttccactgaaactgaactttctgggatacaagtaagcccaacaaaccacacattctctttgtgyggtgttaaacttccagactaagccatgaattgggaaagacagaattattctttggacagtttatgctcagattaattcttacacagttcagtagccctgttactttggaagaaatctttctgctttaaaatgtttctatgaaatattggtctggagattttggcataaatcaaaactatgttcattttaccatttgtcatatattcccaaatggagcttctatgaagtgctaaaatatcagaaaaatcaaactattcaatgatctgaaaagagatgaacaaccctggaagataatttttt

SEQ ID NO: 60988 - DNA, 599 bp, Chicken  19866894321175_1
  misc_feature (1)..(106): n is any nucleotide
nnnnnnnnnnnnnnnnnnnnnnnnnnnnnnnnnnnnnnnnnnnnnnnnnnnnnnnnnnnnnnnnnnnnnnnnnnnnnnnnnnnnnnnnnnnnnnnnnnnnnnnnnntttcttttcccagtgtgttttctttttttttcctgcagagtccattgtgtgagtagttcttagaagcaatttttcaggtctagaaaatggtttgcttagccataggtaagcaaaaaaagcttttcagttagctcctcttgctatcagaaggctggatctaatctttagtttacgttggttaattcaaggacacrgtcattcttagaagctggctttgattactgtagagagtttacagattcctgtccagtgccaaagcagtggaaagtcaccatgagtttaatctctggccttgctgacctgctcctgactggtgcacagaaacaccagttgctaagcagcccagtacatagcgcagggctctgcctatgaactctgaagagggtttataagagcattccagtttctctttgttgaaagaaccgatccgctgcatggagctgcatacttgatctgaccagaagtatgtctgagggtcacagccagatttgac

SEQ ID NO: 60989 - DNA, 600 bp, Chicken  19866894321176_1
ctccatgcacgtgagcgctgacagcacgcctgggagcacccggttacagggaggtgagccaggagccaggaggctgattgccctcagcttgggagggaattgttctgatgaacaccgcccgtgaaaaaaagccgaaagcttttctttcagagggaggaataaaagacctttgaagaaacaaggaagacaaacaccatctgcgaacatccggagggaccgtgagttgcagggtgcgggctgtgccctctacagcctgcagctccagctctgcactgggaggtcatccctcccagcctggcrtggtgggctttccagtggcggtggacccttcgtggctgtgcagctcctggagcggactcagcgctggcagagctgcacttctgcaggatggggggttcagagctccccacacagtttggaggctctgcgatggaggagatcctgaaacggagccagggagttttcttttgctctccctgctgcaagagcatgctggagaacttgagggctttgcaagaccttcccggggctttgctaatgaacccctccccgtgccacatatttcatcacgaaaacagaacgaaaccacagaagtccgcg

SEQ ID NO: 60990 - DNA, 600 bp, Chicken  19866894321177_1
ataaggaatgaagacttctttgtgggaattccctgtggtaatctgacttttgttgttactgctgcttgtcagtgtgcaaaagatataatatgcatgcaaataaggttaaaaaatatgtactatctaattatccagccagtacattccacttgaagacagtgggaggcctgacacacagtatgtgtttgattcattgaggcctgcagggtatttacacaagattacttttaattatgaaattaatatctgtttatctagtatgtataggagtaagtgagagtatacatgagcagaattttyagtaaaataaatgatctcaatatttaatatatataaaatataggcagaagaaaaagtccatgaatttatttccaaaataacagtgaagacctatgccatctttattgtcagaaaaatgtaattttaaagttatgctttaacttatagttgttgccataactgccagctcatttccaggtatgtcttttcacattaaagttttccttctatgcgtttaatccacaggtgtgaaatttaattcttgaagatcaaatatgaaatggaaaccttaatgtcaaaatggctcgctcttcagattta

SEQ ID NO: 60991 - DNA, 600 bp, Chicken  19866894321178_1
agaatccattggtaacacagtcttagatcaagaaagaacccaggcatataaacgtctctgagtagttccctcagtgtggactctggtttgccaagagtgctacagtggatgtgttaagaggatatgcttatctcaaaagataagttgaaccttatctctaagtaatcatcttgttgtgttcaggtgagattattaatcacatcttttaattagagaaatgcttggaagtgtgggcagtaactaaatgttttgctgacagtgtccttagtcagcctgcttaagcaagttaatcaaaccctyctgcatcaaaaaagtakggtctctaataaaaaacggactgtggtcaaagcccctggtgaagaagtgtgacataggaagcatatactaccttgaattgaacctagaaagagtcagctaagtctccttgattttgactattgccttctagtacagagcattaaaggaaaggctgactttgttaatacaaagattygtttccaaaaagggcagttcaaacagctgaaaaactgaagctragtgagaaaaaagagttaacttgaatttactccctgggctaacagtaatttcaaagttaacatt

SEQ ID NO: 60992 - DNA, 600 bp, Chicken  19866894321178_2
cagtcttagatcaagaaagaacccaggcatataaacgtctctgagtagttccctcagtgtggactctggtttgccaagagtgctacagtggatgtgttaagaggatatgcttatctcaaaagataagttgaaccttatctctaagtaatcatcttgttgtgttcaggtgagattattaatcacatcttttaattagagaaatgcttggaagtgtgggcagtaactaaatgttttgctgacagtgtccttagtcagcctgcttaagcaagttaatcaaaccctyctgcatcaaaaaagtakggtctctaataaaaaacggactgtggtcaaagcccctggtgaagaagtgtgacataggaagcatatactaccttgaattgaacctagaaagagtcagctaagtctccttgattttgactattgccttctagtacagagcattaaaggaaaggctgactttgttaatacaaagattygtttccaaaaagggcagttcaaacagctgaaaaactgaagctragtgagaaaaaagagttaacttgaatttactccctgggctaacagtaatttcaaagttaacattctgagaagttgctttga

SEQ ID NO: 60993 - DNA, 600 bp, Chicken  19866894321178_3
taatcacatcttttaattagagaaatgcttggaagtgtgggcagtaactaaatgttttgctgacagtgtccttagtcagcctgcttaagcaagttaatcaaaccctyctgcatcaaaaaagtakggtctctaataaaaaacggactgtggtcaaagcccctggtgaagaagtgtgacataggaagcatatactaccttgaattgaacctagaaagagtcagctaagtctccttgattttgactattgccttctagtacagagcattaaaggaaaggctgactttgttaatacaaagattygtttccaaaaagggcagttcaaacagctgaaaaactgaagctragtgagaaaaaagagttaacttgaatttactccctgggctaacagtaatttcaaagttaacattctgagaagttgctttgacagcaatcttggatctaatcctgcagcatgcaattagaattgtcattccatgtgatatttaaaatgtttataactggcttcaggttagcacagcagctgaatgtggctgagctatttttttcagatagcaactactgaagtagatgttatctgtgaagattatctcacataaacag

SEQ ID NO: 60994 - DNA, 600 bp, Chicken  19866894321178_4
gtaactaaatgttttgctgacagtgtccttagtcagcctgcttaagcaagttaatcaaaccctyctgcatcaaaaaagtakggtctctaataaaaaacggactgtggtcaaagcccctggtgaagaagtgtgacataggaagcatatactaccttgaattgaacctagaaagagtcagctaagtctccttgattttgactattgccttctagtacagagcattaaaggaaaggctgactttgttaatacaaagattygtttccaaaaagggcagttcaaacagctgaaaaactgaagctragtgagaaaaaagagttaacttgaatttactccctgggctaacagtaatttcaaagttaacattctgagaagttgctttgacagcaatcttggatctaatcctgcagcatgcaattagaattgtcattccatgtgatatttaaaatgtttataactggcttcaggttagcacagcagctgaatgtggctgagctatttttttcagatagcaactactgaagtagatgttatctgtgaagattatctcacataaacagcattcacgtttctaaaatgggaaatacatcgccataaagaaac

SEQ ID NO: 60995 - DNA, 599 bp, Chicken  19866894321183_1
  misc_feature (1)..(99): n is any nucleotide
nnnnnnnnnnnnnnnnnnnnnnnnnnnnnnnnnnnnnnnnnnnnnnnnnnnnnnnnnnnnnnnnnnnnnnnnnnnnnnnnnnnnnnnnnnnnnnnnnnnctcagcaaaggcgtggtgccaaggcaagcatgaagggaataccaaagaacaggctatgctgaaaggtcacacgtcacctcttacatgctcctcattcccttacactgtttttttaacctctgctgcccacagtcaagaaaaacagcttttccccatgctatcagggactctcctcaccccaccatccctttgctgaccccraagatcactggagtgctggtactgagccctccttccacccctcagccaagtactgccttcagacagagggggcttcagagatcccagtgctcagttattctctgaaaaatcaggccaaggtttggcayggcaaatgatttgcttcttccccctgacttcagcaactgctctgcaggaagcctcaggcttccctcagcagacatttgctggcgctctccaggctcaagctggctyacccccaacagcttcagcgagactcagtgcttcaacacatgcagtttggtgtgaaaggcactgaa

SEQ ID NO: 60996 - DNA, 600 bp, Chicken  19866894321183_2
atgaagggaataccaaagaacaggctatgctgaaaggtcacacgtcacctcttacatgctcctcattcccttacactgtttttttaacctctgctgcccacagtcaagaaaaacagcttttccccatgctatcagggactctcctcaccccaccatccctttgctgaccccraagatcactggagtgctggtactgagccctccttccacccctcagccaagtactgccttcagacagagggggcttcagagatcccagtgctcagttattctctgaaaaatcaggccaaggtttggcayggcaaatgatttgcttcttccccctgacttcagcaactgctctgcaggaagcctcaggcttccctcagcagacatttgctggcgctctccaggctcaagctggctyacccccaacagcttcagcgagactcagtgcttcaacacatgcagtttggtgtgaaaggcactgaaaaccattctcagaactgctctcctttgggagctgggcayggaagcactgcgctgtcacaggagagcccagggctttgccaggcgtgcacaccctcacagcaaacagctccgtgctttccttccacactc

SEQ ID NO: 60997 - DNA, 600 bp, Chicken  19866894321183_3
agaaaaacagcttttccccatgctatcagggactctcctcaccccaccatccctttgctgaccccraagatcactggagtgctggtactgagccctccttccacccctcagccaagtactgccttcagacagagggggcttcagagatcccagtgctcagttattctctgaaaaatcaggccaaggtttggcayggcaaatgatttgcttcttccccctgacttcagcaactgctctgcaggaagcctcaggcttccctcagcagacatttgctggcgctctccaggctcaagctggctyacccccaacagcttcagcgagactcagtgcttcaacacatgcagtttggtgtgaaaggcactgaaaaccattctcagaactgctctcctttgggagctgggcayggaagcactgcgctgtcacaggagagcccagggctttgccaggcgtgcacaccctcacagcaaacagctccgtgctttccttccacactctggacattcattaactctgcagcacaaacaagcgataaccctggagggctcgttgtgctgcactgcagccttattatccatctccattcagctactcggagtacgc

SEQ ID NO: 60998 - DNA, 506 bp, Chicken  19866894321183_4
ccctcagccaagtactgccttcagacagagggggcttcagagatcccagtgctcagttattctctgaaaaatcaggccaaggtttggcayggcaaatgatttgcttcttccccctgacttcagcaactgctctgcaggaagcctcaggcttccctcagcagacatttgctggcgctctccaggctcaagctggctyacccccaacagcttcagcgagactcagtgcttcaacacatgcagtttggtgtgaaaggcactgaaaaccattctcagaactgctctcctttgggagctgggcayggaagcactgcgctgtcacaggagagcccagggctttgccaggcgtgcacaccctcacagcaaacagctccgtgctttccttccacactctggacattcattaactctgcagcacaaacaagcgataaccctggagggctcgttgtgctgcactgcagccttattatccatctccattcagctactcggagtacgcctcagaagca

SEQ ID NO: 60999 - DNA, 599 bp, Chicken  19866894321188_1
  misc_feature (1)..(5): n is any nucleotide
nnnnnattacactgctcttgcttcctccgaaaaaaaaatcacaggagaaaaataattcccagccagctttaattttaattgattcatattcaatccaatgaggtcatgcatgtttaattatcatcagccttattatagatggaaaatcaacttcctctgatgttgctatgctaattatcatctcatttgtttagcaatggcatccagacaactgaatgagattaaggcaaacaaatagcaaaaggagccgcacgaaagccattacaaacagtgccagggttcagcaaagtacttcgccayggagctcacatttagctccacttcagccctcctgttcaagctctgcagtgaggaacgtgctygagcacttccccacgtcacactttcagcaaatggaagaggagaagtgggaggaaaaaaatcatcacgtttatttaagcgataggaatggaggtgcagagtaattaaagatgagcttttcaagggataaaatgtttctgaaaggcaagactgctggaaacgccagctcaggtctcttggattagactgacggtgaggaataaaacattcttggacagatttctctaaatcccctacag

SEQ ID NO: 61000 - DNA, 600 bp, Chicken  19866894321188_2
ccagctttaattttaattgattcatattcaatccaatgaggtcatgcatgtttaattatcatcagccttattatagatggaaaatcaacttcctctgatgttgctatgctaattatcatctcatttgtttagcaatggcatccagacaactgaatgagattaaggcaaacaaatagcaaaaggagccgcacgaaagccattacaaacagtgccagggttcagcaaagtacttcgccayggagctcacatttagctccacttcagccctcctgttcaagctctgcagtgaggaacgtgctygagcacttccccacgtcacactttcagcaaatggaagaggagaagtgggaggaaaaaaatcatcacgtttatttaagcgataggaatggaggtgcagagtaattaaagatgagcttttcaagggataaaatgtttctgaaaggcaagactgctggaaacgccagctcaggtctcttggattagactgacggtgaggaataaaacattcttggacagatttctctaaatcccctacagctcatcaccacgcatccgcagcccttggccaatgtgtcccctatgactgctgggcgccgagcc

SEQ ID NO: 61001 - DNA, 600 bp, Chicken  19866894321189_1
aatagctgaaaaagaaaaaaggtaatgtaaatgaatatcaagaggaatgcctccccacagataatctgtgcaatgtgaagtattccacttgaccttcaagcttctctctaatactatatcagaatatttaacaattgtgcttctgaaagaaacacaaaggaaattaacactccctttcaactaactactagtgggaaacacagcctcctttcacttctgtttgcttttaccagaggcagggcatgcgcccccatgttccaagatccactggtggggaagactgccacatactaaacactyttctctacaactgtcaattgggagtcactttgcaagggagattctcagtacttgttgagattagagactgcataaataaataaayaacaagagatctctgttgtkaagtgtagaaccagttatacctcagctctccggtcaactgttctcctcacttgactctcccaccttaggacctggatattgatttcttaccacagcaatagtcccctggagagaccaaagtggtcycacgtcagaattctgctaaattgcctttcattagaacactcttctagaaaggaggaaaatcataagctt

SEQ ID NO: 61002 - DNA, 600 bp, Chicken  19866894321189_2
cacttgaccttcaagcttctctctaatactatatcagaatatttaacaattgtgcttctgaaagaaacacaaaggaaattaacactccctttcaactaactactagtgggaaacacagcctcctttcacttctgtttgcttttaccagaggcagggcatgcgcccccatgttccaagatccactggtggggaagactgccacatactaaacactyttctctacaactgtcaattgggagtcactttgcaagggagattctcagtacttgttgagattagagactgcataaataaataaayaacaagagatctctgttgtkaagtgtagaaccagttatacctcagctctccggtcaactgttctcctcacttgactctcccaccttaggacctggatattgatttcttaccacagcaatagtcccctggagagaccaaagtggtcycacgtcagaattctgctaaattgcctttcattagaacactcttctagaaaggaggaaaatcataagcttgatatggagtaaggatttgaattaatgtctcccattcctgaactacatgttttagctacyaacttaaaaatactccaactgaaca

SEQ ID NO: 61003 - DNA, 600 bp, Chicken  19866894321189_3
ctctaatactatatcagaatatttaacaattgtgcttctgaaagaaacacaaaggaaattaacactccctttcaactaactactagtgggaaacacagcctcctttcacttctgtttgcttttaccagaggcagggcatgcgcccccatgttccaagatccactggtggggaagactgccacatactaaacactyttctctacaactgtcaattgggagtcactttgcaagggagattctcagtacttgttgagattagagactgcataaataaataaayaacaagagatctctgttgtkaagtgtagaaccagttatacctcagctctccggtcaactgttctcctcacttgactctcccaccttaggacctggatattgatttcttaccacagcaatagtcccctggagagaccaaagtggtcycacgtcagaattctgctaaattgcctttcattagaacactcttctagaaaggaggaaaatcataagcttgatatggagtaaggatttgaattaatgtctcccattcctgaactacatgttttagctacyaacttaaaaatactccaactgaacatagcccaggctataaagcaa

SEQ ID NO: 61004 - DNA, 600 bp, Chicken  19866894321189_4
agaggcagggcatgcgcccccatgttccaagatccactggtggggaagactgccacatactaaacactyttctctacaactgtcaattgggagtcactttgcaagggagattctcagtacttgttgagattagagactgcataaataaataaayaacaagagatctctgttgtkaagtgtagaaccagttatacctcagctctccggtcaactgttctcctcacttgactctcccaccttaggacctggatattgatttcttaccacagcaatagtcccctggagagaccaaagtggtcycacgtcagaattctgctaaattgcctttcattagaacactcttctagaaaggaggaaaatcataagcttgatatggagtaaggatttgaattaatgtctcccattcctgaactacatgttttagctacyaacttaaaaatactccaactgaacatagcccaggctataaagcaaatcactagcaaagtagcaaagggtattcaaggctgtttccgcttgttttctgatacaaaacttctgcatttctacttatcctgcatattataaacccttgccaatgtacacgtaagctatttaatg

SEQ ID NO: 61005 - DNA, 539 bp, Chicken  19866894321189_5
ttagagactgcataaataaataaayaacaagagatctctgttgtkaagtgtagaaccagttatacctcagctctccggtcaactgttctcctcacttgactctcccaccttaggacctggatattgatttcttaccacagcaatagtcccctggagagaccaaagtggtcycacgtcagaattctgctaaattgcctttcattagaacactcttctagaaaggaggaaaatcataagcttgatatggagtaaggatttgaattaatgtctcccattcctgaactacatgttttagctacyaacttaaaaatactccaactgaacatagcccaggctataaagcaaatcactagcaaagtagcaaagggtattcaaggctgtttccgcttgttttctgatacaaaacttctgcatttctacttatcctgcatattataaacccttgccaatgtacacgtaagctatttaatgaagtaacttcagaacaaagaaaacagtgaatggaaactgctgctaagcataacatctcaacccaaaga

SEQ ID NO: 61006 - DNA, 508 bp, Chicken  19866894321191_1
ttggtgtagctgcataatatgccatttctcttgtctcacagagcttgcattccttcatgcaggaattttccctgctgtgggtgctgcactgtgtagctgatgccacccatttttaagttgattactatgacaagttattttacccgctcagaacaggcttttcattattcttacataacttaataggctcaatgaaactcatcggtgcctgaaatcttaccgtcttataggtatctttgatctgttatgactgtgcaaaagtaatgagattaaagctttagcacaaatcagatggggaayttatttttggaactgattgtcccgtgttaccactagggcctgcaaataggatgtcctagttctgcctcctctgtaacaacatcagagttcacattttgaatccaagagagcactcatgtaagatgcaaaggttcaagtagatgtattcctgaagttcaagtaactgcatcttaacttatttacctgctccaattctgacattacttct

SEQ ID NO: 61007 - DNA, 600 bp, Chicken  19866894321194_1
tgggcaggcgtggggagggtgctgtagagtaaagctacttggtggcgttagatgtgaaggctgctgatgtgggtgtacccaagcggggcttcttgctgtagcacctcgctgccgcatctgaccgatctgctcttttctcaggggaggcagtgagccccacggagacacaccgcggggagcagcccccgtctcgcatctcgctaggtggactatggtggcaggaagatgttggctcggaagagtatcatccctgaggagtatgtgctggcacggatcgctgccgagaacctgcgcaagccrcgcatccgggaccggccacgcaaagcccgcttcatcgccaagaacggagcatgcaacctggcccacaagaacatccgtgagcaggggcgattcctgcaagacatcttcaccaccttggtggacctgaaatggcgtcacacgctggtcatcttcaccatgtccttcctgtgcagctggctgctcttcgccatgatgtggtggctggtggctttcgcccacggcgacatggacccgagcacagagaacactgcaaacaacaccaagtggactccgtgcgtgacatgtgtcaggtacagcgca

SEQ ID NO: 61008 - DNA, 600 bp, Chicken  19866894321206_1
ggcagccatccatactgatttactgtacaaaacagaatacttaccacaaggtgatgctttgtgagaggtgtctgttcttctgtctaatttatcaacacagtgcaaattaattttatgtttcccagaaaaggccatttgctggcttagaataaacctgtcaagagcatagttgatgaaaagaatttttgaaaaaatatggtgggtgttggtgttttccacctagatagaggtagcatccatccttttcatgtcaccagtctccaagtcttgctctgcagcttctgctgtaatagtagcagrgtgaaagttctgttgtatggacaaaccacagtttttaatttttttttcttattttaacttgtcaggtaggaaatgtggggatatgttaagggaggaaccgtggggacctcagggaaacttccaaaataacattttctgatgtgaggaaaataaagccatcacctgccaaacataacagcgtggtactccttgagggttagtttccactatttctttgaggagtaggctgtgtttttgtgctcagaagcaacaaatattcaattttgatgatgtgaagtgtctcaagactactgtgagctg

SEQ ID NO: 61009 - DNA, 600 bp, Chicken  19866894321209_1
tttgctgatgctcatattgtgcaattgagacctcaaggatttttctttgctctttgggctgtaaagtgactctgcatttatgcagcagctagagagacactgagtcagctcaaggggaaaaaaaggtcaggcaagggctagtccctagtctgtgagcatctcatgcaaatcagacacagctcaaacaggcaggcatcaagagatcatccagggcaccatgagttggcagcctagacggagagaactcacactgcattttttcaggaagctaccccacatagagaggagcactttagtcaygattctgttcaacacgtctctattccttacaagtgagtggaacaatctatttttacactcagaggtcataaagggtaggctcatttctttgccttaacccatcctggtgctttcttatagactgtcaactgtcaaatgtcattaccctgtagacatcttaaaaacatactgaaactccaagccagtaagtcagtctgaataaagagacagtttcactaggtgaaagccctcctaaactttagagagactgccttatgcactgcataaggatgaatggatcccaactgtcttggatccagt

SEQ ID NO: 61010 - DNA, 600 bp, Chicken  19866894321209_2
gctctccagtttaattccatgctaaaaaccctcttgtcacattcaaaaggttacaatgagtgggaagaagtgggaaagggagggttaactaatgaatttaatagctttggtcagcaatttgcataactctctgttgtattctgctagccatggtaaggtacatcaccaccaagcatatgagctaacttaactcttattagagaaccgcagagccatcatgacagcatgtaaggttaagaagtgtgatcttgtatatgtgctagataggaagaaggaaattcacagctgaagcaaacaacrgttaccagaagaagggagttcttgaaaaaggataatcttaaatgaccgtctacatttgtttacattgtgggtagactcaaggtgattcagtgacttaaaatattcagtgacttgcttttatcttgtcagtatttggcaggaaaatcaaagcagtctttccctggataacattatctgcctctctgtcttctccagccatgtgtgcgcccctactatcatatccgtagttcagcaatttaggatgccgtgtcacttaaaatcaacacatatgcaaaggaggctaatgtggttttaaagtaa

SEQ ID NO: 61011 - DNA, 600 bp, Chicken  19866894321211_1
tcggaagaattaaacctgctaatggctgcagtacttaaagcattttattataaaacgttcctttgtaatgtaataatttcctgaaatacttcctataattacagtttgtgttagagaagtttatcttataaagccaaaagataaggaatatttcagctaaatagaacattttatgaatggttaaagttttaatcttatctctcttttccaagtgctgttggaattcagctgtttaaaagaaggggcctcacttttttctttccttaccttccaacctcgaactatgcatgaactcttcaytttatcacaacattaaaaaagttctttctactcatacaactcttttggttttaaaatctgtagccccagtaaaatttctctcgaataaatgcaaarcaactttactgaagtgaagcgtattagaaaggtcactgctagggaaagagcacagacaactggttacaatactgtatgcaaagcttctattaatattttacatatcagtaggcattcacatatttattagactcacagtttaatcgtaactaaacttgttattcttttgcattgatgagtacctaaagaatatcagtaggaaag

SEQ ID NO: 61012 - DNA, 600 bp, Chicken  19866894321211_2
aattacagtttgtgttagagaagtttatcttataaagccaaaagataaggaatatttcagctaaatagaacattttatgaatggttaaagttttaatcttatctctcttttccaagtgctgttggaattcagctgtttaaaagaaggggcctcacttttttctttccttaccttccaacctcgaactatgcatgaactcttcaytttatcacaacattaaaaaagttctttctactcatacaactcttttggttttaaaatctgtagccccagtaaaatttctctcgaataaatgcaaarcaactttactgaagtgaagcgtattagaaaggtcactgctagggaaagagcacagacaactggttacaatactgtatgcaaagcttctattaatattttacatatcagtaggcattcacatatttattagactcacagtttaatcgtaactaaacttgttattcttttgcattgatgagtacctaaagaatatcagtaggaaagctatcaggggacccagaaagttttaatgcagtgttctgcaacaaatctagataaacatataatactgcatgtaggttttttttaaaattcagactg

SEQ ID NO: 61013 - DNA, 600 bp, Chicken  19866894321212_1
ccgtaggcaggctgctggagggtcccctcttgatgggtgatggagtgggatggggttagggctcaccccgtggccctggagctgcgcgctgacatttcctctctgcgcctgacccttttttctgttctctctgtgttatctcaaataatgtcactgcctctttagcatctactcagcagagcagaaagaaggcactgctgacacggattaaacaaaaataccatctgtgcctcgcggggcagggcagcacccacaggccccaaagcagcaagcagggttaccatgggggggaagcagctyggagcagcacccccaaaacacgaaggaacgggcgctttgtatgaaggggtcccttgtttctggggtcrtgacagagccttgggaacacatcaccatcctccagcacctctgagttcaatatgcagccaatccaggactcagagtgaccccacgagagcgctgcatccgcacgcctcctattgcaggaggatggagcacagctcctgcccaccccggtgccggctattaaaggcaaaccccagctcgtctgtctttctgcaaagctcataacgtgaaaaatgaagctcaagaaaaattagc

SEQ ID NO: 61014 - DNA, 600 bp, Chicken  19866894321212_2
cgtggccctggagctgcgcgctgacatttcctctctgcgcctgacccttttttctgttctctctgtgttatctcaaataatgtcactgcctctttagcatctactcagcagagcagaaagaaggcactgctgacacggattaaacaaaaataccatctgtgcctcgcggggcagggcagcacccacaggccccaaagcagcaagcagggttaccatgggggggaagcagctyggagcagcacccccaaaacacgaaggaacgggcgctttgtatgaaggggtcccttgtttctggggtcrtgacagagccttgggaacacatcaccatcctccagcacctctgagttcaatatgcagccaatccaggactcagagtgaccccacgagagcgctgcatccgcacgcctcctattgcaggaggatggagcacagctcctgcccaccccggtgccggctattaaaggcaaaccccagctcgtctgtctttctgcaaagctcataacgtgaaaaatgaagctcaagaaaaattagccaaattaccaggctaatccttcagcagcaatctctgctccgctgcacatccgtaaaacgagacggggc

SEQ ID NO: 61015 - DNA, 600 bp, Chicken  19866894321214_1
ctattgacaccttgccaaccaacctgaaagcaaaccccagcttccagcaaggcatgcagactgttggtaagttgttgtaaatgcaccaagtgactgtgaagggaagactttctgggttgcagctgaccctgtgttcatgccaggccacctattagcacattttcataggcagcctatactgtgcttggtcaaattgcatgaaactgagggcattaaataccccagaggtctacaaaaggacaccggggtgcctgataggcagcactggaggaaggacatcctgtgcaggggcaagagttygtcctctcatttgttcccagtgctctgggtctcctcccagggtagatgcagacaccagaagcagtgagctgrgagccctattccactgtaaaatatctttttcacattaaagataatcaacccatggcatgtggtctacgggagtcattaggcacaaarctgcatgcattaaaaagatgcaaaggggaaataaatgttcgtggagccaggaactgtgggaaaagctctttgtgaatgaggaatggaaggaacagtagagtaattgtctcagaaagagaaagaaataggaaggggaaggga

SEQ ID NO: 61016 - DNA, 600 bp, Chicken  19866894321214_2
tgttgtaaatgcaccaagtgactgtgaagggaagactttctgggttgcagctgaccctgtgttcatgccaggccacctattagcacattttcataggcagcctatactgtgcttggtcaaattgcatgaaactgagggcattaaataccccagaggtctacaaaaggacaccggggtgcctgataggcagcactggaggaaggacatcctgtgcaggggcaagagttygtcctctcatttgttcccagtgctctgggtctcctcccagggtagatgcagacaccagaagcagtgagctgrgagccctattccactgtaaaatatctttttcacattaaagataatcaacccatggcatgtggtctacgggagtcattaggcacaaarctgcatgcattaaaaagatgcaaaggggaaataaatgttcgtggagccaggaactgtgggaaaagctctttgtgaatgaggaatggaaggaacagtagagtaattgtctcagaaagagaaagaaataggaaggggaagggatgcagcgaagcaaaacagaaaacaagtagaaaagaggaaaggcaagagagctttggataaatcaggtaatgg

SEQ ID NO: 61017 - DNA, 600 bp, Chicken  19866894321214_3
ttttcataggcagcctatactgtgcttggtcaaattgcatgaaactgagggcattaaataccccagaggtctacaaaaggacaccggggtgcctgataggcagcactggaggaaggacatcctgtgcaggggcaagagttygtcctctcatttgttcccagtgctctgggtctcctcccagggtagatgcagacaccagaagcagtgagctgrgagccctattccactgtaaaatatctttttcacattaaagataatcaacccatggcatgtggtctacgggagtcattaggcacaaarctgcatgcattaaaaagatgcaaaggggaaataaatgttcgtggagccaggaactgtgggaaaagctctttgtgaatgaggaatggaaggaacagtagagtaattgtctcagaaagagaaagaaataggaaggggaagggatgcagcgaagcaaaacagaaaacaagtagaaaagaggaaaggcaagagagctttggataaatcaggtaatggatgtcatagggagggagaccactaggacctgaccacaccatcgtggaatcaagaaggttggaaaataccacttcagatccccaaacc

SEQ ID NO: 61018 - DNA, 600 bp, Chicken  19866894321222_1
gaggatgtggtcgtccaccagcatgatgttgcttgccatctccacaatcacgtcggtgagctgcgaggagagctggctgcaggtcgcgctcagttcattcatccccagttcatgcttccttcccagcacccaccatgcacagatgggtggtagagagcagagagcagcagcagcattacctgcttgatctggtccacgtagccaataaacttctcgatcatctgagccacatagaggacatcaaccatgtctgagaagttggcagcctcagccgtgtagacacgcagctggtgagccagwgtcagtgcattggaggcattgatgggcatctgtagggtggcacaaccacagggcacgggtcacggctgtgcctcagcccaacctcagcaamccacgtgggctgagcacccggctcaccagcacaaaggtgtagagcacgcgggtgatgtcgttggtgtagaggcagtgggaatagtcgccctcctcccagcgccccgcacggtcacaacgcctggacgcttgcttctccgccgccgggcccccacttgccggccccgaggcgaaggggtactgcaggcacgactggaaggcagtgatgcc

SEQ ID NO: 61019 - DNA, 600 bp, Chicken  19866894321222_2
agttcattcatccccagttcatgcttccttcccagcacccaccatgcacagatgggtggtagagagcagagagcagcagcagcattacctgcttgatctggtccacgtagccaataaacttctcgatcatctgagccacatagaggacatcaaccatgtctgagaagttggcagcctcagccgtgtagacacgcagctggtgagccagwgtcagtgcattggaggcattgatgggcatctgtagggtggcacaaccacagggcacgggtcacggctgtgcctcagcccaacctcagcaamccacgtgggctgagcacccggctcaccagcacaaaggtgtagagcacgcgggtgatgtcgttggtgtagaggcagtgggaatagtcgccctcctcccagcgccccgcacggtcacaacgcctggacgcttgcttctccgccgccgggcccccacttgccggccccgaggcgaaggggtactgcaggcacgactggaaggcagtgatgccggccagggtgcggggccacctggatgcacacacacagtgagtgtggggcaacactccccacaaagccactgtccccccatcccacatcctg

SEQ ID NO: 61020 - DNA, 600 bp, Chicken  19866894321224_1
aaagacaaaagagcttctttcaaggaaagacaccacccggaatgcaggaggaaatgttagatgcttaaaggacgccgtctcggctgttgtagcagttgtctgcacacagtgccaacactccttgttttttgaaggaaaaatccatatgtcacagtctggtgtgaacaaatgtggtgtctgggccggatggatgaagttagatggacaccgatgagtttgctcatgctaagcatccaaattgacgtgggagatgagaggagatgaaggaaccccacctgtgaagcagctgattgttggccrgggwygcacagaaatgctgggttgcgtggctcactgtgtgctggtaccctgaagggctgtgctttgtgtgtctgtccagcaaaaccttcctttaggataggcttttgtggtcggatgttcatctggcagcggagacggcttaaggctgtgctctgttakgtgatgcggattgggatctggatattcatgcccaccctttctcattcttcacccatttgatcaacagctggatctagctgtaggcacccctgttcattgcaggggagttgaactggatgacctttgaaggtcccttccaac

SEQ ID NO: 61021 - DNA, 600 bp, Chicken  19866894321224_2
acaaaagagcttctttcaaggaaagacaccacccggaatgcaggaggaaatgttagatgcttaaaggacgccgtctcggctgttgtagcagttgtctgcacacagtgccaacactccttgttttttgaaggaaaaatccatatgtcacagtctggtgtgaacaaatgtggtgtctgggccggatggatgaagttagatggacaccgatgagtttgctcatgctaagcatccaaattgacgtgggagatgagaggagatgaaggaaccccacctgtgaagcagctgattgttggccrgggwygcacagaaatgctgggttgcgtggctcactgtgtgctggtaccctgaagggctgtgctttgtgtgtctgtccagcaaaaccttcctttaggataggcttttgtggtcggatgttcatctggcagcggagacggcttaaggctgtgctctgttakgtgatgcggattgggatctggatattcatgcccaccctttctcattcttcacccatttgatcaacagctggatctagctgtaggcacccctgttcattgcaggggagttgaactggatgacctttgaaggtcccttccaactgat

SEQ ID NO: 61022 - DNA, 600 bp, Chicken  19866894321224_3
caaaagagcttctttcaaggaaagacaccacccggaatgcaggaggaaatgttagatgcttaaaggacgccgtctcggctgttgtagcagttgtctgcacacagtgccaacactccttgttttttgaaggaaaaatccatatgtcacagtctggtgtgaacaaatgtggtgtctgggccggatggatgaagttagatggacaccgatgagtttgctcatgctaagcatccaaattgacgtgggagatgagaggagatgaaggaaccccacctgtgaagcagctgattgttggccrgggwygcacagaaatgctgggttgcgtggctcactgtgtgctggtaccctgaagggctgtgctttgtgtgtctgtccagcaaaaccttcctttaggataggcttttgtggtcggatgttcatctggcagcggagacggcttaaggctgtgctctgttakgtgatgcggattgggatctggatattcatgcccaccctttctcattcttcacccatttgatcaacagctggatctagctgtaggcacccctgttcattgcaggggagttgaactggatgacctttgaaggtcccttccaactgatg

SEQ ID NO: 61023 - DNA, 600 bp, Chicken  19866894321224_4
tgtgaacaaatgtggtgtctgggccggatggatgaagttagatggacaccgatgagtttgctcatgctaagcatccaaattgacgtgggagatgagaggagatgaaggaaccccacctgtgaagcagctgattgttggccrgggwygcacagaaatgctgggttgcgtggctcactgtgtgctggtaccctgaagggctgtgctttgtgtgtctgtccagcaaaaccttcctttaggataggcttttgtggtcggatgttcatctggcagcggagacggcttaaggctgtgctctgttakgtgatgcggattgggatctggatattcatgcccaccctttctcattcttcacccatttgatcaacagctggatctagctgtaggcacccctgttcattgcaggggagttgaactggatgacctttgaaggtcccttccaactgatgattctgagatccttaggatgccagtaggcgtactgccgtagagtgctgagtgcagctttaacttagagaaaaagagaatccatcctgatcctgttgggtgtgaatctgtacaatgggatgaatcatctccagatgcaagcgtggtggtgatatt

SEQ ID NO: 61024 - DNA, 599 bp, Chicken  19866894321234_1
  misc_feature (1)..(53): n is any nucleotide
nnnnnnnnnnnnnnnnnnnnnnnnnnnnnnnnnnnnnnnnnnnnnnnnnnnnnaaaataaaatatatagtaattgaaattcctattacatttaaatgagatagtatacaaaagttatcattatggtaagttatgtgagcatgatcactctttgtagccaaggtatcattaagatgaagaaccaacatgaatgtcaatagaaagttaaacataggggaaacaatggtctacaacaccactcacaaatattcagcaaacatgcagcctataaaaatgataaatatagattgagtgagctaartcyggtattcactgaataactagaacaaagtgcgagtgcaggtcaactttctagctctagaggaagagtttaggtattcaaggaatcttcaaagtgaatatgaatctacaagggtataatgtgagaaaataggttaagaacaagcagtgttactatttttaggcacaaagaaaatctaagaatacacatgcatgtgaatcccaacagagagagagcactgtcaaaaaaaaaaaagaaagagattgaagaaacagacagaatttgccaatgtgtggaaggactcagaactacaatgataa

SEQ ID NO: 61025 - DNA, 599 bp, Chicken  19866894321234_2
  misc_feature (1)..(50): n is any nucleotide
nnnnnnnnnnnnnnnnnnnnnnnnnnnnnnnnnnnnnnnnnnnnnnnnnnaaaataaaatatatagtaattgaaattcctattacatttaaatgagatagtatacaaaagttatcattatggtaagttatgtgagcatgatcactctttgtagccaaggtatcattaagatgaagaaccaacatgaatgtcaatagaaagttaaacataggggaaacaatggtctacaacaccactcacaaatattcagcaaacatgcagcctataaaaatgataaatatagattgagtgagctaartcyggtattcactgaataactagaacaaagtgcgagtgcaggtcaactttctagctctagaggaagagtttaggtattcaaggaatcttcaaagtgaatatgaatctacaagggtataatgtgagaaaataggttaagaacaagcagtgttactatttttaggcacaaagaaaatctaagaatacacatgcatgtgaatcccaacagagagagagcactgtcaaaaaaaaaaaagaaagagattgaagaaacagacagaatttgccaatgtgtggaaggactcagaactacaatgataaaaa

SEQ ID NO: 61026 - DNA, 600 bp, Chicken  19866894321234_3
ggttaagaacaagcagtgttactatttttaggcacaaagaaaatctaagaatacacatgcatgtgaatcccaacagagagagagcactgtcaaaaaaaaaaaagaaagagattgaagaaacagacagaatttgccaatgtgtggaaggactcagaactacaatgataaaaagaagctctaaaaattactcctataaaagaaaaaaaaaaatcctgcaacttaaaaggtcaacataatctaattgttttttccataatatctatatcataaatagaaaagtagctaaaattggaataattyggttattgtaatgcattgttcacacgttctcaatgtgctctaaagttagaaacagctgctcagacactcatgtcgttatcaaaaagtttctaagagattgaaataacagcttggttttgaaggatctcaattccaatgaccagaactcttaattctgcagtcagtctcaaagttcactcattcatttatttgttagttttggtattagtttatggacaagctacataataatcccattctgttatgtttccatccttgtgtttttccttyatttccttaatagttctctaattctgatga

SEQ ID NO: 61027 - DNA, 600 bp, Chicken  19866894321234_4
atagaaaagtagctaaaattggaataattyggttattgtaatgcattgttcacacgttctcaatgtgctctaaagttagaaacagctgctcagacactcatgtcgttatcaaaaagtttctaagagattgaaataacagcttggttttgaaggatctcaattccaatgaccagaactcttaattctgcagtcagtctcaaagttcactcattcatttatttgttagttttggtattagtttatggacaagctacataataatcccattctgttatgtttccatccttgtgtttttccttyatttccttaatagttctctaattctgatgacttgggacacagttctaataagagtaagttagcaaacaattgcatcattcttctataaatatcattctcttctatgctcggttgcaaaaagaaatctctggtatcgatctcatagtaccaataccccatgtaaaccagaatcctgtctaacaatatgccaaaaattgaggattaggaaaagtacaaggacagaacaagtgtatattgaaactattctagaaaaatcttctagcttttagcaatgttcagtccagagaatcttgaaccata

SEQ ID NO: 61028 - DNA, 600 bp, Chicken  19866894321235_1
ccaactcttcaaacactgttgaaataagttatcagaagtgatctccatcacaatagtcagacacatgcctcatgccaacacaaaaggcagcttgccagtaaatcatcaccgcatgcactttggcaaatccttgagaatacaaacattttttgttacagatgaagtcctatctcatgggtggtaaagaagatggatttcagaatacaaaatgctctgaatgagcatgatttcatctcagtcttcagatgtttataattccaggtataattctagatataattctgggtataattcaatcartggttccaacacccctgctaacctaaaggaaggttttagwgaagtcagaggaagagtcttctcaaaggttgacagtgaaaacacagragtgaacagacacaaattgcagcaagatgtaattcatgtagatttaaggataacattcttcacagggtgattaaactgttgaacattgcctggagtgactgtaaactccatccttgaagatattcaaatctcaactggacaagtccataagcatctcaatctagcttgaaagttggccctatgctgaaagttctttcaaattaaattatttca

SEQ ID NO: 61029 - DNA, 600 bp, Chicken  19866894321235_2
atctccatcacaatagtcagacacatgcctcatgccaacacaaaaggcagcttgccagtaaatcatcaccgcatgcactttggcaaatccttgagaatacaaacattttttgttacagatgaagtcctatctcatgggtggtaaagaagatggatttcagaatacaaaatgctctgaatgagcatgatttcatctcagtcttcagatgtttataattccaggtataattctagatataattctgggtataattcaatcartggttccaacacccctgctaacctaaaggaaggttttagwgaagtcagaggaagagtcttctcaaaggttgacagtgaaaacacagragtgaacagacacaaattgcagcaagatgtaattcatgtagatttaaggataacattcttcacagggtgattaaactgttgaacattgcctggagtgactgtaaactccatccttgaagatattcaaatctcaactggacaagtccataagcatctcaatctagcttgaaagttggccctatgctgaaagttctttcaaattaaattatttcatgattagataattctaaatgatctatgttcaacttgcttt

SEQ ID NO: 61030 - DNA, 600 bp, Chicken  19866894321235_3
cagcttgccagtaaatcatcaccgcatgcactttggcaaatccttgagaatacaaacattttttgttacagatgaagtcctatctcatgggtggtaaagaagatggatttcagaatacaaaatgctctgaatgagcatgatttcatctcagtcttcagatgtttataattccaggtataattctagatataattctgggtataattcaatcartggttccaacacccctgctaacctaaaggaaggttttagwgaagtcagaggaagagtcttctcaaaggttgacagtgaaaacacagragtgaacagacacaaattgcagcaagatgtaattcatgtagatttaaggataacattcttcacagggtgattaaactgttgaacattgcctggagtgactgtaaactccatccttgaagatattcaaatctcaactggacaagtccataagcatctcaatctagcttgaaagttggccctatgctgaaagttctttcaaattaaattatttcatgattagataattctaaatgatctatgttcaacttgctttgagataggcagcatttacagctgaatgagaatggagactagrggaga

SEQ ID NO: 61031 - DNA, 600 bp, Chicken  19866894321235_4
acagragtgaacagacacaaattgcagcaagatgtaattcatgtagatttaaggataacattcttcacagggtgattaaactgttgaacattgcctggagtgactgtaaactccatccttgaagatattcaaatctcaactggacaagtccataagcatctcaatctagcttgaaagttggccctatgctgaaagttctttcaaattaaattatttcatgattagataattctaaatgatctatgttcaacttgctttgagataggcagcatttacagctgaatgagaatggagactagrggagagaatctgcctacatgcgggacttctccaagtgattgtggcaagattatcaagtttgtcacatccattttgtaggtgttctrgagtcactgaaatctgcaggtctgtcagccatgaatactcttttaattcattcactctatcaaaaatttcacagtttgtgaaaaacagcctgttagacaactggatgaatgcccaaatatgggcaaagtaatacagcttttccatgttagttggcattatacacttctcatttttgaagaaaaaaaagccacaacacttatggccgcaatgcag

SEQ ID NO: 61032 - DNA, 600 bp, Chicken  19866894321235_5
aacattgcctggagtgactgtaaactccatccttgaagatattcaaatctcaactggacaagtccataagcatctcaatctagcttgaaagttggccctatgctgaaagttctttcaaattaaattatttcatgattagataattctaaatgatctatgttcaacttgctttgagataggcagcatttacagctgaatgagaatggagactagrggagagaatctgcctacatgcgggacttctccaagtgattgtggcaagattatcaagtttgtcacatccattttgtaggtgttctrgagtcactgaaatctgcaggtctgtcagccatgaatactcttttaattcattcactctatcaaaaatttcacagtttgtgaaaaacagcctgttagacaactggatgaatgcccaaatatgggcaaagtaatacagcttttccatgttagttggcattatacacttctcatttttgaagaaaaaaaagccacaacacttatggccgcaatgcagttcttcttatctgtatttaaggactatacatagttgcagatgaatctgtgtgcatttactcattgatttttctttcatattttaac

SEQ ID NO: 61033 - DNA, 600 bp, Chicken  19866894321235_6
cttgacccttcactgatagagttgttttacagtaggcttctggcagcagccaacctgttgtgagaaaggggtagatagactctcgcatcatggctattctgtattaaggaggcatgactaagagcatatgcaggaataagaaagtggttttacaagttgacagtgagaaaagatggagggaaaaccagctttaccacaagcagatgtgattttgatgtggtagagtcacatgtgttgtgtggactgccgtgtcctgtgcagtcctcaagtgttttttatttcaaagtcccactagcaatyrgtgcagccattagggacagtccaactggtgaggtggggaaataccatcctgttttaatcatgcactgagtcaaatatactttcaacatttgtttgtcagactctgattttgaataattgcatattctatttttctatacaaattaatgaatttctcctgaaaggagaaattgtatttgaagacttatttcaggaaatgaaagtctttgtaaaatgggaaggaagagcagctgaccgctgaagtttcagcaggatggggtgagcatttggggttgtgaatgtggattccagtgactgcca

SEQ ID NO: 61034 - DNA, 600 bp, Chicken  19866894321235_7
ttgacccttcactgatagagttgttttacagtaggcttctggcagcagccaacctgttgtgagaaaggggtagatagactctcgcatcatggctattctgtattaaggaggcatgactaagagcatatgcaggaataagaaagtggttttacaagttgacagtgagaaaagatggagggaaaaccagctttaccacaagcagatgtgattttgatgtggtagagtcacatgtgttgtgtggactgccgtgtcctgtgcagtcctcaagtgttttttatttcaaagtcccactagcaatyrgtgcagccattagggacagtccaactggtgaggtggggaaataccatcctgttttaatcatgcactgagtcaaatatactttcaacatttgtttgtcagactctgattttgaataattgcatattctatttttctatacaaattaatgaatttctcctgaaaggagaaattgtatttgaagacttatttcaggaaatgaaagtctttgtaaaatgggaaggaagagcagctgaccgctgaagtttcagcaggatggggtgagcatttggggttgtgaatgtggattccagtgactgccat

SEQ ID NO: 61035 - DNA, 600 bp, Chicken  19866894321237_1
gaataccttctgtctttcccaaatccttccagcactgggagtactgagctgagaatgcaacatttcagctccactctcacaggagtatcacagtttaaaatgaactgtgccttatttttttttttttaataaggcattcctaaagcaaattttttaatctaaacattcaatctgtattggcaatgcagaaagaagtttgaaattcaatcaattcctttggaagatttttagtgactcttttctgacattttgatctcagtgaatttctaaacacctgaacaaaggagatctcttgtgcartgctggccacaagtggacttgggtttatctgaagctgtgaagaacacgtttagagggaaaatgtagctcatctccctcttcttggtgcttctgaatgcttattcttgctagaaatggcattctgyatagagacaatgagttttgagaaaaaaagttcattcctaaatggagggcaaaggaggtggcaggtgcatgcatatgggttagctgctcctcaaactaaatgaacatcgccatcctacgtaagcccaacttgtgctagcacaaaatgaggttcatgaaccaatactttgaacccta

SEQ ID NO: 61036 - DNA, 600 bp, Chicken  19866894321237_2
ttaataaggcattcctaaagcaaattttttaatctaaacattcaatctgtattggcaatgcagaaagaagtttgaaattcaatcaattcctttggaagatttttagtgactcttttctgacattttgatctcagtgaatttctaaacacctgaacaaaggagatctcttgtgcartgctggccacaagtggacttgggtttatctgaagctgtgaagaacacgtttagagggaaaatgtagctcatctccctcttcttggtgcttctgaatgcttattcttgctagaaatggcattctgyatagagacaatgagttttgagaaaaaaagttcattcctaaatggagggcaaaggaggtggcaggtgcatgcatatgggttagctgctcctcaaactaaatgaacatcgccatcctacgtaagcccaacttgtgctagcacaaaatgaggttcatgaaccaatactttgaaccctatgytcatttaaagcttttaacatttatcttatccattccactcaataagttttctgatttattacaaaaaggtgaaaggtccttcctcccattaccaattacctgagccactcagtcctcttttg

SEQ ID NO: 61037 - DNA, 600 bp, Chicken  19866894321237_3
tggccacaagtggacttgggtttatctgaagctgtgaagaacacgtttagagggaaaatgtagctcatctccctcttcttggtgcttctgaatgcttattcttgctagaaatggcattctgyatagagacaatgagttttgagaaaaaaagttcattcctaaatggagggcaaaggaggtggcaggtgcatgcatatgggttagctgctcctcaaactaaatgaacatcgccatcctacgtaagcccaacttgtgctagcacaaaatgaggttcatgaaccaatactttgaaccctatgytcatttaaagcttttaacatttatcttatccattccactcaataagttttctgatttattacaaaaaggtgaaaggtccttcctcccattaccaattacctgagccactcagtcctcttttgatgtatccttgcatgactaagtttatttccagacttccaggtccctccttctttaacttaaaatatttgtccaacaagagcaattttcaacttatgcaggagctagctaattagtatggtagcctgtcattctgtcacactgccttgacaaacaatatagcagattaaagagttgcta

SEQ ID NO: 61038 - DNA, 600 bp, Chicken  19866894321238_1
gcagagcactgtgggagtgacacctctgctctgggcatgacagcatcactggggcgatgtcactgaggtgcaaagcatggagaagtgagacctgtgctggtccttgagttaatctgtttctgaagtgccagcctccctgctcttcaaagcagagggctgcatcggagaggatttggaaaaggatcttcttatggggaggacacatcacccagggcagcaggtctagcagaaatgctctcagtgccttctgctcgggtatctccatccccctgcaaacagagatcgcctctgctcagcaamgggcttagagctgaaaggcagaaaatccccatggctgagactgtgctgtggtgggtgctccgtgggatgctctgggatgcattgggatgctctgggatgcactgggatgcactgggatgctggaggatgcctggagtgtggagctcatggccagggctgtgctgtggtgttggcgtgggctgtcacgagctcagcttcaaatgcaaaacgtgccggcttctccccctcgctctgctgtgcctccaaccgagggatttaatctcactggcggaaatttatggctgatgtctgagttggccc

SEQ ID NO: 61039 - DNA, 600 bp, Chicken  19866894321253_1
tgatgacactaattttgcagtgcttttagtgttttagttaagcacataaatgatggtacaaaccagagccctaacaagaagaggcagagactttctcagccgttggctcccagtcctcacccaccagttcccattgcacacctccacgctgcacccccagactgtcttttgactgaaactcatttttcaggcttagctcccagcctcttgtccctaattctgctcaacagccctcatttgtattttcctagcacatcattgtacgatttctcacctccaaactgattttgcaactctcarcacctatgtagtctccatcttttctcttcagcaaacctatcctgcaatttaatctgcctgacttcctcacatagctaatttcagttttccctgggatcattgttattcagcatcttccttccttccttcctacacctccccagcctcattatcttgcatgacagtctcctgcaggttcctcatccccctccctagctggctttctgtcttgctggtgcttttttcagagcatccagaccaaacccatgtccctttasgtccagaccagtccagccaaccacttatcttctcctttctggt

SEQ ID NO: 61040 - DNA, 441 bp, Chicken  19866894321253_2
attgtacgatttctcacctccaaactgattttgcaactctcarcacctatgtagtctccatcttttctcttcagcaaacctatcctgcaatttaatctgcctgacttcctcacatagctaatttcagttttccctgggatcattgttattcagcatcttccttccttccttcctacacctccccagcctcattatcttgcatgacagtctcctgcaggttcctcatccccctccctagctggctttctgtcttgctggtgcttttttcagagcatccagaccaaacccatgtccctttasgtccagaccagtccagccaaccacttatcttctcctttctggtctaatctcctcccatgaaacctctgcatttcagtggtactccagaactctcggtgtgcccaatctgaggtaggtaaccccacaaaagctcagggaata

SEQ ID NO: 61041 - DNA, 599 bp, Chicken  19866894321255_1
  misc_feature (1)..(185): n is any nucleotide
nnnnnnnnnnnnnnnnnnnnnnnnnnnnnnnnnnnnnnnnnnnnnnnnnnnnnnnnnnnnnnnnnnnnnnnnnnnnnnnnnnnnnnnnnnnnnnnnnnnnnnnnnnnnnnnnnnnnnnnnnnnnnnnnnnnnnnnnnnnnnnnnnnnnnnnnnnnnnnnnnnnnnnnnnnnnnnnnnnnnnnnnnctagtccaaccgccttcccattcccattggtaccacaagctactaaaccaggtctttctgctaactgtgggaaaaaacccttctctgctctgcacgtgagacgtggcagcctgaytcctagtattatcagaagagcgtgcaaaaaccatcaagagaatggtcaagaggaaagggcatttctgctgatgcatgtccttctgtggytctgaaggaacagacgcaacctgcctcgtaccaagctagttcccatcccactctgaacttttctgatgaagtttagtatcctatcaattgctaatacagcatygtttcgctaaaactgcaacgcaaaggcctgatggaagcgtgactggtcgctgatgcatgcttgtaaaagagcagaacggcatcttgcatagcccttacatttctttg

SEQ ID NO: 61042 - DNA, 599 bp, Chicken  19866894321255_2
  misc_feature (1)..(96): n is any nucleotide
nnnnnnnnnnnnnnnnnnnnnnnnnnnnnnnnnnnnnnnnnnnnnnnnnnnnnnnnnnnnnnnnnnnnnnnnnnnnnnnnnnnnnnnnnnnnnnnnctagtccaaccgccttcccattcccattggtaccacaagctactaaaccaggtctttctgctaactgtgggaaaaaacccttctctgctctgcacgtgagacgtggcagcctgaytcctagtattatcagaagagcgtgcaaaaaccatcaagagaatggtcaagaggaaagggcatttctgctgatgcatgtccttctgtggytctgaaggaacagacgcaacctgcctcgtaccaagctagttcccatcccactctgaacttttctgatgaagtttagtatcctatcaattgctaatacagcatygtttcgctaaaactgcaacgcaaaggcctgatggaagcgtgactggtcgctgatgcatgcttgtaaaagagcagaacggcatcttgcatagcccttacatttctttgcggtgcagagtttctgaaagggcgagrcggggcaggacggcgcaagcagcagctgcttcccagcgccagcagtgccagcagccctggcg

SEQ ID NO: 61043 - DNA, 600 bp, Chicken  19866894321255_3
aaccgccttcccattcccattggtaccacaagctactaaaccaggtctttctgctaactgtgggaaaaaacccttctctgctctgcacgtgagacgtggcagcctgaytcctagtattatcagaagagcgtgcaaaaaccatcaagagaatggtcaagaggaaagggcatttctgctgatgcatgtccttctgtggytctgaaggaacagacgcaacctgcctcgtaccaagctagttcccatcccactctgaacttttctgatgaagtttagtatcctatcaattgctaatacagcatygtttcgctaaaactgcaacgcaaaggcctgatggaagcgtgactggtcgctgatgcatgcttgtaaaagagcagaacggcatcttgcatagcccttacatttctttgcggtgcagagtttctgaaagggcgagrcggggcaggacggcgcaagcagcagctgcttcccagcgccagcagtgccagcagccctggcggagggacgcgctgtcccagcaccgacagagggcaggcccgaacttccccccgacaacgggatcgcagttagaaacagcgtccaatgtacacaactggaacttct

SEQ ID NO: 61044 - DNA, 600 bp, Chicken  19866894321255_4
aaaaccatcaagagaatggtcaagaggaaagggcatttctgctgatgcatgtccttctgtggytctgaaggaacagacgcaacctgcctcgtaccaagctagttcccatcccactctgaacttttctgatgaagtttagtatcctatcaattgctaatacagcatygtttcgctaaaactgcaacgcaaaggcctgatggaagcgtgactggtcgctgatgcatgcttgtaaaagagcagaacggcatcttgcatagcccttacatttctttgcggtgcagagtttctgaaagggcgagrcggggcaggacggcgcaagcagcagctgcttcccagcgccagcagtgccagcagccctggcggagggacgcgctgtcccagcaccgacagagggcaggcccgaacttccccccgacaacgggatcgcagttagaaacagcgtccaatgtacacaactggaacttcttaagtccgtgccgtatcttggcgggagcgggctttgaggaccggcggctgctggcttttggggatgcggaggtgtagctgcaggggcctctgccacctgwgctgcgtctgctttgctggttggtgacgtgaggc

SEQ ID NO: 61045 - DNA, 574 bp, Chicken  19866894321255_5
ttctttgcggtgcagagtttctgaaagggcgagrcggggcaggacggcgcaagcagcagctgcttcccagcgccagcagtgccagcagccctggcggagggacgcgctgtcccagcaccgacagagggcaggcccgaacttccccccgacaacgggatcgcagttagaaacagcgtccaatgtacacaactggaacttcttaagtccgtgccgtatcttggcgggagcgggctttgaggaccggcggctgctggcttttggggatgcggaggtgtagctgcaggggcctctgccacctgwgctgcgtctgctttgctggttggtgacgtgaggctgctgacgaaaagggctgtgaaagctgaggagcttcaaaattaacacgggctgaagaaaatgactgtaggatataaatgctgctgctcgactggagaagctgggagaaaggtggcttacttggcagagatgtaaaagtatctaaaaataaggaggtaccgtgtgtgcatctccaaacactgggatgactaactgtaccgacctagaaaagacaagctgcagcagcacacgaagctgtgtg

SEQ ID NO: 61046 - DNA, 483 bp, Chicken  19866894321256_1
tttaatttaaaaagaggagctaaacataattccattttctcagattaactggtggatgagaagctggacatgagccagcagtgtgcacttgcagcccggaaggccaactgtgatctgtgctgcattaaaagaggggtggccagcagggatagggaggtgattgtccccctctactcggctcttgtgaggccccatctggagtaccatgtccaggcgtggggcctcagtacagaaggatgtggagctcttagagcaggtccagaggagggccactaaggtgatcagagggctggagcaccyctcctatgaggaaaggttgagggaactggcagtgtttagcttggagaagagaaggctctgggaagacctcattgtggccttccaatatttgaagggaacatataaatagaagggggaacagctgtttacaagggtggacagtgataggacaagggagaatggttttaaactaagacaggggag

SEQ ID NO: 61047 - DNA, 600 bp, Chicken  19866894321261_1
atttgaatcaatatagtaggagagagaagtcatgtaaggtttgattggattatactcagtgtttttattaagaaactaaactctttctatatcactacctgtgcttgtttcttgtttgtttgtttgtttgtttttttcaaacatctaaaaaatataaccattgcactaaaagagacaaggatacctagatataactctgccaaaatctatgaaattcatagtatatacaggtatttcagttacagtcgtcacttcaaaccacttgcaaaggataatttcaaaaccaagaaatgcctaatrtcaagactaataatgcttagcagcagtatcctaatggaaaataacagcattatgatggcattcttgtcttctcaaatgaaaaygacaagcactgattttgaaaccctgttcaccatagaaccattgctaataaaatacatttatgtgtcacagcagatgtggtaactatcacagttgctgattaatgtggttgttcagagctgtgttcagtctcagttataaatatctttcaaataaaaccattcctttttgaattttgattgcaaaaatgttgccactatcaacatactttgtacttgc

SEQ ID NO: 61048 - DNA, 600 bp, Chicken  19866894321261_2
tttctatatcactacctgtgcttgtttcttgtttgtttgtttgtttgtttttttcaaacatctaaaaaatataaccattgcactaaaagagacaaggatacctagatataactctgccaaaatctatgaaattcatagtatatacaggtatttcagttacagtcgtcacttcaaaccacttgcaaaggataatttcaaaaccaagaaatgcctaatrtcaagactaataatgcttagcagcagtatcctaatggaaaataacagcattatgatggcattcttgtcttctcaaatgaaaaygacaagcactgattttgaaaccctgttcaccatagaaccattgctaataaaatacatttatgtgtcacagcagatgtggtaactatcacagttgctgattaatgtggttgttcagagctgtgttcagtctcagttataaatatctttcaaataaaaccattcctttttgaattttgattgcaaaaatgttgccactatcaacatactttgtacttgcataggtggtacttttatttctaggaagtcttaatggtgcctcagaaaacacaattccagatttctttgaaaagtaagatgaag

SEQ ID NO: 61049 - DNA, 600 bp, Chicken  19866894321266_1
acgtctgcaaaaccagcatttgtccttctggtgagagcgggtgtgagggcctgtctgcagagtctggcccttctccaaacactgaaaaatatcatccttgttccaaagagcttatggtcaaaaccaaaagaagacaaagacgagttcaaaagaaacaagagaaatttaagcgcatacaatcttcataatgtcattaatagtaaataatgatttccctgaccttggcgctgctcccaggaagtcacaccaggatcaagaatgcaacaggatgacgcattactcacagagattgtgtcaaamaccacctggttcctgttagcacaacgccttgctgacatggctcatttgttcttcacttgactgaaaactcatggattcattgcccggatggggcttgatggaaccacttgtaaaccttaacggttttaaaatgcttaataaattaaagaagggagaaaaacagagctcaataaaagccataaaaacgtggcttttccctaacattttgtaaattaaataygttaaattgtgctcgccaaactgatttttctttttttcttttgtttttccatctgcctatgggatggttatggaaactat

SEQ ID NO: 61050 - DNA, 600 bp, Chicken  19866894321266_2
cttggcgctgctcccaggaagtcacaccaggatcaagaatgcaacaggatgacgcattactcacagagattgtgtcaaamaccacctggttcctgttagcacaacgccttgctgacatggctcatttgttcttcacttgactgaaaactcatggattcattgcccggatggggcttgatggaaccacttgtaaaccttaacggttttaaaatgcttaataaattaaagaagggagaaaaacagagctcaataaaagccataaaaacgtggcttttccctaacattttgtaaattaaataygttaaattgtgctcgccaaactgatttttctttttttcttttgtttttccatctgcctatgggatggttatggaaactattgttaggtatatgcaaatactgtcagtgctcctctgcttttcctcaaggaccttgatattggttgtgaaggtaggtttctatgaaacccctaagtaaatcgcaataacttgtttttggaaccagagcttcactgtctagcatatggggagctagaacatttgcagaccaccagatacccatgtttttgggaggggtatgcactgaacattttttcattcc

SEQ ID NO: 61051 - DNA, 600 bp, Chicken  19866894321266_3
tattggttgtgaaggtaggtttctatgaaacccctaagtaaatcgcaataacttgtttttggaaccagagcttcactgtctagcatatggggagctagaacatttgcagaccaccagatacccatgtttttgggaggggtatgcactgaacattttttcattcctctaaacaaatgtacagaagcattctgactgctggcatttgtcctgcagccttctgcagacaaaccttctgctttgcctgctattgctgcaagaagagattttaaccttgtggatgagcaacattgaggtgagcakagggaagatgcctgagtgctggtttcatccacagaaacctctttggcccctttgaaaaactgttcattttgtaattaatgsgatgatgtttactctcattattgcctttctctctgagaaggcattttggactgctaccgaaggagtgtgtgtatgtgtgtggtgtgtgcctgtgctcacgtaagtaaggcatatatgtatgaccttttctgtctacaaatcttcctgctgatagtccgagtttgttttgattgctacacgtgcatggttttaacaatgctaaaatgcagcttgaacacc

SEQ ID NO: 61052 - DNA, 600 bp, Chicken  19866894321266_4
agcatatggggagctagaacatttgcagaccaccagatacccatgtttttgggaggggtatgcactgaacattttttcattcctctaaacaaatgtacagaagcattctgactgctggcatttgtcctgcagccttctgcagacaaaccttctgctttgcctgctattgctgcaagaagagattttaaccttgtggatgagcaacattgaggtgagcakagggaagatgcctgagtgctggtttcatccacagaaacctctttggcccctttgaaaaactgttcattttgtaattaatgsgatgatgtttactctcattattgcctttctctctgagaaggcattttggactgctaccgaaggagtgtgtgtatgtgtgtggtgtgtgcctgtgctcacgtaagtaaggcatatatgtatgaccttttctgtctacaaatcttcctgctgatagtccgagtttgttttgattgctacacgtgcatggttttaacaatgctaaaatgcagcttgaacacctatggatggctgtagagtccactgataataatttgtgtctcctgagggagtcgttccagggtcctgagctgacccctgagc

SEQ ID NO: 61053 - DNA, 599 bp, Chicken  19866894321283_1
  misc_feature (1)..(40): n is any nucleotide
nnnnnnnnnnnnnnnnnnnnnnnnnnnnnnnnnnnnnnnntactcataactatggtactacagcactcctgttacagagttcagcactgtaattttgtcttattgctgaattttgtgattggaccatctctgctacacagtgaagtcctcaagtaccacttcttcaaaatagtgttttgaactggctaagtggctaaaatgttctatttgtggtctttcatgacaaagatgagaatcatcatacttaaagcttcagggacagttcaaaaatatggtcagcaaagctgactatttgagttyagaaatagttcataaaagttatcatcaaatattgtatccattaaaaatacccagatgcatacattattcaaaagaggaatggatataactctgatcatgcttttgccaagattgccatataagaggtatacaggaatgtgcacatagaatcatagaaacatagagtcatagaattagtcaggttgaaaaggacctcaaagatcatcaagtctaaccgcagcctaaccatagtaccctaactctaacaaccctctgctagatcatatctctgagcaccacatccaaatggctcttaaaca

SEQ ID NO: 61054 - DNA, 600 bp, Chicken  19866894321283_2
aatagttcataaaagttatcatcaaatattgtatccattaaaaatacccagatgcatacattattcaaaagaggaatggatataactctgatcatgcttttgccaagattgccatataagaggtatacaggaatgtgcacatagaatcatagaaacatagagtcatagaattagtcaggttgaaaaggacctcaaagatcatcaagtctaaccgcagcctaaccatagtaccctaactctaacaaccctctgctagatcatatctctgagcaccacatccaaatggctcttaaacacatycagggacggtgactcaaccacctccctrgggagcctattccagtatttaaccaccctttctgtaaagaagtgtttcctaacatccaacctaaacttaccttggtgcaacttgaggccatttctcctcgtcttgtcacatacagaagcacagattaatgaaggatgaaagaggcctctggaagcaccaaatcagggcaaacttccaaggaacatgaggttgctctgactttgtccgtcccaagttagaaaagtgccatggatggacacttcagtctgggcagcttagtactgtctcatgtt

SEQ ID NO: 61055 - DNA, 600 bp, Chicken  19866894321283_3
ttgtatccattaaaaatacccagatgcatacattattcaaaagaggaatggatataactctgatcatgcttttgccaagattgccatataagaggtatacaggaatgtgcacatagaatcatagaaacatagagtcatagaattagtcaggttgaaaaggacctcaaagatcatcaagtctaaccgcagcctaaccatagtaccctaactctaacaaccctctgctagatcatatctctgagcaccacatccaaatggctcttaaacacatycagggacggtgactcaaccacctccctrgggagcctattccagtatttaaccaccctttctgtaaagaagtgtttcctaacatccaacctaaacttaccttggtgcaacttgaggccatttctcctcgtcttgtcacatacagaagcacagattaatgaaggatgaaagaggcctctggaagcaccaaatcagggcaaacttccaaggaacatgaggttgctctgactttgtccgtcccaagttagaaaagtgccatggatggacacttcagtctgggcagcttagtactgtctcatgttctcatctactctcaatgcatgttaattt

SEQ ID NO: 61056 - DNA, 600 bp, Chicken  19866894321285_1
ggcatttgcctcagtaaagtcctgagctgctgtaaatcaagtactgttttagactactcccccatggtcatgggcaaatacaaaccaagttaagttctgtcagcctctgggccaagtcatcataacggccgccagtgttccccagcgccatgagcgataaacacgagggccctaaatggagcattaaggtataaatcattaactcggcaatcaacgcacaaaggcttcagagccgcaagcaaaaacagcacattcaatttagcaacagcatttcagctatcagcaaacacaaagcaagtyaaataagggctgttgggagttttaacamgggaaaacagattgccatcctaacctaccatcractcgatcttcaccagctggtagcagggccgacacaagcaagtcagctgcacgtggcacaggctttgttatttgtttgcaaccaggatctgctacaagttcaaaatgcagatgggcatgggcatcagtccttggggtgggtaactacgccttggctttgaggctttcatgtggctcctaccatggaagtgttgcccttgagtttcatggagttggtatatcttggtggtttcaaataca

SEQ ID NO: 61057 - DNA, 600 bp, Chicken  19866894321285_2
gctgtaaatcaagtactgttttagactactcccccatggtcatgggcaaatacaaaccaagttaagttctgtcagcctctgggccaagtcatcataacggccgccagtgttccccagcgccatgagcgataaacacgagggccctaaatggagcattaaggtataaatcattaactcggcaatcaacgcacaaaggcttcagagccgcaagcaaaaacagcacattcaatttagcaacagcatttcagctatcagcaaacacaaagcaagtyaaataagggctgttgggagttttaacamgggaaaacagattgccatcctaacctaccatcractcgatcttcaccagctggtagcagggccgacacaagcaagtcagctgcacgtggcacaggctttgttatttgtttgcaaccaggatctgctacaagttcaaaatgcagatgggcatgggcatcagtccttggggtgggtaactacgccttggctttgaggctttcatgtggctcctaccatggaagtgttgcccttgagtttcatggagttggtatatcttggtggtttcaaatacaaatgggccttaacttttcaccttgcaat

SEQ ID NO: 61058 - DNA, 600 bp, Chicken  19866894321285_3
ccatggtcatgggcaaatacaaaccaagttaagttctgtcagcctctgggccaagtcatcataacggccgccagtgttccccagcgccatgagcgataaacacgagggccctaaatggagcattaaggtataaatcattaactcggcaatcaacgcacaaaggcttcagagccgcaagcaaaaacagcacattcaatttagcaacagcatttcagctatcagcaaacacaaagcaagtyaaataagggctgttgggagttttaacamgggaaaacagattgccatcctaacctaccatcractcgatcttcaccagctggtagcagggccgacacaagcaagtcagctgcacgtggcacaggctttgttatttgtttgcaaccaggatctgctacaagttcaaaatgcagatgggcatgggcatcagtccttggggtgggtaactacgccttggctttgaggctttcatgtggctcctaccatggaagtgttgcccttgagtttcatggagttggtatatcttggtggtttcaaatacaaatgggccttaacttttcaccttgcaatattctcaaatgctacagagcgctcttaaagatg

SEQ ID NO: 61059 - DNA, 600 bp, Chicken  19866894321285_4
cattggaacatcagcaacacaaaacagtcaggaggctacaggtttgagattttcagtactttaaatgaactgacaacacaaaataatgcagcagtttacagctagtgatttcctctactttattttgattgaggttttgaatacattttcagtgtattcactgcagtaaactgctttgatcttaatatacttaaagatgtgaatgatgtagaaaatcctgctctggctctttgattagcacccacttcaaagtatttgctcatgctagacagcttgaaagagcacccattgaaaccagamggatttaacagagggacttgaaacacagcaatgcaaagatgctctggtatctgtctaacactgatcagcaaggttgaggttaggccacgtaacactcagaaatcaaagaaaattkaackgaaggtttcagaatggttggtgtggaacagtcacttcttccttttcagcctcccctgttgatatatttgctagacagcctgatttccagagcacaatgcctacaattatagatccagacaccgaatcatagaatcattaaggttggggaagaccactaagatcacccagcccaacccgtcc

SEQ ID NO: 61060 - DNA, 600 bp, Chicken  19866894321285_5
tactttattttgattgaggttttgaatacattttcagtgtattcactgcagtaaactgctttgatcttaatatacttaaagatgtgaatgatgtagaaaatcctgctctggctctttgattagcacccacttcaaagtatttgctcatgctagacagcttgaaagagcacccattgaaaccagamggatttaacagagggacttgaaacacagcaatgcaaagatgctctggtatctgtctaacactgatcagcaaggttgaggttaggccacgtaacactcagaaatcaaagaaaattkaackgaaggtttcagaatggttggtgtggaacagtcacttcttccttttcagcctcccctgttgatatatttgctagacagcctgatttccagagcacaatgcctacaattatagatccagacaccgaatcatagaatcattaaggttggggaagaccactaagatcacccagcccaacccgtcccctgtgcccaccaaaccatgtcccttggtgccagagctggaagagatggaaagactgctcattccacactggagaacatcacctttctgggaacccagccatcactgcgttgcat

SEQ ID NO: 61061 - DNA, 600 bp, Chicken  19866894321285_6
ttattttgattgaggttttgaatacattttcagtgtattcactgcagtaaactgctttgatcttaatatacttaaagatgtgaatgatgtagaaaatcctgctctggctctttgattagcacccacttcaaagtatttgctcatgctagacagcttgaaagagcacccattgaaaccagamggatttaacagagggacttgaaacacagcaatgcaaagatgctctggtatctgtctaacactgatcagcaaggttgaggttaggccacgtaacactcagaaatcaaagaaaattkaackgaaggtttcagaatggttggtgtggaacagtcacttcttccttttcagcctcccctgttgatatatttgctagacagcctgatttccagagcacaatgcctacaattatagatccagacaccgaatcatagaatcattaaggttggggaagaccactaagatcacccagcccaacccgtcccctgtgcccaccaaaccatgtcccttggtgccagagctggaagagatggaaagactgctcattccacactggagaacatcacctttctgggaacccagccatcactgcgttgcatgtcc

SEQ ID NO: 61062 - DNA, 546 bp, Chicken  19866894321292_1
agcatttacaaatgttatacaattgcctgcgcttccctgacttcccatcaaaagtactgagtatcctctttcttagggagaaaatcttcacagtgcttagtaagctgtgcagttggacttgtttgctggggattccttaattcattttttctttcatcttggagaaaatttggtgtggtgaggcatttatattgtcctgattttgggtagaaagaccttaggtcctcaaggggtacaaaggctgcagcccttctccactgtcttcctctcccttcctcagtgccatgcatttctctgcayctccacacttgcactagcgccggtcattcttacatttctgaagttaaaagacaaaaacagaagaccaccccttcctgtagtggcttctattattagaaaagtaatttttttttggagaggaaggatgattttatggagctggaagccagatgatctcacttctaatcctggtgttgacacagattttcctgtgcaacctcaggaaaaatctcttgctgcattccagtttgcaatcagtaatataca

SEQ ID NO: 61063 - DNA, 600 bp, Chicken  19866894321296_1
atgtagatccctatctcctgttagttctgatcttgcttggtgtggccagcccatgtgctggaaggcttacagaaggggaaatcatttccttggactccctcctgctctttaatgggtctgatttgtgatgtgccacgttgctccctcagtggctgctcaaaagtctcttgcctagttttagaaagagcccaccagacacaaaatagaagacaaaaatattcggtgtcttgatggaaagtgagtctaaaggggtctgctgtaacatgaaaaacaaaaggagcagtgtttccacctagtgckccaaacatcttggagtcaaatgcggaaaatgtttatagtgttgtatagttttattgctacagactgagggaaaacagcttattgagtgactttcaggggccgtactttgtaccgatgggctatcaaatagtggacaccctttgctgtagattgggagtgcggaatctgtagtagtactcagctttcttgtgctgtttatgaggataaatcctagttttgaattcactgaggttctagattcatagggatgagtttggctgcagtgccagaggctgtgtgggtacctgagggcatagcccc

SEQ ID NO: 61064 - DNA, 600 bp, Chicken  19866894321302_1
tttgtttgtttgttggtgggatctttggaaggctgttttgaccatgagacgtatggtgtcagtaaatgtagttccagtatctgacttacgttagcaactgaacacagggtagtggcacaaagtaaggtgtcccactgcgaaaagtatcttgcagtacagaactcagggatgttttagaatcaagatgaaagataaagttttagtttcaaatcactggcttcccattcacataaaaggagtcttacagagaagtctttacttattcagtacttcattcattatatcgtctgttatcaaccytgtaagtacaggttcccatgatgagcctttacaaataaatctgattattaagacacracctgtatttcttttcactgtctgcaacagaagccagggaaccctaaacagtggacaagctagatacgcttcaggaaccagagcccttagtgctacgtcatagcatctttgatttgtgctgggggaacatattccttcttaactcacagtctgcacaatgctactttgctggaagaacatttacaaacagccacatcctttccatgcattacaactaacacaaaatagaatgtacctttcaga

SEQ ID NO: 61065 - DNA, 600 bp, Chicken  19866894321302_2
gtcagtaaatgtagttccagtatctgacttacgttagcaactgaacacagggtagtggcacaaagtaaggtgtcccactgcgaaaagtatcttgcagtacagaactcagggatgttttagaatcaagatgaaagataaagttttagtttcaaatcactggcttcccattcacataaaaggagtcttacagagaagtctttacttattcagtacttcattcattatatcgtctgttatcaaccytgtaagtacaggttcccatgatgagcctttacaaataaatctgattattaagacacracctgtatttcttttcactgtctgcaacagaagccagggaaccctaaacagtggacaagctagatacgcttcaggaaccagagcccttagtgctacgtcatagcatctttgatttgtgctgggggaacatattccttcttaactcacagtctgcacaatgctactttgctggaagaacatttacaaacagccacatcctttccatgcattacaactaacacaaaatagaatgtacctttcagaaattattgctttcctttatagctttgtgccttgagtctctcaaaatactacatacag

SEQ ID NO: 61066 - DNA, 600 bp, Chicken  19866894321304_1
attgggagtgtgtatgatgagatccaaggactgcatcaagggaccaggcaatcagtggcacatgctgagtgtgagcatgtgaactgggtacctggcagaggctctccagttgtatggccacgtctccttcctgcaagaaccccagggcatgggctggtggatgctctgaagacgcacttacagcatagggcatgcactcccatctgggaggttggtagcagacacagctgtgtccatgcagctggaactccacaggctgcttgcagtgtctcagagttggaatgtgcatcttgcaatgcmtccttacaaaatggcatccagaagataagtctgtggtgtttaccgcttttcattctctttttcagtgaaatcactacaaaatcctgcagcacagcacaacaactggtgtgcttctaccagtgagcagttggacaggcagcagtattcacagctcgatcctttttctgcttaaaaattcctctgtcagaggacacttttggaaattcatgtaaatctcactttttgagatgcttaaattctgtgtttcaaaatatcttgctattaaatggataggtaagctggctaagggtgctgtatgtg

SEQ ID NO: 61067 - DNA, 600 bp, Chicken  19866894321306_1
ttgagcctgaaaccacctcttcggtcatgtgctggtggatttaagtataccttggtgtgtgtggctgtatcttttaaaaaattgcccatcagttgcaagagaagagctcccaagtgggagccaaccccaactaacatggggcgtgcgtgctcatggccgctgtatgtggggacaaatgttggtgttgcttaagccagcctgacacttcccattgatatgataagaccttacttttgatacctgagaaatctgacagcctgcagctgcttggcctaaaatcttcctttgggctgttcccasgtacgggctatgsgcctctgtgtggatttgcccatcccccaaaaacagacaaatgcaaaagcagtatctactattcacattgcaaaatgtggtgggggagagggcggtggatgctgccacgctgcccgtgttgcagctgcatcctcccctgagcgcagggcaggaaggatgctgccagctcctggtgctggggtttggcccatttgggtcctaggggacccaaagctgctatgctggttccttgggcacactctatttgcccgtgcaggctctggaggtgctgccaggggccgtgggtgt

SEQ ID NO: 61068 - DNA, 600 bp, Chicken  19866894321306_2
cacctcttcggtcatgtgctggtggatttaagtataccttggtgtgtgtggctgtatcttttaaaaaattgcccatcagttgcaagagaagagctcccaagtgggagccaaccccaactaacatggggcgtgcgtgctcatggccgctgtatgtggggacaaatgttggtgttgcttaagccagcctgacacttcccattgatatgataagaccttacttttgatacctgagaaatctgacagcctgcagctgcttggcctaaaatcttcctttgggctgttcccasgtacgggctatgsgcctctgtgtggatttgcccatcccccaaaaacagacaaatgcaaaagcagtatctactattcacattgcaaaatgtggtgggggagagggcggtggatgctgccacgctgcccgtgttgcagctgcatcctcccctgagcgcagggcaggaaggatgctgccagctcctggtgctggggtttggcccatttgggtcctaggggacccaaagctgctatgctggttccttgggcacactctatttgcccgtgcaggctctggaggtgctgccaggggccgtgggtgtagtttgagcctta

SEQ ID NO: 61069 - DNA, 600 bp, Chicken  19866894321307_1
tactaacagtactgctttttgagggaaataatgagtctcttcaagctaagaatttgaactgccagaataatttcaagctttccagttttatctctagtagtctctatgttgtgagagtaatttatcatgggtttgaacttgtctaatataggcttatttttccattacatatttatctgataacatctgtaagaacagcagatattgatactttatatcgtgtctaggatgaagatctgaggcaggaggggaaaaaaggagtatgcaacaaatactcatcaattttcttgatattgaagwctttaatgtaagctgaaattggcctagcagttatgtttgtcacgatgacattattaaagggaatgaagcacaaaataattattgtcttgacaatagaatatttattatttggtgtccagctttggcagtgcagcaagctctacttgagacattgcctgtaacttgtttcttttggaaaatacatcaatgtgatcacactacactttttctggataatattgaaatcatcagagactaaaaaacttctaaagctttgcattttttttttgtttttccctatgatgtcaaaagaatatgatg

SEQ ID NO: 61070 - DNA, 600 bp, Chicken  19866894321316_1
gcagaggaaggagaggagcagtgtagagacagtctgtaatttgaccttggcattaggaaaagtaacttaagagaaacttaaatgctttcaaggtaaaagtagtctagacctcaggtctccaactccctggtacatgatctaacctataaaacatgtttgtccccattttcagaatgaggtttgttcttcaggaatcactcactttgagtaaagctttggcctccaaccaacctcctcaccctgttaaccttcaggcagggctggaaactcagtttcttcacagggctaatccttccctawcagtaaacttggagcaggctagtctgytgagatttattgctttcccacttgatggttaattacctgtgagtaattatatttctttacctccagatgtttttggaagattaatgtattaagaaatgtaagcagctctgttaattatgtgttcttaccaggatagatggcaattccatacctgggagtacagcaaagcagtgatgcaatgctgtggttagccattcacctgcacgttgtctgcgaggcttcagaaacttagctgctgaagrggttgagagtatggtctgatttcaatgttgg

SEQ ID NO: 61071 - DNA, 600 bp, Chicken  19866894321316_2
gacagtctgtaatttgaccttggcattaggaaaagtaacttaagagaaacttaaatgctttcaaggtaaaagtagtctagacctcaggtctccaactccctggtacatgatctaacctataaaacatgtttgtccccattttcagaatgaggtttgttcttcaggaatcactcactttgagtaaagctttggcctccaaccaacctcctcaccctgttaaccttcaggcagggctggaaactcagtttcttcacagggctaatccttccctawcagtaaacttggagcaggctagtctgytgagatttattgctttcccacttgatggttaattacctgtgagtaattatatttctttacctccagatgtttttggaagattaatgtattaagaaatgtaagcagctctgttaattatgtgttcttaccaggatagatggcaattccatacctgggagtacagcaaagcagtgatgcaatgctgtggttagccattcacctgcacgttgtctgcgaggcttcagaaacttagctgctgaagrggttgagagtatggtctgatttcaatgttggaaatggaatgagagctcataaatcgtt

SEQ ID NO: 61072 - DNA, 600 bp, Chicken  19866894321316_3
cagtttcttcacagggctaatccttccctawcagtaaacttggagcaggctagtctgytgagatttattgctttcccacttgatggttaattacctgtgagtaattatatttctttacctccagatgtttttggaagattaatgtattaagaaatgtaagcagctctgttaattatgtgttcttaccaggatagatggcaattccatacctgggagtacagcaaagcagtgatgcaatgctgtggttagccattcacctgcacgttgtctgcgaggcttcagaaacttagctgctgaagrggttgagagtatggtctgatttcaatgttggaaatggaatgagagctcataaatcgttctgatgcatcgcagttataaatcattctgatgttaaaaataactgtgttcctggaggaacatctgagaaacaaaatgattgcactggtctaatgctaaggccttgaaattgttgagccagaatttaagggtaatctgcaaaataaataaataaacaaataaattgctgtttgggtgattatgtctccttcctggcccctgaaaagagatgcttttcaagtggaaaagctggctggcatgctc

SEQ ID NO: 61073 - DNA, 600 bp, Chicken  19866894321319_1
taatctgtgttgctcttctagtgaggattttactgttggaaaccttagtaaaactggtgtgaaatgaaatacagtttaatatgggaagaagcaaaattttgtgaagtagcccactacaccagtgcagaatataaagtgactagtcagtagcagttctgcaggagagatctggagctgggctcacaatttcaagctggcattcttggtgcaagcaaggccttggtgggctgattctgctggcagaagataagccgtgaaccaattagatagtccagaggagagcacagcagatctttgtaygcctcaaaaatattgtctgtgggataatttacttcattctgtctctgtgtaagattgtagaatcttttgtgtttgaagggaccttttaagatcrtgtagttcaactctcctgcaatgaacaggggcatctgcagctcagagccccatccagtctgaccttgaatgtttccagggataaggtatccaccacgtccctgggcaacctggtctggtgctttactacccttcttgtataaataaaaattaccatttgttcagtctaaatctcctctcttttagttttgaaactatttccctttg

SEQ ID NO: 61074 - DNA, 600 bp, Chicken  19866894321319_2
aattttgtgaagtagcccactacaccagtgcagaatataaagtgactagtcagtagcagttctgcaggagagatctggagctgggctcacaatttcaagctggcattcttggtgcaagcaaggccttggtgggctgattctgctggcagaagataagccgtgaaccaattagatagtccagaggagagcacagcagatctttgtaygcctcaaaaatattgtctgtgggataatttacttcattctgtctctgtgtaagattgtagaatcttttgtgtttgaagggaccttttaagatcrtgtagttcaactctcctgcaatgaacaggggcatctgcagctcagagccccatccagtctgaccttgaatgtttccagggataaggtatccaccacgtccctgggcaacctggtctggtgctttactacccttcttgtataaataaaaattaccatttgttcagtctaaatctcctctcttttagttttgaaactatttccctttgtcctgtcacaaaagaccctgctaaagaatctgtacctttcgatcatagagatccctcattagatactgaaaggctgctcttaggtctccatgga

SEQ ID NO: 61075 - DNA, 600 bp, Chicken  19866894321320_1
aggtgggatagggcaggatgggacatctgcctgcatacgaggagagtggtggagtaatgggcagtgggtccttagcatggggacagtgggtgctgcgtaccactgtggtggcttcccgctgtctgagggatgcttgggatgcaactccctgcacagtgcagtgtgaccataactgtgtgatctgcagtactcccaggtggtttggtgatgtccatgttgcaagatgtccagcttgagatgctatctgcaccaggaaggccaggagctgtttctgcttgagttagataaggctgagacaaraagtgctgttatccctgttctcatggagaagtgatccctgatcttatccttgatctctcttggagtggagcctttccttagggcacgtggggagccctcgagccccagaagccatgccacagtttcccagccctttcccagagccttacctgtgagctgctctgctgcagtgaggtccatccctgcctctctctgtcccatctccaagccaacatgaaccatgccatgcagatctgctggtagagctcagctctgcacccagtctgttgggatttgggagatgtcacccattcccatgtg

SEQ ID NO: 61076 - DNA, 585 bp, Chicken  19866894321321_1
tcctcattaggaaaatgcagccagctgtggcacaactcccagcacagtcacagctccatgttgtattgtaagagggtttgtgggatatgaaagcaaaataaatgagggctcctttcttgcacagcgttatggtttcttcctatcctggatgtataacacgaaggtctgttggctcagtgatccgtgagctcggatcaccttgtgtgaaacagagatcactttagaggaaggctgtgaggtgcctgcatatcagaatctcttatgtttaaaatttagggttacttgacattttgcaacagygtgtgtgtgctctgcagacacggacaaatatcagatctttaaaaagacaaagtggaaaagcaaatgctttgtctccttgaattgatccaaagtaagagcactgtttgctcccctggggcatttcatgatgatttgccttaggcttccaagtaaaaactacagaagcacctggctgttaatttgttttgtttttttttgtaaatctccgtgagaaataagaattatttatgtcagcatttcagtttaactgcaaacaagatttattcagcagcttacccacgcttg

SEQ ID NO: 61077 - DNA, 600 bp, Chicken  19866894321324_1
tgtgtcattttagcaagctaagataatacataaatgaggcggacaggtactagagacagaaggcatgtgccttccctaaacttacttagcccagttcactaggccccactttactcagggctttgtgattccatctgaataaaatgagtttaatatgcatgtatttattagtatgttgtcttatcatgtatatactatgcagttaaaaattagtcataccatatatatatatatatttaccttaggtaataccatgcttttgcctgcataactactttaagcaataggatcatgcattcktttaacactattgtgtatgttaagcaatcagataccatgagctatgtgaatgcaaatcacttgttcacgacaaaatccttcaattaatacagagccaattgtagcatctggcataatatgcttacatggaaaactgtctaaaaactcagtctcatgactcagtaccaatcacttcaagttttataaatcccacatgcacagaggacatcatggttttcaacaaagactaaggagtccaagccaaaatcttcattgtctgagcctaactaatgttattgacttccaatcagttatccccat

SEQ ID NO: 61078 - DNA, 600 bp, Chicken  19866894321327_1
tattcaagattggactggaaaagtccctgagcaagctgatctgaatagacctacattatgttggactgagtggtctccagaggtgcctcccagactaaattttcccttgattccatgcctgcagatgtgggtaccataaggaaatcagactgtagaaagtggtcaggctgtgcatgaaaacacacaccatgagcagcaggagcaccattacttggttgtgcagaacctcttcaagtcagcccatagagtagatggcactagtttagccaggaggattctccaggtccccaatcaggtacmcacccttttctccccaagaacttttgtgatgcccagaaggacagcacagcagtgaaaattgcttcatcaggagtggcaggggaatggcaggcatgcacggggtgtgcacaggacatacacrgcaggatgctggcactagctcacagcaaatactttgcttctgctgcaacttgctcctgaggtgcttcctgctctttacgggaatcccatgccatgggcacagcagtatcatgcacagaaagtgtggggagagcatggtcccaaagcccctttgtcctcatcagaggactgctaggttgt

SEQ ID NO: 61079 - DNA, 600 bp, Chicken  19866894321327_2
cagatgtgggtaccataaggaaatcagactgtagaaagtggtcaggctgtgcatgaaaacacacaccatgagcagcaggagcaccattacttggttgtgcagaacctcttcaagtcagcccatagagtagatggcactagtttagccaggaggattctccaggtccccaatcaggtacmcacccttttctccccaagaacttttgtgatgcccagaaggacagcacagcagtgaaaattgcttcatcaggagtggcaggggaatggcaggcatgcacggggtgtgcacaggacatacacrgcaggatgctggcactagctcacagcaaatactttgcttctgctgcaacttgctcctgaggtgcttcctgctctttacgggaatcccatgccatgggcacagcagtatcatgcacagaaagtgtggggagagcatggtcccaaagcccctttgtcctcatcagaggactgctaggttgtgtgctgtcctgagcaactccacctcatttagaagaaatgtgggtttttatttcttttcattgcttcatgcctatctcatttaagactttttacttgacccatcccttctccattccctatt

SEQ ID NO: 61080 - DNA, 599 bp, Chicken  19866894321332_1
  misc_feature (1)..(38): n is any nucleotide
nnnnnnnnnnnnnnnnnnnnnnnnnnnnnnnnnnnnnntctttgttcccattggtattcatcttcatcttactccactctgctctgcagcatcccactagcaagcacgtccatctatttgcacttgcgctggtttgtaacgctccagcatttatgcacagcttcacacatcagtaatgacatcaacaactctgtgtggttttctcctgggaagtaggaaacaaaatagcaaaatatggtacagtttctcaacctgcctccaggtactgttattaggactgaagtgaattctaagtactgygaatttttggtgtgaattctggaaatgtaattcagtatactcttttttcatgcatctgatttaggaaaaacttaatagtattcatactgtactcttagattcctgcattttaagagcacagctgattttatgtgttatcttggagttaactggtttaaatccagtcccttagcaatttcagtattgtttatgctttttaactttgaacttctggctttttttaaataatgaagacattctacattggaagaggatataaggtgtgcagcacagagatgacatcagtattgtattgtttc

SEQ ID NO: 61081 - DNA, 473 bp, Chicken  19866894321332_2
acttaatagtattcatactgtactcttagattcctgcattttaagagcacagctgattttatgtgttatcttggagttaactggtttaaatccagtcccttagcaatttcagtattgtttatgctttttaactttgaacttctggctttttttaaataatgaagacattctacattggaagaggatataaggtgtgcagcacagagatgacatcagtattgtattgtttctttttttctgttttcttctagatctgctttagcagcagctatccttgcaacaacactgacagggcgcacrgttgctattcctcagcctcggcagcgatcgcggttctgaaggcgattccgcccacatagaacaggagggctttgaaccatatgcaacagtcacagagctcagaatggggtagcatatgctttctattttgctatcttagattagaaaaacaatcttctaatgaaataatttta

SEQ ID NO: 61082 - DNA, 600 bp, Chicken  19866894321333_1
atccgctatggggaatacaacaaaacaacaacagtaaaaaaagaaacccagaatattttcattccagactctaatgaaatgttaaatcattacagaatatgcttcttaaaaaacagtatatataatactaaaaaaaagacagtattaatacatagttaaaagtgaaataaggtacatacaaaaggatcaggaaatgctaagacagttcccatagcaaccataattctgtcccattcatcacagcataggctgatagcctcttttgtttctaatttctttccagctatccctcgccaataygaagcacattcactaaatatgagggctttagccagtcaagttttgcaagtccagtggcagggttctgtcctctgcctgtgggaggcactagtccattgtctaacaaacaaccgtaggcatttctttcagaggttactttaggtttcccattgaggagtttcaaccactatgcaccgtgacagataattgctctccgtagagtattctaaaaattcttcatactctatcaattattctcaactaaaaactgctggttggaattcttataaagagcacgataaattagtgtttacccaattt

SEQ ID NO: 61083 - DNA, 599 bp, Chicken  19866894321334_1
  misc_feature (1)..(177): n is any nucleotide
nnnnnnnnnnnnnnnnnnnnnnnnnnnnnnnnnnnnnnnnnnnnnnnnnnnnnnnnnnnnnnnnnnnnnnnnnnnnnnnnnnnnnnnnnnnnnnnnnnnnnnnnnnnnnnnnnnnnnnnnnnnnnnnnnnnnnnnnnnnnnnnnnnnnnnnnnnnnnnnnnnnnnnnnnnnnnnnnnattcctcacccctcccaactcccatctcaaagcatcatgggattttttgaagagaaaaatgttttgtttttgtctgtataaaataagtttccagacatttcaattatgaagaacagtttgggraaaaaaaaaaaaaaaagactttcagctgagaattacagctcccaaaatatatttggtttaaaatgcaagttttttaaagcttctctccatagttttgaagcttagttcataattatgaaaatttgggattagaaacatgactaagaccagtaaataaaaagaaatctgccatccaatagattagatttttctgacatcatggcagaattcccagagccaacactcagctcaagagagattttctgccatctgaaaagcagattgaaggtggactctctaaagggaccaaaatgattggt

SEQ ID NO: 61084 - DNA, 599 bp, Chicken  19866894321334_2
  misc_feature (1)..(176): n is any nucleotide
nnnnnnnnnnnnnnnnnnnnnnnnnnnnnnnnnnnnnnnnnnnnnnnnnnnnnnnnnnnnnnnnnnnnnnnnnnnnnnnnnnnnnnnnnnnnnnnnnnnnnnnnnnnnnnnnnnnnnnnnnnnnnnnnnnnnnnnnnnnnnnnnnnnnnnnnnnnnnnnnnnnnnnnnnnnnnnnnattcctcacccctcccaactcccatctcaaagcatcatgggattttttgaagagaaaaatgttttgtttttgtctgtataaaataagtttccagacatttcaattatgaagaacagtttgggrraaaaaaaaaaaaaaagactttcagctgagaattacagctcccaaaatatatttggtttaaaatgcaagttttttaaagcttctctccatagttttgaagcttagttcataattatgaaaatttgggattagaaacatgactaagaccagtaaataaaaagaaatctgccatccaatagattagatttttctgacatcatggcagaattcccagagccaacactcagctcaagagagattttctgccatctgaaaagcagattgaaggtggactctctaaagggaccaaaatgattggtt

SEQ ID NO: 61085 - DNA, 599 bp, Chicken  19866894321334_3
  misc_feature (1)..(175): n is any nucleotide
nnnnnnnnnnnnnnnnnnnnnnnnnnnnnnnnnnnnnnnnnnnnnnnnnnnnnnnnnnnnnnnnnnnnnnnnnnnnnnnnnnnnnnnnnnnnnnnnnnnnnnnnnnnnnnnnnnnnnnnnnnnnnnnnnnnnnnnnnnnnnnnnnnnnnnnnnnnnnnnnnnnnnnnnnnnnnnnattcctcacccctcccaactcccatctcaaagcatcatgggattttttgaagagaaaaatgttttgtttttgtctgtataaaataagtttccagacatttcaattatgaagaacagtttgggraraaaaaaaaaaaaaagactttcagctgagaattacagctcccaaaatatatttggtttaaaatgcaagttttttaaagcttctctccatagttttgaagcttagttcataattatgaaaatttgggattagaaacatgactaagaccagtaaataaaaagaaatctgccatccaatagattagatttttctgacatcatggcagaattcccagagccaacactcagctcaagagagattttctgccatctgaaaagcagattgaaggtggactctctaaagggaccaaaatgattggttg

SEQ ID NO: 61086 - DNA, 599 bp, Chicken  19866894321334_4
  misc_feature (1)..(174): n is any nucleotide
nnnnnnnnnnnnnnnnnnnnnnnnnnnnnnnnnnnnnnnnnnnnnnnnnnnnnnnnnnnnnnnnnnnnnnnnnnnnnnnnnnnnnnnnnnnnnnnnnnnnnnnnnnnnnnnnnnnnnnnnnnnnnnnnnnnnnnnnnnnnnnnnnnnnnnnnnnnnnnnnnnnnnnnnnnnnnnattcctcacccctcccaactcccatctcaaagcatcatgggattttttgaagagaaaaatgttttgtttttgtctgtataaaataagtttccagacatttcaattatgaagaacagtttgggraaraaaaaaaaaaaaagactttcagctgagaattacagctcccaaaatatatttggtttaaaatgcaagttttttaaagcttctctccatagttttgaagcttagttcataattatgaaaatttgggattagaaacatgactaagaccagtaaataaaaagaaatctgccatccaatagattagatttttctgacatcatggcagaattcccagagccaacactcagctcaagagagattttctgccatctgaaaagcagattgaaggtggactctctaaagggaccaaaatgattggttgt

SEQ ID NO: 61087 - DNA, 600 bp, Chicken  19866894321335_1
cttttctgtgtcagacaatgcatcagcaaattttggctaaaaattgaggattagtatctatgggaagtgggccagaatttgtagcagaacacacatttcttttttcactgaattgaatcttaacaaatatcagtgggtgtagtaattgacttgttggatgaaatatgcctttttcaatcacatcatttgttccaaaatacttctaatattttctccgtaggttgatttattaacactgctttgcaaactgagaaactggagcttttcccttcagccttcagcatggctgatgtgctgtgyttgggactactaacacagactcactgtaagctttcctaaaatacrgagataattatctgcttatactgcaacagtttgcaagacttcctgtaactctgtattgcttgtggtcaaagagtgccatgagctacaacatgctgccagaggacgaggctgtcctcctccaagtgttggtggctgagaaccagcactgaggagtccagcaaagcagatcctgcctatagtcgactgtgagttctgtgtagctggaaaacacttccagctggaagaacagtcactgctaaaaatggattcaggtca

SEQ ID NO: 61088 - DNA, 600 bp, Chicken  19866894321335_2
gaggattagtatctatgggaagtgggccagaatttgtagcagaacacacatttcttttttcactgaattgaatcttaacaaatatcagtgggtgtagtaattgacttgttggatgaaatatgcctttttcaatcacatcatttgttccaaaatacttctaatattttctccgtaggttgatttattaacactgctttgcaaactgagaaactggagcttttcccttcagccttcagcatggctgatgtgctgtgyttgggactactaacacagactcactgtaagctttcctaaaatacrgagataattatctgcttatactgcaacagtttgcaagacttcctgtaactctgtattgcttgtggtcaaagagtgccatgagctacaacatgctgccagaggacgaggctgtcctcctccaagtgttggtggctgagaaccagcactgaggagtccagcaaagcagatcctgcctatagtcgactgtgagttctgtgtagctggaaaacacttccagctggaagaacagtcactgctaaaaatggattcaggtcagctttcacaatgctttctctcaggagggatattcagtgagctgtc

SEQ ID NO: 61089 - DNA, 600 bp, Chicken  19866894321335_3
aaaaatggattcaggtcagctttcacaatgctttctctcaggagggatattcagtgagctgtcctagtctccaagtgcactttctctccccattgtggacaggctgttttcttaatcaagtgtcacctcatgtcacacactttgcagctgtctttctgtccccttttctctcatcttggatttactttctacttagctgatccttaaaaatccttctcaacataagaattgaacaacagttgccaccatcagagggtgatgtttatgtccatcttcaagacagctgcaccttcctttccmctgtgccttctcccctctttccactccctacagctggctctggagcctcacacagcataaagttcagcttagaagaactagggaaaatgatcacatcagacatcattagtaagacaaattcatcttctgaggacagatattatatttagcactgtgaggaatcttcactgtggatgttgagaaggctgagggctcactacgggtatttcaggcttttcagaggcttttgtggatcctgcactgatgttctcgttggcccggtctaccagcactggcctaaaacacacactgtgccacccc

SEQ ID NO: 61090 - DNA, 599 bp, Chicken  19866894321341_1
  misc_feature (1)..(79): n is any nucleotide
nnnnnnnnnnnnnnnnnnnnnnnnnnnnnnnnnnnnnnnnnnnnnnnnnnnnnnnnnnnnnnnnnnnnnnnnnnnnnnnctttctagattagaattgttcctttttcctagagagagatatatatttaatataaacaataatttggatatattctcacatgaattgtgcaactcatgaacaggttggaaaggaaaacaggaagtttcaaaatagctcagaaatgtgtttattgtacttgtgaaaaaactatgattataccagtagagtagcaatagcagagggtatcaggcttatgacaygaatctgcagtctgaaatgccttttttttttttttttttaataaataaaaacattctggtttccagtatctatactttcaattaaaagggctgcacccagttatgattggtcatgagaagctttcttatacaactaagtccacatttttcaccttgctgaaagaaagaagttccttggcaatgataaaaagattcagtggaactcttatacctttattcactgcagttctcttctgcatgccagtacaagtgctttatgcagtcacaggatgaactggaccaagaactgatctgactaa

SEQ ID NO: 61091 - DNA, 491 bp, Chicken  19866894321344_1
aaaggcaccaggcttttgctttatgcttcatgcctgcaagttgggaatcagaggggaaaaagattccaattttcgaagtctcttattgttaagggtgactggatggcagtctgcaattatatgatttcaatgtaattcattcagtagggaagaagttggttcatagatgcctgacttaaaagattggcattgctatgtgattaatttccaaactttagaggtattttcaacagcatacaatggaagcatgtgacagtgacattttctggatttctgccatgattgctttataattgaagwgctgggcttgtggggatcacattgtgattggagtttcatttttaatacagtgagcataaattagtataggtacaaacatatatatgcattgacgagtatacaygtgcatctatatatagaggtgtccctgcctacagcagggggttggaactaggtaacctcaaaggtcccttcccacccaaaccattcta

SEQ ID NO: 61092 - DNA, 388 bp, Chicken  19866894321344_2
tggcagtctgcaattatatgatttcaatgtaattcattcagtagggaagaagttggttcatagatgcctgacttaaaagattggcattgctatgtgattaatttccaaactttagaggtattttcaacagcatacaatggaagcatgtgacagtgacattttctggatttctgccatgattgctttataattgaagwgctgggcttgtggggatcacattgtgattggagtttcatttttaatacagtgagcataaattagtataggtacaaacatatatatgcattgacgagtatacaygtgcatctatatatagaggtgtccctgcctacagcagggggttggaactaggtaacctcaaaggtcccttcccacccaaaccattcta

SEQ ID NO: 61093 - DNA, 599 bp, Chicken  19866894321347_1
  misc_feature (1)..(145): n is any nucleotide
nnnnnnnnnnnnnnnnnnnnnnnnnnnnnnnnnnnnnnnnnnnnnnnnnnnnnnnnnnnnnnnnnnnnnnnnnnnnnnnnnnnnnnnnnnnnnnnnnnnnnnnnnnnnnnnnnnnnnnnnnnnnnnnnnnnnnnnnnnnnnnnnnatctccattagctcactgtttttctatgggcattatttaaaatcattttaaagatgccagtactgaaattaccccatcttgcaagttttgcagtcattatgcagtgctctggtgccagtacacacaacagaagccctctcccaaggtcatgtttygtgccacttgaccgtacatttttcattatcactcattttattagcaaacctggccctgagtgccagtcagtcagcctgcatgtagacaatgtgttgctctcacaaacaaagaagtcagaagaatawttttaaatgagctctttcagaagcgttatcatctaaacctacttcccaaagtgctattatgatagttagagttcatctacctacctgattttctactttggagtgaatttccactaagacaaacatttctccagtggcgataaacagccttgccatttgttttggcgcatatc

SEQ ID NO: 61094 - DNA, 599 bp, Chicken  19866894321347_2
  misc_feature (1)..(19): n is any nucleotide
nnnnnnnnnnnnnnnnnnnatctccattagctcactgtttttctatgggcattatttaaaatcattttaaagatgccagtactgaaattaccccatcttgcaagttttgcagtcattatgcagtgctctggtgccagtacacacaacagaagccctctcccaaggtcatgtttygtgccacttgaccgtacatttttcattatcactcattttattagcaaacctggccctgagtgccagtcagtcagcctgcatgtagacaatgtgttgctctcacaaacaaagaagtcagaagaatawttttaaatgagctctttcagaagcgttatcatctaaacctacttcccaaagtgctattatgatagttagagttcatctacctacctgattttctactttggagtgaatttccactaagacaaacatttctccagtggcgataaacagccttgccatttgttttggcgcatatcttattcattcaaatctacacaacagatwtctttgtctccagtttggaacatggtctgactgaaaaggctgtattcacatgaatctctaaacatctgttgaagattttatcattcccagtcccaata

SEQ ID NO: 61095 - DNA, 600 bp, Chicken  19866894321347_3
atcactcattttattagcaaacctggccctgagtgccagtcagtcagcctgcatgtagacaatgtgttgctctcacaaacaaagaagtcagaagaatawttttaaatgagctctttcagaagcgttatcatctaaacctacttcccaaagtgctattatgatagttagagttcatctacctacctgattttctactttggagtgaatttccactaagacaaacatttctccagtggcgataaacagccttgccatttgttttggcgcatatcttattcattcaaatctacacaacagatwtctttgtctccagtttggaacatggtctgactgaaaaggctgtattcacatgaatctctaaacatctgttgaagattttatcattcccagtcccaatatattataaattctatgtacactctaaggaaagtttgtattatctttatgaaattttttaaaaatgaaaactttcttcacatcaagcaaactcaggtcattccattaaaaaaaagtaagcctamaggccagcaactgaatcaaatattgtttaagaaggatataggtagtattcagaccttagtacaaaagtgaacttcatcc

SEQ ID NO: 61096 - DNA, 600 bp, Chicken  19866894321347_4
acatttctccagtggcgataaacagccttgccatttgttttggcgcatatcttattcattcaaatctacacaacagatwtctttgtctccagtttggaacatggtctgactgaaaaggctgtattcacatgaatctctaaacatctgttgaagattttatcattcccagtcccaatatattataaattctatgtacactctaaggaaagtttgtattatctttatgaaattttttaaaaatgaaaactttcttcacatcaagcaaactcaggtcattccattaaaaaaaagtaagcctamaggccagcaactgaatcaaatattgtttaagaaggatataggtagtattcagaccttagtacaaaagtgaacttcatccactatgaaaacatctcctgaatcattatgaagtttgtctgttagtaggcagatctaggtcaaatgttcccatgagttgggctgctaatgaaacaagttcaaatctagttgttttcattacacatttccatatatttttaatgtacgtttatacactaccactagaaaactcagtattctttcagcatagcaattttacttggagtacttatcaaaataaga

SEQ ID NO: 61097 - DNA, 600 bp, Chicken  19866894321352_1
ttctacacatccccccccaaatgccccaaggccggggagcaacaggacgggacagactggccgggctgggatgcacgagcactgtgcagaggaaggcagcaaaacccatctgtgaacttccagctccgacagtgaatcttgtttctttgtgctgtaaagaaatagggctgaagagcacttgctggtgacctgctgagagaacgctactagcatcaatctgcttccaagaaaattgaattaaggatccttcatggagcaatggatgtgtcgttaaagatactctgcaaatccaccataacrtacagggtatgtcacactgaccgagctgccttcatgtgacagatgcaggacaacccacagaagaaatttacwtggagtcttttgtatagaaggaaatctcaagacagttcgaagtcacagcagcccrttaaagcagactcatttaccacttgaaagctgagaaaatattaaaaggtttacactgaaaggctgatttaattgcagtttgttacactctgtccaacaaatcttggtaagacgtttgtatttacagaagttgtggtggagataagccttacagtcctaacaaatcatatacca

SEQ ID NO: 61098 - DNA, 600 bp, Chicken  19866894321352_2
gcacgagcactgtgcagaggaaggcagcaaaacccatctgtgaacttccagctccgacagtgaatcttgtttctttgtgctgtaaagaaatagggctgaagagcacttgctggtgacctgctgagagaacgctactagcatcaatctgcttccaagaaaattgaattaaggatccttcatggagcaatggatgtgtcgttaaagatactctgcaaatccaccataacrtacagggtatgtcacactgaccgagctgccttcatgtgacagatgcaggacaacccacagaagaaatttacwtggagtcttttgtatagaaggaaatctcaagacagttcgaagtcacagcagcccrttaaagcagactcatttaccacttgaaagctgagaaaatattaaaaggtttacactgaaaggctgatttaattgcagtttgttacactctgtccaacaaatcttggtaagacgtttgtatttacagaagttgtggtggagataagccttacagtcctaacaaatcatataccacagcactcaaaatacccctggtttgktttacagtacagaaatgatcaaaaaactgcttctccagattgaagt

SEQ ID NO: 61099 - DNA, 600 bp, Chicken  19866894321352_3
gacagtgaatcttgtttctttgtgctgtaaagaaatagggctgaagagcacttgctggtgacctgctgagagaacgctactagcatcaatctgcttccaagaaaattgaattaaggatccttcatggagcaatggatgtgtcgttaaagatactctgcaaatccaccataacrtacagggtatgtcacactgaccgagctgccttcatgtgacagatgcaggacaacccacagaagaaatttacwtggagtcttttgtatagaaggaaatctcaagacagttcgaagtcacagcagcccrttaaagcagactcatttaccacttgaaagctgagaaaatattaaaaggtttacactgaaaggctgatttaattgcagtttgttacactctgtccaacaaatcttggtaagacgtttgtatttacagaagttgtggtggagataagccttacagtcctaacaaatcatataccacagcactcaaaatacccctggtttgktttacagtacagaaatgatcaaaaaactgcttctccagattgaagtgaggctgccacaaagctcatgtttctattaccctggtggtgcctgcatgtagcca

SEQ ID NO: 61100 - DNA, 600 bp, Chicken  19866894321352_4
tgccttcatgtgacagatgcaggacaacccacagaagaaatttacwtggagtcttttgtatagaaggaaatctcaagacagttcgaagtcacagcagcccrttaaagcagactcatttaccacttgaaagctgagaaaatattaaaaggtttacactgaaaggctgatttaattgcagtttgttacactctgtccaacaaatcttggtaagacgtttgtatttacagaagttgtggtggagataagccttacagtcctaacaaatcatataccacagcactcaaaatacccctggtttgktttacagtacagaaatgatcaaaaaactgcttctccagattgaagtgaggctgccacaaagctcatgtttctattaccctggtggtgcctgcatgtagccaagaccaaaggttcccttcacacagcccacctcagctgcatcaatgtgagctctgggctttagattctaacacagcttaattctgaaacacaccgagggctggaaaggacaagaggtgaagtgtgagcagcaggagctgtgctctgtcctttggttttttaatttttggtggtgtggaaacagcaaaatgcactgcacca

SEQ ID NO: 61101 - DNA, 600 bp, Chicken  19866894321352_5
acacgtcgcctgcctgcagcactaagggcttccaaaaggaaaatcctacgagtgaagaactcgaaactttcagatgccaagcttcaaatataatattatcagatataattacagtaatacattgcacgcacacagaaatccattaaccatggaaatagagtcaggagaattacaactgggtaggggtttctctgataatgccaagtatttcagcatagctattattaaacaggagaacggcggagcacaaagagctgaacagctgtttctgatataagatcagacactgaaggagatacragtagaactcaaatgatttaaagtaatgaatgggtttcaaataaaacgcaaacataaccatttccttcaactgaacagtggggaagagaaatgcaaaagaactttccgcaagagaacagcctgaccttttgcataacatatggtgactttcctgtctttgattcagtgttttcttcaggaaaaagcacagaaaagatcaacaatctcatgcatatagataaaggtttgctatattctgaagaaacgttttgcttctctgttttcctcaagatgcttccccacacttctctgggaggtcct

SEQ ID NO: 61102 - DNA, 600 bp, Chicken  19866894321353_1
catagtcaatgagtctgcagacagagactgtactgtctgagaaatactttgtcctataaaggaaaaagtgtcaggtagtccacataataatttgtgatctacagtattttaacttctgaatagcgttgtgttataatgctctagaagatagacacaaatgatcttctgaaatgaaagagtgacagacagagtcccatagtgcctgttaaatgtaatcttaaacttgactatgtgcaaaataactaacccataaaaatctttaaaaaataaaataaccactatcacctaatatttatacaytgttatagtggttaataatgttttgcaataatgtatgtgcatctctgtcttttcaggagtatcctgattgcatgaatgatatgcatagaaactctcatcacttgaggagtccattacggaattatatctttaactcacgtgcaaaactaatcatatgaagaatgttcatgctgyagttggttgagaagaacaatacagtagtaagtcaaaaagctttttgtctttttttttttttaatccactgatgctttattctatctgaactcatcactaggagacatcaaaaatctttacaaattg

SEQ ID NO: 61103 - DNA, 600 bp, Chicken  19866894321353_2
aagagtgacagacagagtcccatagtgcctgttaaatgtaatcttaaacttgactatgtgcaaaataactaacccataaaaatctttaaaaaataaaataaccactatcacctaatatttatacaytgttatagtggttaataatgttttgcaataatgtatgtgcatctctgtcttttcaggagtatcctgattgcatgaatgatatgcatagaaactctcatcacttgaggagtccattacggaattatatctttaactcacgtgcaaaactaatcatatgaagaatgttcatgctgyagttggttgagaagaacaatacagtagtaagtcaaaaagctttttgtctttttttttttttaatccactgatgctttattctatctgaactcatcactaggagacatcaaaaatctttacaaattgagttacagaggtaacatgatagggatgtgcatagaaatctaagctttgatttacttatttttaattagtaagtgctctgtgtagtgcagcgaaacaaacgtgcttgstagagttttaaagtactttatgagaaaagttcaggttttgaagcatttaagtcaatgtaattgcctt

SEQ ID NO: 61104 - DNA, 600 bp, Chicken  19866894321353_3
agtccattacggaattatatctttaactcacgtgcaaaactaatcatatgaagaatgttcatgctgyagttggttgagaagaacaatacagtagtaagtcaaaaagctttttgtctttttttttttttaatccactgatgctttattctatctgaactcatcactaggagacatcaaaaatctttacaaattgagttacagaggtaacatgatagggatgtgcatagaaatctaagctttgatttacttatttttaattagtaagtgctctgtgtagtgcagcgaaacaaacgtgcttgstagagttttaaagtactttatgagaaaagttcaggttttgaagcatttaagtcaatgtaattgcctttgacatgtctgctgcttttcatatttttctctccaaaatrtatttctcttttttgctgcctcactctccctgtgtatctgatctctttcaccttcagattatctttcttagtatttccagcctccacctcatcagtaaagcttcaatgaacaatactgtttgaatcagaaatttaacaccaccatgaaggacaccatcaggtctaactacactcataggacaatcatgtagat

SEQ ID NO: 61105 - DNA, 600 bp, Chicken  19866894321353_4
tttttgtctttttttttttttaatccactgatgctttattctatctgaactcatcactaggagacatcaaaaatctttacaaattgagttacagaggtaacatgatagggatgtgcatagaaatctaagctttgatttacttatttttaattagtaagtgctctgtgtagtgcagcgaaacaaacgtgcttgstagagttttaaagtactttatgagaaaagttcaggttttgaagcatttaagtcaatgtaattgcctttgacatgtctgctgcttttcatatttttctctccaaaatrtatttctcttttttgctgcctcactctccctgtgtatctgatctctttcaccttcagattatctttcttagtatttccagcctccacctcatcagtaaagcttcaatgaacaatactgtttgaatcagaaatttaacaccaccatgaaggacaccatcaggtctaactacactcataggacaatcatgtagatatccaygtgagctttaaactggctggattcagtagcaatgcaggtctaaccaccatatgaatcagcatgtgttcctgtagcctactaagaaagttctgcaggataga

SEQ ID NO: 61106 - DNA, 600 bp, Chicken  19866894321353_5
tttaaagtactttatgagaaaagttcaggttttgaagcatttaagtcaatgtaattgcctttgacatgtctgctgcttttcatatttttctctccaaaatrtatttctcttttttgctgcctcactctccctgtgtatctgatctctttcaccttcagattatctttcttagtatttccagcctccacctcatcagtaaagcttcaatgaacaatactgtttgaatcagaaatttaacaccaccatgaaggacaccatcaggtctaactacactcataggacaatcatgtagatatccaygtgagctttaaactggctggattcagtagcaatgcaggtctaaccaccatatgaatcagcatgtgttcctgtagcctactaagaaagttctgcaggatagatgcacackaagtcttgcaagaccttcttcaatgggaagttacactgaccaataattttgaggatccctgccttagatcaggatactcaggtttagaaggtcactgctgattgaaaaacttaatcttttaacatctctgatacataattaattatacgcttttatgtatgtgttttctttgcactgtgtttggaaccaga

SEQ ID NO: 61107 - DNA, 600 bp, Chicken  19866894321353_6
ttttttgctgcctcactctccctgtgtatctgatctctttcaccttcagattatctttcttagtatttccagcctccacctcatcagtaaagcttcaatgaacaatactgtttgaatcagaaatttaacaccaccatgaaggacaccatcaggtctaactacactcataggacaatcatgtagatatccaygtgagctttaaactggctggattcagtagcaatgcaggtctaaccaccatatgaatcagcatgtgttcctgtagcctactaagaaagttctgcaggatagatgcacackaagtcttgcaagaccttcttcaatgggaagttacactgaccaataattttgaggatccctgccttagatcaggatactcaggtttagaaggtcactgctgattgaaaaacttaatcttttaacatctctgatacataattaattatacgcttttatgtatgtgttttctttgcactgtgtttggaaccagaatggccttccttctctaccagttagttgagatcttctgtgccagaggagcttttgattatgatctggattcacaattgatgtaagtgtggagattaattaagtgaagaa

SEQ ID NO: 61108 - DNA, 599 bp, Chicken  19866894321354_1
  misc_feature (1)..(158): n is any nucleotide
nnnnnnnnnnnnnnnnnnnnnnnnnnnnnnnnnnnnnnnnnnnnnnnnnnnnnnnnnnnnnnnnnnnnnnnnnnnnnnnnnnnnnnnnnnnnnnnnnnnnnnnnnnnnnnnnnnnnnnnnnnnnnnnnnnnnnnnnnnnnnnnnnnnnnnnnnnnnnnggacttattttgacctgccttgtgtttctgataatacataatatttatgtgtgcaattaagactgaaaaatgtcagaatgggctccaagttggacactgcatctcactgttttcagtctgctggaaggggacagatgtgcarcatgtaccgcaggtgcccaggggccacagaccccaggaatctgtcctcaaascatggcacaaccaccgtgcagggctgcaaagccccactgcccactgaggtcccctctcaaacacctgatccccgcaatrtcctggcagccatggttttagagcacactgcccatttggctccctgaatttgcaggggtgagtcctgccacggacccctgccacctggctctgaccaggacagctgggcagccgaggctctggtggctcagaagggtcaggccgtgagataccccatggtatagcagg

SEQ ID NO: 61109 - DNA, 599 bp, Chicken  19866894321354_2
  misc_feature (1)..(106): n is any nucleotide
nnnnnnnnnnnnnnnnnnnnnnnnnnnnnnnnnnnnnnnnnnnnnnnnnnnnnnnnnnnnnnnnnnnnnnnnnnnnnnnnnnnnnnnnnnnnnnnnnnnnnnnnnnggacttattttgacctgccttgtgtttctgataatacataatatttatgtgtgcaattaagactgaaaaatgtcagaatgggctccaagttggacactgcatctcactgttttcagtctgctggaaggggacagatgtgcarcatgtaccgcaggtgcccaggggccacagaccccaggaatctgtcctcaaascatggcacaaccaccgtgcagggctgcaaagccccactgcccactgaggtcccctctcaaacacctgatccccgcaatrtcctggcagccatggttttagagcacactgcccatttggctccctgaatttgcaggggtgagtcctgccacggacccctgccacctggctctgaccaggacagctgggcagccgaggctctggtggctcagaagggtcaggccgtgagataccccatggtatagcagggcacggcacagtcctgctcctgcttrgcttcgcagcacccagggaggccgca

SEQ ID NO: 61110 - DNA, 599 bp, Chicken  19866894321354_3
  misc_feature (1)..(27): n is any nucleotide
nnnnnnnnnnnnnnnnnnnnnnnnnnnggacttattttgacctgccttgtgtttctgataatacataatatttatgtgtgcaattaagactgaaaaatgtcagaatgggctccaagttggacactgcatctcactgttttcagtctgctggaaggggacagatgtgcarcatgtaccgcaggtgcccaggggccacagaccccaggaatctgtcctcaaascatggcacaaccaccgtgcagggctgcaaagccccactgcccactgaggtcccctctcaaacacctgatccccgcaatrtcctggcagccatggttttagagcacactgcccatttggctccctgaatttgcaggggtgagtcctgccacggacccctgccacctggctctgaccaggacagctgggcagccgaggctctggtggctcagaagggtcaggccgtgagataccccatggtatagcagggcacggcacagtcctgctcctgcttrgcttcgcagcacccagggaggccgcagccctcagggactacgcagctgctggccacggcaccttccaacacaacacattcagccaccgcacagctgaggggcaat

SEQ ID NO: 61111 - DNA, 576 bp, Chicken  19866894321354_4
acagaccccaggaatctgtcctcaaascatggcacaaccaccgtgcagggctgcaaagccccactgcccactgaggtcccctctcaaacacctgatccccgcaatrtcctggcagccatggttttagagcacactgcccatttggctccctgaatttgcaggggtgagtcctgccacggacccctgccacctggctctgaccaggacagctgggcagccgaggctctggtggctcagaagggtcaggccgtgagataccccatggtatagcagggcacggcacagtcctgctcctgcttrgcttcgcagcacccagggaggccgcagccctcagggactacgcagctgctggccacggcaccttccaacacaacacattcagccaccgcacagctgaggggcaatgctgcactctgctacacaccaggtgccccagccctgcacatctgtgtgtagctgctggacagggcttgcttcggaggaaaccaaaatgaaaggcagccaggcgctgaggcgcaaaaaggccccaccatgcaattgctcacgcttaatttgggactttttataccttgagaa

SEQ ID NO: 61112 - DNA, 600 bp, Chicken  19866894321356_1
ttattctatgattctatgacaccagcacatattgcaggaactctccagagtgaatgtgactttttcctatagctgccagggtaagcatttttatatctccccctggacccatcctgtagtatgaaagactctagcagatgggggatggaagtaaggaatatttgtcccattattgcatggcagaggaatggtgaagctgatggtggaaacaggttgatatgcttacattttttctgattgttcatggagatcttcaccgaaacaggtttgcaagaatcccaaatgtgtaagatgaactcrggaagacccaaagtgtccaagtcctgattgtatctgcccagagatacgctggactgagatccctgaactccccagtgccaggccatgcacttttgcaccatctacgcagcccatgctgcacagatcctccatgatcactagctctgtctgagggaaaggtgaaacctattgacatagaagttgaaaaattcttattagcacttgcaggctgctttgtgttttgagcaatgggattgtatgggaagcctgaaggggcagatgttctctgctgtttcgtatttgcccaacacttagcaatga

SEQ ID NO: 61113 - DNA, 600 bp, Chicken  19866894321356_2
gcaacaattatctggagtgctacactgaatccaagctcaaacctctgtcttttgaaaagtgaaaaattacgtgaagatgtaccaatccccctgaccgaccacaggagataatttcttcataccaactttaataatgaactatgaaaattgacttctgaatatcaattaaggtgttttccaaagcagttctcctgcttttttaattctttttttgatggttattttcactgaaagtatggggaactattaaaaaggataattgcatagctttcagcatgagaaaaagatgagatggaaaawttttattgcaaagatttggatatgttcaatttggctgtatcacatcttcttcaaatgcagcgtacatggcccaaacattgcctctgggctacactgtctaggaagtgtccagatccatattgtaggaatgaatagccgaaagagctctggggcaagttcgtgtttttgaacagcagtctggcttcattatataaagccatagggatatagtactgctcacttcagaggagcttttttgcatttgtattaacaaagaatatcattcttgttggccaatttgtgcggtgcttgggatgaata

SEQ ID NO: 61114 - DNA, 503 bp, Chicken  19866894321361_1
gagagcagagcagaagctgccacaaaatgcctgaagtgtttctttgcgagggcccctggagctgctggagagctgcatgggaccgatctgggaatgagattaccgggcaggctgccttttttccatcccttctttttccaggggtggcaagttgtttttctagaattctttcccctgtggaagtgatgataaacaggcaggcagctgctcggcccgtctcgctggcggatggaggagggaagcccttgttccttggcaacgtggctctgtgctgtgcgctcaccggagaggcagcagcgsaggcagggccacgtgtgctgagctgagagctgcgctcaggcagcacggggtgggggggggggaaaggaattgcattcttcctccctctgccaggaaaccaaaggcaatggggaatgcaggcaggtggctggagaggaacagaacagggtgttgtgtgatggctgtgcaggctgttgtgtgttgggctgcgctgggaagggcag

SEQ ID NO: 61115 - DNA, 599 bp, Chicken  19866894321369_1
  misc_feature (1)..(73): n is any nucleotide
nnnnnnnnnnnnnnnnnnnnnnnnnnnnnnnnnnnnnnnnnnnnnnnnnnnnnnnnnnnnnnnnnnnnnnnnnttgctgtgccatttgactcatgtactagctattagctcaatattagccatgccaaaaccagggccattcccatgcaaagccagagagatgtgtttccactaagactctttactgctccctggagtaatgcaataaagacaatctgggcagccacaaaaaaaagtcaagtcacgtcaggcctatgtttttagcttgaactgtgagctatacacacacagctgtgcagygtaactcccaagactaagctgtccctggaaacaatgcagccacatccacttggcccagcttttgagctgatgtgcctctgggacccaatccagttcacatctccacattcatgacatttttcatctgcagaaactggaagatgacaatgtatggaagcatgtttatacaccccttccaatgtaaaaagaataaagtttaattacttcactttttatccaaaagaaaaaagagaaaagcaagctgacacagtagttgtgcaagtttcttcagtgtcccatcagtaggcctgacattcaga

SEQ ID NO: 61116 - DNA, 600 bp, Chicken  19866894321369_2
ccaaaagaaaaaagagaaaagcaagctgacacagtagttgtgcaagtttcttcagtgtcccatcagtaggcctgacattcagacacgaggattgcttatgctttacaaacattcaatttcctttccttaaaaaggaagaggaaagggtgtggataatgaatctttactgaaacagctcttaaaggctgctggcaaaagtcagagcttgctgtgagaggagctgtcagtcaaagaataaaactagctcaaagtagaaaccttaatcctaactccagatggataaacctcgattcttcatasctaacagaaagaaataagcatctttagagacaattcaaaacaacgtgaaatagctctgkaagtgcmcttttttctgactgatgatagacaatctagtcatctagcctccccctagtttaatatatcattttcaggcagctaacatattatgcctggattcaactcaaagaatccagtttagagcctgcagacaggccagactgaacagaccagacagagcaaagcaaaaggaaattaagtgactttatggagatcagagaccacgtgacaaaactagtaagagcagccagtgtgtgttcc

SEQ ID NO: 61117 - DNA, 600 bp, Chicken  19866894321369_3
ccatcagtaggcctgacattcagacacgaggattgcttatgctttacaaacattcaatttcctttccttaaaaaggaagaggaaagggtgtggataatgaatctttactgaaacagctcttaaaggctgctggcaaaagtcagagcttgctgtgagaggagctgtcagtcaaagaataaaactagctcaaagtagaaaccttaatcctaactccagatggataaacctcgattcttcatasctaacagaaagaaataagcatctttagagacaattcaaaacaacgtgaaatagctctgkaagtgcmcttttttctgactgatgatagacaatctagtcatctagcctccccctagtttaatatatcattttcaggcagctaacatattatgcctggattcaactcaaagaatccagtttagagcctgcagacaggccagactgaacagaccagacagagcaaagcaaaaggaaattaagtgactttatggagatcagagaccacgtgacaaaactagtaagagcagccagtgtgtgttcccttatcaccagcccacactctctctctcatgtgaccaaaagtttcactmttttgctaga

SEQ ID NO: 61118 - DNA, 600 bp, Chicken  19866894321369_4
taggcctgacattcagacacgaggattgcttatgctttacaaacattcaatttcctttccttaaaaaggaagaggaaagggtgtggataatgaatctttactgaaacagctcttaaaggctgctggcaaaagtcagagcttgctgtgagaggagctgtcagtcaaagaataaaactagctcaaagtagaaaccttaatcctaactccagatggataaacctcgattcttcatasctaacagaaagaaataagcatctttagagacaattcaaaacaacgtgaaatagctctgkaagtgcmcttttttctgactgatgatagacaatctagtcatctagcctccccctagtttaatatatcattttcaggcagctaacatattatgcctggattcaactcaaagaatccagtttagagcctgcagacaggccagactgaacagaccagacagagcaaagcaaaaggaaattaagtgactttatggagatcagagaccacgtgacaaaactagtaagagcagccagtgtgtgttcccttatcaccagcccacactctctctctcatgtgaccaaaagtttcactmttttgctagaaactaaa

SEQ ID NO: 61119 - DNA, 600 bp, Chicken  19866894321369_5
atagctctgkaagtgcmcttttttctgactgatgatagacaatctagtcatctagcctccccctagtttaatatatcattttcaggcagctaacatattatgcctggattcaactcaaagaatccagtttagagcctgcagacaggccagactgaacagaccagacagagcaaagcaaaaggaaattaagtgactttatggagatcagagaccacgtgacaaaactagtaagagcagccagtgtgtgttcccttatcaccagcccacactctctctctcatgtgaccaaaagtttcactmttttgctagaaactaaattaataatacccgttatttctgcacatttgtgtaagtgcatgcccactcaccacagctgcctcagctttttttctgttcccgaaggaaacttctgtcacaccttccaaatccctcttctctcctctaacaccattccccacacgtatttctttacttctccactcatttttgctctatcaatatggcacatactacttccatcatagagaatcatcactttctatacaattgagcaaccaagagggaggcccagaactgatgatgatcagagggctggagcac

SEQ ID NO: 61120 - DNA, 587 bp, Chicken  19866894321370_1
agacaaaatagcaacattaaggaagaagaaacagaagtggaaatgactgagaaaatctgcagggcaacattttatagtgacctatatgtgggtcagccatttgtctcacgtggagatcagcacagacttctgacagaggatctgggcaatgaaatccactgaatcagagtaaccttgtgcaggaaaagtccatctggaatattttaacttagactaaataatatataaaattaaaatctcatataaagaaactactctgtgatgggtgacagacaaatgacttacaaggatttttttttwttttttttttaaatttcctaaatgttatgggttttttgcattaggttttgtcatcctcactcttttctagatatccaaatataaatttctggagagaagaaataatgaagatgtatgtcttaatcctagaatatttattcatatacttcatgcaattaagcaagggtttcctcatctcagacaatgtggcagcagaataataaatagaatgttcagctcctgagattagtggattcagctatgcaaatgaaaagtgaattcacaacacctgctaaagatttgcatta

SEQ ID NO: 61121 - DNA, 599 bp, Chicken  19866894321377_1
  misc_feature (1)..(203): n is any nucleotide
nnnnnnnnnnnnnnnnnnnnnnnnnnnnnnnnnnnnnnnnnnnnnnnnnnnnnnnnnnnnnnnnnnnnnnnnnnnnnnnnnnnnnnnnnnnnnnnnnnnnnnnnnnnnnnnnnnnnnnnnnnnnnnnnnnnnnnnnnnnnnnnnnnnnnnnnnnnnnnnnnnnnnnnnnnnnnnnnnnnnnnnnnnnnnnnnnnnnnnnnnnnacagagggaaacagagggaataaatgaaagggaaaaatccaatgccaagaaatgatatttgagggatacagaaagttcagaacacctgatagcacaygctaggcaaaatctctcactgctgtaactccattggttttgtgttttaaagtggctctatcagagaagacgtgtcacacacagagtggagcaaactcaggtttacttctagacaagtcaaagtgatatcctggcctttcttcagagataagacactgatgcttggtcactgctcacatgaaaattttgtctctccaccatatccttggcctccaaccttgtgtcctaagaaacgaaagtatgaacttcaggcagaccaaaattaaaggagcagkcagtgcagtggcaaatgaaatcact

SEQ ID NO: 61122 - DNA, 600 bp, Chicken  19866894321377_2
aaagttcagaacacctgatagcacaygctaggcaaaatctctcactgctgtaactccattggttttgtgttttaaagtggctctatcagagaagacgtgtcacacacagagtggagcaaactcaggtttacttctagacaagtcaaagtgatatcctggcctttcttcagagataagacactgatgcttggtcactgctcacatgaaaattttgtctctccaccatatccttggcctccaaccttgtgtcctaagaaacgaaagtatgaacttcaggcagaccaaaattaaaggagcagkcagtgcagtggcaaatgaaatcactgctcctgaaatgacttcagagaaaatgaggtatttgtgcacattgtaactttgaacataactgtaatcgataaggaaaatgaccaggataccactctgaacaggtcactgtagacctctgcttaatatgctgatgtgaaagcaaagcattaagaggcagtgatgtcataattgctacttaagggactggatgcaaaataatactgaaaacatcaacagtgccatgatttgaaaagattcccttctccctctctcatactgtttctcagttcaagc

SEQ ID NO: 61123 - DNA, 600 bp, Chicken  19866894321382_1
tttctattaaaacagaagaggcaacaaaatgataaagctagtgggttggacatgcatgctttaaaagcttgacagggctacttttatgtggataggggaatgacagtgtggaactgtcaggagaaggggaggccatgtgagtgacagaagaaacgctgtgattccctgcgatgcagagggagaggctgagcttttcatgtcttcagctgccccagtacagggcagtgagagaacaagcttgtttttaaagtgttagcagccaacaagtgaagttgtagctcacacatgtacagatcccayggggctgtgtctcatctgaaggctgtacttggctgtactaaggccttatgccagcagtgactttctgacaaccatctgaaacacgttgtgcattgagatacgatgcacagtgttctcgtagctgctcagttaggcagtttctttcttacctgctttcgtgttccattcactcattttcagaggagctgcatctttaagttcctcggagcaatctcagtggatctggggaaagacagaatcaggccgtaccttccaacagtcctcactcctctgtacagggagctgaacagcacctatgca

SEQ ID NO: 61124 - DNA, 600 bp, Chicken  19866894321384_1
attctcttcaagttcttccctagagaccttacgacacagtgggctgtggagtgtgggaaaatgttttgtggtatgtgctgtgtgaagatatgtctcgtacacgacccttttggactaaatgactttttcaaaatgggttgagattgcaagagacttgaattatcaggactgtccacatcaatcctctatccctaaatttagaatttgaaaaactgcagcttagatataatatctagtgtcaatatggaatagtgtgttattttcaatagaatgctctcagaaagtgttctaaccaacctrtgtttggctgtattgtcaattaaagaggaaattaggaacataaatcaaagatttttccttgttttatggttactggattcaagtggtattgaatacatcatgttcctacacatacaaacctaaaggagagcctaatttaaggttgtcactgcattctaagatgctgtgctttataaaagaattattgctgcatgaaagtttttttttttttttttttgaggaatagagaaaataccctccattagattttgtcagatacttagagtaataagaaaggaactaagctgaacaaagcttttg

SEQ ID NO: 61125 - DNA, 600 bp, Chicken  19866894321386_1
gcttctcactggcaccatttcctactttcccctgtgatcgcatcattgccacacttcatctctcacccttacagccatcatccatcggtgtttaacttgaagtcagccttacatgcaagcatcgtgcatgttagcaaatgctgatgggaagaaaaacatgtccagttgcaagaagtcactgcagacaaagcccgattacatggagcaccggtagggctgtatcacacacatcattttccccagatatggggaaacacaccccatgtcccagaccaggtgagatgagttgtgccccacagrtctgcctctactccagagataagtccaatttctccaagagaaaagtgcacagggcactgatttacatcacgcccttcagcctgccctggtgggatatggagatgtgtatctggagccaccattaacttccttgtgatggggtgagagatgatggcctcaagctgtgccagggtggatcagattggatattaggaagaacttcttatcagagagattggtgatgcaatggcacagctgcccagggagcagtggggtcaccatccctggaggtgttccagaaccatggggatgtggcactga

SEQ ID NO: 61126 - DNA, 528 bp, Chicken  19866894321392_1
tagtgaagcagaagcaaaccaagtagcaggatagacagatcaagtcaaattcaaattggaaataagactaagtttcagctgcaagagtaattaaacaagaccttcaaatcaagtcagagcacatctttgaaagaaagtcacaatctttagttctaaaaatctattatctcttaatgaagaagcaaccaaaagaaacaaggattcagactgaagttgtgcctttgctgccccctggagactcttcccattgaactatggacctcaaaaagcaaaacggtgacatccacaaagtttttaagyctgtatagtaacacttgaaattgaaatagcaggtttgttttcttcagctcagtccattattctctctggcttttggcctttcttagcaaagagcactaagtaaaatcagtggtcagaatgcatcgtaaaggagacacagactatatcctgtgtagacagtaataggcttattaggtcagatcctttatcaccataaatcactgtaggcacattgttttctctcagctg

SEQ ID NO: 61127 - DNA, 599 bp, Chicken  19866894321395_1
  misc_feature (1)..(52): n is any nucleotide
nnnnnnnnnnnnnnnnnnnnnnnnnnnnnnnnnnnnnnnnnnnnnnnnnnnnatcaggagttccgattgtctgcgtatcaaatcagttgtatttagtggaatcaagtaggtagtcaccactggagcctgattacctttttaaagagtgctgcctgattagattaaactttgtgccatttatggctgattttgggtaaatgggaacaatcagagatgggatccaggcatgtgagctggtccagattttgggagtgagaaattcaaactcaaaaccaaaccaagattcatgttctgtttccrgatcctacaagttggagctctttggtgttcctgcataggaaactatttgctaccatgctttatgtggagccatggcagagataccttaactcttcaggcctcgtgaaggcatgtgtcctcagtactgagctttggccaaagataaggtgctggaacaccgagcggtttggatgtatgcagaaatgtgcataagagatatttcatcagttccatagtttgcaatccagcatctttgcaggtcaccacatgtattctgtttaagcctcttgattaattacaccgtacccaaaccatgcata

SEQ ID NO: 61128 - DNA, 600 bp, Chicken  19866894321395_2
ggcagctaaagcaaaacctatggggaaaacgctttgtggaggataaatctatatgcaccattgagtccctacttgtgaaagtggaaggcagtattcaatgaaccctttactcttaaacaacgtatttaagtggatcgattttatgttccagcccagaaatgatttaaggcttttcagtgcatggatatcctctgtgatacgcagaactggcagaaaatgtcatcgtgagctgctttatagcctcaattaaggctatttccattgctccagatgtgtaaagcagacttatagctgagttcytgctgtagagaaatccccggtgtgtccttggatcagtgctgccagctcagtgatgtcttcttcacgacccttggaaaaaatgatggataggcagggagctgcaaattcagactgaactctcrcagtatgagcacttataggaggctcagctggttggggcaatagtacagtacctaccaagtggtcactctgtccatctctgccactttggaagctgccgcctgcctgcacrgtgtgccamgggaactctggctgctgtgctctgcgtcttgaactgctctgtacgatgaagctgatact

SEQ ID NO: 61129 - DNA, 600 bp, Chicken  19866894321395_3
tatttaagtggatcgattttatgttccagcccagaaatgatttaaggcttttcagtgcatggatatcctctgtgatacgcagaactggcagaaaatgtcatcgtgagctgctttatagcctcaattaaggctatttccattgctccagatgtgtaaagcagacttatagctgagttcytgctgtagagaaatccccggtgtgtccttggatcagtgctgccagctcagtgatgtcttcttcacgacccttggaaaaaatgatggataggcagggagctgcaaattcagactgaactctcrcagtatgagcacttataggaggctcagctggttggggcaatagtacagtacctaccaagtggtcactctgtccatctctgccactttggaagctgccgcctgcctgcacrgtgtgccamgggaactctggctgctgtgctctgcgtcttgaactgctctgtacgatgaagctgatactgcaaaataaaaaccccaacccaaactcmaaggcactgtggargcggtgacctgcagcaagctgggccagcacctgaaggtgtgcatcgagctgccttctctgagacttatgggcaattctgg

SEQ ID NO: 61130 - DNA, 600 bp, Chicken  19866894321395_4
ctttatagcctcaattaaggctatttccattgctccagatgtgtaaagcagacttatagctgagttcytgctgtagagaaatccccggtgtgtccttggatcagtgctgccagctcagtgatgtcttcttcacgacccttggaaaaaatgatggataggcagggagctgcaaattcagactgaactctcrcagtatgagcacttataggaggctcagctggttggggcaatagtacagtacctaccaagtggtcactctgtccatctctgccactttggaagctgccgcctgcctgcacrgtgtgccamgggaactctggctgctgtgctctgcgtcttgaactgctctgtacgatgaagctgatactgcaaaataaaaaccccaacccaaactcmaaggcactgtggargcggtgacctgcagcaagctgggccagcacctgaaggtgtgcatcgagctgccttctctgagacttatgggcaattctgggatgtgaaaggtgagcagaagtgttgaaggcggggctcctgggtgccttrtgtatgagaagaaaggagatgagaatctgaaagtggaaggctgtttggtggtgctgctga

SEQ ID NO: 61131 - DNA, 600 bp, Chicken  19866894321395_5
ctcaattaaggctatttccattgctccagatgtgtaaagcagacttatagctgagttcytgctgtagagaaatccccggtgtgtccttggatcagtgctgccagctcagtgatgtcttcttcacgacccttggaaaaaatgatggataggcagggagctgcaaattcagactgaactctcrcagtatgagcacttataggaggctcagctggttggggcaatagtacagtacctaccaagtggtcactctgtccatctctgccactttggaagctgccgcctgcctgcacrgtgtgccamgggaactctggctgctgtgctctgcgtcttgaactgctctgtacgatgaagctgatactgcaaaataaaaaccccaacccaaactcmaaggcactgtggargcggtgacctgcagcaagctgggccagcacctgaaggtgtgcatcgagctgccttctctgagacttatgggcaattctgggatgtgaaaggtgagcagaagtgttgaaggcggggctcctgggtgccttrtgtatgagaagaaaggagatgagaatctgaaagtggaaggctgtttggtggtgctgctgatggagctct

SEQ ID NO: 61132 - DNA, 600 bp, Chicken  19866894321395_6
tggatcagtgctgccagctcagtgatgtcttcttcacgacccttggaaaaaatgatggataggcagggagctgcaaattcagactgaactctcrcagtatgagcacttataggaggctcagctggttggggcaatagtacagtacctaccaagtggtcactctgtccatctctgccactttggaagctgccgcctgcctgcacrgtgtgccamgggaactctggctgctgtgctctgcgtcttgaactgctctgtacgatgaagctgatactgcaaaataaaaaccccaacccaaactcmaaggcactgtggargcggtgacctgcagcaagctgggccagcacctgaaggtgtgcatcgagctgccttctctgagacttatgggcaattctgggatgtgaaaggtgagcagaagtgttgaaggcggggctcctgggtgccttrtgtatgagaagaaaggagatgagaatctgaaagtggaaggctgtttggtggtgctgctgatggagctctagccttcacggtctgtggaaggaaagggaagctggccttcacaacaggtgagtcccatgagcctggggaactgatggcttccgtggg

SEQ ID NO: 61133 - DNA, 600 bp, Chicken  19866894321395_7
cagctcagtgatgtcttcttcacgacccttggaaaaaatgatggataggcagggagctgcaaattcagactgaactctcrcagtatgagcacttataggaggctcagctggttggggcaatagtacagtacctaccaagtggtcactctgtccatctctgccactttggaagctgccgcctgcctgcacrgtgtgccamgggaactctggctgctgtgctctgcgtcttgaactgctctgtacgatgaagctgatactgcaaaataaaaaccccaacccaaactcmaaggcactgtggargcggtgacctgcagcaagctgggccagcacctgaaggtgtgcatcgagctgccttctctgagacttatgggcaattctgggatgtgaaaggtgagcagaagtgttgaaggcggggctcctgggtgccttrtgtatgagaagaaaggagatgagaatctgaaagtggaaggctgtttggtggtgctgctgatggagctctagccttcacggtctgtggaaggaaagggaagctggccttcacaacaggtgagtcccatgagcctggggaactgatggcttccgtgggagagaaaaggccaa

SEQ ID NO: 61134 - DNA, 600 bp, Chicken  19866894321395_8
cctaccaagtggtcactctgtccatctctgccactttggaagctgccgcctgcctgcacrgtgtgccamgggaactctggctgctgtgctctgcgtcttgaactgctctgtacgatgaagctgatactgcaaaataaaaaccccaacccaaactcmaaggcactgtggargcggtgacctgcagcaagctgggccagcacctgaaggtgtgcatcgagctgccttctctgagacttatgggcaattctgggatgtgaaaggtgagcagaagtgttgaaggcggggctcctgggtgccttrtgtatgagaagaaaggagatgagaatctgaaagtggaaggctgtttggtggtgctgctgatggagctctagccttcacggtctgtggaaggaaagggaagctggccttcacaacaggtgagtcccatgagcctggggaactgatggcttccgtgggagagaaaaggccaaaatgccaactattccagtgcagagaaaatacaggagatgcagctggtcccctgaatcaaattccttactggcatcagaggaaagaactatgaaaactggttagtctgcaagattactgcggatcataaag

SEQ ID NO: 61135 - DNA, 599 bp, Chicken  19866894321397_1
  misc_feature (1)..(64): n is any nucleotide
nnnnnnnnnnnnnnnnnnnnnnnnnnnnnnnnnnnnnnnnnnnnnnnnnnnnnnnnnnnnnnnnccctattttagcactcatagatatcaggtaatagagtttgggagcagttaagtagaggaaatctatgactttgacagacctgggtgtgaagctgactggaaatgaaaagaatttgcctttctgagcataagagatacagagtctcaggaaaaaaaaagccctttgacattaggaagtctgataaatcccatgtgaagaagaatgaggttttctgctgggaccagaagatgagactragcttctatgagtccagaccaacgtccacagaagcctagaatagtctccttgtacagtgtgttctcataggccttcagccttgccttatttcagcatctggatcctaccatcttggctctatgactgctctgtggaggtgcaaacaccatggttagtgtgtggagctactaattatgccctctgttttatcttccacycagaaacacagcccccacagcagctttgaagaggaacatcaccaaatccatcctgcagatgtcccttgaccatcacattgttacgcccttcacttccatgc

SEQ ID NO: 61136 - DNA, 600 bp, Chicken  19866894321397_2
tacagagtctcaggaaaaaaaaagccctttgacattaggaagtctgataaatcccatgtgaagaagaatgaggttttctgctgggaccagaagatgagactragcttctatgagtccagaccaacgtccacagaagcctagaatagtctccttgtacagtgtgttctcataggccttcagccttgccttatttcagcatctggatcctaccatcttggctctatgactgctctgtggaggtgcaaacaccatggttagtgtgtggagctactaattatgccctctgttttatcttccacycagaaacacagcccccacagcagctttgaagaggaacatcaccaaatccatcctgcagatgtcccttgaccatcacattgttacgcccttcacttccatgctgatagagaaccctgaaaaagatgagataatgctggcagatcagcccaaagaccccagaaggggatgctgctcaggtcagtgtttcaggccactacactacctgtcattttggatttgttatccttgaattttaaaaactaatatgtccattgttgagacaggcagcttgtgcttttaggacaacctgtactttcaggg

SEQ ID NO: 61137 - DNA, 600 bp, Chicken  19866894321403_1
cagggtcatggggaagtgagcggaggataaatgtgtctccccatgtccttcgtgtctttgctgacagcctaaaaatagtgctgttcaatgtttgatagatagggctctacatggcagctaaaatgtacttccccaaaaaatctatcttaaaattcagcattctcaactctttcggggagaccagaaataatctgacaagttggttctttctttatggccgttctgttgcagaaacaaatgcatacacccaattcgatgtagcactttatgtaaaaaatatcacagaagtagttcctctgscataaaagcattaaaattttgccctatctatctgaaaattgatctccttcattcattttagcagatatggtggcactggacttaatatgagaggaccgcaccagacctgctgctctcacacctgaccgagacactgaaatgcagtgatttaacaacatgagcctggaaagggcaatcagagcaaagctgcaagatgtaggtcctagaatcccaatgatctgatagaaacagaagatacttctgacactggcctactcaaacccttgtcaataccagcagcaccccagtatcaccagcacc

SEQ ID NO: 61138 - DNA, 600 bp, Chicken  19866894321406_1
gacctcgtggatgctttcaccatcctggtttctgctttgaagaaaaaaatctgttcattcattacttgtagacagacgggcactgaagtcccaggactcgctaactaagctgatcctttcccttgggtctcccagtgtcttccttttagtgaaaagcacttcataccccatcactgtgcaagctccttgatttaagggctttgcactttcattttgctgtttggtacacattccacagaagctgattactacatcagtgctcaacaattaactctagaatcatcaaatccacctgatacrtaggtcgatttaagcagaagtgaagagctggggtttcctacaggctctcttctgtgctgtgcactccgctggacaacagagggaccgttctgcaggcaggtcacaccagcaccactcattttcatgtcagacagcccatggcaagaaagcacaactactggtgagccgcatattctcctacggtaacaggaatggggataacacygtctgcacwgtccaggcatcttatcacagagccaagagttttactaccaattccttcaatgctcttctacatttcaccagccctgccttagacgt

SEQ ID NO: 61139 - DNA, 600 bp, Chicken  19866894321406_2
ctttcattttgctgtttggtacacattccacagaagctgattactacatcagtgctcaacaattaactctagaatcatcaaatccacctgatacrtaggtcgatttaagcagaagtgaagagctggggtttcctacaggctctcttctgtgctgtgcactccgctggacaacagagggaccgttctgcaggcaggtcacaccagcaccactcattttcatgtcagacagcccatggcaagaaagcacaactactggtgagccgcatattctcctacggtaacaggaatggggataacacygtctgcacwgtccaggcatcttatcacagagccaagagttttactaccaattccttcaatgctcttctacatttcaccagccctgccttagacgtggctagaatacaaagtataattccacggcaggagcatcagctaacccatgctgccctcttcaggagctgcttttaattcagtaccagggtgcagcacaaccctgctgggcagagaatttagcctgattttcataaacaggcccatcaagaacttcattttagcaaagaagaaaaatgttatctctatctgaagataaacaagaca

SEQ ID NO: 61140 - DNA, 600 bp, Chicken  19866894321406_3
tgctgtttggtacacattccacagaagctgattactacatcagtgctcaacaattaactctagaatcatcaaatccacctgatacrtaggtcgatttaagcagaagtgaagagctggggtttcctacaggctctcttctgtgctgtgcactccgctggacaacagagggaccgttctgcaggcaggtcacaccagcaccactcattttcatgtcagacagcccatggcaagaaagcacaactactggtgagccgcatattctcctacggtaacaggaatggggataacacygtctgcacwgtccaggcatcttatcacagagccaagagttttactaccaattccttcaatgctcttctacatttcaccagccctgccttagacgtggctagaatacaaagtataattccacggcaggagcatcagctaacccatgctgccctcttcaggagctgcttttaattcagtaccagggtgcagcacaaccctgctgggcagagaatttagcctgattttcataaacaggcccatcaagaacttcattttagcaaagaagaaaaatgttatctctatctgaagataaacaagacagagcaataa

SEQ ID NO: 61141 - DNA, 600 bp, Chicken  19866894321420_1
ttgcaatcagttagtaaaatcatgagctgtagccatacagaagaagtccaggaaattcacactatacaagaggaaattgttgcaaccgcatttttgaagggtcacagataaatgaatgcaaggtgcagctcagggctgaacaaactctccctcctaatctgtatctactgtctgacacatgctatggttggtatcacaaatactgggagttctaacagtgtgaaatgcacgcatatatgagttacagctaagtaaaatgaaatagccaaataactaaaatggactgctaaggcagcaagytgacaaatagcttctaaccaggtccagatgctttctctttctgcataatttgaaatctaagatttccagatacaacgtgcagttcagctcttttccccccagcctgagcttgcatgctggaaccacacattatgctaatgatctccaaggacctagcaccgctgttgcttaggaacaaaagttttacaggctgcagacagaactgaacagaggcactgtagccagggaagttctttttcaactcttcttcccctcagtaaactcatatacacaatagtttcttgaaggtccgccattttc

SEQ ID NO: 61142 - DNA, 599 bp, Chicken  19866894321427_1
  misc_feature (1)..(23): n is any nucleotide
nnnnnnnnnnnnnnnnnnnnnnnattacattgattgtaaggtctgagtttcaaacttaaccccatgctccagggttaaattattaactatagagcaaaatactaatgacagaaataggaagatgaagaaactgatatatggtatttattgtttaataaatgcataaaatattacaattgtgactaatccgggagaaaatgaaatcaagaattggaaggagaaaagattagattttaaatattagtttaagtgaatgttaaagaaatactgaattctttaattgcaaatcctgtctcctarataacttcccaaaaaatcaaggggacagatgcaacactgaaacactaccttgcaaggagtccttcagctacatttctcaagccatagagctatatgcctacctttgcatgggcacttctcaggtggaaaacacatcatagactaacaccttcttaaaaaaaaataaatctacctgtgcagaaaaaatgatggtactgagtaaaawaaataartaaataaaaatagggaaaagtttttattggaccatgaaggtcatcacacctttgtttcaaaatcacagctcttctgtgattttgtgt

SEQ ID NO: 61143 - DNA, 600 bp, Chicken  19866894321427_2
taaatgcataaaatattacaattgtgactaatccgggagaaaatgaaatcaagaattggaaggagaaaagattagattttaaatattagtttaagtgaatgttaaagaaatactgaattctttaattgcaaatcctgtctcctarataacttcccaaaaaatcaaggggacagatgcaacactgaaacactaccttgcaaggagtccttcagctacatttctcaagccatagagctatatgcctacctttgcatgggcacttctcaggtggaaaacacatcatagactaacaccttcttraaaaaaaataaatctacctgtgcagaaaaaatgatggtactgagtaaaawaaataartaaataaaaatagggaaaagtttttattggaccatgaaggtcatcacacctttgtttcaaaatcacagctcttctgtgattttgtgtttcagcctcttctcgtggtaccaaatttgggaatgtgcccagaggagaactcgtgtgagcccgagttcctatgagcattcttgcatttggcagagaggctcttctgcttgctgtttgctgcagcaaaaaagaatgaaaggaatttggtaaagtcgt

SEQ ID NO: 61144 - DNA, 600 bp, Chicken  19866894321427_3
aagaattggaaggagaaaagattagattttaaatattagtttaagtgaatgttaaagaaatactgaattctttaattgcaaatcctgtctcctarataacttcccaaaaaatcaaggggacagatgcaacactgaaacactaccttgcaaggagtccttcagctacatttctcaagccatagagctatatgcctacctttgcatgggcacttctcaggtggaaaacacatcatagactaacaccttcttaaaaaaaaataaatctacctgtgcagaaaaaatgatggtactgagtaaaawaaataartaaataaaaatagggaaaagtttttattggaccatgaaggtcatcacacctttgtttcaaaatcacagctcttctgtgattttgtgtttcagcctcttctcgtggtaccaaatttgggaatgtgcccagaggagaactcgtgtgagcccgagttcctatgagcattcttgcatttggcagagaggctcttctgcttgctgtttgctgcagcaaaaaagaatgaaaggaatttggtaaagtcgtgcatttgataaagctgggatctagaagcaaacacttacaggactcacgct

SEQ ID NO: 61145 - DNA, 600 bp, Chicken  19866894321427_4
ggaaggagaaaagattagattttaaatattagtttaagtgaatgttaaagaaatactgaattctttaattgcaaatcctgtctcctarataacttcccaaaaaatcaaggggacagatgcaacactgaaacactaccttgcaaggagtccttcagctacatttctcaagccatagagctatatgcctacctttgcatgggcacttctcaggtggaaaacacatcatagactaacaccttcttaaaaaaaaataaatctacctgtgcagaaaaaatgatggtactgagtaaaawaaataartaaataaaaatagggaaaagtttttattggaccatgaaggtcatcacacctttgtttcaaaatcacagctcttctgtgattttgtgtttcagcctcttctcgtggtaccaaatttgggaatgtgcccagaggagaactcgtgtgagcccgagttcctatgagcattcttgcatttggcagagaggctcttctgcttgctgtttgctgcagcaaaaaagaatgaaaggaatttggtaaagtcgtgcatttgataaagctgggatctagaagcaaacacttacaggactcacgctggtctct

SEQ ID NO: 61146 - DNA, 599 bp, Chicken  19866894321429_1
  misc_feature (1)..(129): n is any nucleotide
nnnnnnnnnnnnnnnnnnnnnnnnnnnnnnnnnnnnnnnnnnnnnnnnnnnnnnnnnnnnnnnnnnnnnnnnnnnnnnnnnnnnnnnnnnnnnnnnnnnnnnnnnnnnnnnnnnnnnnnnnnnnnnnnntctctgtatatgttcaacaatgtctggtcttccctcttccctctcctttttctaatacaaaagtgattgctttcatcaagtttgctgtggcaaaactatcattaaagataattaattcaagataggggcaatgtaaagaaaacaagacaagggtggctgttcttgtggttyggtttgagtgaagaaatgtattttcttctattgttgggttaagttcaaatcaaagttcaaagggagtcttggtttacaattgagtatcattctctcttttcccatcagagtatttgtgatgacatctggcagccacagcagcagtaaagctccactatccattttttgtttattttttatttttttaaggacatacttttatatttattgagaagcaaccacccaatcaaaacagaaactgtagcttactttcagttttgcacataagccagragcttcttaaccttgtcttttttata

SEQ ID NO: 61147 - DNA, 587 bp, Chicken  19866894321429_2
agacaagggtggctgttcttgtggttyggtttgagtgaagaaatgtattttcttctattgttgggttaagttcaaatcaaagttcaaagggagtcttggtttacaattgagtatcattctctcttttcccatcagagtatttgtgatgacatctggcagccacagcagcagtaaagctccactatccattttttgtttattttttatttttttaaggacatacttttatatttattgagaagcaaccacccaatcaaaacagaaactgtagcttactttcagttttgcacataagccagragcttcttaaccttgtcttttttataagcaaactatttcagtkttcttctaatagttaatcacattaggatttcttcttgtataaaattttcctgtaaaagtttaaagcctcctgtttctgatggaaaggcctcctcctgccttcctggttttaaagcctttctttcctttttaacctttagcttcataccacacaggaaaraaaaaacacaaaaaaacaacattaataagagatctgagaggtgctataaaatgtttctggaaagggatgtaaaaagcatatatca

SEQ ID NO: 61148 - DNA, 544 bp, Chicken  19866894321429_3
tgtattttcttctattgttgggttaagttcaaatcaaagttcaaagggagtcttggtttacaattgagtatcattctctcttttcccatcagagtatttgtgatgacatctggcagccacagcagcagtaaagctccactatccattttttgtttattttttatttttttaaggacatacttttatatttattgagaagcaaccacccaatcaaaacagaaactgtagcttactttcagttttgcacataagccagragcttcttaaccttgtcttttttataagcaaactatttcagtkttcttctaatagttaatcacattaggatttcttcttgtataaaattttcctgtaaaagtttaaagcctcctgtttctgatggaaaggcctcctcctgccttcctggttttaaagcctttctttcctttttaacctttagcttcataccacacaggaaaraaaaaacacaaaaaaacaacattaataagagatctgagaggtgctataaaatgtttctggaaagggatgtaaaaagcatatatca

SEQ ID NO: 61149 - DNA, 385 bp, Chicken  19866894321429_4
tttatttttttaaggacatacttttatatttattgagaagcaaccacccaatcaaaacagaaactgtagcttactttcagttttgcacataagccagragcttcttaaccttgtcttttttataagcaaactatttcagtkttcttctaatagttaatcacattaggatttcttcttgtataaaattttcctgtaaaagtttaaagcctcctgtttctgatggaaaggcctcctcctgccttcctggttttaaagcctttctttcctttttaacctttagcttcataccacacaggaaaraaaaaacacaaaaaaacaacattaataagagatctgagaggtgctataaaatgtttctggaaagggatgtaaaaagcatatatca

SEQ ID NO: 61150 - DNA, 600 bp, Chicken  19866894321441_1
ttactagtttagcacttgaatcatctagcacgacactgctaaaatgtatgtcctgaactcagttctgtgcggaacggttttgactctctctctccttggctgtcatttctttaagtttttaataatcctgatcttctaacattttacggccttaagaaaagcgcaggcttctacatataatattattttgtcttttcagttacagtcacaggagtagatcaatctgtaagtgcttctgcctttttaatggcgtctaggtttttaataatatcaagatgaaaatgttactttcttttaaaytgagtaaaacatggcgcatgaatagactgcgcacttctgcatgggcgaatgctcagagccgccaatttgcttctgctgttatccttcctgatatgcaatagaaaacaattttggatatctcttcttatccaacttcaggctgttttctactacagatgctttaaattatacttggttgtaaagatttacagtgattgttcttacaggtttttttttgtttgtttaagtcacataagaccctttcaaactttgctggtgcacatttggaagaattctacattttattcagttttggcaata

SEQ ID NO: 61151 - DNA, 600 bp, Chicken  19866894321446_1
ctgcacaaaacacagtcctgaacatacgcttatttcaatgaaaatatccatacaaattctgaagcgtatcctaagtaaaaagaaatttatttggaaaacatacctatgcacaaaattatgtttatgcattacagcaagtccagcagcaatctcacatgccattctctgtagcagcattatttgtgaatctcctctaacgtggtcctgctcattgcagatataagttttcaggtcaccctgtaaaagaagttgaaaatactgatcattgctgtgttgagtgaatctcaaaagtacttaatraaaagccaactaacaacattacctgctttatcagtcaaggtcagcactagatataaacagatctgtgcttaataaagaatctcaagtttctcatcaccaccaagatgcttagagaaattatccaaggcagacggtacatccttttaagggtttttaaatcacatcatttagtgattaacagctggatcacaccgccacaaaaagccatataactgtcaaacaataacactttccagtaaaaatattatgagcttctgtttttaaacaggataagtcaaaattgcaagtgctcccattcag

SEQ ID NO: 61152 - DNA, 599 bp, Chicken  19866894321451_1
  misc_feature (1)..(5): n is any nucleotide
nnnnntttgaatcccatatttctatatggccccatattgtttgttgaatctgggtcccattttgttgttcctctctttcgtctcataacagacttttgtttacttaaactctgtgaaagtctgtcctgggctttagaaaagcccagcctgtgaaaagcagtgggcaatttccgagctgttaggatcctaagtagattgttaaagcagaatcccttgcttcaaaaccgtacttccctgccatctttacctgattccacatccagagagtatttatcaatggccaggttcatggtgtgatakgcagtgttgcagaagtcttccaggatcatatacacagcgttggtgacatttcgaggyacaggtttggcaaatttcattcgactgttcacmacaatgctgccatttctgaagttcaggatttccagattctggaagcctgttagatttgactgaaggtayggtaccagctgcaacacaagggacaatgacagaaaagcttgaatctatactcaagccrgttggtactgcatcaggcagcgggagtctgaattagtttatccaaatcccatggcaagggtattaaaactcttcccgactga

SEQ ID NO: 61153 - DNA, 600 bp, Chicken  19866894321451_2
cattttgttgttcctctctttcgtctcataacagacttttgtttacttaaactctgtgaaagtctgtcctgggctttagaaaagcccagcctgtgaaaagcagtgggcaatttccgagctgttaggatcctaagtagattgttaaagcagaatcccttgcttcaaaaccgtacttccctgccatctttacctgattccacatccagagagtatttatcaatggccaggttcatggtgtgatakgcagtgttgcagaagtcttccaggatcatatacacagcgttggtgacatttcgaggyacaggtttggcaaatttcattcgactgttcacmacaatgctgccatttctgaagttcaggatttccagattctggaagcctgttagatttgactgaaggtayggtaccagctgcaacacaagggacaatgacagaaaagcttgaatctatactcaagccrgttggtactgcatcaggcagcgggagtctgaattagtttatccaaatcccatggcaagggtattaaaactcttcccgactgaggcccatgctggcatcttgccagggtcctgagtacttcacaccaagtatcaatttgta

SEQ ID NO: 61154 - DNA, 600 bp, Chicken  19866894321451_3
gacttttgtttacttaaactctgtgaaagtctgtcctgggctttagaaaagcccagcctgtgaaaagcagtgggcaatttccgagctgttaggatcctaagtagattgttaaagcagaatcccttgcttcaaaaccgtacttccctgccatctttacctgattccacatccagagagtatttatcaatggccaggttcatggtgtgatakgcagtgttgcagaagtcttccaggatcatatacacagcgttggtgacatttcgaggyacaggtttggcaaatttcattcgactgttcacmacaatgctgccatttctgaagttcaggatttccagattctggaagcctgttagatttgactgaaggtayggtaccagctgcaacacaagggacaatgacagaaaagcttgaatctatactcaagccrgttggtactgcatcaggcagcgggagtctgaattagtttatccaaatcccatggcaagggtattaaaactcttcccgactgaggcccatgctggcatcttgccagggtcctgagtacttcacaccaagtatcaatttgtagacrgttcctcatctacagtttagatacacaga

SEQ ID NO: 61155 - DNA, 600 bp, Chicken  19866894321451_4
gtgggcaatttccgagctgttaggatcctaagtagattgttaaagcagaatcccttgcttcaaaaccgtacttccctgccatctttacctgattccacatccagagagtatttatcaatggccaggttcatggtgtgatakgcagtgttgcagaagtcttccaggatcatatacacagcgttggtgacatttcgaggyacaggtttggcaaatttcattcgactgttcacmacaatgctgccatttctgaagttcaggatttccagattctggaagcctgttagatttgactgaaggtayggtaccagctgcaacacaagggacaatgacagaaaagcttgaatctatactcaagccrgttggtactgcatcaggcagcgggagtctgaattagtttatccaaatcccatggcaagggtattaaaactcttcccgactgaggcccatgctggcatcttgccagggtcctgagtacttcacaccaagtatcaatttgtagacrgttcctcatctacagtttagatacacagatatagggatgtatgtggagctctcccttgcccaaagcaacacatacacatgtcatttcaaagggtactt

SEQ ID NO: 61156 - DNA, 592 bp, Chicken  19866894321451_5
ttcaaaaccgtacttccctgccatctttacctgattccacatccagagagtatttatcaatggccaggttcatggtgtgatakgcagtgttgcagaagtcttccaggatcatatacacagcgttggtgacatttcgaggyacaggtttggcaaatttcattcgactgttcacmacaatgctgccatttctgaagttcaggatttccagattctggaagcctgttagatttgactgaaggtayggtaccagctgcaacacaagggacaatgacagaaaagcttgaatctatactcaagccrgttggtactgcatcaggcagcgggagtctgaattagtttatccaaatcccatggcaagggtattaaaactcttcccgactgaggcccatgctggcatcttgccagggtcctgagtacttcacaccaagtatcaatttgtagacrgttcctcatctacagtttagatacacagatatagggatgtatgtggagctctcccttgcccaaagcaacacatacacatgtcatttcaaagggtacttccctcaagcatgttatccttttctatctctctcctttactccctccatct

SEQ ID NO: 61157 - DNA, 448 bp, Chicken  19866894321451_6
gtttggcaaatttcattcgactgttcacmacaatgctgccatttctgaagttcaggatttccagattctggaagcctgttagatttgactgaaggtayggtaccagctgcaacacaagggacaatgacagaaaagcttgaatctatactcaagccrgttggtactgcatcaggcagcgggagtctgaattagtttatccaaatcccatggcaagggtattaaaactcttcccgactgaggcccatgctggcatcttgccagggtcctgagtacttcacaccaagtatcaatttgtagacrgttcctcatctacagtttagatacacagatatagggatgtatgtggagctctcccttgcccaaagcaacacatacacatgtcatttcaaagggtacttccctcaagcatgttatccttttctatctctctcctttactccctccatct

SEQ ID NO: 61158 - DNA, 599 bp, Chicken  19866894321452_1
  misc_feature (1)..(9): n is any nucleotide
nnnnnnnnnaaatacaatgctgcttctcttatgagtgaagtgtataatatcctcccacaacaatagcttagaaaaatctttttaaaaatctactttacaagaaaaaagttgtggatccttttttaaaaagttggggttttcccccaggattcctttcagtactaagggacctctatctaagatatatatatgtatatatttttaaaggctcttaaactgtgttatgtctgctacaagcatcaccaacagacattttgtgcattgaaacattccatttttctatgctcctctaaatttctyatttttcttatgctactatagttttatttatggcatrctcatatttttttaagtcttactttatcatggctccacgagttctcttgcacaggggtatagctaacttttcaggtggcagttatcttatgtaaacacaagacaaggttaccttgctggtaactgggaaaatcaggtcaataaatactttcataatgatcttagagctattttgccatgtgtgcgcttgctcagctgctaacaaagaatgaatgtggtgcccttgatatagaaatcctcagaaataactagctctgtaagag

SEQ ID NO: 61159 - DNA, 600 bp, Chicken  19866894321452_2
aagtgtataatatcctcccacaacaatagcttagaaaaatctttttaaaaatctactttacaagaaaaaagttgtggatccttttttaaaaagttggggttttcccccaggattcctttcagtactaagggacctctatctaagatatatatatgtatatatttttaaaggctcttaaactgtgttatgtctgctacaagcatcaccaacagacattttgtgcattgaaacattccatttttctatgctcctctaaatttctyatttttcttatgctactatagttttatttatggcatrctcatatttttttaagtcttactttatcatggctccacgagttctcttgcacaggggtatagctaacttttcaggtggcagttatcttatgtaaacacaagacaaggttaccttgctggtaactgggaaaatcaggtcaataaatactttcataatgatcttagagctattttgccatgtgtgcgcttgctcagctgctaacaaagaatgaatgtggtgcccttgatatagaaatcctcagaaataactagctctgtaagagaaarcagaaaggtctagaggagtcagaatcttctttcc

SEQ ID NO: 61160 - DNA, 600 bp, Chicken  19866894321452_3
taatatcctcccacaacaatagcttagaaaaatctttttaaaaatctactttacaagaaaaaagttgtggatccttttttaaaaagttggggttttcccccaggattcctttcagtactaagggacctctatctaagatatatatatgtatatatttttaaaggctcttaaactgtgttatgtctgctacaagcatcaccaacagacattttgtgcattgaaacattccatttttctatgctcctctaaatttctyatttttcttatgctactatagttttatttatggcatrctcatarttttttaagtcttactttatcatggctccacgagttctcttgcacaggggtatagctaacttttcaggtggcagttatcttatgtaaacacaagacaaggttaccttgctggtaactgggaaaatcaggtcaataaatactttcataatgatcttagagctattttgccatgtgtgcgcttgctcagctgctaacaaagaatgaatgtggtgcccttgatatagaaatcctcagaaataactagctctgtaagagaaarcagaaaggtctagaggagtcagaatcttctttccttctttc

SEQ ID NO: 61161 - DNA, 600 bp, Chicken  19866894321452_4
tttcttatgctactatagttttatttatggcatrctcatatttttttaagtcttactttatcatggctccacgagttctcttgcacaggggtatagctaacttttcaggtggcagttatcttatgtaaacacaagacaaggttaccttgctggtaactgggaaaatcaggtcaataaatactttcataatgatcttagagctattttgccatgtgtgcgcttgctcagctgctaacaaagaatgaatgtggtgcccttgatatagaaatcctcagaaataactagctctgtaagagaaarcagaaaggtctagaggagtcagaatcttctttccttctttctagcctatgatcagaatacacagatcaaatcttygaatgcagcagatactcactctagtggacatccttgtaactatttatttctgatctatctagtaagatatgcagaaaagctacatgaaaagcattgtattctagatgataaatcaagaattcatattgattaaaatgtcaaaagctggttacatggtactgaatccttaccatagtgctctcgttttgggtattgaatgaagcaaaggtcccatatgcaaacctg

SEQ ID NO: 61162 - DNA, 600 bp, Chicken  19866894321452_5
ttctcttgcacaggggtatagctaacttttcaggtggcagttatcttatgtaaacacaagacaaggttaccttgctggtaactgggaaaatcaggtcaataaatactttcataatgatcttagagctattttgccatgtgtgcgcttgctcagctgctaacaaagaatgaatgtggtgcccttgatatagaaatcctcagaaataactagctctgtaagagaaarcagaaaggtctagaggagtcagaatcttctttccttctttctagcctatgatcagaatacacagatcaaatcttygaatgcagcagatactcactctagtggacatccttgtaactatttatttctgatctatctagtaagatatgcagaaaagctacatgaaaagcattgtattctagatgataaatcaagaattcatattgattaaaatgtcaaaagctggttacatggtactgaatccttaccatagtgctctcgttttgggtattgaatgaagcaaaggtcccatatgcaaacctgtatgtctcaaatataacgctgctctaatgcatacataggatgaaaagagaattgaaattaaatttccacaagtca

SEQ ID NO: 61163 - DNA, 599 bp, Chicken  19866894321455_1
  misc_feature (1)..(110): n is any nucleotide
nnnnnnnnnnnnnnnnnnnnnnnnnnnnnnnnnnnnnnnnnnnnnnnnnnnnnnnnnnnnnnnnnnnnnnnnnnnnnnnnnnnnnnnnnnnnnnnnnnnnnnnnnnnnnncagctatttcttccctgtgcattttgtgattttctcctgatatactctcagtagcacacccagtccagttcctataggactttcttccaaagttttctagctgttaatgtttattcccaataagaaaatcattcttgtagacagtttcagtttagtgagtaaagttgataaatcatggttcctcttatcytgaggatgtcttttatctctgtgtatttttgagaatttctaccttgattttttttttctttttcccctttaggacttgattttacaatatttctctgatgattttgggttatgcatacacaatggatttaaagtttgctttatcaatttactgcttgtttttaatttcagtgagctcttttcagttattcaaggaataaatcagagtagttttaagcgagtttgtggcacagctgtatttcatgacttagtaagcactgttaatgctgaaaagagaatgatcsctctcttccatctctt

SEQ ID NO: 61164 - DNA, 600 bp, Chicken  19866894321455_2
catggttcctcttatcytgaggatgtcttttatctctgtgtatttttgagaatttctaccttgattttttttttctttttcccctttaggacttgattttacaatatttctctgatgattttgggttatgcatacacaatggatttaaagtttgctttatcaatttactgcttgtttttaatttcagtgagctcttttcagttattcaaggaataaatcagagtagttttaagcgagtttgtggcacagctgtatttcatgacttagtaagcactgttaatgctgaaaagagaatgatcsctctcttccatctcttttccatctcagttggaaaactgtaattctataatatgttcagataaacacataccattcaacttgtagatcaaatagatgtgaggtgtgtttctctaggagacactcagttaaaccaggttgcccattttcagttttagtttggcaagtctgttgttcatctgcttcatttgaaataactgacgagatatggagttatttttattttcagatgtgcacacaagttttctttgaaaaggattcataacaaagtgcattataatcactgctttcttcattaattaa

SEQ ID NO: 61165 - DNA, 599 bp, Chicken  19866894321456_1
  misc_feature (1)..(50): n is any nucleotide
nnnnnnnnnnnnnnnnnnnnnnnnnnnnnnnnnnnnnnnnnnnnnnnnnnccctctgtaaattgcagcttcttcttacttgcaaactatacttgtgtaatagaaaggaacaataccatagcaggtatttacttgttatttgctgtccattggaacacacaaattcatattaagcagctgatacatttgtctgcatgtcagttgttgaagtgcttttcatttgttagcttgttttgtgatgcagatatgtcctgggagacagctcaattccttttcttttttatttttatttttttattcsttttttttaatagaaactgattgttctaaaatagtgaaggagcacaggtacagtgtgacatgagtttgtgctttctacatgtttagcaagtctcatagtgagacattatgagcaattaaaaaaaaagtattagagaaattatacccagtgaatactgtgaaaatttcaatcctttgaagtgtgacagaacccttccagtcagctgaggcaaaggacacccctaccttagaatacagttatgcaggcaactcagcaactcttttggaaaggtacttaatcaaaaacaaatgcctcttttt

SEQ ID NO: 61166 - DNA, 599 bp, Chicken  19866894321456_2; identical to SEQ ID NO: 61165
  misc_feature (1)..(50): n is any nucleotide

SEQ ID NO: 61167 - DNA, 599 bp, Chicken  19866894321456_3; identical to SEQ ID NO: 61165
  misc_feature (1)..(50): n is any nucleotide

SEQ ID NO: 61168 - DNA, 599 bp, Chicken  19866894321456_4; identical to SEQ ID NO: 61165
  misc_feature (1)..(50): n is any nucleotide

SEQ ID NO: 61169 - DNA, 600 bp, Chicken  19866894321456_5
taacagagacagtgtgtcacctctgctggtgtagattcttatgaatgcggcattcaggctgttcattgttggcaaaaaaaagcatagctaatggtggtgactactgaaaagtagtgttttgcagctaagaatttgttctgtcagagagtatcattgtattctttgtttcaatttccatggaaataaataggaggcattactttcggagcaaccaatttatgtatttgtatctatacaagtgagaggataactatgtctttcccatgacacagaaacacacactccacattctcacaccarttgagacatagctcttctggtgcacttcagcctggccgtctggacccagggagacaactgctagagatgtcaggtctgcttctgtcccagcttctctgtgttccaccatgcaggcagttttctatatgttgtatttaacgtgtgtattctcccctgagggtttttttctagattatagctttctacattagattactggcataggatgccagctgccgcagctccagacctatgtctgactgaccaaaactgacatttcttctacatgaagcttaaatataaacatcagtgctaatttct

SEQ ID NO: 61170 - DNA, 600 bp, Chicken  19866894321459_1
gtgcccaaggaaacttgaactcagcattttcctcattagcagtttagtattttaatgaatatactacaaaagtagctctttacagcatcagtttacagttgattcttgcttttatatggaaaaattaaatacgttcattttggttcagctgtgtcatgcaagtgtgcaattatgtttgcaggataagaagagcaaaatgtgtatattaaaatggcataatacatatgtaaataagtttttaattttatagtggagaggtgtaaagttgaggactttggtcactgtagtaaaacattgctktaaaattactgggtttatttattcatagccttaccatatggtatgtgaaagcaagatattctcattttatttgaactgagtccattgtttgttacggtgtttgttacagtgctgtttgctctttcttgaatggtgattagttgaaatagattttccatatcttatccatagtgmctcaattgcactgtaaatgttatatgcttcacaatgagttatgttttcttcttttcagtaagattgaaggtatggaacatttacataacctacaaaagatgaaccttgcagggaatgagattgagc

SEQ ID NO: 61171 - DNA, 600 bp, Chicken  19866894321459_2
tttgcaggataagaagagcaaaatgtgtatattaaaatggcataatacatatgtaaataagtttttaattttatagtggagaggtgtaaagttgaggactttggtcactgtagtaaaacattgctktaaaattactgggtttatttattcatagccttaccatatggtatgtgaaagcaagatattctcattttatttgaactgagtccattgtttgttacggtgtttgttacagtgctgtttgctctttcttgaatggtgattagttgaaatagattttccatatcttatccatagtgmctcaattgcactgtaaatgttatatgcttcacaatgagttatgttttcttcttttcagtaagattgaaggtatggaacatttacataacctacaaaagatgaaccttgcagggaatgagattgagcatattcctgtgtgggtagggaagaaactgagatccctgcgcatccttaatttgaaacagaataaagtatcatcagtaagtgattataattaaggaacagtcttttcatgaactggtaaatttatattgtttgacctactctgaattactcagtgtctttcagttgtcagtacag

SEQ ID NO: 61172 - DNA, 600 bp, Chicken  19866894321473_1
tcagctaaaattctgctccagacagtcagctgccatttgcactacttttattgccacgaagtccgaactcctaggactaggtcttccttgcaaaataaaacctctctattttaacctcttacttagttctataatccgagacttatattcaaataaaagcagagggatttctttaatcttcttggctatagccacatagactcatttgttgtaattacctgaagctgactgatctacaattttgtcaagatatgttcactacaaagcaaaacaaggctcttacatgtaaagcctatgacrtctgttttgatgcaaagacctcctctttaacagggccactgatgacagagcagtttacttcagagtacctgcagttcatacaggttctacccacgggagatgtcccaaaatggatgtatgcctctaatgatcttcaacagctaggttcaagtgcaatccagtagaggctgtttgctctttcaccttgtgcaattcatgcagtgactgctgcgcatggctatctggaacatcgtttgtctttcacgtcaccatcaccactgctgaaacacaccacccaccacctcagtttgctagcatcta

SEQ ID NO: 61173 - DNA, 599 bp, Chicken  19866894321476_1
  misc_feature (1)..(162): n is any nucleotide
nnnnnnnnnnnnnnnnnnnnnnnnnnnnnnnnnnnnnnnnnnnnnnnnnnnnnnnnnnnnnnnnnnnnnnnnnnnnnnnnnnnnnnnnnnnnnnnnnnnnnnnnnnnnnnnnnnnnnnnnnnnnnnnnnnnnnnnnnnnnnnnnnnnnnnnnnnnnnnnnnnccggccggaccgagaggcagcaatcggggtaaaggaacacagcggcccatgcccggtcggagcgggggccgctttacggccgtactgcagcggagcccagccgcggggtgccgccatggcagcggtttggcgtcgtgytgggtggggagcgccgcgccccgcggcggggtagggcgcagccgctagcggctacacctcgtacwgagttggttttgaacggcaatgagagctccccggctcggggcacmgcgctgtgtcggccgcggcgatttgaacgctcagaccgaggtctgagggtaagagtaacgccgggctctccgtgggttcggtatgtaccggcacggcagctgcgctggggttactgaatgtcgttgttgcagtgcctcttacagatgcttcacagagaagggaaaacgggctctgaagtcatagaatca

SEQ ID NO: 61174 - DNA, 599 bp, Chicken  19866894321476_2
  misc_feature (1)..(97): n is any nucleotide
nnnnnnnnnnnnnnnnnnnnnnnnnnnnnnnnnnnnnnnnnnnnnnnnnnnnnnnnnnnnnnnnnnnnnnnnnnnnnnnnnnnnnnnnnnnnnnnnnccggccggaccgagaggcagcaatcggggtaaaggaacacagcggcccatgcccggtcggagcgggggccgctttacggccgtactgcagcggagcccagccgcggggtgccgccatggcagcggtttggcgtcgtgytgggtggggagcgccgcgccccgcggcggggtagggcgcagccgctagcggctacacctcgtacwgagttggttttgaacggcaatgagagctccccggctcggggcacmgcgctgtgtcggccgcggcgatttgaacgctcagaccgaggtctgagggtaagagtaacgccgggctctccgtgggttcggtatgtaccggcacggcagctgcgctggggttactgaatgtcgttgttgcagtgcctcttacagatgcttcacagagaagggaaaacgggctctgaagtcatagaatcacagaatcattaagattggaaaagactaagaccatctagtacaactgtcagcccgccccactgacc

SEQ ID NO: 61175 - DNA, 599 bp, Chicken  19866894321476_3
  misc_feature (1)..(52): n is any nucleotide
nnnnnnnnnnnnnnnnnnnnnnnnnnnnnnnnnnnnnnnnnnnnnnnnnnnnccggccggaccgagaggcagcaatcggggtaaaggaacacagcggcccatgcccggtcggagcgggggccgctttacggccgtactgcagcggagcccagccgcggggtgccgccatggcagcggtttggcgtcgtgytgggtggggagcgccgcgccccgcggcggggtagggcgcagccgctagcggctacacctcgtacwgagttggttttgaacggcaatgagagctccccggctcggggcacmgcgctgtgtcggccgcggcgatttgaacgctcagaccgaggtctgagggtaagagtaacgccgggctctccgtgggttcggtatgtaccggcacggcagctgcgctggggttactgaatgtcgttgttgcagtgcctcttacagatgcttcacagagaagggaaaacgggctctgaagtcatagaatcacagaatcattaagattggaaaagactaagaccatctagtacaactgtcagcccgccccactgaccacatccctcagggccacatccacacggttctgaacacccccaggg

SEQ ID NO: 61176 - DNA, 600 bp, Chicken  19866894321478_1
atacatgaagatttggtctggtatcactgcagaaattttgtaacatcatgaggacaattaagaatgctctttaaaaattttaaactgaaatatttgactgatgggtattaaagaatttcatttttgtcatatttagtaaagcatcattcccaaatactcaaagcaatcttattttatttgtgaggtatgcttttataaaaccataaacaacctaaatgtattacgcaatattgagatataatgttttgtgtaacaggactttctctgtgatgatctaaaagcagttctcatccattgatractatgttctcaccacaccctttttagggattttttttctccagttttgaagwtgagtgactgaaacacaggttgtatctacactgggaattctggtgtagggattccagtacattatggaaatgaagtacacttagtataggcacagttggacaagcaggcttgctttgtactgacataataaaatcattttacccttcaaataaaacaagctgtactagtacagcacaattttcctcatgtgtctgaaaacctaaattcttctagacaggtctttatctaaacaaaaatcctgtctga

SEQ ID NO: 61177 - DNA, 600 bp, Chicken  19866894321478_2
acaattaagaatgctctttaaaaattttaaactgaaatatttgactgatgggtattaaagaatttcatttttgtcatatttagtaaagcatcattcccaaatactcaaagcaatcttattttatttgtgaggtatgcttttataaaaccataaacaacctaaatgtattacgcaatattgagatataatgttttgtgtaacaggactttctctgtgatgatctaaaagcagttctcatccattgatractatgttctcaccacaccctttttagggattttttttctccagttttgaagwtgagtgactgaaacacaggttgtatctacactgggaattctggtgtagggattccagtacattatggaaatgaagtacacttagtataggcacagttggacaagcaggcttgctttgtactgacataataaaatcattttacccttcaaataaaacaagctgtactagtacagcacaattttcctcatgtgtctgaaaacctaaattcttctagacaggtctttatctaaacaaaaatcctgtctgagcagattgttaggattttttacctttgtctggactttaagggtggattccttg

SEQ ID NO: 61178 - DNA, 599 bp, Chicken  19866894321480_1
  misc_feature (1)..(57): n is any nucleotide
nnnnnnnnnnnnnnnnnnnnnnnnnnnnnnnnnnnnnnnnnnnnnnnnnnnnnnnnncgccgattacttcagtaatcttttggcggccaggcaatcacatttcattacgggcggcgctactctgcaaagcaaatattgcctattgctgaaaccacgctggagtcacacggcttgtgcccttccagtggttgttgcttgcagcagggttgcagatgagggcacagaacacctcctgacgttcccataaatgccaggtgggagccactgagtggtgcctgttggaagcaagaaaacaaaccyactgctgctgccagttctgacytgtgtgcatgtattgcgtgcagctggaggggctctgtgggcaacaaagagcactgggagcactgggaacaaggggaacactgggggcartggatgcactgattgcagtgggagcagctgggagctaygggagcacaggtatcactggaagcagtgggaatactgggagcactgggagaagtaggagtacaggaagcaatgagggtaagggaacactgggagcatttggagcagagggagaagtgggaactttgggagcatatggcgcagagggagca

SEQ ID NO: 61179 - DNA, 599 bp, Chicken  19866894321480_2
  misc_feature (1)..(35): n is any nucleotide
nnnnnnnnnnnnnnnnnnnnnnnnnnnnnnnnnnncgccgattacttcagtaatcttttggcggccaggcaatcacatttcattacgggcggcgctactctgcaaagcaaatattgcctattgctgaaaccacgctggagtcacacggcttgtgcccttccagtggttgttgcttgcagcagggttgcagatgagggcacagaacacctcctgacgttcccataaatgccaggtgggagccactgagtggtgcctgttggaagcaagaaaacaaaccyactgctgctgccagttctgacytgtgtgcatgtattgcgtgcagctggaggggctctgtgggcaacaaagagcactgggagcactgggaacaaggggaacactgggggcartggatgcactgattgcagtgggagcagctgggagctaygggagcacaggtatcactggaagcagtgggaatactgggagcactgggagaagtaggagtacaggaagcaatgagggtaagggaacactgggagcatttggagcagagggagaagtgggaactttgggagcatatggcgcagagggagcactgggagaattaggagcatggg

SEQ ID NO: 61180 - DNA, 600 bp, Chicken  19866894321480_3
cggcgctactctgcaaagcaaatattgcctattgctgaaaccacgctggagtcacacggcttgtgcccttccagtggttgttgcttgcagcagggttgcagatgagggcacagaacacctcctgacgttcccataaatgccaggtgggagccactgagtggtgcctgttggaagcaagaaaacaaaccyactgctgctgccagttctgacytgtgtgcatgtattgcgtgcagctggaggggctctgtgggcaacaaagagcactgggagcactgggaacaaggggaacactgggggcartggatgcactgattgcagtgggagcagctgggagctaygggagcacaggtatcactggaagcagtgggaatactgggagcactgggagaagtaggagtacaggaagcaatgagggtaagggaacactgggagcatttggagcagagggagaagtgggaactttgggagcatatggcgcagagggagcactgggagaattaggagcatggggagtggtgagaatacagggagcaatgggagcactgggaactttgggagcactgggggctctggaagcactggcatctttggaagcactgg

SEQ ID NO: 61181 - DNA, 600 bp, Chicken  19866894321480_4
aaccacgctggagtcacacggcttgtgcccttccagtggttgttgcttgcagcagggttgcagatgagggcacagaacacctcctgacgttcccataaatgccaggtgggagccactgagtggtgcctgttggaagcaagaaaacaaaccyactgctgctgccagttctgacytgtgtgcatgtattgcgtgcagctggaggggctctgtgggcaacaaagagcactgggagcactgggaacaaggggaacactgggggcartggatgcactgattgcagtgggagcagctgggagctaygggagcacaggtatcactggaagcagtgggaatactgggagcactgggagaagtaggagtacaggaagcaatgagggtaagggaacactgggagcatttggagcagagggagaagtgggaactttgggagcatatggcgcagagggagcactgggagaattaggagcatggggagtggtgagaatacagggagcaatgggagcactgggaactttgggagcactgggggctctggaagcactggcatctttggaagcactgggatcagtgggagaatggaagcacagggagactcgggag

SEQ ID NO: 61182 - DNA, 600 bp, Chicken  19866894321485_1
tactttcacacaagcaatattaaggtagctctgggaaagaagaggaagaaaataaaaccttccttgagatggctgtatttcatcaaaccaacatttgtttgtacaaaagtaaattaaattaattttatttattttaaattacaagcaatgaagcaatcttgctgtaaaatttatattacagaagtccaaactgtctctgcactctcatttttgaagtgtgttatctaacaattttggctgatttttaacacactcataaatagcttctattttcacccctatcacctctaggaaatttgratccaaatcttcaaaatttgcttcagactcttggtgattgcatctatgagtgagttgtatcttgacttgagataacttggatgtgatttttcacaggctgtaaacaatcacaaatctagtcagacccarcacactggtctagcacctgtgaaaatagcatcttgcaatatctcaaattcatcagcaatatactgagaaacccaaagtcatagcattttttttttccccacagaaaattaaccatcatatcagactttgtgactaattctttgctgcttccctatccttcatcttcccata

SEQ ID NO: 61183 - DNA, 600 bp, Chicken  19866894321485_2
tattttaaattacaagcaatgaagcaatcttgctgtaaaatttatattacagaagtccaaactgtctctgcactctcatttttgaagtgtgttatctaacaattttggctgatttttaacacactcataaatagcttctattttcacccctatcacctctaggaaatttgratccaaatcttcaaaatttgcttcagactcttggtgattgcatctatgagtgagttgtatcttgacttgagataacttggatgtgatttttcacaggctgtaaacaatcacaaatctagtcagacccarcacactggtctagcacctgtgaaaatagcatcttgcaatatctcaaattcatcagcaatatactgagaaacccaaagtcatagcattttttttttccccacagaaaattaaccatcatatcagactttgtgactaattctttgctgcttccctatccttcatcttcccatactgtgctggtccactctgtgaagattggtataaaggaaaaagagcagattttaattgtatctcaacttgcctgatggttggtgacaactactaatggagattctgtggtatgcatctccaccactaagg

SEQ ID NO: 61184 - DNA, 599 bp, Chicken  19866894321486_1
  misc_feature (1)..(47): n is any nucleotide
nnnnnnnnnnnnnnnnnnnnnnnnnnnnnnnnnnnnnnnnnnnnnnncatgccattacctcagagaagtagttgtctaggaaggccatgttcacccctccttctcgatattcttttattgttcctccaactgacccttttgcttccccagttccagaaattcctccagctgttccgtaaccagtaccagtaccataaccaactcctgttgtttcttccacaccagatgccactactcctcctcctccatatgtatttgtatatatatctgcaaacaaaaaataagttattccttctgtgytctgtgaaaattttcacagaatttatcagttgtttttgtaaggagtacaatgacagtactgatcacctaaaggtattttagattaattttagacagttagacacagttctacactcatgtgccaaacactgaaactgcagtaaaaatcaagtgcatactagaagacatctaaaacctggattttatttgtgaggctgagcatacatgctttaaaagatcaatgattgacttgtgtaatagggggaggtttctctctcttgtgtatgtatatactaccatggtatatgcattagcaaata

SEQ ID NO: 61185 - DNA, 600 bp, Chicken  19866894321490_1
gtattaatatcttttttttttccttctcagaaggaaacttgctaataaaaattgagttcaaataaatgtccttaggtctaagtattcgcagaccaattcttcactgcttttgaccattagtaaaaattctagtgatgtcaaatcatccttaagatgtcaagctacactgtgatgcgtctttgaggtctactctactatttctgacagggaagtgcaggttctatagctctccatttacacattagctttacagtagcatcctggggaaaggttccctgcactccctgaaatggacctgcrctctcaatggcagctatacatctcttccttgtctggaggaccatgggccatatgactgtatgcaaaggcctggtaggcctgatatgtataaataaaagatagcctactttgcacaatgggctgaaactaagatttcacaggaaatttcccatgaaagacagatgaatctgagaatatgggacactggattcaggagaatatctcctcataataaaagtcatatgaataaggaaaatcccagctacctagttcttaccagaaggaaattctcctcacaatatgctgctggaaggaaatttt

SEQ ID NO: 61186 - DNA, 600 bp, Chicken  19866894321491_1
cacaaagagagtaaaatgaagtgaataaataattcacacagacgcacagaagctaaagaaaataaagtcattcactcatacagggagaattcagatcctagaagatcataagtatttttaaatactctcaacagaaatggtgttgaccttacctttcaaggcgaggaagccatccaacctcttctcacacaactgtgattcacaggattgtttagctactcatgaatgtcacattttccctcatcttcatcataatctgttataaggaggcagagaaaggcataaagctttcagtttcaygatcatgaaaraataagatttgtgttcactttaggtagaaaaagtagaagctctacatgtctgactttcctattcaccacaaaaaacactattacccaggcagcagaacctcaggcatactacagttctgcagagagactgcttgtaatcatgaaagatcaatatgctttgcctttttacatacgtgtctatagcatcacacatatacaagggctgcttcaaaagcaatgctttctattttcctaaattggcccacaacatcagaggtagatgttgatagtatgacagtagaggctgaac

SEQ ID NO: 61187 - DNA, 600 bp, Chicken  19866894321491_2
taaaatgaagtgaataaataattcacacagacgcacagaagctaaagaaaataaagtcattcactcatacagggagaattcagatcctagaagatcataagtatttttaaatactctcaacagaaatggtgttgaccttacctttcaaggcgaggaagccatccaacctcttctcacacaactgtgattcacaggattgtttagctactcatgaatgtcacattttccctcatcttcatcataatctgttataaggaggcagagaaaggcataaagctttcagtttcaygatcatgaaaraataagatttgtgttcactttaggtagaaaaagtagaagctctacatgtctgactttcctattcaccacaaaaaacactattacccaggcagcagaacctcaggcatactacagttctgcagagagactgcttgtaatcatgaaagatcaatatgctttgcctttttacatacgtgtctatagcatcacacatatacaagggctgcttcaaaagcaatgctttctattttcctaaattggcccacaacatcagaggtagatgttgatagtatgacagtagaggctgaaccttcccgccaa

SEQ ID NO: 61188 - DNA, 600 bp, Chicken  19866894321494_1
ccagtagactccaggaatctcctggattgttcaccagtctttggatattattccataccttgtgttagaaaatacatacatattaaactcctaatcaggatcacttttattacttttgagatactatgtacaactgctagttatctatgtttctgtttaaatctcttctgtagaatagcagctctgctatcatttcagtaccaattggcaaccaatgcagctgaaatatgagcaagcttcattagcaaacatcaaacaggagaaaacaggagttaacagaatcagctcaaaaattaatgwtgtcaagcagaaagctttcttaattattattattattattactattatggttatcattttgtactatgttaaatatacttttcatagccttttataacccttacatttccatatgatttgctgttgaaagtaacaatatgtattattcaaatcttggttatacagttaggacaagtcataaaagtcaccatttacatgtcctataaaagtagcatcatagaatcatagaatggcttgggttggaaaggacctcaaggatcatcaagctccaacctccctgccgcatgcaggaccaccaac

SEQ ID NO: 61189 - DNA, 600 bp, Chicken  19866894321498_1
ctttgtatgccctcaggcttcactgaagtcattattacttgtatgtcatgagggctagtttcaaaagtctttttcaacacgatgttcacagtttattatcagtcaggcaccaaaccagccagcaaagcccaagactcagcgaagttggcttcttccagggaacagcatttggcctcacacttgcaaaagggaaactgttcgtaactgatgttttgacagaagacaagattgtctactttagagagacaaaaggtattttctggatgaaatataaatagcatgttctcagcaccggtggtyattaacagaatgctgaaactttaacatggaagtaaacagatcaggggaccttctgagagctggcactccacagatcagccttctatacatcttcaaatcattactgcwcactttcctgaccaaagcagatttgactgctgatactaacacactcctaatgcagctgtgaatggatgagctggtttccatatgctgcttaatgccttaactacagcactgccargcagaagaggtctctttggttggtgactgtgctaacaacctgagagcaagtaatgtctgcaggacagcacagtcagg

SEQ ID NO: 61190 - DNA, 600 bp, Chicken  19866894321498_2
accaaaccagccagcaaagcccaagactcagcgaagttggcttcttccagggaacagcatttggcctcacacttgcaaaagggaaactgttcgtaactgatgttttgacagaagacaagattgtctactttagagagacaaaaggtattttctggatgaaatataaatagcatgttctcagcaccggtggtyattaacagaatgctgaaactttaacatggaagtaaacagatcaggggaccttctgagagctggcactccacagatcagccttctatacatcttcaaatcattactgcwcactttcctgaccaaagcagatttgactgctgatactaacacactcctaatgcagctgtgaatggatgagctggtttccatatgctgcttaatgccttaactacagcactgccargcagaagaggtctctttggttggtgactgtgctaacaacctgagagcaagtaatgtctgcaggacagcacagtcagggaggaaaggggcacccgatcattttaaaatcaaaagaaagcaaggaaaatgctgaggtccataggaaaggacacattcactcaggctcctttgtctctaaaaagctcc

SEQ ID NO: 61191 - DNA, 600 bp, Chicken  19866894321498_3
caagattgtctactttagagagacaaaaggtattttctggatgaaatataaatagcatgttctcagcaccggtggtyattaacagaatgctgaaactttaacatggaagtaaacagatcaggggaccttctgagagctggcactccacagatcagccttctatacatcttcaaatcattactgcwcactttcctgaccaaagcagatttgactgctgatactaacacactcctaatgcagctgtgaatggatgagctggtttccatatgctgcttaatgccttaactacagcactgccargcagaagaggtctctttggttggtgactgtgctaacaacctgagagcaagtaatgtctgcaggacagcacagtcagggaggaaaggggcacccgatcattttaaaatcaaaagaaagcaaggaaaatgctgaggtccataggaaaggacacattcactcaggctcctttgtctctaaaaagctccttttttccccctcaaaacaactgcagcttaaggaggttaatgaagcaataagggagggctgaatttgctgcacaacagttttaggaccagaagcttgttccctgctcccacaggg

SEQ ID NO: 61192 - DNA, 600 bp, Chicken  19866894321502_1
ccacccttccttcctcgtctatccgtctatcccttctgaagagcttgtagccatccatcacagaactccaagtcacaggagtggtcccaccatgtttcagtaatagaagctacgccatagttagcctgacacacaatggcttccaactcctcctgcttgttgcccatgctgcgtgcattggtgtagacgcacttcagctgagtcatctgcctcacccccagctcaagcatcgttcccccaggctcatgtctggtgagccctgttttgtccccttcccccgtcctagctagtttaaagctytttcaataagccctgatagctcctgccctaggatttgttgccccctttgagataggtgtgttccatgggcggaaaacaggccaggggctgagtaaactgccccatgattcaaagaacccaaagtttctgcctcaaaaccagcctgtgatccaattattcattatttgtactttccaagcccactctgtgcccttcactgcccctgaaggtaaagagcaaaagatctcttgagctcccactccttgaactaagctccctaaacccctgaaatctcttttcatagttcacaggcttctctga

SEQ ID NO: 61193 - DNA, 600 bp, Chicken  19866894321505_1
gaattcataaataaaaatcccatgtaaattagctcatttatttgcagtcaggatgatgctggcgcttgtcataatcatgtattctacattttttttttttctatctctcagctagctgggtttttttcaactattcatatttttatctcctgttatttattatcttatggtgcagctcagattgcccattactgtgaccagcgctgacactgcagcattcaaagaaatctgctttctcaccttcccctttcttcatttacaaaaaaataaaaaaataaaaaaaaagagaaaggaaaaaaraaaagtcttctaatcttttgactattcaagaaaagagggatagtctctcagactatggaaatgagacatatggacttttttttcttccactaataagtggtaattcagattataggtaagaagaagctttgatacaggtatatcaaagctgaaatatctatatacacagattactcacagaaaatttattttccttttggctaatataaacattaaaataaatggtaaaataaataataaaattatagttactataacataatgctttaaacatctggttagttataatttttcagccat

SEQ ID NO: 61194 - DNA, 599 bp, Chicken  19866894321511_1
  misc_feature (1)..(146): n is any nucleotide
nnnnnnnnnnnnnnnnnnnnnnnnnnnnnnnnnnnnnnnnnnnnnnnnnnnnnnnnnnnnnnnnnnnnnnnnnnnnnnnnnnnnnnnnnnnnnnnnnnnnnnnnnnnnnnnnnnnnnnnnnnnnnnnnnnnnnnnnnnnnnnnnnnactgctacattagtgaactctccttactccccccacatactgaggtaaccttgttaaatctggaatagaaaaggatgagtttgttagagctgtcctagcatccctagagcttaactcttctcagaagttcagacgtcagttgacgaggctgttyctccagcggctgtgtttttcctgaagaaaacatacctgtttgctgtattgccagtggaagcttattccagttctgctccatcccttctgctgcagacagttacagggcagttttagtctcagcttatatggttcattacttgactccttctcttcagatgtctctttcggattttgatcatccacttaacacttaacttagcaaagtctgcagccttaaacagagccaaaaagataccgcagagaagagcaatcgtgttccaaggatttgctgtgattatctgaaagagattgaatata

SEQ ID NO: 61195 - DNA, 600 bp, Chicken  19866894321511_2
agaaaacatacctgtttgctgtattgccagtggaagcttattccagttctgctccatcccttctgctgcagacagttacagggcagttttagtctcagcttatatggttcattacttgactccttctcttcagatgtctctttcggattttgatcatccacttaacacttaacttagcaaagtctgcagccttaaacagagccaaaaagataccgcagagaagagcaatcgtgttccaaggatttgctgtgattatctgaaagagattgaatatattattctcctcatctgactcggtayatattctacctgtacgttaataagcatttccattcttctatgagaagagtttggcagcacacgcctccrcactgcaaagaagggctgaggccccgtgccacacctgtgcctcgttctggacttcttcccattccttctgtgagaaaggaagcacacgtgccaggagctgccctgtactgactgctaaattccttctgacttgcagggtttaactttttagatagataccattccattagcattttactacattacttaaagatttaagaaaacaagcagtcacacaggaagaggttctcc

SEQ ID NO: 61196 - DNA, 600 bp, Chicken  19866894321511_3
agacagttacagggcagttttagtctcagcttatatggttcattacttgactccttctcttcagatgtctctttcggattttgatcatccacttaacacttaacttagcaaagtctgcagccttaaacagagccaaaaagataccgcagagaagagcaatcgtgttccaaggatttgctgtgattatctgaaagagattgaatatattattctcctcatctgactcggtayatattctacctgtacgttaataagcatttccattcttctatgagaagagtttggcagcacacgcctccrcactgcaaagaagggctgaggccccgtgccacacctgtgcctcgttctggacttcttcccattccttctgtgagaaaggaagcacacgtgccaggagctgccctgtactgactgctaaattccttctgacttgcagggtttaactttttagatagataccattccattagcattttactacattacttaaagatttaagaaaacaagcagtcacacaggaagaggttctcccatcaagaccaaacaaagccagaactactggaaagctttaacaacacacattgtaatgataaactacat

SEQ ID NO: 61197 - DNA, 600 bp, Chicken  19866894321519_1
cattttctgcaaccaaaagccaccagggagaatgaaactaccagtcagcaaccttcaaaaatactttttaccttgatttaatttgttccagatacacaggaacatcagcaatttcttttttatatatttttgaaagaaattaaagaaacaattaaggagtatctgtctctactaattaacccttatttcatggtctgatctagtaagtggcattccgttttcagtattgcttatgaaacataaaatccagcatgatagttatggaaatattcttagtctccacagctagcagactgtttwtaagagaaaaaaactcatagtgagggtgttcttgagatctattttgtatccacttcagtttcaagcaagtatgtacaggttgacctgctgtgtagtgtcctagttttgctgttgtcattcttcattgtatcatttcataagaatttgagagatgtgttagaaaaaggaacgttttttcacgtacctcgttgacaggtctgtctgacctattgtggttatccttcccacattctctgcatataaggctatgcagatgatggggctctgatggactaagtatcctcaaatgtcactgtcttg

SEQ ID NO: 61198 - DNA, 600 bp, Chicken  19866894321527_1
gggatgtttggagctgctctgccctatttctcgcagggagagtgtgcagaagacagtggtggtcaaaagatctgatcttgttgtgcaaagtgaggatgccctccagggttggggtgtactgaagcagatgattggcaagggaccatttttcttctgtcttcaaacaatcaattctgtattttattagggtaatcaatttaacaaagaaatgcaggttgtcaggacattcccctaatacaagcacactagagctgtgaaataccttctttccagagaagatacttagtagggatttctgcyaggataagaacctactgcagacactgacatttcaggagagttggacagcacctttctctagttgttggttgattcatctgagcttgtgcccaagaagaaaacttagatctgaggtcttctctgtgactggtgaggatcacgtcatggtggtcactttgtgccttgtttccatttaagattttgctgatccttcagttcccttttttaaggagcgatcatctattagctatgtgcttatatttctttttttaataagtaatctctgagactcaggtccaccactgcttacaccagtacatg

SEQ ID NO: 61199 - DNA, 600 bp, Chicken  19866894321530_1
cctatattgtaaaaaaaaaaaaaaaaaaaaaaagtcttccttatatccaatctaaatctcctctcttttactttgaaaccatttcccctttccctgttacaacagaccctgctaaggagctggtggtcttccttcttgtaaacctcttttagaaactgaaggacactatcatgtctcctgtgagtcttctccaggctaagcagacctagctttctcagcttgtcctcttaggagagatgtttgaacccttggatcatttctgtggtcctcttatagacatgctccaacaggttcacatcystcacctactgaggactccatatcagaatgcaggatcaggatgaggtctcactaggaaagagtagaggggcagaaccacctcccttgacctgctggccacgcttcttttgatgtagtgcaggatacagttggctttctgggcwgtgaaggcaggttgctggctcatgtccagcttctcatccaccaagtaccctcatgtccttttttggcagggctgtacaccatcctttcactccctagcttgtacttatagtgggggttgctgcaacrcagatgcaagacctcatacttggatttatt

SEQ ID NO: 61200 - DNA, 600 bp, Chicken  19866894321530_2
ctatattgtaaaaaaaaaaaaaaaaaaaaaaagtcttccttatatccaatctaaatctcctctcttttactttgaaaccatttcccctttccctgttacaacagaccctgctaaggagctggtggtcttccttcttgtaaacctcttttagaaactgaaggacactatcatgtctcctgtgagtcttctccaggctaagcagacctagctttctcagcttgtcctcttaggagagatgtttgaacccttggatcatttctgtggtcctcttatagacatgctccaacaggttcacatcystcacctactgaggactccatatcagaatgcaggatcaggatgaggtctcactaggaaagagtagaggggcagaaccacctcccttgacctgctggccacgcttcttttgatgtagtgcaggatacagttggctttctgggcwgtgaaggcaggttgctggctcatgtccagcttctcatccaccaagtaccctcatgtccttttttggcagggctgtacaccatcctttcactccctagcttgtacttatagtgggggttgctgcaacrcagatgcaagacctcatacttggatttattg

SEQ ID NO: 61201 - DNA, 600 bp, Chicken  19866894321530_3
ctcttttagaaactgaaggacactatcatgtctcctgtgagtcttctccaggctaagcagacctagctttctcagcttgtcctcttaggagagatgtttgaacccttggatcatttctgtggtcctcttatagacatgctccaacaggttcacatcystcacctactgaggactccatatcagaatgcaggatcaggatgaggtctcactaggaaagagtagaggggcagaaccacctcccttgacctgctggccacgcttcttttgatgtagtgcaggatacagttggctttctgggcwgtgaaggcaggttgctggctcatgtccagcttctcatccaccaagtaccctcatgtccttttttggcagggctgtacaccatcctttcactccctagcttgtacttatagtgggggttgctgcaacrcagatgcaagacctcatacttggatttattgaacctcatgatgttcacctgggcctagtgctcacacctgactaggtctctctggatgacattctgtcccttgggtgtgttgactgcacccccccagcttggtgtcatcacaaacttgctaagaatgcatttggccctattgt

SEQ ID NO: 61202 - DNA, 600 bp, Chicken  19866894321530_4
ttatagacatgctccaacaggttcacatcystcacctactgaggactccatatcagaatgcaggatcaggatgaggtctcactaggaaagagtagaggggcagaaccacctcccttgacctgctggccacgcttcttttgatgtagtgcaggatacagttggctttctgggcwgtgaaggcaggttgctggctcatgtccagcttctcatccaccaagtaccctcatgtccttttttggcagggctgtacaccatcctttcactccctagcttgtacttatagtgggggttgctgcaacrcagatgcaagacctcatacttggatttattgaacctcatgatgttcacctgggcctagtgctcacacctgactaggtctctctggatgacattctgtcccttgggtgtgttgactgcacccccccagcttggtgtcatcacaaacttgctaagaatgcatttggccctattgttgatgacattgatgaagatgttcatgagcactggacccagtactgacctcagagagacaccacttgtcatagatttccatccagggatgatcttgcaaccaattcctcatgtattgaaaatacactt

SEQ ID NO: 61203 - DNA, 600 bp, Chicken  19866894321532_1
ttagcaatagtatcttcccactgctctactgcttcactgttattgctgtcagaacttatccagacctgcaaggagaaaaaagaaacaaaacgaaggttacctgatgtaacacagaagtccagcctatgttagttccaaataaattccatgaaagtgtagaatgagatgcaacacgtagactgtgaccaaatcattagcaacaaatacagttctgttaggactaacataacttggcttccaactgggaacacagggagtctgggtttatatttagtctctaaacaaatagaagtttagagrgatcactacacactaatgttttgctagttaacaaagtgttttaagtcaagcattccttgcttcattcaaattcatgtgctggggtcaagggcccgtgagggcagtgatgactctctggaccatgcagtcaaactccagctggctgcaagccacctggcacccagatttagctgtccagccttttcatgagcatttaaaatcacacactccaacagacagggccaaacctgcattccacagaggttactaacgtgcctgtagcacacatagtcacgcagtaagagtgcatctcttcacaat

SEQ ID NO: 61204 - DNA, 600 bp, Chicken  19866894321532_2
cttgcttcattcaaattcatgtgctggggtcaagggcccgtgagggcagtgatgactctctggaccatgcagtcaaactccagctggctgcaagccacctggcacccagatttagctgtccagccttttcatgagcatttaaaatcacacactccaacagacagggccaaacctgcattccacagaggttactaacgtgcctgtagcacacatagtcacgcagtaagagtgcatctcttcacaatattaaactaatggacagaagccattaaacaaggaaatgaggtacaagaaggaagyttccccctaaaaattatcatcagtttcaactgccaaaagaattctgattatgtaagtaggtgtcatcatttatgggactccatttcctccactcttccaagaatgagtctttttaatacttctcagaaaccttcaccatgaagtacatttagcccacactgttgaggcatgattcctcaagtgagaataatgtcttccagaataccacaggcagctgatgtttcatccacagagattcagtatacatcttgctcatgattaaagacatgctcataaatgcaacctaatcaaaatgttgtc

SEQ ID NO: 61205 - DNA, 600 bp, Chicken  19866894321536_1
ctgaagttttaagtaggctttttttatgggatgggaattcctgatgctagttttggcacaaagaccccgtaatacagagctgcaatctcagcaggttctgagcaaccaggaggggttttacaccttgcttgaaattactctccagtaaaaatacagggcgtctgtaagagatttattttgttcttaaggtggtgcacaggtgtgataaatttatattcctatacagagagggctctggacctgcacattttcatctgagctgaacagaaacaaaaatcacagtcaaaagtttgagagaarggtttctgtgatcagttggactaatgcaggccagagtgtatgcaaacaatgaagcaaggcgaggcacactgacggagctggtgctggtttttgctgtatacactgatgtgtgtatctaaaatggctgaagctccagtataaataatgttagtggacttagtcagtgggctgggagaagttctagaaattggatgagttttcttatagttacagcctttgtgtgtccaacagtgctctcataaaaactgaagggcttcaaatgtaactacaaggaaggggcataagactatccccagtatt

SEQ ID NO: 61206 - DNA, 599 bp, Chicken  19866894321537_1
  misc_feature (1)..(173): n is any nucleotide
nnnnnnnnnnnnnnnnnnnnnnnnnnnnnnnnnnnnnnnnnnnnnnnnnnnnnnnnnnnnnnnnnnnnnnnnnnnnnnnnnnnnnnnnnnnnnnnnnnnnnnnnnnnnnnnnnnnnnnnnnnnnnnnnnnnnnnnnnnnnnnnnnnnnnnnnnnnnnnnnnnnnnnnnnnnnnaactttagaagccaaagtctgaatagtaaaatctaccagaactcataactggctttggaacaagtcatttaggacttagttactgcttcaaaaatgaagtgccctagttttgaaggggaaaacaggyttagaaatatctagcaaatacaaagaaaactggattcagtgcactgttgattgactaagtcataaayatccycttgcaccctcataatttgtctccataagggtrcacaagkgtaatatccccagaaaaygcagtcattgaggacatctggagagagacaggaccaacatgaaatgaatgaccaaaatgttgcatgccaaatataagcacaaccttgacctggtacatcctgcacaagctgcttaacaccgcagtcaaagagagaagaggagctctcagataatgacatgtgggcctta

SEQ ID NO: 61207 - DNA, 599 bp, Chicken  19866894321537_2
  misc_feature (1)..(106): n is any nucleotide
nnnnnnnnnnnnnnnnnnnnnnnnnnnnnnnnnnnnnnnnnnnnnnnnnnnnnnnnnnnnnnnnnnnnnnnnnnnnnnnnnnnnnnnnnnnnnnnnnnnnnnnnnnaactttagaagccaaagtctgaatagtaaaatctaccagaactcataactggctttggaacaagtcatttaggacttagttactgcttcaaaaatgaagtgccctagttttgaaggggaaaacaggyttagaaatatctagcaaatacaaagaaaactggattcagtgcactgttgattgactaagtcataaayatccycttgcaccctcataatttgtctccataagggtrcacaagkgtaatatccccagaaaaygcagtcattgaggacatctggagagagacaggaccaacatgaaatgaatgaccaaaatgttgcatgccaaatataagcacaaccttgacctggtacatcctgcacaagctgcttaacaccgcagtcaaagagagaagaggagctctcagataatgacatgtgggccttacagacccggcagtgggcagaaggcatcgctcgttattctgtcaaggactccacatgccagtctatgc

SEQ ID NO: 61208 - DNA, 599 bp, Chicken  19866894321537_3
  misc_feature (1)..(101): n is any nucleotide
nnnnnnnnnnnnnnnnnnnnnnnnnnnnnnnnnnnnnnnnnnnnnnnnnnnnnnnnnnnnnnnnnnnnnnnnnnnnnnnnnnnnnnnnnnnnnnnnnnnnnaactttagaagccaaagtctgaatagtaaaatctaccagaactcataactggctttggaacaagtcatttaggacttagttactgcttcaaaaatgaagtgccctagttttgaaggggaaaacaggyttagaaatatctagcaaatacaaagaaaactggattcagtgcactgttgattgactaagtcataaayatccycttgcaccctcataatttgtctccataagggtrcacaagkgtaatatccccagaaaaygcagtcattgaggacatctggagagagacaggaccaacatgaaatgaatgaccaaaatgttgcatgccaaatataagcacaaccttgacctggtacatcctgcacaagctgcttaacaccgcagtcaaagagagaagaggagctctcagataatgacatgtgggccttacagacccggcagtgggcagaaggcatcgctcgttattctgtcaaggactccacatgccagtctatgcaatct

SEQ ID NO: 61209 - DNA, 599 bp, Chicken  19866894321537_4
  misc_feature (1)..(68): n is any nucleotide
nnnnnnnnnnnnnnnnnnnnnnnnnnnnnnnnnnnnnnnnnnnnnnnnnnnnnnnnnnnnnnnnnnnnaactttagaagccaaagtctgaatagtaaaatctaccagaactcataactggctttggaacaagtcatttaggacttagttactgcttcaaaaatgaagtgccctagttttgaaggggaaaacaggyttagaaatatctagcaaatacaaagaaaactggattcagtgcactgttgattgactaagtcataaayatccycttgcaccctcataatttgtctccataagggtrcacaagkgtaatatccccagaaaaygcagtcattgaggacatctggagagagacaggaccaacatgaaatgaatgaccaaaatgttgcatgccaaatataagcacaaccttgacctggtacatcctgcacaagctgcttaacaccgcagtcaaagagagaagaggagctctcagataatgacatgtgggccttacagacccggcagtgggcagaaggcatcgctcgttattctgtcaaggactccacatgccagtctatgcaatctgattcgcaatcaattgcaagtgattacacattg

SEQ ID NO: 61210 - DNA, 599 bp, Chicken  19866894321537_5
  misc_feature (1)..(61): n is any nucleotide
nnnnnnnnnnnnnnnnnnnnnnnnnnnnnnnnnnnnnnnnnnnnnnnnnnnnnnnnnnnnnaactttagaagccaaagtctgaatagtaaaatctaccagaactcataactggctttggaacaagtcatttaggacttagttactgcttcaaaaatgaagtgccctagttttgaaggggaaaacaggyttagaaatatctagcaaatacaaagaaaactggattcagtgcactgttgattgactaagtcataaayatccycttgcaccctcataatttgtctccataagggtrcacaagkgtaatatccccagaaaaygcagtcattgaggacatctggagagagacaggaccaacatgaaatgaatgaccaaaatgttgcatgccaaatataagcacaaccttgacctggtacatcctgcacaagctgcttaacaccgcagtcaaagagagaagaggagctctcagataatgacatgtgggccttacagacccggcagtgggcagaaggcatcgctcgttattctgtcaaggactccacatgccagtctatgcaatctgattcgcaatcaattgcaagtgattacacattgtttatca

SEQ ID NO: 61211 - DNA, 599 bp, Chicken  19866894321537_6
  misc_feature (1)..(43): n is any nucleotide
nnnnnnnnnnnnnnnnnnnnnnnnnnnnnnnnnnnnnnnnnnnaactttagaagccaaagtctgaatagtaaaatctaccagaactcataactggctttggaacaagtcatttaggacttagttactgcttcaaaaatgaagtgccctagttttgaaggggaaaacaggyttagaaatatctagcaaatacaaagaaaactggattcagtgcactgttgattgactaagtcataaayatccycttgcaccctcataatttgtctccataagggtrcacaagkgtaatatccccagaaaaygcagtcattgaggacatctggagagagacaggaccaacatgaaatgaatgaccaaaatgttgcatgccaaatataagcacaaccttgacctggtacatcctgcacaagctgcttaacaccgcagtcaaagagagaagaggagctctcagataatgacatgtgggccttacagacccggcagtgggcagaaggcatcgctcgttattctgtcaaggactccacatgccagtctatgcaatctgattcgcaatcaattgcaagtgattacacattgtttatcatcgattggcacaaggaat

SEQ ID NO: 61212 - DNA, 599 bp, Chicken  19866894321545_1
  misc_feature (1)..(168): n is any nucleotide
nnnnnnnnnnnnnnnnnnnnnnnnnnnnnnnnnnnnnnnnnnnnnnnnnnnnnnnnnnnnnnnnnnnnnnnnnnnnnnnnnnnnnnnnnnnnnnnnnnnnnnnnnnnnnnnnnnnnnnnnnnnnnnnnnnnnnnnnnnnnnnnnnnnnnnnnnnnnnnnnnnnnnnnncctcataatacaagagtactaaaatgaacctccttgtcacaagctgttacggaaagcaagtcattttcctctcttcccttaaatgatttactccttcattattccaaatctttccattgttttttctcttgwgctcacacagctcctcactagcatcatatttgcagcagttggctatcacaccaccgcagtgactcacrctcaggaggagataaaacacagtaattgaaaagggcaggccagagttgtacccaaagagattgcagggatcccatcagcacaaaccagatctgagtgccagccccactgtccagatgttcctgctctgctgtcacctggactcctcatcttttgcttttagttatgagtcatgtcatgctactagagtttgcctgcaattttagcaagcccaaataccaggtggaaaacaa

SEQ ID NO: 61213 - DNA, 599 bp, Chicken  19866894321545_2
  misc_feature (1)..(100): n is any nucleotide
nnnnnnnnnnnnnnnnnnnnnnnnnnnnnnnnnnnnnnnnnnnnnnnnnnnnnnnnnnnnnnnnnnnnnnnnnnnnnnnnnnnnnnnnnnnnnnnnnnnncctcataatacaagagtactaaaatgaacctccttgtcacaagctgttacggaaagcaagtcattttcctctcttcccttaaatgatttactccttcattattccaaatctttccattgttttttctcttgwgctcacacagctcctcactagcatcatatttgcagcagttggctatcacaccaccgcagtgactcacrctcaggaggagataaaacacagtaattgaaaagggcaggccagagttgtacccaaagagattgcagggatcccatcagcacaaaccagatctgagtgccagccccactgtccagatgttcctgctctgctgtcacctggactcctcatcttttgcttttagttatgagtcatgtcatgctactagagtttgcctgcaattttagcaagcccaaataccaggtggaaaacaaaaacagcactttccctcttctcccarttctgccttggaacccagtggctgacagtttcccttttttgt

SEQ ID NO: 61214 - DNA, 600 bp, Chicken  19866894321545_3
atatttgcagcagttggctatcacaccaccgcagtgactcacrctcaggaggagataaaacacagtaattgaaaagggcaggccagagttgtacccaaagagattgcagggatcccatcagcacaaaccagatctgagtgccagccccactgtccagatgttcctgctctgctgtcacctggactcctcatcttttgcttttagttatgagtcatgtcatgctactagagtttgcctgcaattttagcaagcccaaataccaggtggaaaacaaaaacagcactttccctcttctcccarttctgccttggaacccagtggctgacagtttcccttttttgtttcaagttgcttttatagccaaacttgcaggtcttcagagactggttgctcccagcattacacaataagcccactcacttgccatgagaacacacacgatcccccacctgtcctgtgttagcagcactgttgtgggctgaagggcatmatttctggccaagtggaaggtcatctccatgctatacctgaacctcaaaaagaaccccccagttggaaactaagcaggctttccaaactccttaaaaactaacttcctgc

SEQ ID NO: 61215 - DNA, 600 bp, Chicken  19866894321545_4
tcttttgcttttagttatgagtcatgtcatgctactagagtttgcctgcaattttagcaagcccaaataccaggtggaaaacaaaaacagcactttccctcttctcccarttctgccttggaacccagtggctgacagtttcccttttttgtttcaagttgcttttatagccaaacttgcaggtcttcagagactggttgctcccagcattacacaataagcccactcacttgccatgagaacacacacgatcccccacctgtcctgtgttagcagcactgttgtgggctgaagggcatmatttctggccaagtggaaggtcatctccatgctatacctgaacctcaaaaagaaccccccagttggaaactaagcaggctttccaaactccttaaaaactaacttcctgcccactgctgaacatttcacacaccagtttctttacagcttgttgagatgttttgtgtgcaaagactggcctgaggtcactgcccagccccaaggcacccctcaggcacaggttggctacaccacactgaggtcagtgggcagaggagagcacatcatgctgaggctccttgcacttccaaggagctgcag

SEQ ID NO: 61216 - DNA, 599 bp, Chicken  19866894321547_1
  misc_feature (1)..(81): n is any nucleotide
nnnnnnnnnnnnnnnnnnnnnnnnnnnnnnnnnnnnnnnnnnnnnnnnnnnnnnnnnnnnnnnnnnnnnnnnnnnnnnnnnacccacagctctgtcaggtgctcagagccccgtccagcctgaccttgagtgtctccaagcatccacctctctgagcagcctgtgccagtgcttcactacccttattattaaaaacttcttccttatatcctgtatgtgtctctaattttattttgaaaccatttccccttgtcctatcaccacaaatcctgctaaagcgtctgtccccttctttcttamagcccctttagatactgacaggccgctctcaggttcccccctgagccttctctcctccaggctgcacagccycagctctctcagcctgtcctcatagaagagatgttccatcccttggatcgtttttgttgccctcctctggacactcwccaacaggtccatgtctctcctgtgctgaggactctacaactggatacagggctccaggtgaagtctgacagctcagagcagagggatgggatccctcttcagcagggctatactctatccttttgtcccccagcttgtattttttccta

SEQ ID NO: 61217 - DNA, 599 bp, Chicken  19866894321547_2
  misc_feature (1)..(9): n is any nucleotide
nnnnnnnnnacccacagctctgtcaggtgctcagagccccgtccagcctgaccttgagtgtctccaagcatccacctctctgagcagcctgtgccagtgcttcactacccttattattaaaaacttcttccttatatcctgtatgtgtctctaattttattttgaaaccatttccccttgtcctatcaccacaaatcctgctaaagcgtctgtccccttctttcttamagcccctttagatactgacaggccgctctcaggttcccccctgagccttctctcctccaggctgcacagccycagctctctcagcctgtcctcatagaagagatgttccatcccttggatcgtttttgttgccctcctctggacactcwccaacaggtccatgtctctcctgtgctgaggactctacaactggatacagggctccaggtgaagtctgacagctcagagcagagggatgggatccctcttcagcagggctatactctatccttttgtcccccagcttgtattttttcctagtataaatatggttggtactttcattacaaaagggaagcaaacaattcctccctcagctatagttcaaggcc

SEQ ID NO: 61218 - DNA, 600 bp, Chicken  19866894321547_3
ctctgagcagcctgtgccagtgcttcactacccttattattaaaaacttcttccttatatcctgtatgtgtctctaattttattttgaaaccatttccccttgtcctatcaccacaaatcctgctaaagcgtctgtccccttctttcttamagcccctttagatactgacaggccgctctcaggttcccccctgagccttctctcctccaggctgcacagccycagctctctcagcctgtcctcatagaagagatgttccatcccttggatcgtttttgttgccctcctctggacactcwccaacaggtccatgtctctcctgtgctgaggactctacaactggatacagggctccaggtgaagtctgacagctcagagcagagggatgggatccctcttcagcagggctatactctatccttttgtcccccagcttgtattttttcctagtataaatatggttggtactttcattacaaaagggaagcaaacaattcctccctcagctatagttcaaggccctgccaccagcaaagcaggcaggagttcctgtggcctctcaacaccccaggagcccagagctcagcatccccaggttc

SEQ ID NO: 61219 - DNA, 600 bp, Chicken  19866894321547_4
cctgtgctgaggactctacaactggatacagggctccaggtgaagtctgacagctcagagcagagggatgggatccctcttcagcagggctatactctatccttttgtcccccagcttgtattttttcctagtataaatatggttggtactttcattacaaaagggaagcaaacaattcctccctcagctatagttcaaggccctgccaccagcaaagcaggcaggagttcctgtggcctctcaacaccccaggagcccagagctcagcatccccaggttcatcatgaccttccccattycttattttaaactctttaccacactgtcaagttccagtgtctctttctgagcatgccaaaggcaatgctgacatcagctgccaatgtcactggggcacttccctgatggcagtggaatgtgatgatgccactcctggggactggtgacccaagccacaggcaaagtagatgacaacttgtctgtcatttctgtgatcagaaggaattagatgtcctgtgtcactttgctgctgtcagcaggaaaaccaattgacagcttgatcttatttttagtctctttttttcttcactccatgctta

SEQ ID NO: 61220 - DNA, 599 bp, Chicken  19866894321552_1
tttctcataacattaatgttcattcatgtcatagatatttcatttacatttttttttccaatcttccctggggaaaatgatggaaaactgtgtcaaaaaagctttcttaactcaggagttagtagccatgaggcattttacactgtcacaagacatgtcgaggttgtttgagcatgatgttttttgacactttcttgttggctgtttctcaatttcttgatgtttttagctgtaaaatctgattatttgctctgctatttttctgcacattgaaattaatcttgaccatctgtaactccrtaatttttcttcttttccactttcatacctttcatagactgtatttactttttccagctttctttttctctctgttttagaactttattgccagcagccaacagtcttgtaacacttctaccctaatagtgttacatattctttgactctatcaagaacacgtaatgaatcccaatattcttccccatactccactgttaatggacgcagtagcaaaaaatttaaatgaaacgatagtttatttcctttgttaaaggaattgataagggttgtcagggttaagggaatataggccagtt

SEQ ID NO: 61221 - DNA, 600 bp, Chicken  19866894321555_1
cgccattagcccacctctcccccacgtttatcgagtatgctgtagattctcctccaggaaatgctaagtgcaattcaactgaaaatgaacattcatagccactaatagcacagacaggcagaatttcaaatgccatttattaagcctatgtcttacagcagtacaaaccatacaacttttggaaagttttcactaaccagaacgttttagataaattacaggctaagagcacgttgaatggaagcaaaaaatgttttgctttgaaactgtggttataggcagtgtgcccaccatacactraagaaytggcagttttgagtggttcgttctgttctttttaacagcagaagagtttacctacagcacaactccgcccccttccatctagtagctggtgtcactctttcagcttcctttatgacttccagttgaacattaggtaacactaaatttgaaaaaatacaggcttaccttgaaagcgggtatatcctaacgtttgctcctcggaaactcttataatattttactccataaactataattggtcttctaagaatatgtgcaagtacaaaaatgtgtgtctgctccaaacttgctcca

SEQ ID NO: 61222 - DNA, 600 bp, Chicken  19866894321555_2
tagcccacctctcccccacgtttatcgagtatgctgtagattctcctccaggaaatgctaagtgcaattcaactgaaaatgaacattcatagccactaatagcacagacaggcagaatttcaaatgccatttattaagcctatgtcttacagcagtacaaaccatacaacttttggaaagttttcactaaccagaacgttttagataaattacaggctaagagcacgttgaatggaagcaaaaaatgttttgctttgaaactgtggttataggcagtgtgcccaccatacactraagaaytggcagttttgagtggttcgttctgttctttttaacagcagaagagtttacctacagcacaactccgcccccttccatctagtagctggtgtcactctttcagcttcctttatgacttccagttgaacattaggtaacactaaatttgaaaaaatacaggcttaccttgaaagcgggtatatcctaacgtttgctcctcggaaactcttataatattttactccataaactataattggtcttctaagaatatgtgcaagtacaaaaatgtgtgtctgctccaaacttgctccaggctga

SEQ ID NO: 61223 - DNA, 600 bp, Chicken  19866894321559_1
atgaggatcctttattgccagcatctgaaagctgcagagtgcaagcaggcagagcagtggctagaattggagtacattcccttgccttagtgggagtccgagcaaattaccctccttccaatctccagagcagccagctgcagagagcagcaaatccttccttagcgttgtaaagctcctgaagggcttctcagccagtgatctcattgtgctggaagatatccaggcactgagggaaactccatcgatgtttttacagtcctgttctgaaacgtgagctttctctttgcagtgggtgartacacgcacgtgttcactgattaactgtcctttcagaactcattttcaggtatgtaaggatttctggtgctaaaccagaagtgtcagatcgttgtgttgcctgacagtaattcagagggcgctgacatctcccttgggtacacgtagctctttttcctcgcatcagggagacagccaagtgagcaatttgcttcctgttttcaatctagaagacacatgagaaatgtagttttggccctgccagtatggctaatggagctgggaagctttaccgacgctaccagaaagcacgcagctctg

SEQ ID NO: 61224 - DNA, 599 bp, Chicken  19866894321560_1
  misc_feature (1)..(157): n is any nucleotide
nnnnnnnnnnnnnnnnnnnnnnnnnnnnnnnnnnnnnnnnnnnnnnnnnnnnnnnnnnnnnnnnnnnnnnnnnnnnnnnnnnnnnnnnnnnnnnnnnnnnnnnnnnnnnnnnnnnnnnnnnnnnnnnnnnnnnnnnnnnnnnnnnnnnnnnnnnnnngaggtcaaccagcaacacagcttctactacaacacatcgcattggaaaatgagatttctacatgggaactgcaactggggtcaagcatacaagccaacctctcgagaaagacagcagaaggaaaagaagtgcaacagtgtacragaccgaagcacaggtataagtgctcttatgagtggtgatacaaagagcattgagcaggtagctgtcactacagcatcctcaaaacatgatgttctattgaatttcggctccatgcttctttgcgagatgtgttttcctaacattctttatgygagactctttagaaggaaacatagcaattgtttgtttttaaagagatatttgtaacgtgttggttattctcaagagatatttccctttaaagaaatattagaaaagctgtaaatgacagtcagcttacattctacctatcctcaca

SEQ ID NO: 61225 - DNA, 599 bp, Chicken  19866894321560_2
  misc_feature (1)..(4): n is any nucleotide
nnnngaggtcaaccagcaacacagcttctactacaacacatcgcattggaaaatgagatttctacatgggaactgcaactggggtcaagcatacaagccaacctctcgagaaagacagcagaaggaaaagaagtgcaacagtgtacragaccgaagcacaggtataagtgctcttatgagtggtgatacaaagagcattgagcaggtagctgtcactacagcatcctcaaaacatgatgttctattgaatttcggctccatgcttctttgcgagatgtgttttcctaacattctttatgygagactctttagaaggaaacatagcaattgtttgtttttaaagagatatttgtaacgtgttggttattctcaagagatatttccctttaaagaaatattagaaaagctgtaaatgacagtcagcttacattctacctatcctcacagctttaaatattttcactcgttaatgttctgtaaacagcatgtagccctccctgctgtatgccaagacacactgctratttccttgataccagataacaaggaaatgacactactgacatatagaaagcacaacctttgagaatgaagagctc

SEQ ID NO: 61226 - DNA, 600 bp, Chicken  19866894321560_3
tcctcaaaacatgatgttctattgaatttcggctccatgcttctttgcgagatgtgttttcctaacattctttatgygagactctttagaaggaaacatagcaattgtttgtttttaaagagatatttgtaacgtgttggttattctcaagagatatttccctttaaagaaatattagaaaagctgtaaatgacagtcagcttacattctacctatcctcacagctttaaatattttcactcgttaatgttctgtaaacagcatgtagccctccctgctgtatgccaagacacactgctratttccttgataccagataacaaggaaatgacactactgacatatagaaagcacaacctttgagaatgaagagctcctcagtagaattatggtagctgtagaaagaaagtgaaagcaatggtagagcatgcagtaagtctgaacagtacgagacgttctttctattcccttccgttttgctctgtctgtcagcatctggataagtgagaagacacaaaggttattcccaaaccacagactgctctatgcctacaacagggatagtttttgaacttatctttatggaagcaaaaaaaaaaa

SEQ ID NO: 61227 - DNA, 599 bp, Chicken  19866894321567_1
  misc_feature (1)..(221): n is any nucleotide
nnnnnnnnnnnnnnnnnnnnnnnnnnnnnnnnnnnnnnnnnnnnnnnnnnnnnnnnnnnnnnnnnnnnnnnnnnnnnnnnnnnnnnnnnnnnnnnnnnnnnnnnnnnnnnnnnnnnnnnnnnnnnnnnnnnnnnnnnnnnnnnnnnnnnnnnnnnnnnnnnnnnnnnnnnnnnnnnnnnnnnnnnnnnnnnnnnnnnnnnnnnnnnnnnnnnnnnnnnnnncagtcagttattgtattaacacttatgttatactgctgcctacaggtccatatttaaagttagggtgtaacactaactkgtgtttaaacaaggctcctgtcccaaaccttataaaacaagcaagataagaaaggtatgggagaaggtgcctagcctaacccattttatctttttgacacattttaacacaatcgtgtttgtgaatgtaattgaatgtatgtcttcaactgccttgtagccctgacagaaggggctggtttgttgttttttttttcagtagagctgcatacaggaaagcaatacgaaaggaaaagggtgatgctggtgcttgtcttaggggtactatggaaatattgcgaatggcagccctccccacaa

SEQ ID NO: 61228 - DNA, 600 bp, Chicken  19866894321569_1
ggggtgatgaggtgtatgaggataaacaagatcctctgaaaaattaccaagtataaacacactgagtcgcacatgctttcttaatttacttatttttgcatgtctgtgtgtttgactttgtagcattactcctcctgcattagtgttaaatgttgatatgatttctcaggtcttgtaaaagactgaacttaaaaacactgaaattccatcatgtggaagcattttaacacccacagtgtttatctgtgggagctagatgtgaaggtctcccactcacagctactctacttgagctgtcayggataacactcgtaagttgttttctctgtgtgtgaactgcctcagatgagacacagaccctaccgggccttttccagtctttttctagcggtaggggagtagtgagactggggaattttggtttcttctctagcctctagataggggcagtatattttagggagtacaggaccctcctgcctctcattcttayttgactgagtgaatcctgttgctgtcaatattgtcctaacttatccctgtctttccatgctggtttcttgccactgcctacctcccctgcttatcctagtcagtctc

SEQ ID NO: 61229 - DNA, 600 bp, Chicken  19866894321569_2
aacactgaaattccatcatgtggaagcattttaacacccacagtgtttatctgtgggagctagatgtgaaggtctcccactcacagctactctacttgagctgtcayggataacactcgtaagttgttttctctgtgtgtgaactgcctcagatgagacacagaccctaccgggccttttccagtctttttctagcggtaggggagtagtgagactggggaattttggtttcttctctagcctctagataggggcagtatattttagggagtacaggaccctcctgcctctcattcttayttgactgagtgaatcctgttgctgtcaatattgtcctaacttatccctgtctttccatgctggtttcttgccactgcctacctcccctgcttatcctagtcagtctctttgtttagtcctgctccccaggatccttgtccagagtcaagcttctctttctcatatcttactctcatctcctttcaccaacagtcccatcccctgctcctcttctgacttctcccatcagtgtccttcatttatctgcccgtggtcactttttcccttttttttccttttgactcctgtctctgtggtcca

SEQ ID NO: 61230 - DNA, 600 bp, Chicken  19866894321577_1
actgaagttgttgtatagcagcttagagtcggatctctgtagatcaatgggttgttcaatttgccaatcagtctccaggaaaggcattttgacctagatggtaagaattgaagcttatggatgaggctgtcttaaggaaatgtattgctgaattgccaacccattacttccaatgaggggaagcaagttgtctcatacttttagaaagaaaggaccaaatttagagtgagaataaagtaaaataattttttttttctgtcattatatagaaacaggacagctgtgcatccttacctctaygtagctccagtcaggcatactcgtcactgttgctcatgtgcattccctctatatattcagtttctttggggtcaagggaagaagagatgaatggttagcctccagcacatggatgtgtttgagagagtctcatttaagaastctgcttctgaagtcattctttctgttcacrtggctgctgaagaagtggatgtgctgtttgtgtgtcatgcatgacttctgatgtagatgttgcctcgcttcccagtgaactggattgtagatacagtctttgaaacagcagaaatggtctcattcttg

SEQ ID NO: 61231 - DNA, 600 bp, Chicken  19866894321577_2
gtattgctgaattgccaacccattacttccaatgaggggaagcaagttgtctcatacttttagaaagaaaggaccaaatttagagtgagaataaagtaaaataattttttttttctgtcattatatagaaacaggacagctgtgcatccttacctctaygtagctccagtcaggcatactcgtcactgttgctcatgtgcattccctctatatattcagtttctttggggtcaagggaagaagagatgaatggttagcctccagcacatggatgtgtttgagagagtctcatttaagaastctgcttctgaagtcattctttctgttcacrtggctgctgaagaagtggatgtgctgtttgtgtgtcatgcatgacttctgatgtagatgttgcctcgcttcccagtgaactggattgtagatacagtctttgaaacagcagaaatggtctcattcttgccttgtgtatgctgaacaccgagctaaacagttatctttttgttctgrtctgactgtctttagaacaaatggaggattgattgcttaaaaaagtcttaaagacaaatatggctgagaaatctgttggcttaggaataatac

SEQ ID NO: 61232 - DNA, 600 bp, Chicken  19866894321577_3
atgaggggaagcaagttgtctcatacttttagaaagaaaggaccaaatttagagtgagaataaagtaaaataattttttttttctgtcattatatagaaacaggacagctgtgcatccttacctctaygtagctccagtcaggcatactcgtcactgttgctcatgtgcattccctctatatattcagtttctttggggtcaagggaagaagagatgaatggttagcctccagcacatggatgtgtttgagagagtctcatttaagaastctgcttctgaagtcattctttctgttcacrtggctgctgaagaagtggatgtgctgtttgtgtgtcatgcatgacttctgatgtagatgttgcctcgcttcccagtgaactggattgtagatacagtctttgaaacagcagaaatggtctcattcttgccttgtgtatgctgaacaccgagctaaacagttatctttttgttctgrtctgactgtctttagaacaaatggaggattgattgcttaaaaaagtcttaaagacaaatatggctgagaaatctgttggcttaggaataatacatcaagctgatgtgagaaggattattttttt

SEQ ID NO: 61233 - DNA, 600 bp, Chicken  19866894321577_4
gctgtgcatccttacctctaygtagctccagtcaggcatactcgtcactgttgctcatgtgcattccctctatatattcagtttctttggggtcaagggaagaagagatgaatggttagcctccagcacatggatgtgtttgagagagtctcatttaagaastctgcttctgaagtcattctttctgttcacrtggctgctgaagaagtggatgtgctgtttgtgtgtcatgcatgacttctgatgtagatgttgcctcgcttcccagtgaactggattgtagatacagtctttgaaacrgcagaaatggtctcattcttgccttgtgtatgctgaacaccgagctaaacagttatctttttgttctgrtctgactgtctttagaacaaatggaggattgattgcttaaaaaagtcttaaagacaaatatggctgagaaatctgttggcttaggaataatacatcaagctgatgtgagaaggattattttttttcttattttattggtctcttaaactatctttttttatgtggattataatcagtgttaccggaaaaggtgtacagtgccataaactaaatctcaatatgccaggttca

SEQ ID NO: 61234 - DNA, 600 bp, Chicken  19866894321577_5; identical to SEQ ID NO: 61233

SEQ ID NO: 61235 - DNA, 600 bp, Chicken  19866894321577_6
ctatatattcagtttctttggggtcaagggaagaagagatgaatggttagcctccagcacatggatgtgtttgagagagtctcatttaagaastctgcttctgaagtcattctttctgttcacrtggctgctgaagaagtggatgtgctgtttgtgtgtcatgcatgacttctgatgtagatgttgcctcgcttcccagtgaactggattgtagatacagtctttgaaacagcagaaatggtctcattcttgccttgtgtatgctgaacaccgagctaaacagttatctttttgttctgrtctgactgtctttagaacaaatggaggattgattgcttaaaaaagtcttaaagacaaatatggctgagaaatctgttggcttaggaataatacatcaagctgatgtgagaaggattattttttttcttattttattggtctcttaaactatctttttttatgtggattataatcagtgttaccggaaaaggtgtacagtgccataaactaaatctcaatatgccaggttcaaggggtgaaagatttctccaactggtgtaatagaaaataatgattgttttatagctggaggcaactgct

SEQ ID NO: 61236 - DNA, 600 bp, Chicken  19866894321582_1
cagaaataccatttctcacctgcttgcagcttggtcagtcaggaaccaacaaaagcacacaaacaggaaacttcctgcaccacgactggactgctgcggagtgagatctgcctgggctgtgcacactgagagggcagaaagcagagagggagactgaggagtgcactcacagatcctctggttaagctgaaccggggtcctgagttgcaggaaagggcaacacagccgtcacagcgctgccgttacacaactgcagccactccagtccctttctgcagcattatcacatcacatcaaatrgggtaggaaggttcaaagaggtcactttgctgccatggcagctcacctccacccaagctgtatgagaagagccacccagcctgcttttagaagtctcttaatgctgaagagattctacagcatcgcacacgagcctactttcaagtgcttaactaccctaaggaatgaagcctttcctcaagcctaatcttcatctattttgctgcaatttatgcccattccttcctgcgctgttcagcacggagctggaggacagcttgttctcctccttcccacagcagccttttctccagctgaaag

SEQ ID NO: 61237 - DNA, 599 bp, Chicken  19866894321586_1
  misc_feature (1)..(141): n is any nucleotide
nnnnnnnnnnnnnnnnnnnnnnnnnnnnnnnnnnnnnnnnnnnnnnnnnnnnnnnnnnnnnnnnnnnnnnnnnnnnnnnnnnnnnnnnnnnnnnnnnnnnnnnnnnnnnnnnnnnnnnnnnnnnnnnnnnnnnnnnnnnnncatctaattatatgtaaaaaatccatatatctataaattgagaaccagcagtgaattattgaaggtgacatacttttctggataacgaatccaggaagatggggcttccttttggtattcatttagcagacgaacctgttaacattattataagttttwaaattatccttgacatttcaagaactacaaacaagayaaaaggcatgaaaagttcatttatacctttttaagtatatgatttacgtctgcattagatacatccagacctgatgaaatacgaagagaatattctccagaaaagaagtaaaactccaaatgctgtgctaaaaaacaaacaaacaaacaaaaaaacagcccagctccatgacaagagtggcaaaacagactaattatacagtttcatagtagaaagtaaatgttttttgggaagtacatgactcacaaattcaaaaatgtaa

SEQ ID NO: 61238 - DNA, 599 bp, Chicken  19866894321586_2
  misc_feature (1)..(104): n is any nucleotide
nnnnnnnnnnnnnnnnnnnnnnnnnnnnnnnnnnnnnnnnnnnnnnnnnnnnnnnnnnnnnnnnnnnnnnnnnnnnnnnnnnnnnnnnnnnnnnnnnnnnnnnncatctaattatatgtaaaaaatccatatatctataaattgagaaccagcagtgaattattgaaggtgacatacttttctggataacgaatccaggaagatggggcttccttttggtattcatttagcagacgaacctgttaacattattataagttttwaaattatccttgacatttcaagaactacaaacaagayaaaaggcatgaaaagttcatttatacctttttaagtatatgatttacgtctgcattagatacatccagacctgatgaaatacgaagagaatattctccagaaaagaagtaaaactccaaatgctgtgctaaaaaacaaacaaacaaacaaaaaaacagcccagctccatgacaagagtggcaaaacagactaattatacagtttcatagtagaaagtaaatgttttttgggaagtacatgactcacaaattcaaaaatgtaatttaatgcacatacctaaacttgtatagacttctctt

SEQ ID NO: 61239 - DNA, 600 bp, Chicken  19866894321588_1
cttcagtgaccatgccttatgtcagtaacaagcatttatcactactatttgagctgaatttgaacaactgtctagaagattaggaggctcttaattccattatcagtttcctctgttgtctcttcagtaattctcttccttgtctcagagatgtgataagagagtagttcttctttttgctatttgcagtggaatactcttctctttactttcctcttcctgggtaatatgatgtatgtctcaacccagcaaaaactaagtgatgttgtgtttttcctgctggtcagccagcccagccawcaaggagcaatagagatgaagcagtaagcagtgctcccaagtgcatctggatatgggagaggcagcattttgctccagggataccctttgattgctacaggtagctttaagtggtgtagttgctccatcactacattatatctgctgatgtctgaccttggtatctggtactgagcccctcttgctgcatttcctgtccttctgagctgtgaaatggtagaggcagcaggaagattctactttgtgctgaacaaattcagagatttgaaggagttgtttgggtaaatttatctaaaggaa

SEQ ID NO: 61240 - DNA, 599 bp, Chicken  19866894321599_1
agtttatgcatttttcacaaatgttactttctctgtacttgatagtgtgaaatatccaacactttgtactggtcacattactggatgcttagggaaagtagggtgaatgagaatgagactacagttacgttaatcggcgtggcaatctctagatttttcctgctcatcagcatattatttcaaacaagtcttctaagcatgtggtagaacacccttactaacaacctaaactgtaaaagagaagattcacttttgctaggtctacattttttgtggaattgccaagctcgagagtttcarttttctgttatgatgcaacacatgttaatgactattctgacagaaaacaaaaacaaataatgatcatatgcaaattccattaatgtaattatcctctaattcactcctgctttcaccaaaggtcaatcggtatcttcagcataagtttgagaaaatagtgaataaaaaaatcattgtgcaactgtacaaatgtcatccaaataataaacattgcacatagagcatataatgcactttttatttttacactgctagatgctttataaacatgctataccaattctatactttgtaggtct

SEQ ID NO: 61241 - DNA, 600 bp, Chicken  19866894321607_1
acaacaaataagctgctgcaaattacactgaggaaaacagaggcatgtgctgtgttactggaatcagctggtaggaagtgtggaaggggtctggtgtcctccacaagcagtgaaggtatccctgcagtggctatggtgacctctgagacgtatttcttgacaactaggctgataagcaccatggttaatctgagattcacatgtgtcaattgtagcttttatttctttattgtttgatgttcaaaaaaaccaacatttcacaaaagcagtaagattcacagcagaagatgcaaagcaagrctgtgatttygtatgaatgaaaaaagagcctcaggatttgccctgaattctycatactgaccagaaattaaacagtgtgttagtgaaagaaaaataagcagcagaagtccaataaattcatgagaaattcaggttgaccttggtaggcttctattcattgctgaaaatcaatgatagattatgctacaaatatttttctgtcatcatttttgcttatttttttttcttccagtagttaaactgtaatgctgctttttgtaaatttagtagtttccacaagcaataggaaagaaaaagctg

SEQ ID NO: 61242 - DNA, 600 bp, Chicken  19866894321607_2
agctgctgcaaattacactgaggaaaacagaggcatgtgctgtgttactggaatcagctggtaggaagtgtggaaggggtctggtgtcctccacaagcagtgaaggtatccctgcagtggctatggtgacctctgagacgtatttcttgacaactaggctgataagcaccatggttaatctgagattcacatgtgtcaattgtagcttttatttctttattgtttgatgttcaaaaaaaccaacatttcacaaaagcagtaagattcacagcagaagatgcaaagcaagrctgtgatttygtatgaatgaaaaaagagcctcaggatttgccctgaattctycatactgaccagaaattaaacagtgtgttagtgaaagaaaaataagcagcagaagtccaataaattcatgagaaattcaggttgaccttggtaggcttctattcattgctgaaaatcaatgatagattatgctacaaatatttttctgtcatcatttttgcttatttttttttcttccagtagttaaactgtaatgctgctttttgtaaatttagtagtttccacaagcaataggaaagaaaaagctgaaggatcttt

SEQ ID NO: 61243 - DNA, 600 bp, Chicken  19866894321607_3
tgttactggaatcagctggtaggaagtgtggaaggggtctggtgtcctccacaagcagtgaaggtatccctgcagtggctatggtgacctctgagacgtatttcttgacaactaggctgataagcaccatggttaatctgagattcacatgtgtcaattgtagcttttatttctttattgtttgatgttcaaaaaaaccaacatttcacaaaagcagtaagattcacagcagaagatgcaaagcaagrctgtgatttygtatgaatgaaaaaagagcctcaggatttgccctgaattctycatactgaccagaaattaaacagtgtgttagtgaaagaaaaataagcagcagaagtccaataaattcatgagaaattcaggttgaccttggtaggcttctattcattgctgaaaatcaatgatagattatgctacaaatatttttctgtcatcatttttgcttatttttttttcttccagtagttaaactgtaatgctgctttttgtaaatttagtagtttccacaagcaataggaaagaaaaagctgaaggatctttccagaaacttcattttaaaatcgttattaatgtgaccatttg

SEQ ID NO: 61244 - DNA, 600 bp, Chicken  19866894321611_1
cttcttaaattaagtcctaatatacaagtaaaagtaacaaatgctcagttccttgagtaacaaaatttattatcacagtaattgtatgaacatgaacttatgaagaaaacactcagtttaccatccaccataagataacaggaacacacagaaatgccctctgagtcaatgttaacagagagcaagaaagctattttactgcatttcagaggtaatacagaaaggcagagtacaagttcccaacctgcagttcagctgtgctatctcacacacatctatgtaaaagttgtaagtattatyaatgcctacaagtggtcagaactttatgcatctcaaagaacagtcccttcagctgcacggaatctgaagaccataccaagacaggaggtggactttcttttttcgtgtcctttcgtgcttggtaagatttcagagctttagagcattggcactgtaacagatttccaagtgtaataccaggacataatctagcagaaaaatgattacttctcgaagagtacaggatagagcactgcataccgagaacgtacagtgctgggaaataaaattggagttgatgattaccttgccatgcttttt

SEQ ID NO: 61245 - DNA, 599 bp, Chicken  19866894321614_1
  misc_feature (1)..(65): n is any nucleotide
nnnnnnnnnnnnnnnnnnnnnnnnnnnnnnnnnnnnnnnnnnnnnnnnnnnnnnnnnnnnnnnnncaatcctaaccctaatcccaaatgtaaccttaacctcgaactctaaccctatccctaaaccccaaacctaacccagaatagcacagggataatagtgcctgttcgcagtcctctgcctcaggagtgtttctttatagcagatattcaagggactgcttctttttgctggcctggagctgagcatcccatggttaatcgctgagcagggtacctcatgcaaatgctttagccccarctgagaaccatggaaccaagtggagttagcctgaatcaagtatatgaggggctggagtgcaagcagtgtacccacaagcactacttcttttaaattgttttacgtagtgcttccagatgtggaaaaaaccaagtggaagttgccactcactgatgtttttacagctgctgccttaaagcctgttgaagtggctgctgtgggtaatgaattagtgctggcaatgtggcagagggatgctctgcagggctccgctgtaacagaggttttctgtgtcatttttgctctttttttccatctgc

SEQ ID NO: 61246 - DNA, 600 bp, Chicken  19866894321614_2
tgttcagaaacagtgagggccacaaagcttcaaatcactgtagtatctgactatcttcaagggggaatttgtcttgctgggaggacaattctccacctacacaatagctctgtgattgccatccacttccccaaagttcgctcccctctccaaatttgctcccctctccaatcctgaaaaggcaacatttgctagcatttaatctctctatttacatgtgcaatcagaagcggtagagggaaaaggcacactccaagccctgctttggaagtcgtgtcatggcctcagaggaaaagtaaygaggaaaaaataagcaaattaaataaaagtcaaagctgctagcagtcgcctgtttgcttttcacatctcggcactgcttacacttggaaagagcatatagatcaataaataaatgtgtatttatacatatatatacacacacacatataacttgcagaagagtgagcacagcagctgatctcttgctgcagacccaaagtcaaatcctgccctgtgtgatcagtgtgggctaacacactgaaggcagaaaaagagagacccaaaaggcttaccaaaaagaagggaggcaagttggatttc

SEQ ID NO: 61247 - DNA, 599 bp, Chicken  19866894321617_1
  misc_feature (1)..(161): n is any nucleotide
nnnnnnnnnnnnnnnnnnnnnnnnnnnnnnnnnnnnnnnnnnnnnnnnnnnnnnnnnnnnnnnnnnnnnnnnnnnnnnnnnnnnnnnnnnnnnnnnnnnnnnnnnnnnnnnnnnnnnnnnnnnnnnnnnnnnnnnnnnnnnnnnnnnnnnnnnnnnnnnnncctttgaaacaaatagttcatgctgtgtgtgttactcttattttcttccctatagtcagatatcacttaatcagggcaaagtgacttacagtggactcaaatttatcttaaaatttattattattattattattaaatwatccgagttcaggtactctgctgcagcactctgtgtgcgacattatctgtcccattctcctggctgaagcttctcagtggtttctgtgatccttccttctgattacctmctagcacctggatttgtgctgctcctggtaactttccactccttcaagccacgctcctcacatatcaacctggaaaaactggtttgtgtaaactttaggtaaccctttgtgctaagcctatttccaactcgatagctgaacggggtggtgtcatgaccaaacattgttcccagcagaagagttaaagaac

SEQ ID NO: 61248 - DNA, 599 bp, Chicken  19866894321617_2
  misc_feature (1)..(52): n is any nucleotide
nnnnnnnnnnnnnnnnnnnnnnnnnnnnnnnnnnnnnnnnnnnnnnnnnnnncctttgaaacaaatagttcatgctgtgtgtgttactcttattttcttccctatagtcagatatcacttaatcagggcaaagtgacttacagtggactcaaatttatcttaaaatttattattattattattattaaatwatccgagttcaggtactctgctgcagcactctgtgtgcgacattatctgtcccattctcctggctgaagcttctcagtggtttctgtgatccttccttctgattacctmctagcacctggatttgtgctgctcctggtaactttccactccttcaagccacgctcctcacatatcaacctggaaaaactggtttgtgtaaactttaggtaaccctttgtgctaagcctatttccaactcgatagctgaacggggtggtgtcatgaccaaacattgttcccagcagaagagttaaagaacatttggggaggagaagagggaggggaattcagacttgcagatacatttggctgaaaacttcccataaagtttatgttaagattcatattgtacaactgcagggagtaat

SEQ ID NO: 61249 - DNA, 600 bp, Chicken  19866894321618_1
atgaaaattgcaatgaattagattaggctgaaagtcagtatctgcctgtgtatctcaggatctgggagcaaccctgtgggctcaggaagaagagtgtgatatgagcacttctcaaagccaccacctgcagtcttatcagaagggactctctgggtgtcaccattagatgctaaagtgtcccaggtgagtgggaaagccatctgttcttatgcaagcacacactgttgaggagaagcttgagttaaatgaggaaatgactaaagagagactgtctgatattactcttaattcattgaattyagcaaggagtgttctaatgcctggggtgtacttgcaaataatgttttgtattctatttatctttggttgattaggaatttaaagtcacgtttcacattgtttttatgaaaattggcttttaaatatscttcagaactgtatcttcaagattagttgtagctcaactgatgtggctggatcagaacagttttcatgtcagtttccctggctctcctgtctagggaaaggctatattgctgttacctgacttgaactttgactatagaggatgcctttgtgaaacaaacacgccaagggaat

SEQ ID NO: 61250 - DNA, 600 bp, Chicken  19866894321618_2
cagtcttatcagaagggactctctgggtgtcaccattagatgctaaagtgtcccaggtgagtgggaaagccatctgttcttatgcaagcacacactgttgaggagaagcttgagttaaatgaggaaatgactaaagagagactgtctgatattactcttaattcattgaattyagcaaggagtgttctaatgcctggggtgtacttgcaaataatgttttgtattctatttatctttggttgattaggaatttaaagtcacgtttcacattgtttttatgaaaattggcttttaaatatscttcagaactgtatcttcaagattagttgtagctcaactgatgtggctggatcagaacagttttcatgtcagtttccctggctctcctgtctagggaaaggctatattgctgttacctgacttgaactttgactatagaggatgcctttgtgaaacaaacacgccaagggaattcacgcaagttgttgtataaggaaacttgtgagagaatgaacaattagcaaagaccagcggttgttttagtttccagagattactttaccatgttaacagtgaacagaacagatggttaaggtacca

SEQ ID NO: 61251 - DNA, 600 bp, Chicken  19866894321620_1
cctctaatgcaaaatgaaggtgtaatggcccatgaactcacaggggcaggtattttgcccacgcatctattccatttctatagtacactttctaagcttacctatgaggaagttatgaaagacagcatcaaaagccttgcagaatcaaggtagacagcatccactgctctccccatatctacccagccagtcatgacctcacagaaggataccaggttggtcaagcatgatttctccttggtgaattcatgttgactacttctgataacctccttctcttccaattgcttggagatgacrtctagaataagctgttccactatgttcctatgaacaaaggtgagactgaytggcctgcagkttccctcctccttcctgcagctcctccttcttgctctttctgaagactggagtgacatgggctttcctcagtcacctgtcctccatggcctttcaaagatracaaagagaggcttggcagtcccttctgccaaatccctgagcactcatgggtgcatcccattgggrcccatggatttgtgtgcgctgattttgcctagacgctctctgaccagatcctcctcaaccaagaggaaaccc

SEQ ID NO: 61252 - DNA, 600 bp, Chicken  19866894321620_2
tattttgcccacgcatctattccatttctatagtacactttctaagcttacctatgaggaagttatgaaagacagcatcaaaagccttgcagaatcaaggtagacagcatccactgctctccccatatctacccagccagtcatgacctcacagaaggataccaggttggtcaagcatgatttctccttggtgaattcatgttgactacttctgataacctccttctcttccaattgcttggagatgacrtctagaataagctgttccactatgttcctatgaacaaaggtgagactgaytggcctgcagkttccctcctccttcctgcagctcctccttcttgctctttctgaagactggagtgacatgggctttcctcagtcacctgtcctccatggcctttcaaagatracaaagagaggcttggcagtcccttctgccaaatccctgagcactcatgggtgcatcccattgggrcccatggatttgtgtgcgctgattttgcctagacgctctctgaccagatcctcctcaaccaagaggaaaccctcctttccccaggttctctctcttacctctggggtctgggattcccaagg

SEQ ID NO: 61253 - DNA, 600 bp, Chicken  19866894321620_3
cgcatctattccatttctatagtacactttctaagcttacctatgaggaagttatgaaagacagcatcaaaagccttgcagaatcaaggtagacagcatccactgctctccccatatctacccagccagtcatgacctcacagaaggataccaggttggtcaagcatgatttctccttggtgaattcatgttgactacttctgataacctccttctcttccaattgcttggagatgacrtctagaataagctgttccactatgttcctatgaacaaaggtgagactgaytggcctgcagkttccctcctccttcctgcagctcctccttcttgctctttctgaagactggagtgacatgggctttcctcagtcacctgtcctccatggcctttcaaagatracaaagagaggcttggcagtcccttctgccaaatccctgagcactcatgggtgcatcccattgggrcccatggatttgtgtgcgctgattttgcctagacgctctctgaccagatcctcctcaaccaagaggaaaccctcctttccccaggttctctctcttacctctggggtctgggattcccaaggggcagtcttag

SEQ ID NO: 61254 - DNA, 600 bp, Chicken  19866894321620_4
actgctctccccatatctacccagccagtcatgacctcacagaaggataccaggttggtcaagcatgatttctccttggtgaattcatgttgactacttctgataacctccttctcttccaattgcttggagatgacrtctagaataagctgttccactatgttcctatgaacaaaggtgagactgaytggcctgcagkttccctcctccttcctgcagctcctccttcttgctctttctgaagactggagtgacatgggctttcctcagtcacctgtcctccatggcctttcaaagatracaaagagaggcttggcagtcccttctgccaaatccctgagcactcatgggtgcatcccattgggrcccatggatttgtgtgcgctgattttgcctagacgctctctgaccagatcctcctcaaccaagaggaaaccctcctttccccaggttctctctcttacctctggggtctgggattcccaaggggcagtcttagcagtaaagactgtagcaaagaaggtgttcagtaactgccttctcagtgtcctccacttaccagggtaaaagaaagccttgaggaagacacagctccagtac

SEQ ID NO: 61255 - DNA, 600 bp, Chicken  19866894321620_5
gatttctccttggtgaattcatgttgactacttctgataacctccttctcttccaattgcttggagatgacrtctagaataagctgttccactatgttcctatgaacaaaggtgagactgaytggcctgcagkttccctcctccttcctgcagctcctccttcttgctctttctgaagactggagtgacatgggctttcctcagtcacctgtcctccatggcctttcaaagatracaaagagaggcttggcagtcccttctgccaaatccctgagcactcatgggtgcatcccattgggrcccatggatttgtgtgcgctgattttgcctagacgctctctgaccagatcctcctcaaccaagaggaaaccctcctttccccaggttctctctcttacctctggggtctgggattcccaaggggcagtcttagcagtaaagactgtagcaaagaaggtgttcagtaactgccttctcagtgtcctccacttaccagggtaaaagaaagccttgaggaagacacagctccagtacacaacctaactcgcagtctgcactctgagaggcaaagtatgagggcgatggcccttgcagggaggt

SEQ ID NO: 61256 - DNA, 600 bp, Chicken  19866894321625_1
tctccacaccgtatttcactttctacccgttgaaatctctacttctcccctactttgagggaagggatgaaaaaaggcagaatttcaccacactgtattaaatttacataagtttcagatgaatgctgctcttcagatatcattacagttcatgcctaattgcagacttcagtcagaatgaaagtctcctggaaaactctgcagcaaatcgttaatacaccccacaaagcacggtcacctaacaaacattatgtacttgtccagcaagctggatgtgcaagtactgagaaataagagatmaagtcgtccaggaacccatagcagagatgyaattgagagcaaagaagtgctttatgtacctaagatctttgtgtaattaaagaaacaaaatggtagaaacataaaagtacatgaaataaggtcaagcacaagaatcataccaagatacaaaagagggaaggaataaggagtataggaagtgagaccagcagaaaatagaagtactggacatcctggacacctcatcccatctcccagagcttcatttagagcaaatatggatgttattcacacaatttaaggacaggatcgtggaaacac

SEQ ID NO: 61257 - DNA, 600 bp, Chicken  19866894321625_2
tgaaatctctacttctcccctactttgagggaagggatgaaaaaaggcagaatttcaccacactgtattaaatttacataagtttcagatgaatgctgctcttcagatatcattacagttcatgcctaattgcagacttcagtcagaatgaaagtctcctggaaaactctgcagcaaatcgttaatacaccccacaaagcacggtcacctaacaaacattatgtacttgtccagcaagctggatgtgcaagtactgagaaataagagatmaagtcgtccaggaacccatagcagagatgyaattgagagcaaagaagtgctttatgtacctaagatctttgtgtaattaaagaaacaaaatggtagaaacataaaagtacatgaaataaggtcaagcacaagaatcataccaagatacaaaagagggaaggaataaggagtataggaagtgagaccagcagaaaatagaagtactggacatcctggacacctcatcccatctcccagagcttcatttagagcaaatatggatgttattcacacaatttaaggacaggatcgtggaaacacagcatagcatgtgttcaacattttaaaaga

SEQ ID NO: 61258 - DNA, 600 bp, Chicken  19866894321630_1
gcagggctaaaatgagtaaacagagaaggcatgaagagaagggttcgggttaaaggagcaattgccctctggcaaacatactgcaatgtaaatggaaacatgtatgtcaataaggagagttctgagatgggctggagagaaagcagcttatgtgatatgagcttctgctgggaactatcagagccttctccctccattccccccactccaaatcaccctgttcttcaggtgttggagcccccactaaaagcaaagtacactcttgaactcagaaaggaacttcagaagcaaccaacaggsacacataaaggtctccagttctcttgaagttgactctagctagatcaccagcttcctccaaggagccctgttgcagcagtcaagaaccaagatcttcagaaatatattttcctcaaagctaaactcacacagagtacttttacaatgccagacagcctactgaatggtccaaacacccagctggaccaccaggcatttcccagaattctgtttttcttttggtcatacttctccttcaggaaatagcttatggaagatgccagcaagacaacctgaaccatgatctccttccacagtgca

SEQ ID NO: 61259 - DNA, 600 bp, Chicken  19866894321633_1
tctttccttcacgttggatgaagttctgattattcgatgtaggaatgcaaccttgaggtacgattgcagccttggaataattcttaaaatgtaaaaagaaatctgtcgagagcgcactttctggatttaaaaaagacacaccgttataatggtgctaccagagccacggtacagtatatcatggcacatctccagaacataatcaaggacatgagatagaacttctatttacacaaactcgatgccacttccagaaaaaatatgacagaaaaagaaaaaaaaaaaaaaaaaagaaaagcrttatttcctgaatgtcctgaatttttagaaggttccttttaaatttctctccagcaatccagtggtcctccacaactgcattctccctgacctcagcatggaccataagtgacaccgacaggaattgggaatcatatggcaaaccgattcctctgagaggatgctctcccatgcccctttactcacaagccagcttgctgtcaaaacttgagagggcaatagcaaaggcttgtagagcgcacattgggtagttgtagtccatggtgaacacgtcctcagccacgcggccaaactgcatca

SEQ ID NO: 61260 - DNA, 600 bp, Chicken  19866894321633_2
gacctcagcatggaccataagtgacaccgacaggaattgggaatcatatggcaaaccgattcctctgagaggatgctctcccatgcccctttactcacaagccagcttgctgtcaaaacttgagagggcaatagcaaaggcttgtagagcgcacattgggtagttgtagtccatggtgaacacgtcctcagccacgcggccaaactgcatcactatatagtcagctgcaagaaaggccacaagaagcaacaaacattatttttgcttgcagctctcattaaataagccaatatgcaacaycctttctggcccagctgaacaaaacacaaacttgckcccatatcaaacttcacaacacttaactcgtgagagtgggtgtggtgatatcacagggagaagcaaggacgggctgagtgaggaatatctaagtgattaaggattgtgaggcttgttagaaagttgcagatttgggttttttacaaatacagaaggaaaattgtttctccataaaatgttcaagtgcattacatgtgctgagcttcacatgtatcaagaatgaattaattccattcctacttaattacaggcaagtggacaagt

SEQ ID NO: 61261 - DNA, 600 bp, Chicken  19866894321633_3
ttgggaatcatatggcaaaccgattcctctgagaggatgctctcccatgcccctttactcacaagccagcttgctgtcaaaacttgagagggcaatagcaaaggcttgtagagcgcacattgggtagttgtagtccatggtgaacacgtcctcagccacgcggccaaactgcatcactatatagtcagctgcaagaaaggccacaagaagcaacaaacattatttttgcttgcagctctcattaaataagccaatatgcaacaycctttctggcccagctgaacaaaacacaaacttgckcccatatcaaacttcacaacacttaactcgtgagagtgggtgtggtgatatcacagggagaagcaaggacgggctgagtgaggaatatctaagtgattaaggattgtgaggcttgttagaaagttgcagatttgggttttttacaaatacagaaggaaaattgtttctccataaaatgttcaagtgcattacatgtgctgagcttcacatgtatcaagaatgaattaattccattcctacttaattacaggcaagtggacaagtaagaataagggggggaagaaaacgtatgattgtgat

SEQ ID NO: 61262 - DNA, 600 bp, Chicken  19866894321638_1
gaagaacacaggattgttctggttgtatttgctttgtgaatcaaactaataattaagagcttggattgatcaatcaatcaaacaaacaaacaaacaaaaaaacccacaaaacaaacacaacagcaagaaagaaaagcaaacaaaaaaacaccaaagatgtcagaaagaagattctcatttgcttaacacttctaagagtaaaacaaggattttattactcaatagcacaaattgttatactgaaaattataagggaaaggtcagaatttcaaatcaaagtagtgtgacttgttttcactsgtatgtctgaatactgtctgagggaatatcagaccctgtgtggaaggagtatagcaaagtgagttggtgttcatttctttcagattacacacctcctcagatgagaaagggttaagcatgaattagggatgcatgtgaaaatatatgggtgaagtaggaaaaaaaaatgctattctagcttgagtcactccatctgttcccttaattcagtggcagaccttgactggaccctgctagtcccacacttcacacaacttctctctgtaaattaagttgttggcctgtgttgccgagggttta

SEQ ID NO: 61263 - DNA, 523 bp, Chicken  19866894321639_1
gcctgtttcaatgattaatctgtacagttgagaaagttcactataggggaaaggtccttggaactatttagtttacagcagtagcttcagtctccaagcaatgcactatccgtcttcaccttatacagttgaatggctaaactgtgtacattttgctgactcctctcttgtaagtttggatactatgggaaaatcaagcttgcagaatcccttgatatgaactgattcatgaactgttatggatcagattgtactcttggtcaccgtgatctagatgacttgacctgcacaccgtgtaaygcaggaggtgtgtctgtatttcatctgtccagcagcaaagcagaggatctgctcaatcaatccgaacttatgttctggctggctgtctgcctgtctaatcagaagccatgttaactactggccttgctgcataccacgtctcaggcttagatagaacacacgcatacctccaccaaggataccatacaagcaaggacagaaggaggaaggagtgctgtgacag

SEQ ID NO: 61264 - DNA, 600 bp, Chicken  19866894321640_1
caagatgctcatttgttacagggatgagctacagtaaaaatttcactaaggattcatagataaacttcatttctgtgacttactgaataataatgacaacatttctctgacacaaacaattctgataattttctccaatgtagaaaatagatataaaaacaggacgatatttgtcaggggagacttatgaatcacctgatgacacatcacatcttaatggggggtgaataactgctacttcaataatcaaatgtttagtcttaatttgatgttattgtggggcaggagatggcacacatkaacaaacatgatagttactgcattgcactaagtactrtgtggcactaattacttatatcacatattgaagctctctagaatagaaattcatgaaattgcagtacagaccctgtgcattccatatgatttctcaggcccatgtagatctgtatttgcacctaccacctgctgcttagagttatgaatgagacagatrtgytattaagactttggtatagatgggattttcagtgtctgggttgcatattgaaatagtgcactcggaagaaatcagttgcctctgatataatcactttgata

SEQ ID NO: 61265 - DNA, 600 bp, Chicken  19866894321640_2
aaatttcactaaggattcatagataaacttcatttctgtgacttactgaataataatgacaacatttctctgacacaaacaattctgataattttctccaatgtagaaaatagatataaaaacaggacgatatttgtcaggggagacttatgaatcacctgatgacacatcacatcttaatggggggtgaataactgctacttcaataatcaaatgtttagtcttaatttgatgttattgtggggcaggagatggcacacatkaacaaacatgatagttactgcattgcactaagtactrtgtggcactaattacttatatcacatattgaagctctctagaatagaaattcatgaaattgcagtacagaccctgtgcattccatatgatttctcaggcccatgtagatctgtatttgcacctaccacctgctgcttagagttatgaatgagacagatrtgytattaagactttggtatagatgggattttcagtgtctgggttgcatattgaaatagtgcactcggaagaaatcagttgcctctgatataatcactttgataggaaaaagcattggcatcatgctgatacattatgtag

SEQ ID NO: 61266 - DNA, 600 bp, Chicken  19866894321640_3
tgatgacacatcacatcttaatggggggtgaataactgctacttcaataatcaaatgtttagtcttaatttgatgttattgtggggcaggagatggcacacatkaacaaacatgatagttactgcattgcactaagtactrtgtggcactaattacttatatcacatattgaagctctctagaatagaaattcatgaaattgcagtacagaccctgtgcattccatatgatttctcaggcccatgtagatctgtatttgcacctaccacctgctgcttagagttatgaatgagacagatrtgytattaagactttggtatagatgggattttcagtgtctgggttgcatattgaaatagtgcactcggaagaaatcagttgcctctgatataatcactttgataggaaaaagcattggcatcatgctgatacattatgtaggcacagcagaatctaatcataactcggaagagcgatggcagttttcacttctgaactcagaaggtccaataattaggtttctgtcttctctaaatataacttataaggaatagtaaagtgtgagaagacaggaaaaaaactgtcataaattcttaccaa

SEQ ID NO: 61267 - DNA, 600 bp, Chicken  19866894321640_4
tgacacatcacatcttaatggggggtgaataactgctacttcaataatcaaatgtttagtcttaatttgatgttattgtggggcaggagatggcacacatkaacaaacatgatagttactgcattgcactaagtactrtgtggcactaattacttatatcacatattgaagctctctagaatagaaattcatgaaattgcagtacagaccctgtgcattccatatgatttctcaggcccatgtagatctgtatttgcacctaccacctgctgcttagagttatgaatgagacagatrtgytattaagactttggtatagatgggattttcagtgtctgggttgcatattgaaatagtgcactcggaagaaatcagttgcctctgatataatcactttgataggaaaaagcattggcatcatgctgatacattatgtaggcacagcagaatctaatcataactcggaagagcgatggcagttttcacttctgaactcagaaggtccaataattaggtttctgtcttctctaaatataacttataaggaatagtaaagtgtgagaagacaggaaaaaaactgtcataaattcttaccaaatt

SEQ ID NO: 61268 - DNA, 600 bp, Chicken  19866894321650_1
ctgttaaaacattgacttgtaatgaagtgatgacatgtcaaggccttgaagtaggaggatgaggacaacacgcagaagttttcttctttgaataatgtagttgttgaatgtggcaatgaattttccattaattattgatatttgatttattctttgaggctctttaagggccaaggaccatgtgggctgtgtacatactgcagaagctcagatggatgaatacacagcaaggttgtcaaagtggctttgttctgtaaactcagctattacaggatttgaaaggcgaccttcgtatggcaygtggcatgccactgttaaaatacttactgtacaaaaattgggcttatgactagaagaatgtaggcattgaagataattgtctagacaattgccattagttkactcaaaaaagaagtcagtaacttccagatctgattttgatctctctctaatacaaatctgaacaaactagaaccagtggtatatacgaattatatacatacacagtcattgagataggagctgattctaggaacttcaattccatmgtgcagtagaggtcagacattttctgtcagttgatacaaataattaatagct

SEQ ID NO: 61269 - DNA, 600 bp, Chicken  19866894321650_2
tgttgaatgtggcaatgaattttccattaattattgatatttgatttattctttgaggctctttaagggccaaggaccatgtgggctgtgtacatactgcagaagctcagatggatgaatacacagcaaggttgtcaaagtggctttgttctgtaaactcagctattacaggatttgaaaggcgaccttcgtatggcaygtggcatgccactgttaaaatacttactgtacaaaaattgggcttatgactagaagaatgtaggcattgaagataattgtctagacaattgccattagttkactcaaaaaagaagtcagtaacttccagatctgattttgatctctctctaatacaaatctgaacaaactagaaccagtggtatatacgaattatatacatacacagtcattgagataggagctgattctaggaacttcaattccatmgtgcagtagaggtcagacattttctgtcagttgatacaaataattaatagcttttgatcctgtgctttgtaaggtagaataatgctgtggggcttttttctttgcctgcgaaatgacttaggacttaagagaagtaactagcagcatttttca

SEQ ID NO: 61270 - DNA, 600 bp, Chicken  19866894321650_3
gttctgtaaactcagctattacaggatttgaaaggcgaccttcgtatggcaygtggcatgccactgttaaaatacttactgtacaaaaattgggcttatgactagaagaatgtaggcattgaagataattgtctagacaattgccattagttkactcaaaaaagaagtcagtaacttccagatctgattttgatctctctctaatacaaatctgaacaaactagaaccagtggtatatacgaattatatacatacacagtcattgagataggagctgattctaggaacttcaattccatmgtgcagtagaggtcagacattttctgtcagttgatacaaataattaatagcttttgatcctgtgctttgtaaggtagaataatgctgtggggcttttttctttgcctgcgaaatgacttaggacttaagagaagtaactagcagcatttttcatattgtctttttctttttcattatctttttaatgtatttttttctcttttgttgaagtagacgaggggttagagcaggtgtttgcattagaaacaaaaatatgccactttggttttccttcacaagatgcctccagtcttatgttgc

SEQ ID NO: 61271 - DNA, 600 bp, Chicken  19866894321659_1
cccatgtaaacatactaaattggtctctggaaaagcagaaactcctttctattcaatgggaaataaatatctaaaagattaaggggcatttgaaaggacgagtatacttagtgccatgctgcacataatcagagttttgcattaagcatgaagatgactccactcttctagagttattaaataaccacttgaaggcgatcaagatgtagtaactgatatgctgctaagtaagagctggggattgatgtcagccagaatctgggtgtgttaactaatgtggtgtcccaggtaaagaataaytcaggcacttactaggtgttgaaggaacagaaagaggcttgatttattaatacttcgatgtgtaaaaagaaatcatgattaaacattggaaaaaatagtacggtagtagtagagaagaataaaaaaagggggggggggtattctcaatgtactggaagcaatcacagttattagtggctttgcatattaatttagatgaggttctggcatttgggtcaaaattcatccatatttgtgaacaaaatgagtccaccagcaacatcttgtttcagcagacaccatataaataacaaatgcagt

SEQ ID NO: 61272 - DNA, 599 bp, Chicken  19866894321669_1
  misc_feature (1)..(84): n is any nucleotide
nnnnnnnnnnnnnnnnnnnnnnnnnnnnnnnnnnnnnnnnnnnnnnnnnnnnnnnnnnnnnnnnnnnnnnnnnnnnnnnnnnnntagttgagagttcggcctgttcacatagctgatgacaaattttaagttaagatagttttgtccttcggttcattgtctgactctttctcactgctatatcttttggtgcagtattccccttttgtgccctttccagtctctaggagaagactgatctgcagataactggatattcaacacctatgtttcaattatcatattatttgaagaacctgstgcttcacttaatgttcctcaagtagttttcttgattatttactattgaagagctgggataaacttgtttgcttctccttctccctctgcctgaatttgatttcagaaagcaatctctgataaaagaaagatttcagagtcctaatcacatgctgctgttgttggctttgttgctgcaagtggcaatgtagtgcatagtttaccctacactgtgtgaaatgccaagagcagaatacattattttttttttggtgagcgttttccagaacagacgtacatgatggttgtattcatcatgg

SEQ ID NO: 61273 - DNA, 600 bp, Chicken  19866894321672_1
atctgtgacagttaccccaaacttttttcttcttttaaacctgcatttgggattttcatatgaaagcaaactatattaatgacttatgggtagctttttggtttaagaatgtacttgaaatttctagtcattcctatcaagaagatcttctcataaatgcacagaataagcaatgggaaataggtataaagcaagtcacactgtcaagcacaaatgacatgagaagattacacatgcacaatcctcagacccgtgctgatattcttgagctccatttacacttttcatgaatcagttctraactaacattctcagagctgtacagttctagagaccagarwgacttcactgttctggattttaaaattctagttaattcaggtcacttagtctaacaagaaatctcctcaggatgtatttatttttatttttcataaagcacactgcactgctgcataaacatttttcctcataaaaacatatggcaagtgagaccactttcaaatcaacaccttttttctcatattgtccttacggccctcttgcagacaccataggtcatttacaagatctgacaccaaaaaatgaattctaatcaaa

SEQ ID NO: 61274 - DNA, 600 bp, Chicken  19866894321672_2
ctgcatttgggattttcatatgaaagcaaactatattaatgacttatgggtagctttttggtttaagaatgtacttgaaatttctagtcattcctatcaagaagatcttctcataaatgcacagaataagcaatgggaaataggtataaagcaagtcacactgtcaagcacaaatgacatgagaagattacacatgcacaatcctcagacccgtgctgatattcttgagctccatttacacttttcatgaatcagttctraactaacattctcagagctgtacagttctagagaccagarwgacttcactgttctggattttaaaattctagttaattcaggtcacttagtctaacaagaaatctcctcaggatgtatttatttttatttttcataaagcacactgcactgctgcataaacatttttcctcataaaaacatatggcaagtgagaccactttcaaatcaacaccttttttctcatattgtccttacggccctcttgcagacaccataggtcatttacaagatctgacaccaaaaaatgaattctaatcaaaagctgaataaaaattagaactacaataagagtgatacaaa

SEQ ID NO: 61275 - DNA, 600 bp, Chicken  19866894321672_3
tgcatttgggattttcatatgaaagcaaactatattaatgacttatgggtagctttttggtttaagaatgtacttgaaatttctagtcattcctatcaagaagatcttctcataaatgcacagaataagcaatgggaaataggtataaagcaagtcacactgtcaagcacaaatgacatgagaagattacacatgcacaatcctcagacccgtgctgatattcttgagctccatttacacttttcatgaatcagttctraactaacattctcagagctgtacagttctagagaccagarwgacttcactgttctggattttaaaattctagttaattcaggtcacttagtctaacaagaaatctcctcaggatgtatttatttttatttttcataaagcacactgcactgctgcataaacatttttcctcataaaaacatatggcaagtgagaccactttcaaatcaacaccttttttctcatattgtccttacggccctcttgcagacaccataggtcatttacaagatctgacaccaaaaaatgaattctaatcaaaagctgaataaaaattagaactacaataagagtgatacaaag

SEQ ID NO: 61276 - DNA, 599 bp, Chicken  19866894321673_1
  misc_feature (1)..(137): n is any nucleotide
nnnnnnnnnnnnnnnnnnnnnnnnnnnnnnnnnnnnnnnnnnnnnnnnnnnnnnnnnnnnnnnnnnnnnnnnnnnnnnnnnnnnnnnnnnnnnnnnnnnnnnnnnnnnnnnnnnnnnnnnnnnnnnnnnnnnnnnnncaataacacacaaaagcgctactaaagccaagacatttcacaggaagtatttgccaaattcaattattctaccctgagcctgaatgatgaaaccaaaccttgagcattatcaaaatgaattgtgttttagacggaaaattcagtagttcctctatcttctgcktcattcatgtgtagtaaagcagaatacttcaaggaaaattgaaygcctcatgggaacctaacgtttccatttggttttcttagggaattgaaattatcaggtaacttgaaaatggtatggacaaacctttatacggtacggtgacaaattcttctctgaaaaagcttggacagggtcaacagtctgtttttgagtcatataacactgtgaaaaccaagtctctgaagtcagttgaaagttgtctgcatagagaatacgtgttttattataatgattccctgtttctaatacctttgaat

SEQ ID NO: 61277 - DNA, 599 bp, Chicken  19866894321673_2
  misc_feature (1)..(93): n is any nucleotide
nnnnnnnnnnnnnnnnnnnnnnnnnnnnnnnnnnnnnnnnnnnnnnnnnnnnnnnnnnnnnnnnnnnnnnnnnnnnnnnnnnnnnnnnnnnnncaataacacacaaaagcgctactaaagccaagacatttcacaggaagtatttgccaaattcaattattctaccctgagcctgaatgatgaaaccaaaccttgagcattatcaaaatgaattgtgttttagacggaaaattcagtagttcctctatcttctgcktcattcatgtgtagtaaagcagaatacttcaaggaaaattgaaygcctcatgggaacctaacgtttccatttggttttcttagggaattgaaattatcaggtaacttgaaaatggtatggacaaacctttatacggtacggtgacaaattcttctctgaaaaagcttggacagggtcaacagtctgtttttgagtcatataacactgtgaaaaccaagtctctgaagtcagttgaaagttgtctgcatagagaatacgtgttttattataatgattccctgtttctaatacctttgaatctttttctgtatgagcaaagagaaatcagaaggaaatgtaattg

SEQ ID NO: 61278 - DNA, 487 bp, Chicken  19866894321673_3
caaacctttatacggtacggtgacaaattcttctctgaaaaagcttggacagggtcaacagtctgtttttgagtcatataacactgtgaaaaccaagtctctgaagtcagttgaaagttgtctgcatagagaatacgtgttttattataatgattccctgtttctaatacctttgaatctttttctgtatgagcaaagagaaatcagaaggaaatgtaattgctgtggggaaaactggctctggctctgcatgttcttcctaatcctgtgtgactgtagtagttgctcctccttaggggyttcagcaacatttgtggaagcggccagtagagaggtataagacattacaccaggtatctttatactgatgyttttaattcaattcaaaatgatctgaaaaagatcttggtttgaaaaacaaacaaaaagaaggtgcactgccattctgatgtgtgtgtggggtaggtcccaagtcagtcctttctga

SEQ ID NO: 61279 - DNA, 416 bp, Chicken  19866894321673_4
agtcatataacactgtgaaaaccaagtctctgaagtcagttgaaagttgtctgcatagagaatacgtgttttattataatgattccctgtttctaatacctttgaatctttttctgtatgagcaaagagaaatcagaaggaaatgtaattgctgtggggaaaactggctctggctctgcatgttcttcctaatcctgtgtgactgtagtagttgctcctccttaggggyttcagcaacatttgtggaagcggccagtagagaggtataagacattacaccaggtatctttatactgatgyttttaattcaattcaaaatgatctgaaaaagatcttggtttgaaaaacaaacaaaaagaaggtgcactgccattctgatgtgtgtgtggggtaggtcccaagtcagtcctttctga

SEQ ID NO: 61280 - DNA, 599 bp, Chicken  19866894321678_1
  misc_feature (1)..(258): n is any nucleotide
nnnnnnnnnnnnnnnnnnnnnnnnnnnnnnnnnnnnnnnnnnnnnnnnnnnnnnnnnnnnnnnnnnnnnnnnnnnnnnnnnnnnnnnnnnnnnnnnnnnnnnnnnnnnnnnnnnnnnnnnnnnnnnnnnnnnnnnnnnnnnnnnnnnnnnnnnnnnnnnnnnnnnnnnnnnnnnnnnnnnnnnnnnnnnnnnnnnnnnnnnnnnnnnnnnnnnnnnnnnnnnnnnnnnnnnnnnnnnnnnnnnnnnnnnnnnnnnnnntgaagtttgatctatgacagatttttcatatctaacacgatrtggtcctttgcttcagtgtttttactagttatattcttcccattgtaatttatatcctctttgttctggagtatgcatttctcaagatccttgctgcttttgtgaaactgagatcagctacagtactaaaaaaacatgcttagtttatgcattacaaaaaatttcttctgttcatagttcagtttgaaactaactactctttgaaagtacaattttcatagcctggcctctgaactataaaatggaattgacatgactgacattttgcatgtgagaatttatgcaaaggttgacttatg

SEQ ID NO: 61281 - DNA, 600 bp, Chicken  19866894321684_1
actccctcaacctttttttcataagagaggtgctccagccctcttatcacctgctctggacctgctccagaatctccatgtctttccagagcgggggccacagtcttggacactgtactccagatggggcctcacaagggcagagcagaggggtaaagtcacccacttctccctgctggccaaccctctgttgatgcagcccaggatacctctggctttccagtctgcaagcatacattgctggttcgtgttaagcttttcatctgtccccttctaacactgaactgctgcgtaaatcaygttttcttagttaaaaaaggctgaaaaaacttaaagaaactgctaaaaatcaaaagtgcagttaaattaatggctgcttttaaaagctgtaatgattaatgctggtatatttaaagaacaaacaaacaaacaaccaaacaaaaaaacccacaaccatttgaagcacgactgccatcttgctttctgccactcatctctctcctgtcattcttcattctagactccacttcatcttccaggctcttacacagctgccacaagaagtctgacatttagccttttctgcctagcttttgtcag

SEQ ID NO: 61282 - DNA, 600 bp, Chicken  19866894321687_1
acttaatgtgatgttactttcagcaacaagattctaagctgtcttaaatttgtacagtttctgcttaagaaaatctgtacttatcacagcatttgccaaaaaggaacaattatctgcagggatatataattaatttaatacctaatagctatcacaaagaaccatattaccacacaacataacctattagctcagagagtatatgtttgatgaacagagaatgaattacaatgaaaggttaagcagaagtaaaaacagctatacatcttctattattcgtgcttctttttaagtatctawttttcattttggagtttctcattcccttaggtacagcatgaacttaaaaacaacctagactcttcacaggacttttagagtatacgatggatcaataatttgttggtttgtttatgaaatatgccaacttactgggacagagtcatttttaagatgaaagaaagatcaatatatatgtgcatagatttatgggtggttttgttacaatcaaaataagtcttactcttttaagaactccaaaaaggcaggttggcttttctttttcattgatgcgctggcttgagcaggtcacttcaattc

SEQ ID NO: 61283 - DNA, 600 bp, Chicken  19866894321693_1
aactgtgtagcatgtcccttcaaagctttttgtcatatatctaatggaacatgtaaataagtgacaaaatataaaacatagagtcatagaatgggtaagattgaaaaagactgctaagatcctatagttcaaccccaacccatccccaccacccctctaaaccacatccctccatgccacgtctctgcagttcttgaacacctgcagggatggtgactcaccactcttacagagaagttgtttttcttaatatccaacctcaacctcccttgggcaacttaaggccattccctcttgtcmtatcattgttacctgggagcagagaccaacccccacctcaccacaatgtcctcgcttcctgagcttcctccacactgaaccatccctttttcctcagctgctccccgtaagacttgtgctccaaatgcttcacagctccattgcccttttctggacacgctccagggcctaacatttcccacatgaagaactttaaaaaggctatatgaaggaatattattgataataaagtcatcccataaaatttgttgtcttacagggtgacagtcaaaatccagtgcacaaggtgaccacccatta

SEQ ID NO: 61284 - DNA, 600 bp, Chicken  19866894321697_1
aaaataaaataaagtaatgatcaaggtttcccagtaatttcccacatcattcagtaaatgtgtttctactcagaataaggggaactgtcttcttcggtgaaatgaattagactatttacagtcagtggctatttccttcactcagttggcagccatcggctttggtggcagttttttggctagtgaaagatgaggaatgccttcagaaagtatagtaaattcagctctcataatgtagcaatgtgaaattttctaatctgtgctctgatttaaaatgacctttgattttatttggaactrtgaagggaatactctgcccagaggsttgtggagtctccttccacaaagatattcataacctgcctgggtactttcctgtgtgacctgctgtagggaacctgctttagcagagcatttggacttgatgatctccagggtcccttccaaaccctacaattctgtaattttgtgagtagaatttggcaaatactgaactggaagattggcatttgttgattttgttttcaacaaaattaccagaactccaattttgacctgaaccatcttattctttttcaagactgaggcataataatgtga

SEQ ID NO: 61285 - DNA, 600 bp, Chicken  19866894321697_2
gtttcccagtaatttcccacatcattcagtaaatgtgtttctactcagaataaggggaactgtcttcttcggtgaaatgaattagactatttacagtcagtggctatttccttcactcagttggcagccatcggctttggtggcagttttttggctagtgaaagatgaggaatgccttcagaaagtatagtaaattcagctctcataatgtagcaatgtgaaattttctaatctgtgctctgatttaaaatgacctttgattttatttggaactrtgaagggaatactctgcccagaggsttgtggagtctccttccacaaagatattcataacctgcctgggtactttcctgtgtgacctgctgtagggaacctgctttagcagagcatttggacttgatgatctccagggtcccttccaaaccctacaattctgtaattttgtgagtagaatttggcaaatactgaactggaagattggcatttgttgattttgttttcaacaaaattaccagaactccaattttgacctgaaccatcttattctttttcaagactgaggcataataatgtgaggagcctttctgacaattattgttt

SEQ ID NO: 61286 - DNA, 600 bp, Chicken  19866894321697_3
acaaagatattcataacctgcctgggtactttcctgtgtgacctgctgtagggaacctgctttagcagagcatttggacttgatgatctccagggtcccttccaaaccctacaattctgtaattttgtgagtagaatttggcaaatactgaactggaagattggcatttgttgattttgttttcaacaaaattaccagaactccaattttgacctgaaccatcttattctttttcaagactgaggcataataatgtgaggagcctttctgacaattattgtttgtctttcgtctttctgrgtttagcctggaagcaaatgcattgagaaagcactgaaaaaaatgccaaagaaaagaaagaaggatcctgagttactgagggtgccagcaattccattgtatgtgaaataagaaataatttatgaaataatttatgagcttgaattaaaaggcacacagccctatacttacattctgtaacttcctttctraagttacaaaatctttcttttcaaaaccacggttgagatcattttatttgactctcttgcactctgttttcaaataattgctcatttttgttaatgttattcaatacaa

SEQ ID NO: 61287 - DNA, 600 bp, Chicken  19866894321697_4
ttaccagaactccaattttgacctgaaccatcttattctttttcaagactgaggcataataatgtgaggagcctttctgacaattattgtttgtctttcgtctttctgrgtttagcctggaagcaaatgcattgagaaagcactgaaaaaaatgccaaagaaaagaaagaaggatcctgagttactgagggtgccagcaattccattgtatgtgaaataagaaataatttatgaaataatttatgagcttgaattaaaaggcacacagccctatacttacattctgtaacttcctttctraagttacaaaatctttcttttcaaaaccacggttgagatcattttatttgactctcttgcactctgttttcaaataattgctcatttttgttaatgttattcaatacaacctatttcctattgaaagattagtattgaatttgttgggagttatttcaatctctgtagaaagtatgcttttctttatgaataattttaactgtggttaaaaatacaatttcttttcaagaaactgaacattgagtaatttgtaaactttaatagctctccgtttagccacagaagggaagcaaacaatgt

SEQ ID NO: 61288 - DNA, 599 bp, Chicken  19866894321702_1
  misc_feature (1)..(139): n is any nucleotide
nnnnnnnnnnnnnnnnnnnnnnnnnnnnnnnnnnnnnnnnnnnnnnnnnnnnnnnnnnnnnnnnnnnnnnnnnnnnnnnnnnnnnnnnnnnnnnnnnnnnnnnnnnnnnnnnnnnnnnnnnnnnnnnnnnnnnnnnnnncctcttattttttatttctccttgctaggttgcatgtccttaccaggcatctcagagctatgacgctgaaaaaagaaaagatgaaaattggtttccttttcataaaatcattagtgtccacttgatttaaggtctctgctcacaaagcagaagctgtgctyaacacagccaaggagctctgagtgctactgtacyttatgaaaacaaaccttggtatgtagyctttcaaagctctgtgataatgaaaatattttgtttgctcctgatttttagtatgcttttagtagatgaaatcaaaaatttccaaaagaaaatcttacagctggcaaatgttaaaatctgctgaatactatttcagatcagaacctgaaagagtgatttgggtatattcaagttcagtggtatagttcattcttcacaagctttaacactctgtcttctctgtctttgaattaatgca

SEQ ID NO: 61289 - DNA, 599 bp, Chicken  19866894321702_2
  misc_feature (1)..(105): n is any nucleotide
nnnnnnnnnnnnnnnnnnnnnnnnnnnnnnnnnnnnnnnnnnnnnnnnnnnnnnnnnnnnnnnnnnnnnnnnnnnnnnnnnnnnnnnnnnnnnnnnnnnnnnnnncctcttattttttatttctccttgctaggttgcatgtccttaccaggcatctcagagctatgacgctgaaaaaagaaaagatgaaaattggtttccttttcataaaatcattagtgtccacttgatttaaggtctctgctcacaaagcagaagctgtgctyaacacagccaaggagctctgagtgctactgtacyttatgaaaacaaaccttggtatgtagyctttcaaagctctgtgataatgaaaatattttgtttgctcctgatttttagtatgcttttagtagatgaaatcaaaaatttccaaaagaaaatcttacagctggcaaatgttaaaatctgctgaatactatttcagatcagaacctgaaagagtgatttgggtatattcaagttcagtggtatagttcattcttcacaagctttaacactctgtcttctctgtctttgaattaatgcaatggttttcaatatgcactccgtataaaatgaat

SEQ ID NO: 61290 - DNA, 599 bp, Chicken  19866894321702_3
  misc_feature (1)..(78): n is any nucleotide
nnnnnnnnnnnnnnnnnnnnnnnnnnnnnnnnnnnnnnnnnnnnnnnnnnnnnnnnnnnnnnnnnnnnnnnnnnnnnncctcttattttttatttctccttgctaggttgcatgtccttaccaggcatctcagagctatgacgctgaaaaaagaaaagatgaaaattggtttccttttcataaaatcattagtgtccacttgatttaaggtctctgctcacaaagcagaagctgtgctyaacacagccaaggagctctgagtgctactgtacyttatgaaaacaaaccttggtatgtagyctttcaaagctctgtgataatgaaaatattttgtttgctcctgatttttagtatgcttttagtagatgaaatcaaaaatttccaaaagaaaatcttacagctggcaaatgttaaaatctgctgaatactatttcagatcagaacctgaaagagtgatttgggtatattcaagttcagtggtatagttcattcttcacaagctttaacactctgtcttctctgtctttgaattaatgcaatggttttcaatatgcactccgtataaaatgaattgctggacaacttccatggggtctggg

SEQ ID NO: 61291 - DNA, 600 bp, Chicken  19866894321703_1
ttttaagctatttttttcttccacagttcctggatgtttcatttctgtttatgaaatcttttaatgtaaattaattgataaggaaacaagagtgactaaggaaaaggccaaaacagtgatatttctatttgtttatatcagatagtacagaaaaggaagtggatggtaacagcggaagaagttaatttcaaagaaagtaaaatagtaaaatctaacacaaattcattcctactgttaatcacgaagtcaccaaacaattcattttgtcctaaggattctgtttaaagtattaagccttgsaaagatagaaagacaataagattatccagccttcctggaaaggtcttgtcattacagtcttcatgattttcctgtcttcagtatcatcacatttcttcagactagtccaacactcctacttttaatgttccaagtcacagtcattcttctgtcttagagggactgtcaacacayattctaataaaccagagtagtggctgttgaatgatatgaagcagtttctttccctggggctaaatatgctgccttcacaacagtcatggggcctaccggccgatacagcagagactgggtttcccc

SEQ ID NO: 61292 - DNA, 475 bp, Chicken  19866894321703_2
gaagaagttaatttcaaagaaagtaaaatagtaaaatctaacacaaattcattcctactgttaatcacgaagtcaccaaacaattcattttgtcctaaggattctgtttaaagtattaagccttgsaaagatagaaagacaataagattatccagccttcctggaaaggtcttgtcattacagtcttcatgattttcctgtcttcagtatcatcacatttcttcagactagtccaacactcctacttttaatgttccaagtcacagtcattcttctgtcttagagggactgtcaacacayattctaataaaccagagtagtggctgttgaatgatatgaagcagtttctttccctggggctaaatatgctgccttcacaacagtcatggggcctaccggccgatacagcagagactgggtttccccacacagcagtagagcagcactgttaaggtacctagagaactctttccaa

SEQ ID NO: 61293 - DNA, 600 bp, Chicken  19866894321707_1
cttatagaatattgaatacaaacagtgatccctctcaactttattatcagaactccatgcactattttcattggtgacctaaagataaaagacagcatttccaaaatcactgctaaaattcctcattctgaggttctcttctaaacagctgttacagttctttcaaactgtaaggcacgcaaaaggagatcaagagctgttctgattccccatttcacaacagaatgagcttaggttctggatctccctcagttaaaatatctaatacatgaatctagaattgacagttcaggaaaggasratcactgaagtgatgcttggagctaacaaagttattaatgacatttaaactgagacaccagcgcagcgggcatttcaacacacagacagtggtgaatttctaaactaaataatgacggttccaatcctcctctactactggagtagtaaatgtacatattgtagtctctctgctttgaggaactgagagaattgaagtgtactgaagctgttataaagtagtcaaggaaagatatataattaagttagatgagattctcttaagatgtatacttagttaaccacaattccttcctcagc

SEQ ID NO: 61294 - DNA, 600 bp, Chicken  19866894321707_2
ttatagaatattgaatacaaacagtgatccctctcaactttattatcagaactccatgcactattttcattggtgacctaaagataaaagacagcatttccaaaatcactgctaaaattcctcattctgaggttctcttctaaacagctgttacagttctttcaaactgtaaggcacgcaaaaggagatcaagagctgttctgattccccatttcacaacagaatgagcttaggttctggatctccctcagttaaaatatctaatacatgaatctagaattgacagttcaggaaaggasratcactgaagtgatgcttggagctaacaaagttattaatgacatttaaactgagacaccagcgcagcgggcatttcaacacacagacagtggtgaatttctaaactaaataatgacggttccaatcctcctctactactggagtagtaaatgtacatattgtagtctctctgctttgaggaactgagagaattgaagtgtactgaagctgttataaagtagtcaaggaaagatatataattaagttagatgagattctcttaagatgtatacttagttaaccacaattccttcctcagca

SEQ ID NO: 61295 - DNA, 600 bp, Chicken  19866894321707_3
caaggaaagatatataattaagttagatgagattctcttaagatgtatacttagttaaccacaattccttcctcagcagctacaatctagcaggttaataacagattcacagctctggagtaaaaaggttacacttctgtttctttcttattccttatactccagtagacccttttattttctcctaatgctgtagactactcacacgacttgctgcacttataatcagcactctccgatccattttaaatgctaaagaagtacagttcagacaaactgtacaaagacatacacacacaytagatgtaagaaacagaacaaggaaaataggtatgtaaatgttaaatgaattccacgtaaaagcacacacatccaactcagcgactgctactcagctctctggctgaggcaggatatttacagaacactgcaagtttctttcacttggaaactgtttaaactggctaatctctaggtaaaacttacaaaattgtaactgctaaaagtgctgtttatttaaattagagcaggctgactgctcttaggcggcccccaaaacatggaacaaactgaaaacatcacgggacttgatagcatcat

SEQ ID NO: 61296 - DNA, 600 bp, Chicken  19866894321709_1
aaagaggtgaggagatgactgccttagcactgtctggatgccagaaggagtaggacatgcaagatggggcagctacaggcctctgaggatgaggagagaagacaggataagaaaataagatcctgagcagagaaaggtggcagatgctggcagaaagcctgaacaggtaaccaagagagtgggatgcaaggaaggctgagcacaggctggatgggaaatgtcatcaggaggccaggccaaaacaatcggtgttttgaaagaagaaatggcagagattgccacaggagaaagaaaaccagyrcaaggtaaaacttgaaagatcaaatctctaagagtagtagaagatataaattatttcaagaaaaaatagttgagagagatgcagatcatggagggagatactggagawgtgaactgtgttctgctcagaggcaaggttgctcaggcttttaagaagtggtgtttgaaagagactgaagaagagacaagagttaaacacaaagagaagacatgaatgcctgaagtaaattaatcaccaggtcaaagccgatgagtttagcaagmgaattacagaggaataaaagcttcaaagatctcaag

SEQ ID NO: 61297 - DNA, 600 bp, Chicken  19866894321709_2
aagaggtgaggagatgactgccttagcactgtctggatgccagaaggagtaggacatgcaagatggggcagctacaggcctctgaggatgaggagagaagacaggataagaaaataagatcctgagcagagaaaggtggcagatgctggcagaaagcctgaacaggtaaccaagagagtgggatgcaaggaaggctgagcacaggctggatgggaaatgtcatcaggaggccaggccaaaacaatcggtgttttgaaagaagaaatggcagagattgccacaggagaaagaaaaccagyrcaaggtaaaacttgaaagatcaaatctctaagagtagtagaagatataaattatttcaagaaaaaatagttgagagagatgcagatcatggagggagatactggagawgtgaactgtgttctgctcagaggcaaggttgctcaggcttttaagaagtggtgtttgaaagagactgaagaagagacaagagttaaacacaaagagaagacatgaatgcctgaagtaaattaatcaccaggtcaaagccgatgagtttagcaagmgaattacagaggaataaaagcttcaaagatctcaaga

SEQ ID NO: 61298 - DNA, 600 bp, Chicken  19866894321709_3
agaaaataagatcctgagcagagaaaggtggcagatgctggcagaaagcctgaacaggtaaccaagagagtgggatgcaaggaaggctgagcacaggctggatgggaaatgtcatcaggaggccaggccaaaacaatcggtgttttgaaagaagaaatggcagagattgccacaggagaaagaaaaccagyrcaaggtaaaacttgaaagatcaaatctctaagagtagtagaagatataaattatttcaagaaaaaatagttgagagagatgcagatcatggagggagatactggagawgtgaactgtgttctgctcagaggcaaggttgctcaggcttttaagaagtggtgtttgaaagagactgaagaagagacaagagttaaacacaaagagaagacatgaatgcctgaagtaaattaatcaccaggtcaaagccgatgagtttagcaagmgaattacagaggaataaaagcttcaaagatctcaagatatccttgatcagctgattgagggaaggattaggaaatctgaagaagaagctctaaagaaagaaaaaggatgttttatggacaaatttagagtgaaagagaaaaagaa

SEQ ID NO: 61299 - DNA, 540 bp, Chicken  19866894321709_4
aatggcagagattgccacaggagaaagaaaaccagyrcaaggtaaaacttgaaagatcaaatctctaagagtagtagaagatataaattatttcaagaaaaaatagttgagagagatgcagatcatggagggagatactggagawgtgaactgtgttctgctcagaggcaaggttgctcaggcttttaagaagtggtgtttgaaagagactgaagaagagacaagagttaaacacaaagagaagacatgaatgcctgaagtaaattaatcaccaggtcaaagccgatgagtttagcaagmgaattacagaggaataaaagcttcaaagatctcaagatatccttgatcagctgattgagggaaggattaggaaatctgaagaagaagctctaaagaaagaaaaaggatgttttatggacaaatttagagtgaaagagaaaaagaagacatgaaggtatgttgctaaatataactgagatgaaaattcagcaagcccaagaaatgctgaacaaaactgtgggagcagaaagtaaaacacag

SEQ ID NO: 61300 - DNA, 600 bp, Chicken  19866894321710_1
tggagttccctttgtaatttttcagatctgtgtcaagtttctccagtttaagaagagcttttttgcgtgtagcttcaacccaagctgtgtcaagaggaggaggttcaattccactatcagggacagcatcaggcgtattctgcagctctctgaaagagtttgatctgattaataccctgcaaacgtttctgaacaaacatctgaaaactacctgccactgtttccctaaaaacagtaccaccacatgcaccaaacagagcaaagagaaaacaaaggcagtgggaaacaaaagaaagaaayagaaaggaagaaagagagaggcaaacatttagatgaggctttaattcattaatacaggagcatctagaataatcttcaattccataatttacctagagagtgctcactaatacctgaagcagttgcaaggattaaacttctctccatatctacctgtagccctttaagacactatgacttcagaatgagataagatgcctaaggaacattttggcattacacatgtaaagttccccacaattaaacacttgtcttcagtaaaaaaggctccgcaggtctgccatgctctcagtacctggt

SEQ ID NO: 61301 - DNA, 600 bp, Chicken  19866894321713_1
tgggataatccaagctttgagagttcagtggggaaggagaccacacagggctttaaaactacagaggtgtcacaagacatcggcttctctgccctgagcagcaagagcgatagcttaaacgaaacaccactttctccctctgggccagagctcccagatgactctgtcactgtgataaattctgaagaaccctctgagactgcagtccactttgcacagacagctctgacccaacagattcagagcgtggacagcactccagagaaggcacgggctgagggcagagacctgccgcattcrgaagatcgtcctgggaaaaatctgggtgcttctgagctgggcagtcctccagctgctaacggtgactttcctgtagtgactgtggctctgatccaccatccactaaagatgactctgcgtgaactggaacctcaggatgtggcttgtgcttcagtagttactaacgacatgagtgtgtctctagcagcagctctggagctttcaaagactgagctggacatgaaggacctgagaaatcctgagttgcctttacaagacttatctcgagatgacccaggagttgcaggactcaagcagtac

SEQ ID NO: 61302 - DNA, 599 bp, Chicken  19866894321714_1
  misc_feature (1)..(198): n is any nucleotide
nnnnnnnnnnnnnnnnnnnnnnnnnnnnnnnnnnnnnnnnnnnnnnnnnnnnnnnnnnnnnnnnnnnnnnnnnnnnnnnnnnnnnnnnnnnnnnnnnnnnnnnnnnnnnnnnnnnnnnnnnnnnnnnnnnnnnnnnnnnnnnnnnnnnnnnnnnnnnnnnnnnnnnnnnnnnnnnnnnnnnnnnnnnnnnnnnnnnnnttgcagctgctgctgttgctcttcctattgaaatctgattttgttttgtgaaggtaaacaaaaccaagcatgtagaaaacaggacagaaatgctaaaataayatgcatctttttgttgaggtattgattggttctcagtgtcttattaattttcctacaatattagrtggttcctttattagtagttcctatctgcagcrtcttgctgatgcttgaagataaatcctgttttctcactctggtttttgaactgccaatgtggatatggatccttatcttctgggtaagaaccagaagcacccagctttgtctcaagctttgtactaacattcatattcgcagtcaccgtggtccttccctgcttttattgcataactggcagggtaggaaaggaaacattc

SEQ ID NO: 61303 - DNA, 599 bp, Chicken  19866894321714_2
  misc_feature (1)..(133): n is any nucleotide
nnnnnnnnnnnnnnnnnnnnnnnnnnnnnnnnnnnnnnnnnnnnnnnnnnnnnnnnnnnnnnnnnnnnnnnnnnnnnnnnnnnnnnnnnnnnnnnnnnnnnnnnnnnnnnnnnnnnnnnnnnnnnnnnnnnnnttgcagctgctgctgttgctcttcctattgaaatctgattttgttttgtgaaggtaaacaaaaccaagcatgtagaaaacaggacagaaatgctaaaataayatgcatctttttgttgaggtattgattggttctcagtgtcttattaattttcctacaatattagrtggttcctttattagtagttcctatctgcagcrtcttgctgatgcttgaagataaatcctgttttctcactctggtttttgaactgccaatgtggatatggatccttatcttctgggtaagaaccagaagcacccagctttgtctcaagctttgtactaacattcatattcgcagtcaccgtggtccttccctgcttttattgcataactggcagggtaggaaaggaaacattcttgaggtgctgcttaaacatgtgtcacctaagtcttcctgtgtttaatgacatgacagagacata

SEQ ID NO: 61304 - DNA, 599 bp, Chicken  19866894321714_3
  misc_feature (1)..(100): n is any nucleotide
nnnnnnnnnnnnnnnnnnnnnnnnnnnnnnnnnnnnnnnnnnnnnnnnnnnnnnnnnnnnnnnnnnnnnnnnnnnnnnnnnnnnnnnnnnnnnnnnnnnnttgcagctgctgctgttgctcttcctattgaaatctgattttgttttgtgaaggtaaacaaaaccaagcatgtagaaaacaggacagaaatgctaaaataayatgcatctttttgttgaggtattgattggttctcagtgtcttattaattttcctacaatattagrtggttcctttattagtagttcctatctgcagcrtcttgctgatgcttgaagataaatcctgttttctcactctggtttttgaactgccaatgtggatatggatccttatcttctgggtaagaaccagaagcacccagctttgtctcaagctttgtactaacattcatattcgcagtcaccgtggtccttccctgcttttattgcataactggcagggtaggaaaggaaacattcttgaggtgctgcttaaacatgtgtcacctaagtcttcctgtgtttaatgacatgacagagacatatcactggacaattaaacttatatctacaggtca

SEQ ID NO: 61305 - DNA, 600 bp, Chicken  19866894321714_4
tcatattcgcagtcaccgtggtccttccctgcttttattgcataactggcagggtaggaaaggaaacattcttgaggtgctgcttaaacatgtgtcacctaagtcttcctgtgtttaatgacatgacagagacatatcactggacaattaaacttatatctacaggtcagaagagcacaggactctgctgtccaactttgctctgtatccacgcaaggctgagcttgggctgttccagcactgcgcccacaagccatagagatgagaggtctgatttactgctgttcatgggacgtgccytggacatcacttggggccrattcccatagcaaggacttgcttatgcacggaatccttgttttgttgcctaagtaacattcagatctgtagcttccaaagtgtcgcttggcatctgttggctgacactcagaggaaaaagttatttgaatattaatttaacattatagttggatttcaaaatacctgtaacgcatatttccagtagccccatatactgagacttctttctttctttgttcttttcttttccttccagttaaaaagatttttttgttgttgtttttactcataactgcttcc

SEQ ID NO: 61306 - DNA, 600 bp, Chicken  19866894321714_5
ggtccttccctgcttttattgcataactggcagggtaggaaaggaaacattcttgaggtgctgcttaaacatgtgtcacctaagtcttcctgtgtttaatgacatgacagagacatatcactggacaattaaacttatatctacaggtcagaagagcacaggactctgctgtccaactttgctctgtatccacgcaaggctgagcttgggctgttccagcactgcgcccacaagccatagagatgagaggtctgatttactgctgttcatgggacgtgccytggacatcacttggggccrattcccatagcaaggacttgcttatgcacggaatccttgttttgttgcctaagtaacattcagatctgtagcttccaaagtgtcgcttggcatctgttggctgacactcagaggaaaaagttatttgaatattaatttaacattatagttggatttcaaaatacctgtaacgcatatttccagtagccccatatactgagacttctttctttctttgttcttttcttttccttccagttaaaaagatttttttgttgttgtttttactcataactgcttcccctcctacaccatgcacat

SEQ ID NO: 61307 - DNA, 600 bp, Chicken  19866894321714_6
atagcaaggacttgcttatgcacggaatccttgttttgttgcctaagtaacattcagatctgtagcttccaaagtgtcgcttggcatctgttggctgacactcagaggaaaaagttatttgaatattaatttaacattatagttggatttcaaaatacctgtaacgcatatttccagtagccccatatactgagacttctttctttctttgttcttttcttttccttccagttaaaaagatttttttgttgttgtttttactcataactgcttcccctcctacaccatgcacatttgttygttatgcacaaattagtggttatgctttgttctctgggaatccacaagtataggaatctttaacaggttccacagatatactttgaagccacaactgtttttcatgaatgaaaagaagtaacagaaaaaaaaaagaaaaaaatgaaaaaaaaaaagcagcagtttctcaagcattcctacaattttatggtgaaaattaacatatcatatgatacataagcatagaaaatgaatgtttacctacagatgggaaaaagagtttttaattccacagcaaggggaagatatttgtgaaaaaca

SEQ ID NO: 61308 - DNA, 600 bp, Chicken  19866894321722_1
ttccccagcttcagaaatgctaactatacctaaaaatgctcttcaactgacataaaaatgagcaatgctaaacttatttaacaacaaggctcgagaaacttctgaatgtaaatgcaaaagaaagggatactaattttttgtagttttcaacttctgcttaaaaagatatttctagcatttaaggcttaaattatcctccaaaccacaagccaacatagtcctgccttctgtattttgcaggcaattttggtgcctttcaatattgcagccttccatgaactgagtgggtttctgcctcascactttagcttggattaggaggttgctcttgaaaataatctcccaaccattccyccttactgtgctttagtttgcttagtagagcaaactctatttattttggataacactaaaatgtaaaatgcataaggactagcctgaagataaaccacaaaagcacagtacagctgtttggtcttaagctccagtactgccctgcacgtcgctcctgtttactgtgytatttgctaatgtggatgcatctcaygactrtttctggttaaactgaatcccaatcagacatgcacygatgtactgaaa

SEQ ID NO: 61309 - DNA, 600 bp, Chicken  19866894321722_2
aaaatgagcaatgctaaacttatttaacaacaaggctcgagaaacttctgaatgtaaatgcaaaagaaagggatactaattttttgtagttttcaacttctgcttaaaaagatatttctagcatttaaggcttaaattatcctccaaaccacaagccaacatagtcctgccttctgtattttgcaggcaattttggtgcctttcaatattgcagccttccatgaactgagtgggtttctgcctcascactttagcttggattaggaggttgctcttgaaaataatctcccaaccattccyccttactgtgctttagtttgcttagtagagcaaactctatttattttggataacactaaaatgtaaaatgcataaggactagcctgaagataaaccacaaaagcacagtacagctgtttggtcttaagctccagtactgccctgcacgtcgctcctgtttactgtgytatttgctaatgtggatgcatctcaygactrtttctggttaaactgaatcccaatcagacatgcacygatgtactgaaactagttatttaaagctggactgcctcgaggactctgtgaaatacatataaagtg

SEQ ID NO: 61310 - DNA, 600 bp, Chicken  19866894321722_3
tgccttctgtattttgcaggcaattttggtgcctttcaatattgcagccttccatgaactgagtgggtttctgcctcascactttagcttggattaggaggttgctcttgaaaataatctcccaaccattccyccttactgtgctttagtttgcttagtagagcaaactctatttattttggataacactaaaatgtaaaatgcataaggactagcctgaagataaaccacaaaagcacagtacagctgtttggtcttaagctccagtactgccctgcacgtcgctcctgtttactgtgytatttgctaatgtggatgcatctcaygactrtttctggttaaactgaatcccaatcagacatgcacygatgtactgaaactagttatttaaagctggactgcctcgaggactctgtgaaatacatataaagtgatatacatataaacaatttgacatatcctagctgtaatagagacttcattccacttacggtgagaaaattgttagcatggttctgcrgataaccagggcaagggagatgagctgtggagaggggctagtaacatgccttactttatctacatatgaaaaaactgagc

SEQ ID NO: 61311 - DNA, 600 bp, Chicken  19866894321722_4
tggtgcctttcaatattgcagccttccatgaactgagtgggtttctgcctcascactttagcttggattaggaggttgctcttgaaaataatctcccaaccattccyccttactgtgctttagtttgcttagtagagcaaactctatttattttggataacactaaaatgtaaaatgcataaggactagcctgaagataaaccacaaaagcacagtacagctgtttggtcttaagctccagtactgccctgcacgtcgctcctgtttactgtgytatttgctaatgtggatgcatctcaygactrtttctggttaaactgaatcccaatcagacatgcacygatgtactgaaactagttatttaaagctggactgcctcgaggactctgtgaaatacatataaagtgatatacatataaacaatttgacatatcctagctgtaatagagacttcattccacttacggtgagaaaattgttagcatggttctgcrgataaccagggcaagggagatgagctgtggagaggggctagtaacatgccttactttatctacatatgaaaaaactgagccccaaaattcatttcagagcatggaa

SEQ ID NO: 61312 - DNA, 600 bp, Chicken  19866894321722_5
cctttcaatattgcagccttccatgaactgagtgggtttctgcctcascactttagcttggattaggaggttgctcttgaaaataatctcccaaccattccyccttactgtgctttagtttgcttagtagagcaaactctatttattttggataacactaaaatgtaaaatgcataaggactagcctgaagataaaccacaaaagcacagtacagctgtttggtcttaagctccagtactgccctgcacgtcgctcctgtttactgtgytatttgctaatgtggatgcatctcaygactrtttctggttaaactgaatcccaatcagacatgcacygatgtactgaaactagttatttaaagctggactgcctcgaggactctgtgaaatacatataaagtgatatacatataaacaatttgacatatcctagctgtaatagagacttcattccacttacggtgagaaaattgttagcatggttctgcrgataaccagggcaagggagatgagctgtggagaggggctagtaacatgccttactttatctacatatgaaaaaactgagccccaaaattcatttcagagcatggaaccata

SEQ ID NO: 61313 - DNA, 600 bp, Chicken  19866894321722_6
tttctgcctcascactttagcttggattaggaggttgctcttgaaaataatctcccaaccattccyccttactgtgctttagtttgcttagtagagcaaactctatttattttggataacactaaaatgtaaaatgcataaggactagcctgaagataaaccacaaaagcacagtacagctgtttggtcttaagctccagtactgccctgcacgtcgctcctgtttactgtgytatttgctaatgtggatgcatctcaygactrtttctggttaaactgaatcccaatcagacatgcacygatgtactgaaactagttatttaaagctggactgcctcgaggactctgtgaaatacatataaagtgatatacatataaacaatttgacatatcctagctgtaatagagacttcattccacttacggtgagaaaattgttagcatggttctgcrgataaccagggcaagggagatgagctgtggagaggggctagtaacatgccttactttatctacatatgaaaaaactgagccccaaaattcatttcagagcatggaaccatattggtctaggtagtgattttaacacttaaaaaaaga

SEQ ID NO: 61314 - DNA, 600 bp, Chicken  19866894321722_7
agataaaccacaaaagcacagtacagctgtttggtcttaagctccagtactgccctgcacgtcgctcctgtttactgtgytatttgctaatgtggatgcatctcaygactrtttctggttaaactgaatcccaatcagacatgcacygatgtactgaaactagttatttaaagctggactgcctcgaggactctgtgaaatacatataaagtgatatacatataaacaatttgacatatcctagctgtaatagagacttcattccacttacggtgagaaaattgttagcatggttctgcrgataaccagggcaagggagatgagctgtggagaggggctagtaacatgccttactttatctacatatgaaaaaactgagccccaaaattcatttcagagcatggaaccatattggtctaggtagtgattttaacacttaaaaaaagaagacttcactttaaaaggaaaggtagaaatatatatgtctctagcagccattaaacctgtgtagatcttttctacagtcatgggtctgttggtttcaaatttagagacagttcaagtcaacaaggaagaaagtagtacttaagagactactct

SEQ ID NO: 61315 - DNA, 599 bp, Chicken  19866894321732_1
  misc_feature (1)..(35): n is any nucleotide
nnnnnnnnnnnnnnnnnnnnnnnnnnnnnnnnnnnacagattggatgatgctactgtgtctgtgacaagacagatcctagctgaagaaagcagttgcatttgccatcaagctgccctttgaaacgctgtgagaagctggaaggtgagtttgggggtctcgtgtgggagaaatgggcaagcgattctctccatcgcttcagacgaacgcaagtaacttattgttatagtttgtaggataaaccatgagactgtggcatgtgttacaggcacagaatgtgggttgtctctctgacacacttycaggagrarcttcattgttttgataccacacacctcctgtctgcctgtgacattgctgtggaagccttgctgacaagtctgactaatgcactgagygaagaggtaccaccaaaccagcagcctacccacagtagcagaaagttgcagaaagtgtcctttttccatatagccatttccatagcatgaattgtttatgaggaaagtaagagactgagcatttgctgggaagctgctttaaattcacattccattgctcttcaaaatgtatactactaatgccctgctcttccaattccgta

SEQ ID NO: 61316 - DNA, 599 bp, Chicken  19866894321732_2
  misc_feature (1)..(28): n is any nucleotide
nnnnnnnnnnnnnnnnnnnnnnnnnnnnacagattggatgatgctactgtgtctgtgacaagacagatcctagctgaagaaagcagttgcatttgccatcaagctgccctttgaaacgctgtgagaagctggaaggtgagtttgggggtctcgtgtgggagaaatgggcaagcgattctctccatcgcttcagacgaacgcaagtaacttattgttatagtttgtaggataaaccatgagactgtggcatgtgttacaggcacagaatgtgggttgtctctctgacacacttycaggagrarcttcattgttttgataccacacacctcctgtctgcctgtgacattgctgtggaagccttgctgacaagtctgactaatgcactgagygaagaggtaccaccaaaccagcagcctacccacagtagcagaaagttgcagaaagtgtcctttttccatatagccatttccatagcatgaattgtttatgaggaaagtaagagactgagcatttgctgggaagctgctttaaattcacattccattgctcttcaaaatgtatactactaatgccctgctcttccaattccgtaattttta

SEQ ID NO: 61317 - DNA, 599 bp, Chicken  19866894321732_3
  misc_feature (1)..(26): n is any nucleotide
nnnnnnnnnnnnnnnnnnnnnnnnnnacagattggatgatgctactgtgtctgtgacaagacagatcctagctgaagaaagcagttgcatttgccatcaagctgccctttgaaacgctgtgagaagctggaaggtgagtttgggggtctcgtgtgggagaaatgggcaagcgattctctccatcgcttcagacgaacgcaagtaacttattgttatagtttgtaggataaaccatgagactgtggcatgtgttacaggcacagaatgtgggttgtctctctgacacacttycaggagrarcttcattgttttgataccacacacctcctgtctgcctgtgacattgctgtggaagccttgctgacaagtctgactaatgcactgagygaagaggtaccaccaaaccagcagcctacccacagtagcagaaagttgcagaaagtgtcctttttccatatagccatttccatagcatgaattgtttatgaggaaagtaagagactgagcatttgctgggaagctgctttaaattcacattccattgctcttcaaaatgtatactactaatgccctgctcttccaattccgtaatttttaga

SEQ ID NO: 61318 - DNA, 600 bp, Chicken  19866894321732_4
catttgccatcaagctgccctttgaaacgctgtgagaagctggaaggtgagtttgggggtctcgtgtgggagaaatgggcaagcgattctctccatcgcttcagacgaacgcaagtaacttattgttatagtttgtaggataaaccatgagactgtggcatgtgttacaggcacagaatgtgggttgtctctctgacacacttycaggagrarcttcattgttttgataccacacacctcctgtctgcctgtgacattgctgtggaagccttgctgacaagtctgactaatgcactgagygaagaggtaccaccaaaccagcagcctacccacagtagcagaaagttgcagaaagtgtcctttttccatatagccatttccatagcatgaattgtttatgaggaaagtaagagactgagcatttgctgggaagctgctttaaattcacattccattgctcttcaaaatgtatactactaatgccctgctcttccaattccgtaatttttagattttctcctgttcaccagtctgaaagaaaggatctttccagagtcattgactgtgtcatgcggacatttttgctttcttgtgattctc

SEQ ID NO: 61319 - DNA, 600 bp, Chicken  19866894321733_1
ttgaagtgtgcccatgaaatgatatgaaacataaactccagggatggcaaaaatcatctgaacatgcctagtcatctatttacatctgaaaacatccctggagataatgtctgattttgttccacaaatgaggaataacgagaaatagaacattggccaatggctgccattctagcaaacatcatccgcggactcaacatttatccccatttatgtatttcactgaagtatttgtcttttttttttcagacctcacaaagctaatcactctattaactctctctctgcttctttctttcyggcattcttgttccagctctgaaattcaacaagtttttcagactgatagaatagcctgctccacaggctgctgaaaacaacagaaacctctgatctgggatctccatcaggctttgacatcttgctggtgggaaaagaattggtgccagtactcaacattcaattaatatttataacaatagtaatgacaaaatcaaatacaagatgatgattgtagctccttgatggattattgcttatacccaaatgtgctcctagataatccataaaaacttctcttaatgcctgccacgttcttgt

SEQ ID NO: 61320 - DNA, 600 bp, Chicken  19866894321741_1
ttcctttgaatgaaaagatatgcatttatagaggaactagaaggtgcaggactattttctgaatcagatgctgaaactagatggctgatctctatattagtgttcatctggcaactgacaattttacaaccattgcttatcttctatatttttctggaccttgataattcatgttagatattgaagataaagatattgcgtttatacctgttcttaagtctacaactattcctcatccagcatgtaatgagttagatttcttctctattcgagacacttgattagaggcacttactcacrcatgcataagatcggaattcttactattgtttctatagaatttgcagctgcatcaaagcaaaactcaggtttaactctgttgtgagtagctgcaattggttctagaccttctactacgtgggagaaatttattctaagatttttgatgtcttaattgttcttgtttcttcttttttcctggttacaccgaataatacattttcctagccacattatgctaactttttgggagtggaaggagcagcaactattacaatgacacaggcctaaaaatattacttcagtattttattgatctga

SEQ ID NO: 61321 - DNA, 599 bp, Chicken  19866894321743_1
  misc_feature (1)..(162): n is any nucleotide
nnnnnnnnnnnnnnnnnnnnnnnnnnnnnnnnnnnnnnnnnnnnnnnnnnnnnnnnnnnnnnnnnnnnnnnnnnnnnnnnnnnnnnnnnnnnnnnnnnnnnnnnnnnnnnnnnnnnnnnnnnnnnnnnnnnnnnnnnnnnnnnnnnnnnnnnnnnnnnnnnntttgagaatgtacattgcagtaatgcttctgaagcatccaacgctgttgcagaatcagaagctcctttcacaaccgtgactgcttctaaagtttttggctttaccacaggttgcagaacttcttccaaaggtctcacrtttcccatgtgcacagagactctaactggttcgatatccttcacttcaacagtccctggtgccaggggtgttttggcacttacgatctgcacctgggtcacagcagtttctgcaggtactttaaaagaatgttgcaaagctgcatctgggtccacttctttatttttcacatctcccatcgtaactacagattccgaggtcgccttcaagatacctgaaccctccatggagctgcactgtgtcactctcaaattaccasatacaactggtaattcagttgctcctggaattctcacttc

SEQ ID NO: 61322 - DNA, 600 bp, Chicken  19866894321743_2
gctttaccacaggttgcagaacttcttccaaaggtctcacrtttcccatgtgcacagagactctaactggttcgatatccttcacttcaacagtccctggtgccaggggtgttttggcacttacgatctgcacctgggtcacagcagtttctgcaggtactttaaaagaatgttgcaaagctgcatctgggtccacttctttatttttcacatctcccatcgtaactacagattccgaggtcgccttcaagatacctgaaccctccatggagctgcactgtgtcactctcaaattaccasatacaactggtaattcagttgctcctggaattctcacttctcctatggccatagacgtgtcatttaccttcacagtattcagatctgcctgatttgcaagtttaggaattgctgtcacatcacttgtcaaacacattgattctgaagttgtttctaattctttagcgcctcccagtgccatagacttcagagatgtttctgaatatgtcaatacctccatggtattagatgccaaacttgtatccaaggtttttacttctgaaggtaaaactaatttctgaagttcagatttattggcca

SEQ ID NO: 61323 - DNA, 599 bp, Chicken  19866894321752_1
  misc_feature (1)..(152): n is any nucleotide
nnnnnnnnnnnnnnnnnnnnnnnnnnnnnnnnnnnnnnnnnnnnnnnnnnnnnnnnnnnnnnnnnnnnnnnnnnnnnnnnnnnnnnnnnnnnnnnnnnnnnnnnnnnnnnnnnnnnnnnnnnnnnnnnnnnnnnnnnnnnnnnnnnnnnnnncaccctttgttttctctcacagaatcatagaattgctcaggttggaaaagaacttcaagatcaccacgtctaactgcagcctaaccatacaccctaatgtagggtaaatcctctgttaaatcatgtccctgagcaccacaaccaaacrgtttttaaacacatccagggatggtgactcaaccacctccccggggagcccattccagtgcttaacaaccctttctgtaaagaagttcttcctcatatccaacctaaatctcccttggcacaacataaggccatttcccctcgtcctgtcacctgtcaggagcgagaagagaccaaccccgctctcaccacaatcacctttcactgaacaagcaaacagagttattttctccttccacacacttctttcttttcactcggtgtctgtgctgcagggctggtggcacaatggagggttgg

SEQ ID NO: 61324 - DNA, 599 bp, Chicken  19866894321754_1
  misc_feature (1)..(50): n is any nucleotide
nnnnnnnnnnnnnnnnnnnnnnnnnnnnnnnnnnnnnnnnnnnnnnnnnnactaagtgcgtgccaagttgctctttgtatctctaatttctcccataaaataatcagatcctgtatctagatgggacaaagatcaacctttggccaggcagcaggccttccaagctgtagaattaaaattctaaactgtgatacactgttggatacggtcatgtatcttcctgcacggctacctccggcaactgaactcactacctgtcccaatcagtggcaccagttctcagtggctccttgtgatgarataaagctttttttcatacttcatagctccaaaacctccatcgtatcacaaacagcaatacacctcactctgtctcttccactttcacaaaagcttccagtctccctactgtgatagtgtacagtgagttgcacgtggaaatctgctttctgcaacacccagaagccctgttctccttggggatggcactagcaccctctgctgttgtacgggagcaccaacgtcagctgaaacccagtgccagccctgagcgcagggcatcccaggggcagccctagagatcctttgctgaaggccct

SEQ ID NO: 61325 - DNA, 527 bp, Chicken  19866894321756_1
ttcagcagacaggctatgcaaagtatgttgtagtgtaacgtggtataaacctctgcctttgagtggggcttacagctcagcagcagtgctgatgctttgggtatggtgtaccatagaaccatataggttgcagtagacctctaagatcatccagtctaactatctacccatcccagtctatccgtttacccatccccaccatgcccactaaaccatgtctgtgaaattcccatttattttgggaggtgagaaagaagggagaaaaaagtatttctgggacaatctgactttttaaaagcyacttttttctttctttcttttgaggttgttraagagtttgaagcattagataaagttcttgggaaatcgatgagttgtcacagttgcaggatgatatttagtggcttcactgttttatcatgtggatatcttccccacatgtggcaaatatgcagcaagaagcagctggttaacaatgcatagcagcacattgaagcaatttaggaccagaagtgaataaattagaa

SEQ ID NO: 61326 - DNA, 496 bp, Chicken  19866894321756_2
agtgtaacgtggtataaacctctgcctttgagtggggcttacagctcagcagcagtgctgatgctttgggtatggtgtaccatagaaccatataggttgcagtagacctctaagatcatccagtctaactatctacccatcccagtctatccgtttacccatccccaccatgcccactaaaccatgtctgtgaaattcccatttattttgggaggtgagaaagaagggagaaaaaagtatttctgggacaatctgactttttaaaagcyacttttttctttctttcttttgaggttgttraagagtttgaagcattagataaagttcttgggaaatcgatgagttgtcacagttgcaggatgatatttagtggcttcactgttttatcatgtggatatcttccccacatgtggcaaatatgcagcaagaagcagctggttaacaatgcatagcagcacattgaagcaatttaggaccagaagtgaataaattagaa

SEQ ID NO: 61327 - DNA, 600 bp, Chicken  19866894321760_1
tcagattcacagctgggtgctctgccatagacccaccggtggtggcatttggtaatcaaatccacgtgactgctggcatagtcacagcgcctagacctgcataccctgggagaggctcttcctacagtctgcatgcagctctctggtcctgccccttgcttgctgtgcaggtgtccctggtttggggagaaatagggcattttggctcccttagtgtatagctctgtgtttgaaatgggaagagttttggaatctgttatagaatcacagaatcatgaaggtcagaaaagacctctgagwtcatctgacccaaccatctactcgcctgcaccgtgcccataaccacatccctcagtgccacatccccacggttctggaacacctccagggatggtgaccccagcactcccagagcagcctgtgccagagtctgaccactcttttggaggactttttcctaatttccaacctgttcctctcttgttctccgcacttggttgttgtcagcattaatatgccattaacacatgctcattaggaggagaatgatgatacccagcagaacatgggggaagccttcattaggcactaacatattga

SEQ ID NO: 61328 - DNA, 600 bp, Chicken  19866894321762_1
tttgaaaattgtctgtgatcatttgctgtaactagctccatctttgtgcatatataagggaaaataaatgtgaaatagatatatcagcctataggaaggagataatcctgacacaaaatagaagaaaattcaacaagaatggaaggactgtgtgggaaatacatactgggagaagacttcaggacatcatctttttcaacagttcctaatctgataggtttgacttcatggcatctgatctcactgcaataaaatagaagaatcaagacagctgcagccaagcaatgaactgatttcacrgggacagcagaatttgtgaagtggcacagagaggagcagtagaaggcagcagaaggctcagattcctttcttttttctctgcaaatagtggaagatctaatagttcctgtgtattgcaaatacatcaggataaggataatgaggttcatttaccaacctcattatcactgagttgaacatgcgttctaagattaaagaacaactggtgacttgttttatttttctttatatcttatttcacaatgtatttgtacttttgagcttcattgtcttgagagaaaaaaaaaaaaaaagccagat

SEQ ID NO: 61329 - DNA, 600 bp, Chicken  19866894321773_1
gtttaaagaatttctatattagggatggactcataaaataaccagtccataacaatacagttatcaactccctacgtctctagagagtagtgtagatttattttaatgaagtcttgagaagcagaaatgcaagtaattttcctttccctaaagaagccatattgactgatccctgtaattgaaagagaaaaggctccaggggtttttccatgaactcagattgtctaagcatgggaaagcaaattatacatagtatacatagctttcatataatcagaaaactcctgctaggagcagggraaaaaaaaaaaaaaaaagaaacaggaagaatagtaagcagatggtcaggatcagggccgtttatttgccatacaaagctcaaagtagaaggtagcaataccagaatgcgcctttttttcctgtttgtagaaattgcaatcttgaatcagatatgcttagtgatacagattgcattgtataataacgtaacagtgaaagagaagcagtccctcagtgtgtggaaataatctatttgcagtgatccctctttgtcatcctctcagactgactttgtattagttggtgttcatcagatagtac

SEQ ID NO: 61330 - DNA, 600 bp, Chicken  19866894321781_1
tatatatcaggagaatattgctcagattacacaccttcgattcccttgatgtgaaggcacgtttttctgccagcatgtggggtttttggggtttgtttttccttcttgaactcacgtgctgctctctgtcagaggcacactgctgggctgcaggagcttcaggtctgctgtgctttcaccactgcctctgtgcaggaaactcttgtaagcctttatttacttttgtttgataataatgttgatgttacagaactacaaagattaacattcctatgattctatgagggtggtgaagcacckaaacaggttgcccaaggaggtagtggatgtcccatccctggaggctggatgtgactctggacagcctggtctagtggttggtgaccctgcgcacagcagaggtggattgaaactagatgatcattatggtccttttcaacccaggccattctatgattctgattacagactcaaaaatcatttgctagttccataaaagcagctgatttcttgtccaaaataaatgtatcctttggtaaaacttagccaaattttgtgagaatgcttaaaagcatctcttattaaattggagatgtatgg

SEQ ID NO: 61331 - DNA, 600 bp, Chicken  19866894321781_2
atgattccaagccgagggagtacactggagggaaggaaaagtaaggtatccaaagggacctggacaggctggggtagtgggcccatgtgaacctaatgaggttcacaagtgcaaggtgcttgggccagggcaatcccaggtatgtatacagtctaggggaagaacttcttgagagcagccctgcagaacctgggggtcctgatggacaagaagctggacatgagccagcagtgtgcttgccagtgtgcttgcagcctggaaggccaactgtatcctgggctgcattaaaaacatatggtsagcagggagagggaggtgattgtccccttctactcagctcttgtgaggccccatctggattactgcattcaggcttggggcctctggcccaagaaagacatggagctcttggaacaagtccagaggagggccactgagatgatcagaggggtggagcatctctcctatgacgaaaagttgagggaactgggcttgtttagcttggagaagagaaggctctggggtcacctcattgtggccttccagtacttgaagggagtgtataaacaggaggggaatggctgtttatgagggtggata

SEQ ID NO: 61332 - DNA, 600 bp, Chicken  19866894321787_1
gacagaagaagtctggctctgtggcacccttcttctagctctgtcacatctgtccccactcctctccctcttctgtgtcaaatgtcctctgacactgaaatctgttcaccactaccacatcactggggcagtgaagttcaaattcagtggtgctactgagaagcctttacctgtatgggagtcacaaatacatctgtatgtacctatgcatcatcagtgctataggaattctcccacattgactcattttgtccactaagacagctgatgggaaaaaaagtccaggcagacagacctcaycttctattaaatgctcctcaggagagtattggatgaatggcacacagtctgacaacaggatggctttgggaccttaaaggttcagataattgccaacaggcttgggcaacatgcagggactgctggagtaaaacacaacctgaagaagagcagtttcagaatcacttcaatgttctcttgtggtccagcactagcccccacttactcctgtcatttatccttgtctcaccttctcttccttgggctgatctaaaacatccctcacatcatggtgtcagatcttctttgatagtactggga

SEQ ID NO: 61333 - DNA, 599 bp, Chicken  19866894321790_1
  misc_feature (1)..(68): n is any nucleotide
nnnnnnnnnnnnnnnnnnnnnnnnnnnnnnnnnnnnnnnnnnnnnnnnnnnnnnnnnnnnnnnnnnnnaacggggaggtttggggtgagatcggtgagtctccgtgtgatgtgggtgtgaacgaagctgcagagagcggagggtcccaggcggtagtggggacgcggagaagcagaggctgtggtggaccctcagcccgaccctgagagctccgcagggctcctgggggagctgcagcactgtgagctccgcgctccttttcacgatgagttcccagcttcagaaagctccgggcctgcrcrkatagcagcgctggggggcagttttcctcccacagtgaaaacgtaatgcgccccaacctgagataacgccacgctgtccctttctgctccctgctgagcgtcacggctgagctgcaggcagtggctgtgaggtgggcactgtgtggggctctctggatttaaggccatttttgcagctttctatgacagaggggagagcacagcgctcacagcccctcctgggccatgcaaagcgcccctaatggyrtttcctttcttttgggggttcacagtggactttgccctgaaggtggtcca

SEQ ID NO: 61334 - DNA, 599 bp, Chicken  19866894321790_2
  misc_feature (1)..(66): n is any nucleotide
nnnnnnnnnnnnnnnnnnnnnnnnnnnnnnnnnnnnnnnnnnnnnnnnnnnnnnnnnnnnnnnnnnaacggggaggtttggggtgagatcggtgagtctccgtgtgatgtgggtgtgaacgaagctgcagagagcggagggtcccaggcggtagtggggacgcggagaagcagaggctgtggtggaccctcagcccgaccctgagagctccgcagggctcctgggggagctgcagcactgtgagctccgcgctccttttcacgatgagttcccagcttcagaaagctccgggcctgcrcrkatagcagcgctggggggcagttttcctcccacagtgaaaacgtaatgcgccccaacctgagataacgccacgctgtccctttctgctccctgctgagcgtcacggctgagctgcaggcagtggctgtgaggtgggcactgtgtggggctctctggatttaaggccatttttgcagctttctatgacagaggggagagcacagcgctcacagcccctcctgggccatgcaaagcgcccctaatggyrtttcctttcttttgggggttcacagtggactttgccctgaaggtggtccagt

SEQ ID NO: 61335 - DNA, 599 bp, Chicken  19866894321790_3
  misc_feature (1)..(65): n is any nucleotide
nnnnnnnnnnnnnnnnnnnnnnnnnnnnnnnnnnnnnnnnnnnnnnnnnnnnnnnnnnnnnnnnnaacggggaggtttggggtgagatcggtgagtctccgtgtgatgtgggtgtgaacgaagctgcagagagcggagggtcccaggcggtagtggggacgcggagaagcagaggctgtggtggaccctcagcccgaccctgagagctccgcagggctcctgggggagctgcagcactgtgagctccgcgctccttttcacgatgagttcccagcttcagaaagctccgggcctgcrcrkatagcagcgctggggggcagttttcctcccacagtgaaaacgtaatgcgccccaacctgagataacgccacgctgtccctttctgctccctgctgagcgtcacggctgagctgcaggcagtggctgtgaggtgggcactgtgtggggctctctggatttaaggccatttttgcagctttctatgacagaggggagagcacagcgctcacagcccctcctgggccatgcaaagcgcccctaatggyrtttcctttcttttgggggttcacagtggactttgccctgaaggtggtccagtg

SEQ ID NO: 61336 - DNA, 600 bp, Chicken  19866894321790_4
ccgcgctccttttcacgatgagttcccagcttcagaaagctccgggcctgcrcrkatagcagcgctggggggcagttttcctcccacagtgaaaacgtaatgcgccccaacctgagataacgccacgctgtccctttctgctccctgctgagcgtcacggctgagctgcaggcagtggctgtgaggtgggcactgtgtggggctctctggatttaaggccatttttgcagctttctatgacagaggggagagcacagcgctcacagcccctcctgggccatgcaaagcgcccctaatggyrtttcctttcttttgggggttcacagtggactttgccctgaaggtggtccagtggtccgagtcggagacggtgcggcttcagctctgggatattgcaggtatgtccatacagagcccaaaatgcatccaggttgggatgaggctcctattggggacrgaggccccacctgtgccggggtgggagggcgctcaggatgcagagcagattgagatgcagggctgtgggttccacccttttctctgtttgggtgtgagagtctggaatcctcacaaagaaaacaggaaggagaagtttgcagt

SEQ ID NO: 61337 - DNA, 600 bp, Chicken  19866894321790_5
cgcgctccttttcacgatgagttcccagcttcagaaagctccgggcctgcrcrkatagcagcgctggggggcagttttcctcccacagtgaaaacgtaatgcgccccaacctgagataacgccacgctgtccctttctgctccctgctgagcgtcacggctgagctgcaggcagtggctgtgaggtgggcactgtgtggggctctctggatttaaggccatttttgcagctttctatgacagaggggagagcacagcgctcacagcccctcctgggccatgcaaagcgcccctaatggyrtttcctttcttttgggggttcacagtggactttgccctgaaggtggtccagtggtccgagtcggagacggtgcggcttcagctctgggatattgcaggtatgtccatacagagcccaaaatgcatccaggttgggatgaggctcctattggggacrgaggccccacctgtgccggggtgggagggcgctcaggatgcagagcagattgagatgcagggctgtgggttccacccttttctctgtttgggtgtgagagtctggaatcctcacaaagaaaacaggaaggagaagtttgcagtg

SEQ ID NO: 61338 - DNA, 480 bp, Chicken  19866894321790_6
cggctgagctgcaggcagtggctgtgaggtgggcactgtgtggggctctctggatttaaggccatttttgcagctttctatgacagaggggagagcacagcgctcacagcccctcctgggccatgcaaagcgcccctaatggyrtttcctttcttttgggggttcacagtggactttgccctgaaggtggtccagtggtccgagtcggagacggtgcggcttcagctctgggatattgcaggtatgtccatacagagcccaaaatgcatccaggttgggatgaggctcctattggggacrgaggccccacctgtgccggggtgggagggcgctcaggatgcagagcagattgagatgcagggctgtgggttccacccttttctctgtttgggtgtgagagtctggaatcctcacaaagaaaacaggaaggagaagtttgcagtgaggggattgcagcaaagaagcggatttcggtttcag

SEQ ID NO: 61339 - DNA, 599 bp, Chicken  19866894321795_1
  misc_feature (1)..(34): n is any nucleotide
nnnnnnnnnnnnnnnnnnnnnnnnnnnnnnnnnncttgtctaagtccaaggttcttttgtaagtatctctaattaggctggaggaggcactgaaaaaaaagggaaatgggtaagttttgtttaaagggagctatttgcatttgtggaaggaaaaataggaggaaagctaagctaacttgtttggaaacacaaccaatggataagggaggctggtaaaccaactgccaatgagaatttgactcccggcactcatggacttaggacaagtagtctgagaaaggtcgtgaatgtgaaggcagmtagtgataggctagtgaaagtgctagagggacaaatatcaggtgtcaatgatttggtttggatggagatagttttcttcacaatagctggtagaatacagtgttggattttggataaaaacaatattgatagcacactgatacttcagttactacagagcaatgcttacgtacattcaggaatgtttcagctactaatgctgccctgcaagcraggagatgsggatgcatgaggagggaacagaaccaggacagctgacccaatttaccagagggatgtcccataccacgtggcatcat

SEQ ID NO: 61340 - DNA, 600 bp, Chicken  19866894321795_2
taaaccaactgccaatgagaatttgactcccggcactcatggacttaggacaagtagtctgagaaaggtcgtgaatgtgaaggcagmtagtgataggctagtgaaagtgctagagggacaaatatcaggtgtcaatgatttggtttggatggagatagttttcttcacaatagctggtagaatacagtgttggattttggataaaaacaatattgatagcacactgatacttcagttactacagagcaatgcttacgtacattcaggaatgtttcagctactaatgctgccctgcaagcraggagatgsggatgcatgaggagggaacagaaccaggacagctgacccaatttaccagagggatgtcccataccacgtggcatcatgctcaacattaaaacctggggaaagaaggagaacaaggggggatttcagagttatcatttttgccttcccaagaaactgttatgtgtgatgagccctgctttcctatgaatagcagaacaactgcctgcagatgggaagcagtaagtgaattccttgtttttctgtgctttgcacacagcttctgctttacctagtaaacttttcctttatttc

SEQ ID NO: 61341 - DNA, 600 bp, Chicken  19866894321795_3
tgccaatgagaatttgactcccggcactcatggacttaggacaagtagtctgagaaaggtcgtgaatgtgaaggcagmtagtgataggctagtgaaagtgctagagggacaaatatcaggtgtcaatgatttggtttggatggagatagttttcttcacaatagctggtagaatacagtgttggattttggataaaaacaatattgatagcacactgatacttcagttactacagagcaatgcttacgtacattcaggaatgtttcagctactaatgctgccctgcaagcraggagatgsggatgcatgaggagggaacagaaccaggacagctgacccaatttaccagagggatgtcccataccacgtggcatcatgctcaacattaaaacctggggaaagaaggagaacaaggggggatttcagagttatcatttttgccttcccaagaaactgttatgtgtgatgagccctgctttcctatgaatagcagaacaactgcctgcagatgggaagcagtaagtgaattccttgtttttctgtgctttgcacacagcttctgctttacctagtaaacttttcctttatttccagtgcata

SEQ ID NO: 61342 - DNA, 600 bp, Chicken  19866894321800_1
ccacttataagtgcttacaatgcttaggcattttgccagccatgcttgtaggctcaagcattgcacaaatgtgctgattcctattcacttcttgcagagacaagctgatacggcaaagttgcatagtgcaagcgaagtacagaatggctttgtgacacagacagctcaggtcagaaacagcagtttcatctgttttgttaagaggaggcacatctctccaagataagcaggtaaaaactatcagttacatggtttcaagcagtagctggaagagccttacaaaaggattatgtagacaaycaaagagcggccttgcattcatgaactgatcgaggaaacacaagcatcacttatatgtcactaattaaagcaaaattttgttaattatttgtgctgtcagtccacactgattggttaagaaaaaagggccagaggaattttttttaggaggaggttaatcacccagagggtggtgacgcactgaacaggttgcccaaggaggctgtggatgccccatccctggaggcattcaaggccaggctggatgtggctctgggcagcctggtctggtggttggcaaccgtgcacacagcaatgggg

SEQ ID NO: 61343 - DNA, 599 bp, Chicken  19866894321807_1
gggaggaggtgatacattttaaaaaatcctcattggcatgagcttatgaaatagtttcatgtcttatgtaaacctcacagccaatatctgatatgcctgtttattttgaattacacgtgactgaggatttcagtaggagttttggaaaaatccctgtaaacttgtgaatttgtgcttttgatgaacatacttatggatgaccttccacgtcttttttgtttgcagaagctccctaaagctttaattccctgaaggtatggtttgggatagctgacttgtgagcatgctcttatgatcagwtcggattcttgatagagggtaagcccttagaggcccttctagctagagatacatattgcttctgcatcccaggtcccaaggaactgacgtaacagcaggttctatggctccctcaatccagccctacctcttaaaccactctgtgtatttgcaggagataaggtttgagtagaaataaaaagactgcaattattggggtggtggtttttttttgtttgtttgtttgttttgttttgttttttgtcatttgcactagatattccctttaagatagtatttcagtgtatttcaatagtttg

SEQ ID NO: 61344 - DNA, 600 bp, Chicken  19866894321811_1
tggggctgggttcagccagagcatctaggtccagcatttctaagcattcaccttgaactctactggcattcccaagtgtccaaagacttgaggtttgtgtgaactcacaatttagccagcaaaactgggctgggagggtcagcagaagccatacaaaactcatccatctgtgacaccacttagagccagtttctccctcgtagagccagggagggtatcccagccccacagctcaccccaaaactggacatggggtggggaccctggcacaggaggagggcgaggaggggatgctgctcrtcgtagcaagctgctgcatagataggaatcccagattgattaattgattaatcacacctgctaattacattgaacaaataggcaaaattaatatttgatgtaggtctctacagagactgtatggatcaattttccacagataagacagcaaagttcycacagaaaacacagagaaatgcagcagcatctccccggctccatcacatcccatccyaccggcactgtacacagccctgcctcacgctgtgcacccatgtaccacttgtggagacatgcaagcacatgcatgtgctcaaaacc

SEQ ID NO: 61345 - DNA, 539 bp, Chicken  19866894321811_2
actcatccatctgtgacaccacttagagccagtttctccctcgtagagccagggagggtatcccagccccacagctcaccccaaaactggacatggggtggggaccctggcacaggaggagggcgaggaggggatgctgctcrtcgtagcaagctgctgcatagataggaatcccagattgattaattgattaatcacacctgctaattacattgaacaaataggcaaaattaatatttgatgtaggtctctacagagactgtatggatcaattttccacagataagacagcaaagttcycacagaaaacacagagaaatgcagcagcatctccccggctccatcacatcccatccyaccggcactgtacacagccctgcctcacgctgtgcacccatgtaccacttgtggagacatgcaagcacatgcatgtgctcaaaaccgctcccagggttgcctggctgctgctcgtatgaaaatcaaacatcaaaaacacatcaagataatgaaaatagcagatcagctgcatttaatacgta

SEQ ID NO: 61346 - DNA, 482 bp, Chicken  19866894321811_3
gtatcccagccccacagctcaccccaaaactggacatggggtggggaccctggcacaggaggagggcgaggaggggatgctgctcrtcgtagcaagctgctgcatagataggaatcccagattgattaattgattaatcacacctgctaattacattgaacaaataggcaaaattaatatttgatgtaggtctctacagagactgtatggatcaattttccacagataagacagcaaagttcycacagaaaacacagagaaatgcagcagcatctccccggctccatcacatcccatccyaccggcactgtacacagccctgcctcacgctgtgcacccatgtaccacttgtggagacatgcaagcacatgcatgtgctcaaaaccgctcccagggttgcctggctgctgctcgtatgaaaatcaaacatcaaaaacacatcaagataatgaaaatagcagatcagctgcatttaatacgta

SEQ ID NO: 61347 - DNA, 575 bp, Chicken  19866894321817_1
acacacagatttttttttttttaatagttatgaaatcaagtgataattacgtagattcagaaaaattttcacttgtttttctggtgtcatctatatatcagtttctggtcctgtaaagtcagtttcagttggaaatagcaggtgtatgttgtttccctagtatttagctccatagctataagaatacattgaacttgtcaactagcagaagaatgagaacatttacaatttggacactattgattaactgatacgtctccagcagctgtgaagagggaactgtgataagtctgtcaatgytgaacaatttcacaaggaagaaacaaattattccacattgcatgggtattcaaatgctaatttttccaataatgacactgacagtgaaactgatacctctgaagattcctggttccttagaccctcaagactagaaaagcatttcagatttgcacttaaaatacttactttgtaaaaattctggcatggaagattttatgtaacaattgacattgttccctgtttaaatcagacatgaaaacaccaaaattttccagaattcactgttttgtttg

SEQ ID NO: 61348 - DNA, 599 bp, Chicken  19866894321819_1
  misc_feature (1)..(190): n is any nucleotide
nnnnnnnnnnnnnnnnnnnnnnnnnnnnnnnnnnnnnnnnnnnnnnnnnnnnnnnnnnnnnnnnnnnnnnnnnnnnnnnnnnnnnnnnnnnnnnnnnnnnnnnnnnnnnnnnnnnnnnnnnnnnnnnnnnnnnnnnnnnnnnnnnnnnnnnnnnnnnnnnnnnnnnnnnnnnnnnnnnnnnnnnnnnnnntctttccaagcttttggctatatgaatagttagtagacatttaaagtgtttcaaacatttggtcttccccatctctctgaaactgtctgctgaaataatggaaatagctraggctgtgctgtgccacactgaagtctgtgctgagcaacccttcgtattgatcgcacctggcgtgtcggtgtgccagccagcagacraagcaggaaaaccagagagtgctgagatagccacggaggaatttcacatccatatcagaggaaggatattcgtgtttgatgtgcagaagcagtcaggaactcagtccgtatgcacccaygggaataagcatctattgcagacagagcatctcgctgagccgcccgcgttacgggaaggcagcgagccttttctcactgatttcccccatgct

SEQ ID NO: 61349 - DNA, 599 bp, Chicken  19866894321819_2
  misc_feature (1)..(103): n is any nucleotide
nnnnnnnnnnnnnnnnnnnnnnnnnnnnnnnnnnnnnnnnnnnnnnnnnnnnnnnnnnnnnnnnnnnnnnnnnnnnnnnnnnnnnnnnnnnnnnnnnnnnnnntctttccaagcttttggctatatgaatagttagtagacatttaaagtgtttcaaacatttggtcttccccatctctctgaaactgtctgctgaaataatggaaatagctraggctgtgctgtgccacactgaagtctgtgctgagcaacccttcgtattgatcgcacctggcgtgtcggtgtgccagccagcagacraagcaggaaaaccagagagtgctgagatagccacggaggaatttcacatccatatcagaggaaggatattcgtgtttgatgtgcagaagcagtcaggaactcagtccgtatgcacccaygggaataagcatctattgcagacagagcatctcgctgagccgcccgcgttacgggaaggcagcgagccttttctcactgatttcccccatgcttttcagacggcttcacgcccctcatgatcgcctcgtgcagcggaggagggctggagactggcaacagcgaggaggaggacgatgccc

SEQ ID NO: 61350 - DNA, 600 bp, Chicken  19866894321819_3
gctatatgaatagttagtagacatttaaagtgtttcaaacatttggtcttccccatctctctgaaactgtctgctgaaataatggaaatagctraggctgtgctgtgccacactgaagtctgtgctgagcaacccttcgtattgatcgcacctggcgtgtcggtgtgccagccagcagacraagcaggaaaaccagagagtgctgagatagccacggaggaatttcacatccatatcagaggaaggatattcgtgtttgatgtgcagaagcagtcaggaactcagtccgtatgcacccaygggaataagcatctattgcagacagagcatctcgctgagccgcccgcgttacgggaaggcagcgagccttttctcactgatttcccccatgcttttcagacggcttcacgcccctcatgatcgcctcgtgcagcggaggagggctggagactggcaacagcgaggaggaggacgatgcccctgcagtcatctcagatttcatctaccaaggygccagtttgcacaaccagactgaccgcaccggcgagaccgcgctgcacctggctgcccgctactcgcgctccgacgctgccaaacgcc

SEQ ID NO: 61351 - DNA, 600 bp, Chicken  19866894321819_4
cacggaggaatttcacatccatatcagaggaaggatattcgtgtttgatgtgcagaagcagtcaggaactcagtccgtatgcacccaygggaataagcatctattgcagacagagcatctcgctgagccgcccgcgttacgggaaggcagcgagccttttctcactgatttcccccatgcttttcagacggcttcacgcccctcatgatcgcctcgtgcagcggaggagggctggagactggcaacagcgaggaggaggacgatgcccctgcagtcatctcagatttcatctaccaaggygccagtttgcacaaccagactgaccgcaccggcgagaccgcgctgcacctggctgcccgctactcgcgctccgacgctgccaaacgcctgctggaagccagtgctgatgcgaacattcaggataacatgggcaggacccctctgcacgccgctgtctctgctgatgcccaaggagtcttccaggtaaaagggtcctttcaccactgcttttctgctgaaagcgtttgtcagcggtgcgggtcggttgggaccgtgggcagcctcatccagtgggtggcaaccagcctacagcagggcttg

SEQ ID NO: 61352 - DNA, 600 bp, Chicken  19866894321828_1
tgtgagtcactcatagcttggctctgtttgctgtctttgcccccagagcatctaattacatactccactaattttaacatatggcatgattaaggagtaattggaagtaattcctcgtgtcgccagcactctagctggttgcatctctacaatgctccataagcaagcaggatcatgcatgcgtatattatttaggttgtgcctttgcttattttgcctttaaattataggatgtgccaagatttggagttaacgacccaaaagattgggaattcaacccaaaagatagagaattcctcraattgtgcagtcatgtttgctgtgcctgtgtttggcagcccacrgaggctgctcgcaacagacattagatacaggctgctgctgtgcagagaaagcctgggcaggaggatggaggagggatgtttgtgctgtggagctgcagtatatatggattatttacaattggacttgatgatctttcgtggtcttttccagccttagtcatagaatcacagaacggcctgggttgcaaaggcccacagtgctcatcccgttccaaccccctgctatgtgcagggtcgccaaccagcagcccaggct

SEQ ID NO: 61353 - DNA, 600 bp, Chicken  19866894321828_2
agagcatctaattacatactccactaattttaacatatggcatgattaaggagtaattggaagtaattcctcgtgtcgccagcactctagctggttgcatctctacaatgctccataagcaagcaggatcatgcatgcgtatattatttaggttgtgcctttgcttattttgcctttaaattataggatgtgccaagatttggagttaacgacccaaaagattgggaattcaacccaaaagatagagaattcctcraattgtgcagtcatgtttgctgtgcctgtgtttggcagcccacrgaggctgctcgcaacagacattagatacaggctgctgctgtgcagagaaagcctgggcaggaggatggaggagggatgtttgtgctgtggagctgcagtatatatggattatttacaattggacttgatgatctttcgtggtcttttccagccttagtcatagaatcacagaacggcctgggttgcaaaggcccacagtgctcatcccgttccaaccccctgctatgtgcagggtcgccaaccagcagcccaggctgcccagagccacatccagcctggccttgaatgcctgcagggatg

SEQ ID NO: 61354 - DNA, 599 bp, Chicken  19866894321838_1
  misc_feature (1)..(132): n is any nucleotide
nnnnnnnnnnnnnnnnnnnnnnnnnnnnnnnnnnnnnnnnnnnnnnnnnnnnnnnnnnnnnnnnnnnnnnnnnnnnnnnnnnnnnnnnnnnnnnnnnnnnnnnnnnnnnnnnnnnnnnnnnnnnnnnnnnnngatgtgaaaaaatagttgtcaaatttctgattatgacaaagaggtaaagagtcagcacttttccattacaggcataatttcaatcactcttctacaaaatgagcagtcaaaaagacagttgatgtataattaaatccaaatgtaaagctcagatttcatgtttcttgygaaatggaatcttgtggcactcacagcggaggcacatgggggaataaagaagttttgaygtggaagatgtttttttgataatatcccagtgcacaaggtgttctgccacatcttggagatgaaccaagtagattataaagaaaaggttcatttactctggatggatggcactttctaaaatcaaatgtcatcagatagattttatctgacacagaagctgccttgtagacaaggtcttcaggatggatgaatctggagctccaagcctgagcaatttggcaggtctcccaagatgacta

SEQ ID NO: 61355 - DNA, 599 bp, Chicken  19866894321838_2
  misc_feature (1)..(73): n is any nucleotide
nnnnnnnnnnnnnnnnnnnnnnnnnnnnnnnnnnnnnnnnnnnnnnnnnnnnnnnnnnnnnnnnnnnnnnnnngatgtgaaaaaatagttgtcaaatttctgattatgacaaagaggtaaagagtcagcacttttccattacaggcataatttcaatcactcttctacaaaatgagcagtcaaaaagacagttgatgtataattaaatccaaatgtaaagctcagatttcatgtttcttgygaaatggaatcttgtggcactcacagcggaggcacatgggggaataaagaagttttgaygtggaagatgtttttttgataatatcccagtgcacaaggtgttctgccacatcttggagatgaaccaagtagattataaagaaaaggttcatttactctggatggatggcactttctaaaatcaaatgtcatcagatagattttatctgacacagaagctgccttgtagacaaggtcttcaggatggatgaatctggagctccaagcctgagcaatttggcaggtctcccaagatgactagaattttgcacattgtggccattttctctgtgttttgtgtgtactgcagctgtgctgca

SEQ ID NO: 61356 - DNA, 553 bp, Chicken  19866894321838_3
ttggagatgaaccaagtagattataaagaaaaggttcatttactctggatggatggcactttctaaaatcaaatgtcatcagatagattttatctgacacagaagctgccttgtagacaaggtcttcaggatggatgaatctggagctccaagcctgagcaatttggcaggtctcccaagatgactagaattttgcacattgtggccattttctctgtgttttgtgtgtactgcagctgtgctgcatgaatatacatgcaacaggagtgtgctccaggggcctggtgatcttgggatccrtttggggcaatttgctgaataygtgttcttgtagaaacagtactaaacttccaractctgtggaartttgggtagtgttcttccagctgactgatggcattgcaggtcagtggagggctcagtcagtaaagggccagagcactggaaaagggttagttgggtggcatttgttgcaacttttttttttctcttaatcacttagaactaataacaactctgtttttttttttttctttttttggggggggggcgt

SEQ ID NO: 61357 - DNA, 531 bp, Chicken  19866894321838_4
ataaagaaaaggttcatttactctggatggatggcactttctaaaatcaaatgtcatcagatagattttatctgacacagaagctgccttgtagacaaggtcttcaggatggatgaatctggagctccaagcctgagcaatttggcaggtctcccaagatgactagaattttgcacattgtggccattttctctgtgttttgtgtgtactgcagctgtgctgcatgaatatacatgcaacaggagtgtgctccaggggcctggtgatcttgggatccrtttggggcaatttgctgaataygtgttcttgtagaaacagtactaaacttccaractctgtggaartttgggtagtgttcttccagctgactgatggcattgcaggtcagtggagggctcagtcagtaaagggccagagcactggaaaagggttagttgggtggcatttgttgcaacttttttttttctcttaatcacttagaactaataacaactctgtttttttttttttctttttttggggggggggcgt

SEQ ID NO: 61358 - DNA, 499 bp, Chicken  19866894321838_5
ggcactttctaaaatcaaatgtcatcagatagattttatctgacacagaagctgccttgtagacaaggtcttcaggatggatgaatctggagctccaagcctgagcaatttggcaggtctcccaagatgactagaattttgcacattgtggccattttctctgtgttttgtgtgtactgcagctgtgctgcatgaatatacatgcaacaggagtgtgctccaggggcctggtgatcttgggatccrtttggggcaatttgctgaataygtgttcttgtagaaacagtactaaacttccaractctgtggaartttgggtagtgttcttccagctgactgatggcattgcaggtcagtggagggctcagtcagtaaagggccagagcactggaaaagggttagttgggtggcatttgttgcaacttttttttttctcttaatcacttagaactaataacaactctgtttttttttttttctttttttggggggggggcgt

SEQ ID NO: 61359 - DNA, 487 bp, Chicken  19866894321838_6
aatcaaatgtcatcagatagattttatctgacacagaagctgccttgtagacaaggtcttcaggatggatgaatctggagctccaagcctgagcaatttggcaggtctcccaagatgactagaattttgcacattgtggccattttctctgtgttttgtgtgtactgcagctgtgctgcatgaatatacatgcaacaggagtgtgctccaggggcctggtgatcttgggatccrtttggggcaatttgctgaataygtgttcttgtagaaacagtactaaacttccaractctgtggaartttgggtagtgttcttccagctgactgatggcattgcaggtcagtggagggctcagtcagtaaagggccagagcactggaaaagggttagttgggtggcatttgttgcaacttttttttttctcttaatcacttagaactaataacaactctgtttttttttttttctttttttggggggggggcgt

SEQ ID NO: 61360 - DNA, 600 bp, Chicken  19866894321839_1
tcactaggcaaacatccaagctgctctgatgtgcaggatgtaggcagcattcagtgttataatttgctgaacgctagaaaagataaaattgggatattgtgtcattgcttcctatgtggtggcaacactcatatcctggcagaagttagactgacagtgaaaagctgcgtggtgtattttattatcgctgtggactatgtcccttttctcatcttatttgcttatactgactcctgggaattgctagatacccaaacaaattaattaacacacattaattagatcagtttcatggtgagraaaggagtgtgtactcgagtgcaagtaatgtattttaattcagagcaggatggggaggtgaatcgaagaattgaggtagcagtgttagagaagagctgcccaacgttcaaggagaagaaaggggagtgcagtgtggcagggcacagcctgaatcattaaaatggtggagctatactaggcaaatgcagagaaccaggaaaatgaaggcagtaaagatggtggctttactgaagtaaagaaaggttgaggaaagtactgacagtggttggatgacagaaaggtaacaggaatgatgaaggt

SEQ ID NO: 61361 - DNA, 599 bp, Chicken  19866894321842_1
  misc_feature (1)..(128): n is any nucleotide
nnnnnnnnnnnnnnnnnnnnnnnnnnnnnnnnnnnnnnnnnnnnnnnnnnnnnnnnnnnnnnnnnnnnnnnnnnnnnnnnnnnnnnnnnnnnnnnnnnnnnnnnnnnnnnnnnnnnnnnnnnnnnnnncaaccccaaagtccttctctgcagtttttctcaatcagttctcctagactgtacacatatctgggattgcccagatccaaatgcagctccttgcacttggccttgtctcttgttaaacagttctagtcacaagacagatccctggagagcaccactcctcaccagcctccayctgtacacagagctactaaccacaaacaattgtttattcatcaaataatccatatctctccragttagagataaagatgtggcatggggttgcatcaaaggccttgcacaagtccacatagatgacatcagttaattttcctttattcactaattctggcattccatctcagaaggccaccagtttggtgaggcatgttcagcccttgatgaaagctggcygtcttagtttacttactgatcgtacatacgtgttcgcgtagcttccagaaggatccgtaycttgatttttgcacacag

SEQ ID NO: 61362 - DNA, 599 bp, Chicken  19866894321842_2
  misc_feature (1)..(66): n is any nucleotide
nnnnnnnnnnnnnnnnnnnnnnnnnnnnnnnnnnnnnnnnnnnnnnnnnnnnnnnnnnnnnnnnnncaaccccaaagtccttctctgcagtttttctcaatcagttctcctagactgtacacatatctgggattgcccagatccaaatgcagctccttgcacttggccttgtctcttgttaaacagttctagtcacaagacagatccctggagagcaccactcctcaccagcctccayctgtacacagagctactaaccacaaacaattgtttattcatcaaataatccatatctctccragttagagataaagatgtggcatggggttgcatcaaaggccttgcacaagtccacatagatgacatcagttaattttcctttattcactaattctggcattccatctcagaaggccaccagtttggtgaggcatgttcagcccttgatgaaagctggcygtcttagtttacttactgatcgtacatacgtgttcgcgtagcttccagaaggatccgtaycttgatttttgcacacaggtaaggctcatgggcatgtagttcctgcttatccccttcttaaaaataaaagttaagtttcc

SEQ ID NO: 61363 - DNA, 600 bp, Chicken  19866894321842_3
cacttggccttgtctcttgttaaacagttctagtcacaagacagatccctggagagcaccactcctcaccagcctccayctgtacacagagctactaaccacaaacaattgtttattcatcaaataatccatatctctccragttagagataaagatgtggcatggggttgcatcaaaggccttgcacaagtccacatagatgacatcagttaattttcctttattcactaattctggcattccatctcagaaggccaccagtttggtgaggcatgttcagcccttgatgaaagctggcygtcttagtttacttactgatcgtacatacgtgttcgcgtagcttccagaaggatccgtaycttgatttttgcacacaggtaaggctcatgggcatgtagttcctgcttatccccttcttaaaaataaaagttaagtttccactttccccatcactgtggattccgtctgactgccatgtcttttctaatatgttcctcttttccctgagtttgaccagcaagttcttgctcagccatgccagtttcctgcctcctctgcttgatttcttatgctggggaacagagagctcttgttcttta

SEQ ID NO: 61364 - DNA, 600 bp, Chicken  19866894321842_4
actcctcaccagcctccayctgtacacagagctactaaccacaaacaattgtttattcatcaaataatccatatctctccragttagagataaagatgtggcatggggttgcatcaaaggccttgcacaagtccacatagatgacatcagttaattttcctttattcactaattctggcattccatctcagaaggccaccagtttggtgaggcatgttcagcccttgatgaaagctggcygtcttagtttacttactgatcgtacatacgtgttcgcgtagcttccagaaggatccgtaycttgatttttgcacacaggtaaggctcatgggcatgtagttcctgcttatccccttcttaaaaataaaagttaagtttccactttccccatcactgtggattccgtctgactgccatgtcttttctaatatgttcctcttttccctgagtttgaccagcaagttcttgctcagccatgccagtttcctgcctcctctgcttgatttcttatgctggggaacagagagctcttgttctttaagaaaggcatccttaaacagctgccagctctattccactcctttatctctaaagacagcc

SEQ ID NO: 61365 - DNA, 600 bp, Chicken  19866894321857_1
tgcccagggaagctgtagatgccccatccctggaggtgttcaaggcgaggttggatggggccctgggcagtctgagctggtggatggcagccctgcctgtgctgaggatgttaaaacaagatggtctttaaagtcccttttaacccaagctattccatcattctgtgaattgaggtctgtcatcgacatgcaactgaaaaccagctatggaccttcagtatgccatttcccactcactgcttgtgccttttttttgtgccagctgttccccatacagtttcctaatccccactctctaarccatttttctctaacgtgcatgcgttaaaaaagtatggttcactgtagttcattgaaacggtaacagatcgtagttttcctagaaatgttcagttttagtatatataggtcctgctagagaaggagtaatggattccaatgattcactgtagagagcatttgattatagctacttagtctaggaaggataaaaatggtttaggagtaagacttgtgggatgaattggcttgtcaaaagagccatagctgccaaagaagaactaatcttgatgatcaccttttttttttttttcctcatga

SEQ ID NO: 61366 - DNA, 600 bp, Chicken  19866894321864_1
catactctagcttctgattgacagttgcaagggatacgagcagtaaccaggctcctccagaccctttctttgcatctgtcctggagaggtgcagtctgatttaggagccagattagaggtgaagaaataggtaatatcaggagaatcctattggcagggaagagcagtttcacttctgtgaaatcccatttgctactactagatattaatcttttgagtgcctcttgtctgtcaatataggtaatgaaggtctagcttaaaaagcaaacacttctgaaattgtattttccttatttaccrtaatggcctgtggttttgtataagtaatattgcagaatgttaaaatcagaaaactgtaatcaaaggcctgaccacttcggcagtgctatctttgtctattgaaccagctttscwactcttggggaaaagggaatgagaacatggactgtaatcatattttaattttcagaccatacaaatcacagaatcatagaagcactaaagttggacaagacctccaagatcatccaatccaaccatccrcctaccaccaatatttccccattaaactatgtccctcggtacaacatctaaatgtaa

SEQ ID NO: 61367 - DNA, 600 bp, Chicken  19866894321864_2
ttagaggtgaagaaataggtaatatcaggagaatcctattggcagggaagagcagtttcacttctgtgaaatcccatttgctactactagatattaatcttttgagtgcctcttgtctgtcaatataggtaatgaaggtctagcttaaaaagcaaacacttctgaaattgtattttccttatttaccrtaatggcctgtggttttgtataagtaatattgcagaatgttaaaatcagaaaactgtaatcaaaggcctgaccacttcggcagtgctatctttgtctattgaaccagctttscwactcttggggaaaagggaatgagaacatggactgtaatcatattttaattttcagaccatacaaatcacagaatcatagaagcactaaagttggacaagacctccaagatcatccaatccaaccatccrcctaccaccaatatttccccattaaactatgtccctcggtacaacatctaaatgtaaggagagccctgtctttctttaaacactgatgggatttgctgtagtttctatctgcaaagactatattgccctttgccgaaccaaaacatgagtccctatcgaatttcctccc

SEQ ID NO: 61368 - DNA, 600 bp, Chicken  19866894321864_3
agaggtgaagaaataggtaatatcaggagaatcctattggcagggaagagcagtttcacttctgtgaaatcccatttgctactactagatattaatcttttgagtgcctcttgtctgtcaatataggtaatgaaggtctagcttaaaaagcaaacacttctgaaattgtattttccttatttaccrtaatggcctgtggttttgtataagtaatattgcagaatgttaaaatcagaaaactgtaatcaaaggcctgaccacttcggcagtgctatctttgtctattgaaccagctttscwactcttggggaaaagggaatgagaacatggactgtaatcatattttaattttcagaccatacaaatcacagaatcatagaagcactaaagttggacaagacctccaagatcatccaatccaaccatccrcctaccaccaatatttccccattaaactatgtccctcggtacaacatctaaatgtaaggagagccctgtctttctttaaacactgatgggatttgctgtagtttctatctgcaaagactatattgccctttgccgaaccaaaacatgagtccctatcgaatttcctccctg

SEQ ID NO: 61369 - DNA, 600 bp, Chicken  19866894321864_4
atgaaggtctagcttaaaaagcaaacacttctgaaattgtattttccttatttaccrtaatggcctgtggttttgtataagtaatattgcagaatgttaaaatcagaaaactgtaatcaaaggcctgaccacttcggcagtgctatctttgtctattgaaccagctttscwactcttggggaaaagggaatgagaacatggactgtaatcatattttaattttcagaccatacaaatcacagaatcatagaagcactaaagttggacaagacctccaagatcatccaatccaaccatccrcctaccaccaatatttccccattaaactatgtccctcggtacaacatctaaatgtaaggagagccctgtctttctttaaacactgatgggatttgctgtagtttctatctgcaaagactatattgccctttgccgaaccaaaacatgagtccctatcgaatttcctccctgtacaatctcctcccatatcctctgcctgttctgtcctgacaatgttgtagcatggtgtgatggtttatgaaccaaaggtggttatgaaccgaaggcagaaattagttcaaaaattcaaacagcttcccc

SEQ ID NO: 61370 - DNA, 600 bp, Chicken  19866894321867_1
tacttgtgttatgaagtcactgataagcaacacaatgaaaacctcttgcaatgtccatccactggcacaagagaccagcagtgagagaaggatgtttcttggctcctgactagtggagagagaggagggtagatctgatcaagtgctaaacaaggagcaacaggtgggacctgcagaggtgtgcctttcaggcagcacaggaggtggctccagtggctttctcttcttaggaaaggagcagtgagtcactagggttacaaaacgccagccattatatatagccccaatcatgttattatratgtgtatttctagctgctgtacaaccccaaagcacacttccactgtaacacatcttgtagcagcttatatgcagagaagaatgttcagaccctgtggcactttccccctaggtccccaaatcagggggagatgtgccaaggaaacagctccctctttctgctacagtccactgtcagcacctgctgatacagaacactccataggcgctccagacagtcatcattacaatgagctttcataggcttgcagctgaaggtgtctggcacagcactgcatgactgtaaccctacactccacc

SEQ ID NO: 61371 - DNA, 599 bp, Chicken  19866894321869_1
  misc_feature (1)..(82): n is any nucleotide
nnnnnnnnnnnnnnnnnnnnnnnnnnnnnnnnnnnnnnnnnnnnnnnnnnnnnnnnnnnnnnnnnnnnnnnnnnnnnnnnnnagacaccaggaaatgtcttttcaagcttcagtctcacggagcagcactggagtaactgcagttgaatagaagagcatctgaaatcattgtactcctttttagggtttgggagcagaaatggatgcgatagttgtgcttaaaaatattgtttaaaggtcattattaagatacagggaaagaaaaaaataggtaacattctaaagattgttaagaaaggmtttcattttaacagtgttcctattcttcactcctctctgtctctagaactcttaccaagagtcaccatctgtgtagcattaaaaataatcaaggctctcattttcttcgtgaagaaaggaaattagctgaagcgtagtggttgctctttttgctaaacaagcatggacaaaagatgccaaaaagagcagccgaggaccactcctctctggtgcttacactggcagtgcctgggctcggtctcaccagtgctctggtagtgctcatcaccagcagagatggagctgtgccactgctcctg

SEQ ID NO: 61372 - DNA, 600 bp, Chicken  19866894321870_1
tctttcaagtatcagtgactttagtaagttagagcatccaatttctagaggagggtttactttacctcatcattgaaaccctgctgtggaatacaatctgttttcagaagagcaaagaggtgaaggacaaaaacaaatggcaattactctaaaactgtgaagagcttggagatggtgttctctcacatccgaattagggcaaggaaatatacttgtcaaaatgttgacagtgaaaatgcactaccactgaccatgctgaaatttgtcttggcatcaatctggaatgtggaactgcctccrtggaggcctgtcatgagatctgtcttgggaccaatgctcttcaacatctttatcaacaacacagacagtgggatcaagcgctycctcagcaagtttgctcatgaygctgaatttagtggtgcaggtgacacaacagaagcaatggatgccatccagagggactggatatgcttgaaaaacgggcctgcatttagctaatgaggttcaacaaagccaagtgcaaggtgttgcacttgggtcagrgcaattggaaatcatcaccctctactctgccctcatgcaactccatgtggagtactg

SEQ ID NO: 61373 - DNA, 600 bp, Chicken  19866894321870_2
ctgtggaatacaatctgttttcagaagagcaaagaggtgaaggacaaaaacaaatggcaattactctaaaactgtgaagagcttggagatggtgttctctcacatccgaattagggcaaggaaatatacttgtcaaaatgttgacagtgaaaatgcactaccactgaccatgctgaaatttgtcttggcatcaatctggaatgtggaactgcctccrtggaggcctgtcatgagatctgtcttgggaccaatgctcttcaacatctttatcaacaacacagacagtgggatcaagcgctycctcagcaagtttgctcatgaygctgaatttagtggtgcaggtgacacaacagaagcaatggatgccatccagagggactggatatgcttgaaaaacgggcctgcatttagctaatgaggttcaacaaagccaagtgcaaggtgttgcacttgggtcagrgcaattggaaatcatcaccctctactctgccctcatgcaactccatgtggagtactgcgtccagctctgctgcccccagcacaaaaagatgcagagctgttggttgaagtacccctgcccacagcaaggtcatttccaac

SEQ ID NO: 61374 - DNA, 600 bp, Chicken  19866894321870_3
agaagagcaaagaggtgaaggacaaaaacaaatggcaattactctaaaactgtgaagagcttggagatggtgttctctcacatccgaattagggcaaggaaatatacttgtcaaaatgttgacagtgaaaatgcactaccactgaccatgctgaaatttgtcttggcatcaatctggaatgtggaactgcctccrtggaggcctgtcatgagatctgtcttgggaccaatgctcttcaacatctttatcaacaacacagacagtgggatcaagcgctycctcagcaagtttgctcatgaygctgaatttagtggtgcaggtgacacaacagaagcaatggatgccatccagagggactggatatgcttgaaaaacgggcctgcatttagctaatgaggttcaacaaagccaagtgcaaggtgttgcacttgggtcagrgcaattggaaatcatcaccctctactctgccctcatgcaactccatgtggagtactgcgtccagctctgctgcccccagcacaaaaagatgcagagctgttggttgaagtacccctgcccacagcaaggtcatttccaacctaagccatcctaygattctmt

SEQ ID NO: 61375 - DNA, 600 bp, Chicken  19866894321870_4
ccactgaccatgctgaaatttgtcttggcatcaatctggaatgtggaactgcctccrtggaggcctgtcatgagatctgtcttgggaccaatgctcttcaacatctttatcaacaacacagacagtgggatcaagcgctycctcagcaagtttgctcatgaygctgaatttagtggtgcaggtgacacaacagaagcaatggatgccatccagagggactggatatgcttgaaaaacgggcctgcatttagctaatgaggttcaacaaagccaagtgcaaggtgttgcacttgggtcagrgcaattggaaatcatcaccctctactctgccctcatgcaactccatgtggagtactgcgtccagctctgctgcccccagcacaaaaagatgcagagctgttggttgaagtacccctgcccacagcaaggtcatttccaacctaagccatcctaygattctmttacaaaaggattatctacaaaattaagatgcaaatatttacaaattcagtcacaccttgtgacatctactggtaaaaatcatccccaagcaagcagccaaacatgaatgtatttgaaggttggtagatcttcgccata

SEQ ID NO: 61376 - DNA, 600 bp, Chicken  19866894321870_5
ctcatgaygctgaatttagtggtgcaggtgacacaacagaagcaatggatgccatccagagggactggatatgcttgaaaaacgggcctgcatttagctaatgaggttcaacaaagccaagtgcaaggtgttgcacttgggtcagrgcaattggaaatcatcaccctctactctgccctcatgcaactccatgtggagtactgcgtccagctctgctgcccccagcacaaaaagatgcagagctgttggttgaagtacccctgcccacagcaaggtcatttccaacctaagccatcctaygattctmttacaaaaggattatctacaaaattaagatgcaaatatttacaaattcagtcacaccttgtgacatctactggtaaaaatcatccccaagcaagcagccaaacatgaatgtatttgaaggttggtagatcttcgccataaaatagcctctttataggaaattaaaggcagtagccactctgtgggcccttctagagcacaacacagaagagcagactgtcttaaaatgtaagaccctttaatgtaatctagtttgccaaggtcaggaggaggagcttgtttctgaaccctttt

SEQ ID NO: 61377 - DNA, 600 bp, Chicken  19866894321870_6
ygctgaatttagtggtgcaggtgacacaacagaagcaatggatgccatccagagggactggatatgcttgaaaaacgggcctgcatttagctaatgaggttcaacaaagccaagtgcaaggtgttgcacttgggtcagrgcaattggaaatcatcaccctctactctgccctcatgcaactccatgtggagtactgcgtccagctctgctgcccccagcacaaaaagatgcagagctgttggttgaagtacccctgcccacagcaaggtcatttccaacctaagccatcctaygattctmttacaaaaggattatctacaaaattaagatgcaaatatttacaaattcagtcacaccttgtgacatctactggtaaaaatcatccccaagcaagcagccaaacatgaatgtatttgaaggttggtagatcttcgccataaaatagcctctttataggaaattaaaggcagtagccactctgtgggcccttctagagcacaacacagaagagcagactgtcttaaaatgtaagaccctttaatgtaatctagtttgccaaggtcaggaggaggagcttgtttctgaaccctttttcttaat

SEQ ID NO: 61378 - DNA, 600 bp, Chicken  19866894321874_1
ggaaaaagtgcaggttgccacaaaaatattgttctctcatgtgggtaggtgaatactggtggctgcgctgcacacgtttgtgcagtgtttctgcatgttgcccaactgaaatgtcatgtgcaggaatgtcatacaggctgaggatgtgtggagagagcaatgtacaacctttaccattatcaacacacatgcagcttatgccactgtgctcttccctttccagaaatggaaaaaaagaacttcagaatgttgaagtcgctttatgttttcttctgccttaaaaagtgcaggtgtgttgaragaggaagggatacctggggattgagagatcccagcagtgtgtgtggagatgtgggccccttaaaatatatttcttttgatgcagatgtggaatttccaaatgaatatccctcagggtgcctcctgggctgtgtggatgtaactgattgtttatcgcaagagcaatttaatgagcaggtgagtgcagtaaaacctttacaaacctcattttctggaaaactttttcgagtggtgtaactcacttttctgagatgctctagagaagatggtgaatgaaaaatttcaagtgtgatgagagga

SEQ ID NO: 61379 - DNA, 600 bp, Chicken  19866894321877_1
aatgtcaatgggtgcaatttttttccacatggagtgattcaacgaggcacctttgcttcatatgcacttccatgtcatgccatttagtcagactgcccctctgctgccatgtgtcatatgacaacaaaactgctgtggtttaacctggcaggtagctaagctcctgtcatggttttatgatttttggttatcagtattccacatcacaacatcatgcagtgtactgggagttaaggagcaaatgctttagttccgggtacctgtctggaagagaagaagaactacgttccccaagagccytttcgagtactgttatcattcctgctcaagggaacagatataagggcgcaggtcatctgacttgtccctcttctcgtctcgccgtgttccctgtcggattggctcgcttctgctgctcccgactgcacgcaaggcttcagtattagcgtaaggcctttggctctcggacaatctttctctcaattattgttgatttatattgtattatagtgtgttatcttacattccgatactatatttagtaaattagtttgtttctcctcagatcgttgccactgtttttaattattttggggtccc

SEQ ID NO: 61380 - DNA, 599 bp, Chicken  19866894321878_1
  misc_feature (1)..(72): n is any nucleotide
nnnnnnnnnnnnnnnnnnnnnnnnnnnnnnnnnnnnnnnnnnnnnnnnnnnnnnnnnnnnnnnnnnnnnnnntgccatttgtatgccaagactgctgagggccgtgtggcttttgaatttcttctgctgagttttgcaggctgaccgtgggcacttcttgctgaccacacaaatggacagccccaaaacctgagtctcaagtccagaagcacggcttaggaccctttgttaccccatgccgagcagagcttgggcaggacacactgtgctttgttcccgagtccctcaggagctgccccrggagcacaagtacccgagagaggccaggccacaaagaggagaaagggactgggctgtgctggcttggccagtcctggtgacagtgtggggcctcctgggagctgtgggctctgctgtgagagctcattcccgtaaactgacctaatctctcctcggctgtttgggctgtgctgtgactaatgtgtgcaggttagagggctgatgtctgagtaagagtgggttttttttgtttgtttggtttggctattttttttcctcctaatgaggcactgtcaagtctgggccagctgtgcgggatg

SEQ ID NO: 61381 - DNA, 600 bp, Chicken  19866894321885_1
ctgatgactcatattccagccctccatgaactcaagcagaagctgttactccctgcattaggttcactactgttcgattcttctttgcattaaggccagtgtcttctatttgcagatgtcagttagtaaatgtcttttttttttttttttaattttatacattcccttgtgtatattatctgaattcttactctgatcttcaaaagtttatgaacttttttgtctgatgtcatacacacgttgcacccatgctatataagtaactacttgaaggactgaatgggactgctactaggacargctctttcagaagttcccaggtcttcccagaaaaataagccattgatagctctacagtgacaactagcagcatggacgcaaggagaatgagagcagtggttgagcagtagctgaagaaaatagtcaaagcagcaacaggccacagaaggctttaatgataaatagcttttagttaacagtgggaagcatatgcaacagagggactattagggacactggataatttgagggtggcatacagagaaaattatcattgtagctgccaagtgatgcaagttcagagccagaaaagaatgtaca

SEQ ID NO: 61382 - DNA, 600 bp, Chicken  19866894321891_1
atgtttgtggtgaaagaatatgttgtgtgaccacagtgacagaaagttgcctcccatgtgggaatgtgaagttctggattttgggaaacagactgtatggcagtagcacacagtatactgctctaatttctttctcaaggcatgtttcaataaatagaaagtgatatttcagtacaagctctcatttctttgccacaaaatccatcacaataaactcatattcagctcccatgcacaaattttcagaggattttcctggtctttcgttgcttactcttgctgtccttccttccacacagwcatctgcaaaygaattcactcctggacaactcatacaggagttttcaatttaagctagactttctgatagttatcttccacaccagaatacattagaggaagtcctctttgttatactgacgtgtatattccttgcagcttaagtagagctaccattgtagtttcctggttggagatgaacttcagaatgaaaggacgtcatttttcatttctgtgtacatattttcaactctcttaggactgatcatacagctaaatgttcatattgtgatcggtcattctaacactggtttttattct

SEQ ID NO: 61383 - DNA, 600 bp, Chicken  19866894321891_2
gaaagaatatgttgtgtgaccacagtgacagaaagttgcctcccatgtgggaatgtgaagttctggattttgggaaacagactgtatggcagtagcacacagtatactgctctaatttctttctcaaggcatgtttcaataaatagaaagtgatatttcagtacaagctctcatttctttgccacaaaatccatcacaataaactcatattcagctcccatgcacaaattttcagaggattttcctggtctttcgttgcttactcttgctgtccttccttccacacagwcatctgcaaaygaattcactcctggacaactcatacaggagttttcaatttaagctagactttctgatagttatcttccacaccagaatacattagaggaagtcctctttgttatactgacgtgtatattccttgcagcttaagtagagctaccattgtagtttcctggttggagatgaacttcagaatgaaaggacgtcatttttcatttctgtgtacatattttcaactctcttaggactgatcatacagctaaatgttcatattgtgatcggtcattctaacactggtttttattctgtgtattggga

SEQ ID NO: 61384 - DNA, 599 bp, Chicken  19866894321894_1
  misc_feature (1)..(114): n is any nucleotide
nnnnnnnnnnnnnnnnnnnnnnnnnnnnnnnnnnnnnnnnnnnnnnnnnnnnnnnnnnnnnnnnnnnnnnnnnnnnnnnnnnnnnnnnnnnnnnnnnnnnnnnnnnnnnnnnnnaagtctttgctgatccttgtagtattgacaccaagaactcatcccttgtctttcatacatatgagaaagatggcaaaaagaccaggaccagctctttacatctcaagaatggtttgagcactgtagcaccctgaccttcaaagaataccttgcttttctacccaacagccccctgctgggagacargcaagaccattatttgtactgaaaggcaaacaaagaycacaacaccggcctcctattgcatcccttcaagcaacctggaggasgactgcctggctggtcctctcactgcacaatcagcatccagcccgaggctacgagcacgtgrggaggaatggagcagacccagccaggatagcaggaaggtgtgcaggyagggcagtgcggacagcctccagagcaggactatcctgcagggtttgtgctgctggcacaacaagcacacagcacttctctgcctggagagccctctcagaagcacc

SEQ ID NO: 61385 - DNA, 599 bp, Chicken  19866894321894_2
  misc_feature (1)..(77): n is any nucleotide
nnnnnnnnnnnnnnnnnnnnnnnnnnnnnnnnnnnnnnnnnnnnnnnnnnnnnnnnnnnnnnnnnnnnnnnnnnnnnaagtctttgctgatccttgtagtattgacaccaagaactcatcccttgtctttcatacatatgagaaagatggcaaaaagaccaggaccagctctttacatctcaagaatggtttgagcactgtagcaccctgaccttcaaagaataccttgcttttctacccaacagccccctgctgggagacargcaagaccattatttgtactgaaaggcaaacaaagaycacaacaccggcctcctattgcatcccttcaagcaacctggaggasgactgcctggctggtcctctcactgcacaatcagcatccagcccgaggctacgagcacgtgrggaggaatggagcagacccagccaggatagcaggaaggtgtgcaggyagggcagtgcggacagcctccagagcaggactatcctgcagggtttgtgctgctggcacaacaagcacacagcacttctctgcctggagagccctctcagaagcaccactcagcataaagggccaagcaaatacasggctactt

SEQ ID NO: 61386 - DNA, 599 bp, Chicken  19866894321894_3
  misc_feature (1)..(31): n is any nucleotide
nnnnnnnnnnnnnnnnnnnnnnnnnnnnnnnaagtctttgctgatccttgtagtattgacaccaagaactcatcccttgtctttcatacatatgagaaagatggcaaaaagaccaggaccagctctttacatctcaagaatggtttgagcactgtagcaccctgaccttcaaagaataccttgcttttctacccaacagccccctgctgggagacargcaagaccattatttgtactgaaaggcaaacaaagaycacaacaccggcctcctattgcatcccttcaagcaacctggaggasgactgcctggctggtcctctcactgcacaatcagcatccagcccgaggctacgagcacgtgrggaggaatggagcagacccagccaggatagcaggaaggtgtgcaggyagggcagtgcggacagcctccagagcaggactatcctgcagggtttgtgctgctggcacaacaagcacacagcacttctctgcctggagagccctctcagaagcaccactcagcataaagggccaagcaaatacasggctacttgggcaaaacaaataaactcagcctacagtgtttgaagaggaagcag

SEQ ID NO: 61387 - DNA, 600 bp, Chicken  19866894321894_4
caagaactcatcccttgtctttcatacatatgagaaagatggcaaaaagaccaggaccagctctttacatctcaagaatggtttgagcactgtagcaccctgaccttcaaagaataccttgcttttctacccaacagccccctgctgggagacargcaagaccattatttgtactgaaaggcaaacaaagaycacaacaccggcctcctattgcatcccttcaagcaacctggaggasgactgcctggctggtcctctcactgcacaatcagcatccagcccgaggctacgagcacgtgrggaggaatggagcagacccagccaggatagcaggaaggtgtgcaggyagggcagtgcggacagcctccagagcaggactatcctgcagggtttgtgctgctggcacaacaagcacacagcacttctctgcctggagagccctctcagaagcaccactcagcataaagggccaagcaaatacasggctacttgggcaaaacaaataaactcagcctacagtgtttgaagaggaagcagaatgagcrcttttctgtgaacacctgcagaatttttatacatagtgtttacattccaaagaga

SEQ ID NO: 61388 - DNA, 600 bp, Chicken  19866894321894_5
agaccaggaccagctctttacatctcaagaatggtttgagcactgtagcaccctgaccttcaaagaataccttgcttttctacccaacagccccctgctgggagacargcaagaccattatttgtactgaaaggcaaacaaagaycacaacaccggcctcctattgcatcccttcaagcaacctggaggasgactgcctggctggtcctctcactgcacaatcagcatccagcccgaggctacgagcacgtgrggaggaatggagcagacccagccaggatagcaggaaggtgtgcaggyagggcagtgcggacagcctccagagcaggactatcctgcagggtttgtgctgctggcacaacaagcacacagcacttctctgcctggagagccctctcagaagcaccactcagcataaagggccaagcaaatacasggctacttgggcaaaacaaataaactcagcctacagtgtttgaagaggaagcagaatgagcrcttttctgtgaacacctgcagaatttttatacatagtgtttacattccaaagagaatttgcccttccagcgtggcaagatgatctgacaaatcagttttcca

SEQ ID NO: 61389 - DNA, 600 bp, Chicken  19866894321894_6
aacaaagaycacaacaccggcctcctattgcatcccttcaagcaacctggaggasgactgcctggctggtcctctcactgcacaatcagcatccagcccgaggctacgagcacgtgrggaggaatggagcagacccagccaggatagcaggaaggtgtgcaggyagggcagtgcggacagcctccagagcaggactatcctgcagggtttgtgctgctggcacaacaagcacacagcacttctctgcctggagagccctctcagaagcaccactcagcataaagggccaagcaaatacasggctacttgggcaaaacaaataaactcagcctacagtgtttgaagaggaagcagaatgagcrcttttctgtgaacacctgcagaatttttatacatagtgtttacattccaaagagaatttgcccttccagcgtggcaagatgatctgacaaatcagttttccaccgagcagtcaaaggaacacgggatgaggtgcactgctgaaaacaggccagtgttaatcatacacacagcttctgcacacatccacacatcacacaggactcccgcacaaagtgcttgatgatttactgacaactg

SEQ ID NO: 61390 - DNA, 600 bp, Chicken  19866894321894_7
tggctggtcctctcactgcacaatcagcatccagcccgaggctacgagcacgtgrggaggaatggagcagacccagccaggatagcaggaaggtgtgcaggyagggcagtgcggacagcctccagagcaggactatcctgcagggtttgtgctgctggcacaacaagcacacagcacttctctgcctggagagccctctcagaagcaccactcagcataaagggccaagcaaatacasggctacttgggcaaaacaaataaactcagcctacagtgtttgaagaggaagcagaatgagcrcttttctgtgaacacctgcagaatttttatacatagtgtttacattccaaagagaatttgcccttccagcgtggcaagatgatctgacaaatcagttttccaccgagcagtcaaaggaacacgggatgaggtgcactgctgaaaacaggccagtgttaatcatacacacagcttctgcacacatccacacatcacacaggactcccgcacaaagtgcttgatgatttactgacaactgccagcctggagccgggtatctctgtgaaaagatgctgacaaaagggagagaagagctgaaaa

SEQ ID NO: 61391 - DNA, 599 bp, Chicken  19866894321895_1
  misc_feature (1)..(54): n is any nucleotide
nnnnnnnnnnnnnnnnnnnnnnnnnnnnnnnnnnnnnnnnnnnnnnnnnnnnnncgaggggaagcgaggcggggcgaggtgaggacaggcggatcgaggcaagtcagggcgaggcggggtgaggtgaggtggggtggggcggggcggggcgtggcgagtggtagcgaggtgggccaagcagggcctggctaggccaggcggggtgaggcaaaacaaggcgagtcaaggcagggtgaggctaggcagggcagggtgaggcggggtgggctgtggtggggcgagggtggacgaggcagggcraggtggggtgaggcggtgcgaggcggggcgaggctaggcgtggtgggccgaggcggggcgaggcagggcgaggcgaggcttggtaggcgaggtggttcggggcggtgcgatgggaagcgaggtggggaaagacggggcgagacgaggcaaggcaagkcgagacagggcaaggttggtcgaggcggggcggggtgagaagaagcgaggtgggttaaggtgaggcgaggcggggcgaggcgaggcgaggtgggacggggcgagacgaggcggggcgaggtggggcgaggcggggtggggct

SEQ ID NO: 61392 - DNA, 600 bp, Chicken  19866894321895_2
gtggtagcgaggtgggccaagcagggcctggctaggccaggcggggtgaggcaaaacaaggcgagtcaaggcagggtgaggctaggcagggcagggtgaggcggggtgggctgtggtggggcgagggtggacgaggcagggcraggtggggtgaggcggtgcgaggcggggcgaggctaggcgtggtgggccgaggcggggcgaggcagggcgaggcgaggcttggtaggcgaggtggttcggggcggtgcgatgggaagcgaggtggggaaagacggggcgagacgaggcaaggcaagkcgagacagggcaaggttggtcgaggcggggcggggtgagaagaagcgaggtgggttaaggtgaggcgaggcggggcgaggcgaggcgaggtgggacggggcgagacgaggcggggcgaggtggggcgaggcggggtggggctgtgcgttccgaggcgggagatgcggatcgaggtggggcgaggtggggcgaggcggggtgaggagaggcgtggcaggcaaggcggggcgaggcaaggtgaggctaggcggggagaggcggggtgcagcgaggtgaggcggggcaaggcgaggcgaggtg

SEQ ID NO: 61393 - DNA, 599 bp, Chicken  19866894321899_1
  misc_feature (1)..(57): n is any nucleotide
nnnnnnnnnnnnnnnnnnnnnnnnnnnnnnnnnnnnnnnnnnnnnnnnnnnnnnnnnagttctcctactttgcttacccctacaccccccccagacacgaatctgagtactggctgcaggttatgtgaacacggaaacagacttactgttcttttaagtatttaacaagagcacatggcatttcagggcacagctagttcaactttaaatacttgcatttccagtagcacggaaaacagctcattcttcattttccatatgagccccatctcattcagccagatcaataattacagagaraacacgtggtcagctagagttagtgacacatgttaagtcaaaaacctgcagcacagctctaagttagatgtattacacaatagctatactaaatgtctttcagtagggcactcttattctgctgtcatagttgtagacagctacaattctaattgttttttattcagggcttaacaagatatttcagtttaacttactttttagaagaaggggatttattttccatgatgatgtatactcattcttcctaagtcctaaaatcatactggagtttgagcttgggaatgttgtttttatta

SEQ ID NO: 61394 - DNA, 600 bp, Chicken  19866894321902_1
tgctgctggtggccccgtgccacaccacatcacacccaactccttacaaacagcctgtttccattttccctttgctctcatttggcggcttaaaggtttctgctccatgagcatcccaaccctcagcccttgctcaccccctctcagaggcacagcggctgccctaccttttcactgtgcttgaactgcttccagaacctatcaaacatttctgggtttgtcttctctgggtagcaggttaccgttttaatgtaaactttgagcattcgttccagtagatgattcacttctgcgtagtcrtagtcatcgtacctgcggggagcacggggcagtcacagccagcacctggccccaaccacacacctctcctgtggtccacctgggacaygtcacagccatggggcaaggacacaacactgggcactgaagccccatttgtgcagcaccttgcagcagccatgcatagtcatagagcagttgggttggaagggaccttaaagcccatccaatcccacccgtgccgtgggctgggcgcctcccaccagctcaggctgcccagggccccttccagcccagccataggcacctccagggatgggg

SEQ ID NO: 61395 - DNA, 600 bp, Chicken  19866894321902_2
cttaaaggtttctgctccatgagcatcccaaccctcagcccttgctcaccccctctcagaggcacagcggctgccctaccttttcactgtgcttgaactgcttccagaacctatcaaacatttctgggtttgtcttctctgggtagcaggttaccgttttaatgtaaactttgagcattcgttccagtagatgattcacttctgcgtagtcrtagtcatcgtacctgcggggagcacggggcagtcacagccagcacctggccccaaccacacacctctcctgtggtccacctgggacaygtcacagccatggggcaaggacacaacactgggcactgaagccccatttgtgcagcaccttgcagcagccatgcatagtcatagagcagttgggttggaagggaccttaaagcccatccaatcccacccgtgccgtgggctgggcgcctcccaccagctcaggctgcccagggccccttccagcccagccataggcacctccagggatggggcaccgcagctctctgggcatctgcatcattatctcttttccaagccaatgtacaaagaacacctccaaacatctgggcacacagcagg

SEQ ID NO: 61396 - DNA, 600 bp, Chicken  19866894321903_1
aaatgcaggaagatctatctgtggagtagaaatgactcccttcagatctatgaagttacttctcagttaagaaggcctgatggtctggtggttggcaaccctgcacatagcaggggggttgaaactcaatgatcatttgtggtccttttcaacacaggctattctataattctatgttgaagaacacaatcaacactgcacgatgccggtaacaactattttaaaaccagatatgcctctctaaaatgaatatgtttatgaagttggaaaaggaaaacccagtggtgacagagaggtagrgccaacttwcttttttttcttttacatcaactaaagaaacatgttstgctggttaaaattaagaagaagaaaaaaagcaagatgtctgatgaatagttctactgatattgactggatttctctgtttctaaaaacacgagcacttcataaatacaccgaaatgttctgtcatcgccagacagaacatgcccggttttctataaatatagacatctggctgggggtttcttctactgttatacatttctggtgtgaagaacgctactttgagagcaaatgcatgtttgaaattaatttcat

SEQ ID NO: 61397 - DNA, 600 bp, Chicken  19866894321903_2
aagatctatctgtggagtagaaatgactcccttcagatctatgaagttacttctcagttaagaaggcctgatggtctggtggttggcaaccctgcacatagcaggggggttgaaactcaatgatcatttgtggtccttttcaacacaggctattctataattctatgttgaagaacacaatcaacactgcacgatgccggtaacaactattttaaaaccagatatgcctctctaaaatgaatatgtttatgaagttggaaaaggaaaacccagtggtgacagagaggtagrgccaacttwcttttttttcttttacatcaactaaagaaacatgttstgctggttaaaattaagaagaagaaaaaaagcaagatgtctgatgaatagttctactgatattgactggatttctctgtttctaaaaacacgagcacttcataaatacaccgaaatgttctgtcatcgccagacagaacatgcccggttttctataaatatagacatctggctgggggtttcttctactgttatacatttctggtgtgaagaacgctactttgagagcaaatgcatgtttgaaattaatttcatatgcgacag

SEQ ID NO: 61398 - DNA, 600 bp, Chicken  19866894321903_3
tctatgaagttacttctcagttaagaaggcctgatggtctggtggttggcaaccctgcacatagcaggggggttgaaactcaatgatcatttgtggtccttttcaacacaggctattctataattctatgttgaagaacacaatcaacactgcacgatgccggtaacaactattttaaaaccagatatgcctctctaaaatgaatatgtttatgaagttggaaaaggaaaacccagtggtgacagagaggtagrgccaacttwcttttttttcttttacatcaactaaagaaacatgttstgctggttaaaattaagaagaagaaaaaaagcaagatgtctgatgaatagttctactgatattgactggatttctctgtttctaaaaacacgagcacttcataaatacaccgaaatgttctgtcatcgccagacagaacatgcccggttttctataaatatagacatctggctgggggtttcttctactgttatacatttctggtgtgaagaacgctactttgagagcaaatgcatgtttgaaattaatttcatatgcgacaggttgcattaaagagcacaaaagattggctaggcagaa

SEQ ID NO: 61399 - DNA, 600 bp, Chicken  19866894321904_1
cggccacttggatcatgggaaaaggattatgatgcttttgttcttcctcttcttgaagacaagcaaccgtgttacatattatacagattagattctcagaatgctcaaggatatgaatggatctttattgcatggtcgcctgatcactctcctgtaagtaataatcatagaatcatagaatggcttgggttagaaaggacctcaagggtcatcgagctccaaacccctgtgccacaggcagggccaccaacgtccacatttaataccagaccaggctgcccagggccccacccaacctgrccttgaacacctccagggacagggcatccacagcctccctgggcagcctgttccagcacctcaccactctcatagtaaagaacttcyccctgatatccaacctaaatcttccctccctcaacttaaaaccattttcccttgtcctgctattatctcccctcctgcttataggctctctttaggtaccttggaaggctgcagtgaggtcaccccgcagccttctcttctccaaastaaacaagcccagcttcatcagcctgtcttcataggggagatgcaaaggacatacaattttaactg

SEQ ID NO: 61400 - DNA, 600 bp, Chicken  19866894321904_2
ttagattctcagaatgctcaaggatatgaatggatctttattgcatggtcgcctgatcactctcctgtaagtaataatcatagaatcatagaatggcttgggttagaaaggacctcaagggtcatcgagctccaaacccctgtgccacaggcagggccaccaacgtccacatttaataccagaccaggctgcccagggccccacccaacctgrccttgaacacctccagggacagggcatccacagcctccctgggcagcctgttccagcacctcaccactctcatagtaaagaacttcyccctgatatccaacctaaatcttccctccctcaacttaaaaccattttcccttgtcctgctattatctcccctcctgcttataggctctctttaggtaccttggaaggctgcagtgaggtcaccccgcagccttctcttctccaaastaaacaagcccagcttcatcagcctgtcttcataggggagatgcaaaggacatacaattttaactgtttttcaacagtattgtttgatccaaatccaagatgagaaggatttggggaatgaagcattccccaaccttcaccacactttctgcc

SEQ ID NO: 61401 - DNA, 500 bp, Chicken  19866894321904_3
caggcagggccaccaacgtccacatttaataccagaccaggctgcccagggccccacccaacctgrccttgaacacctccagggacagggcatccacagcctccctgggcagcctgttccagcacctcaccactctcatagtaaagaacttcyccctgatatccaacctaaatcttccctccctcaacttaaaaccattttcccttgtcctgctattatctcccctcctgcttataggctctctttaggtaccttggaaggctgcagtgaggtcaccccgcagccttctcttctccaaastaaacaagcccagcttcatcagcctgtcttcataggggagatgcaaaggacatacaattttaactgtttttcaacagtattgtttgatccaaatccaagatgagaaggatttggggaatgaagcattccccaaccttcaccacactttctgccaaggaaaatgtggaaacatcttccttgaagctgactctgagtctgga

SEQ ID NO: 61402 - DNA, 600 bp, Chicken  19866894321914_1
gctattgaaatctatatagaggaggctttaattcaaggaaggaaaggtctttcaaacagagccagccagcttgagagatggggctttcaaaggaggaagaaaaagcagcatttgaaaacgatctccttgattctatgttaatcaggaaaactatgattaataaaataattatggaaacaagtagtattggcagagctgtaggactgttcccccttgtcctataaatatcacagtctgtgtaaataaaatccctctttaaatactggaagactacagtgaggtctccctggagcccttttycaggcctgctgcactgaggacctctgtgctactgatgcaatgcttcccagggtggtgtatctgcaagctggaaactttgcaaggcagcgtcgttgagtgtggcatgaggggtcagtgacaacagcccattccctcgttcttcttgtcagccataaataaggaaaacccaacagaggacagtgctgttgctgtggtgtgagyagtaatgattkgcgtggcttttgtttgcagctccaaaagcagggatggggcaggctaagggagctgtgcaggagcagcctgcagcagagctygtgtagc

SEQ ID NO: 61403 - DNA, 600 bp, Chicken  19866894321914_2
gactgttcccccttgtcctataaatatcacagtctgtgtaaataaaatccctctttaaatactggaagactacagtgaggtctccctggagcccttttycaggcctgctgcactgaggacctctgtgctactgatgcaatgcttcccagggtggtgtatctgcaagctggaaactttgcaaggcagcgtcgttgagtgtggcatgaggggtcagtgacaacagcccattccctcgttcttcttgtcagccataaataaggaaaacccaacagaggacagtgctgttgctgtggtgtgagyagtaatgattkgcgtggcttttgtttgcagctccaaaagcagggatggggcaggctaagggagctgtgcaggagcagcctgcagcagagctygtgtagcagtgcccagtgaggctgttagctgcagtgctgcctattcctcttttatttgcttttaatgtgctttggctgcgtagagatgcagggctgcgtaatgagcacaggctgcaatcagtttatacagcaartaggggtaatgtgtttttcttctcacatagtgtcctgcagcccagtgagagctctgggtgggatgctctggcac

SEQ ID NO: 61404 - DNA, 600 bp, Chicken  19866894321914_3
cttgtcctataaatatcacagtctgtgtaaataaaatccctctttaaatactggaagactacagtgaggtctccctggagcccttttycaggcctgctgcactgaggacctctgtgctactgatgcaatgcttcccagggtggtgtatctgcaagctggaaactttgcaaggcagcgtcgttgagtgtggcatgaggggtcagtgacaacagcccattccctcgttcttcttgtcagccataaataaggaaaacccaacagaggacagtgctgttgctgtggtgtgagyagtaatgattkgcgtggcttttgtttgcagctccaaaagcagggatggggcaggctaagggagctgtgcaggagcagcctgcagcagagctygtgtagcagtgcccagtgaggctgttagctgcagtgctgcctattcctcttttatttgcttttaatgtgctttggctgcgtagagatgcagggctgcgtaatgagcacaggctgcaatcagtttatacagcaartaggggtaatgtgtttttcttctcacatagtgtcctgcagcccagtgagagctctgggtgggatgctctggcacttggtattcca

SEQ ID NO: 61405 - DNA, 600 bp, Chicken  19866894321914_4
ccttttycaggcctgctgcactgaggacctctgtgctactgatgcaatgcttcccagggtggtgtatctgcaagctggaaactttgcaaggcagcgtcgttgagtgtggcatgaggggtcagtgacaacagcccattccctcgttcttcttgtcagccataaataaggaaaacccaacagaggacagtgctgttgctgtggtgtgagyagtaatgattkgcgtggcttttgtttgcagctccaaaagcagggatggggcaggctaagggagctgtgcaggagcagcctgcagcagagctygtgtagcagtgcccagtgaggctgttagctgcagtgctgcctattcctcttttatttgcttttaatgtgctttggctgcgtagagatgcagggctgcgtaatgagcacaggctgcaatcagtttatacagcaartaggggtaatgtgtttttcttctcacatagtgtcctgcagcccagtgagagctctgggtgggatgctctggcacttggtattccacatgtatgtcttctgtggatgctgtctgggtctgttttgaccccggtggtgtttcatgccctgggttttgtgctgacttct

SEQ ID NO: 61406 - DNA, 600 bp, Chicken  19866894321914_5
attccctcgttcttcttgtcagccataaataaggaaaacccaacagaggacagtgctgttgctgtggtgtgagyagtaatgattkgcgtggcttttgtttgcagctccaaaagcagggatggggcaggctaagggagctgtgcaggagcagcctgcagcagagctygtgtagcagtgcccagtgaggctgttagctgcagtgctgcctattcctcttttatttgcttttaatgtgctttggctgcgtagagatgcagggctgcgtaatgagcacaggctgcaatcagtttatacagcaartaggggtaatgtgtttttcttctcacatagtgtcctgcagcccagtgagagctctgggtgggatgctctggcacttggtattccacatgtatgtcttctgtggatgctgtctgggtctgttttgaccccggtggtgtttcatgccctgggttttgtgctgacttcttgtggtagctttccactggtgcccaaatcccagctcctgggtgtgcagagggatgttggagtgctgctgttgaacagctgttgatgaagacgtcaggatgtgcgctgtcactgcacgtcagctgatgcagagca

SEQ ID NO: 61407 - DNA, 599 bp, Chicken  19866894321916_1
  misc_feature (1)..(5): n is any nucleotide
nnnnnttttgcttggacagagcagatgattttcccagttgcagggtgatgagcaaagtataaaggaaaacgtagttgaggttttacccttaatacccttgatcccagtgcatgggttttatttgtgtaaagactatctaggacattggggctcccaagcagacagtctgcctccactgcaggggaccagggatctttgccatgactggctttgagatctggagcccaggtttgtgcagtgaatttctgcctgtatgcatctgaagtcccccgcgaggtgagtgcacacagcgaggtcctrtttatttgcactcagaaggcagcagatgaatctctcttctctggaagggttctcagtttgtttcgcaatctgttacaagggttgtgctaattattggaaattttcttatttagttaacagattaaatatagcagccattacagttgatagttaagacaaggtgtaagcttgcaatttctttaaggaaatgcaaaatcaaaggaaattaggaatcataacgcaaagtcagcatcaacccgaccgccttgtcaggatttatagaggccatgaaattgaacaataaaaccaacctttggatg

SEQ ID NO: 61408 - DNA, 600 bp, Chicken  19866894321921_1
tataatcaggatatatatatatatatatatatatatataggatatatatataatacatatattaatgcctcattgttggcatgaatcagctggtaagtatacgaagaatgtatattcttaaagaactccaaagcacagagaaacacagaaataggagactgaagtagcttactgtggtaaatgagagaccatgaacccctaacagataaatttcttgttcctacttaaggcagagcatacaaacatgcacacagagcttcaaacactaccaaacacttatgacagagcaatagagatccktccttctgccctctgcaagtcttacttcaaatatacaatgacagtggaatgtgacagaagtcagtatgtaaaagaaaaccagtaagaccttaagggctcaaacaataggtagatggactgttctttcttgcrtaggcactctttatgcttcttacatggaaagataaaattttatgtggcaacagtcagcttaaagatagtcacatgtggcaaatgaaatgggtgtgcccaacataaaatgttattgctagttagtacaagtacagtaaatgacaatatttacatgccatttacaaatga

SEQ ID NO: 61409 - DNA, 600 bp, Chicken  19866894321921_2
gcacagagaaacacagaaataggagactgaagtagcttactgtggtaaatgagagaccatgaacccctaacagataaatttcttgttcctacttaaggcagagcatacaaacatgcacacagagcttcaaacactaccaaacacttatgacagagcaatagagatccktccttctgccctctgcaagtcttacttcaaatatacaatgacagtggaatgtgacagaagtcagtatgtaaaagaaaaccagtaagaccttaagggctcaaacaataggtagatggactgttctttcttgcrtaggcactctttatgcttcttacatggaaagataaaattttatgtggcaacagtcagcttaaagatagtcacatgtggcaaatgaaatgggtgtgcccaacataaaatgttattgctagttagtacaagtacagtaaatgacaatatttacatgccatttacaaatgacaattattagtaataagtaaaataaacactgagcaggcactgttttgctatcaggaacctatgataaatgctcagcagtaagaggcttaattcaaagtttacctgacgttgaagggaggcttccatcatatt

SEQ ID NO: 61410 - DNA, 482 bp, Chicken  19866894321936_1
ggcattaaggccctggagcatgtccagaggagggcaacaaagctgtgaagggtctggtgcacaagggttttttgttttgctttgttttgttttgttttgtttttatggggagtggctgaaagaactgggattgttcagtctggagaagaggaggctcagggagaccttatcattctctatgaccctctgaaaggaggttgtggtgaggtggatgtcggcctcttctcccaggtaacagcaataggatgagaggtgatagtattaagttgtgccaggggaggttcaggttggatattaagraaaatgtcttctctagaagagtggtgaggtactggaacagactgcccaggaaggcggtgaagtcacgattcctggaggtgttcaagaaacatgtatacatggtacttaggaatacggtttagtgggcaatgttggcggtagttggacagttggactagatgaccctagtggtcttttccaat

SEQ ID NO: 61411 - DNA, 599 bp, Chicken  19866894321941_1
  misc_feature (1)..(14): n is any nucleotide
nnnnnnnnnnnnnncaaatgagttgtaaagggttttcaaaaggtgatcagatgaggctccccagaaagaaaagcagagtcaggggactgggagcttcatttagaattcaatcacatgatttataatatagtataagtgcttgcagctttcagggaattgttatcttctcaaagggagcacaaacaatcatattcagaaatttatacagatatttggcataaatcatctcctgaagattaagagtatcttaacttcctaagaatgaaatacttgcactcagtgatgtatgaagaagtgtgraagaatagataggcaacctgaggtgagaaaagtacttgtcaaaagaaaggtcatttaggacccgtatgacttgtttctgttcctctcttctgcaagtccttggctcatgtgatacttcatgtagaccaattgcagacaaagctcagcaaagtctttcctcagacaggcagattaaattttgcccggcaccttaagaatccaagggaatacctaagatggtgtaaagaacatatttttatgaggcaggtgaagacaccagtgacaaggctctaaagcatccttcagttatgacacacagc

SEQ ID NO: 61412 - DNA, 599 bp, Chicken  19866894321952_1
  misc_feature (1)..(54): n is any nucleotide
nnnnnnnnnnnnnnnnnnnnnnnnnnnnnnnnnnnnnnnnnnnnnnnnnnnnnncttttattaagcaatctctgactatttggataactatccaaatctcagaagacaggctgcagaaggaagatatgcaagaatcaggtttgacacagcctccggaagcagatcagactgctgcccataatattcccagtgtctctgcttgcttttttctttttttttcttctttttggcactagaaatcaaagaccattgtctcctgcttctaacagtgtgtgttgatggaaactaacaaatagaaargttgttggtacaaattaggaattattttagcgcagacatgctgactgtgcaacatctagtaatttacaactgatttggaataaagcaaaagaatcgtagttttatttccagcaggaaatatggatataatggtgtttcacacagaaagagtctgactgacctttgatttttatctggatgcttgctacttttcatccctttagacgaacacattctatacagttttactcttgaaaaaaagatcggagaaatagatcaaggctcagagacaggagcataccagtaagtaaagcaagctc

SEQ ID NO: 61413 - DNA, 582 bp, Chicken  19866894321955_1
tatattttaatgaaaggaggaagactgtactaacagaatcactgaaaattatcaacagtggaaacaggaagaaagcacatctttacatattctaatgcaacaaggtaaattggtaaacatctttctgttcctgagaacgtagactttccaatagaaatggtgaaataagaaaatggacatgcagagcaaaggagcacaatatcagagtgtgaaaaagctaatcctgagcaagagcgagaaaagctttttacattcaaattattacttagaaataaccatattaattgcttaactattacyactaaactgataaagcatattacaatgcacagatactttttagctgtgctaagacatggttgaaaaacttgtaattcccactgcaagtgaaatagaatccattcatccagagtctgaaataaatatacagtatcaatctgtggaatttaaccatacaggatgttacagaaatattatttgatagtggcagaagccagacacagtttgactaccttacaattaatggaattgatagatttatggaaaacatgtatcctgttattgattacaatgaatcacagt

SEQ ID NO: 61414 - DNA, 599 bp, Chicken  19866894321957_1
  misc_feature (1)..(228): n is any nucleotide
nnnnnnnnnnnnnnnnnnnnnnnnnnnnnnnnnnnnnnnnnnnnnnnnnnnnnnnnnnnnnnnnnnnnnnnnnnnnnnnnnnnnnnnnnnnnnnnnnnnnnnnnnnnnnnnnnnnnnnnnnnnnnnnnnnnnnnnnnnnnnnnnnnnnnnnnnnnnnnnnnnnnnnnnnnnnnnnnnnnnnnnnnnnnnnnnnnnnnnnnnnnnnnnnnnnnnnnnnnnnnnnnnnnntgatcttacgtgaaagggtttctgtaaggtacccataaggtgccaggctgaagtagttggcaaatgtggaasagtgatcctggcctagttctgcakcctygatcttccagggacatcccctgtggagcagcacctgcttcctcgaggcggccatctacgcttgtacgctggtctgtgtatcatcacccacaagatgcctcactgctcagttttggggcttttagggataagcagaacactgaactgaaggctacgcacagagatctacttctgtcctaataatacaaatacaaatttagacagtgataggacaagggggaatggttttaagctcaagtagggaagatttagattgcatgtcagggggaagt

SEQ ID NO: 61415 - DNA, 599 bp, Chicken  19866894321957_2
  misc_feature (1)..(204): n is any nucleotide
nnnnnnnnnnnnnnnnnnnnnnnnnnnnnnnnnnnnnnnnnnnnnnnnnnnnnnnnnnnnnnnnnnnnnnnnnnnnnnnnnnnnnnnnnnnnnnnnnnnnnnnnnnnnnnnnnnnnnnnnnnnnnnnnnnnnnnnnnnnnnnnnnnnnnnnnnnnnnnnnnnnnnnnnnnnnnnnnnnnnnnnnnnnnnnnnnnnnnnnnnnnntgatcttacgtgaaagggtttctgtaaggtacccataaggtgccaggctgaagtagttggcaaatgtggaasagtgatcctggcctagttctgcakcctygatcttccagggacatcccctgtggagcagcacctgcttcctcgaggcggccatctacgcttgtacgctggtctgtgtatcatcacccacaagatgcctcactgctcagttttggggcttttagggataagcagaacactgaactgaaggctacgcacagagatctacttctgtcctaataatacaaatacaaatttagacagtgataggacaagggggaatggttttaagctcaagtagggaagatttagattgcatgtcagggggaagttcttcacagagagagtggtgaggt

SEQ ID NO: 61416 - DNA, 599 bp, Chicken  19866894321957_3
  misc_feature (1)..(200): n is any nucleotide
nnnnnnnnnnnnnnnnnnnnnnnnnnnnnnnnnnnnnnnnnnnnnnnnnnnnnnnnnnnnnnnnnnnnnnnnnnnnnnnnnnnnnnnnnnnnnnnnnnnnnnnnnnnnnnnnnnnnnnnnnnnnnnnnnnnnnnnnnnnnnnnnnnnnnnnnnnnnnnnnnnnnnnnnnnnnnnnnnnnnnnnnnnnnnnnnnnnnnnnntgatcttacgtgaaagggtttctgtaaggtacccataaggtgccaggctgaagtagttggcaaatgtggaasagtgatcctggcctagttctgcakcctygatcttccagggacatcccctgtggagcagcacctgcttcctcgaggcggccatctacgcttgtacgctggtctgtgtatcatcacccacaagatgcctcactgctcagttttggggcttttagggataagcagaacactgaactgaaggctacgcacagagatctacttctgtcctaataatacaaatacaaatttagacagtgataggacaagggggaatggttttaagctcaagtagggaagatttagattgcatgtcagggggaagttcttcacagagagagtggtgaggtgctg

SEQ ID NO: 61417 - DNA, 600 bp, Chicken  19866894321957_4
atcccctgtggagcagcacctgcttcctcgaggcggccatctacgcttgtacgctggtctgtgtatcatcacccacaagatgcctcactgctcagttttggggcttttagggataagcagaacactgaactgaaggctacgcacagagatctacttctgtcctaataatacaaatacaaatttagacagtgataggacaagggggaatggttttaagctcaagtagggaagatttagattgcatgtcagggggaagttcttcacagagagagtggtgaggtgctggcacaggctgcccasagcagctgtggatgccccatccctggcggtgattaaggtcactctggatggggccctgtgcagcctggtctagtgccagatttggagttagtggccctgcctgtggcagggggttggaacttgatgatccctggcgtcccttccaacccaaggcatcctatgattctatgatactatgatttggtagtgaagttaccttccatagttaagtataaaacaccaacatgaagcacttggtcttattctctctccaaccaaagcacagtttctttgatggcagttctatatgtctgcctgatc

SEQ ID NO: 61418 - DNA, 600 bp, Chicken  19866894321958_1
cgttctgagccaaggatagtgtgtatgtttttcatccacgttgcacagaaaatgaactctgcttacttacaaagagttagaaagaatgatggaactgatttaattctgtcatagacacctcagtcataattgtctcttagtcactgtcttgagagagaaggatctgcattgttactctcttccaacaatatctcaggctttttaaatttgcggcctcagtgatccttcactaccctcatcttagaggagagatgtgggacagctgagccatcacactcagaaaggtgtggaagcctttcytccagcactcctggctgctcagaagtgcagtctggtcacactgcacagtgagcaatggggctgtgagctgaagcagggatgctgttaggagtagccatgcagtcctttgtgtgtgcatttccctcttggctgaaggctgacttttgcttttggatgggtttgacacctctctgatatttacagattgccctgcacagattggttgcagactgttctaccatgcccagacctacgtgatgtgctatttaaatacatgaccttgggctgaaaatctgccctctgtgtaccgagaragcagca

SEQ ID NO: 61419 - DNA, 465 bp, Chicken  19866894321958_2
cctttcytccagcactcctggctgctcagaagtgcagtctggtcacactgcacagtgagcaatggggctgtgagctgaagcagggatgctgttaggagtagccatgcagtcctttgtgtgtgcatttccctcttggctgaaggctgacttttgcttttggatgggtttgacacctctctgatatttacagattgccctgcacagattggttgcagactgttctaccatgcccagacctacgtgatgtgctatttaaatacatgaccttgggctgaaaatctgccctctgtgtaccgagaragcagcacagagggatgcggacatgcagagaaccgctctgtgccctgagcccccaaaggcatcacacagagccacagatcagacagctctgcttccacccagtttaaaggagtctggagagcagacacctggggcatactggggatcccattactgccagctcct

SEQ ID NO: 61420 - DNA, 600 bp, Chicken  19866894321961_1
acctatttaaaaaaacattttgttaccagcttccgtctctgaggaaggtagaaacatatggtctttcctagttccattaactgttttataaagctccacaatttctatgctttaattataatgatagttttataaaatgaatattttctgaaatcattaatttaggaaataaattctcactgtctagactcaaatgataccataaaaggtcttcctgtgaccatacctgaggctcaaagtacaaaaacactgcagagggcctttgagtcattctgcagccacacatgagcacagcctgcycagggcagcagyactgtgtagcactatcaagaatcgggctcaaaaatgctaaagaaaacaatctggatatcactacattaaacagacatctttggtgttctcaagtcagtctcaaaatcaaaaacacattaaraagcagagctggcatttgctgtcctgtcatcaaatgttgatgctyctggaatggcttgagtcttcctgcagttctgacaggaatttaaacacatacataatatatgtgtgtgtaaattgagtgcagattttttacaataagacaatgaaascaaattctgaacaata

SEQ ID NO: 61421 - DNA, 600 bp, Chicken  19866894321961_2
aaacattttgttaccagcttccgtctctgaggaaggtagaaacatatggtctttcctagttccattaactgttttataaagctccacaatttctatgctttaattataatgatagttttataaaatgaatattttctgaaatcattaatttaggaaataaattctcactgtctagactcaaatgataccataaaaggtcttcctgtgaccatacctgaggctcaaagtacaaaaacactgcagagggcctttgagtcattctgcagccacacatgagcacagcctgcycagggcagcagyactgtgtagcactatcaagaatcgggctcaaaaatgctaaagaaaacaatctggatatcactacattaaacagacatctttggtgttctcaagtcagtctcaaaatcaaaaacacattaaraagcagagctggcatttgctgtcctgtcatcaaatgttgatgctyctggaatggcttgagtcttcctgcagttctgacaggaatttaaacacatacataatatatgtgtgtgtaaattgagtgcagattttttacaataagacaatgaaascaaattctgaacaataatttctaatcaa

SEQ ID NO: 61422 - DNA, 600 bp, Chicken  19866894321961_3
aaaatgaatattttctgaaatcattaatttaggaaataaattctcactgtctagactcaaatgataccataaaaggtcttcctgtgaccatacctgaggctcaaagtacaaaaacactgcagagggcctttgagtcattctgcagccacacatgagcacagcctgcycagggcagcagyactgtgtagcactatcaagaatcgggctcaaaaatgctaaagaaaacaatctggatatcactacattaaacagacatctttggtgttctcaagtcagtctcaaaatcaaaaacacattaaraagcagagctggcatttgctgtcctgtcatcaaatgttgatgctyctggaatggcttgagtcttcctgcagttctgacaggaatttaaacacatacataatatatgtgtgtgtaaattgagtgcagattttttacaataagacaatgaaascaaattctgaacaataatttctaatcaacaaaaaaagtcaagaaaattctgaatttcatattgaacataaataccaggctgacagcactggccatcatcagaggccaaatttaactttaaagcttcagtggtttcctcagccctcagag

SEQ ID NO: 61423 - DNA, 600 bp, Chicken  19866894321961_4
actgtctagactcaaatgataccataaaaggtcttcctgtgaccatacctgaggctcaaagtacaaaaacactgcagagggcctttgagtcattctgcagccacacatgagcacagcctgcycagggcagcagyactgtgtagcactatcaagaatcgggctcaaaaatgctaaagaaaacaatctggatatcactacattaaacagacatctttggtgttctcaagtcagtctcaaaatcaaaaacacattaaraagcagagctggcatttgctgtcctgtcatcaaatgttgatgctyctggaatggcttgagtcttcctgcagttctgacaggaatttaaacacatacataatatatgtgtgtgtaaattgagtgcagattttttacaataagacaatgaaascaaattctgaacaataatttctaatcaacaaaaaaagtcaagaaaattctgaatttcatattgaacataaataccaggctgacagcactggccatcatcagaggccaaatttaactttaaagcttcagtggtttcctcagccctcagagcataaggacaagactcccagctggggagctgctcacagggagcgg

SEQ ID NO: 61424 - DNA, 600 bp, Chicken  19866894321961_5
atgagcacagcctgcycagggcagcagyactgtgtagcactatcaagaatcgggctcaaaaatgctaaagaaaacaatctggatatcactacattaaacagacatctttggtgttctcaagtcagtctcaaaatcaaaaacacattaaraagcagagctggcatttgctgtcctgtcatcaaatgttgatgctyctggaatggcttgagtcttcctgcagttctgacaggaatttaaacacatacataatatatgtgtgtgtaaattgagtgcagattttttacaataagacaatgaaascaaattctgaacaataatttctaatcaacaaaaaaagtcaagaaaattctgaatttcatattgaacataaataccaggctgacagcactggccatcatcagaggccaaatttaactttaaagcttcagtggtttcctcagccctcagagcataaggacaagactcccagctggggagctgctcacagggagcgggtgatctgatcctaaaggcctcaggcagacccaccgtgatggatgggtaaagaccagcaacactactagctaggacttccttgcttttatccacttagtttcttga

SEQ ID NO: 61425 - DNA, 600 bp, Chicken  19866894321964_1
catgaacaataattaagttaaataggaataaactcaggaagccaccagataactggccaagaacagcagctcgagtctattgaactgtcagcattattttcttagaacttgtcacgacctccaactctgcaaacacgttggctctgtaggactgaacatcagttactgacataagaaataatgaagccgttaccatgctccagtactttcagtggaaaccagaagagaatgatggaatggatcagggcattgatgcagtgaccccagaaaacctgagggaaaacaaaccaagtcatcagyaaagtccaaaactcttgacctctctctaactcccaacaaatgcttcattgtgtagttcagagtcagacgatatttttcctaaagtgaaatacctaaactttcctgagatccatttcctcctacaatttctgctctgtcacaagaaaacactggtccagttggatagttttattctaacgagttaaaatgtaacaggcaggcagacttgcaacttaagatgtttatcaaaatacagcagacagatggagtcacctttctttaattatctcaaagactgattctataccatgaagtgttcca

SEQ ID NO: 61426 - DNA, 600 bp, Chicken  19866894321972_1
gatggcattgggtcttgaaggtgtattttgctagagtgtaaatatgcaaaggtcttatacatttaatcaaaataactcacattaatttattagagaaaaagtgggctgcattctggctccaccaccctccaccagcatcatttccaggcaccagcaatgcatctttctgcagcagaatgagtgcaaggccagcagcgagccctgcacaaaggacaccgcagttactggagccttgctccttgtcagcaggagctgcagagatgtcctctgtgtgccggggacacccgcctcttggctgcmaagggtaggagcagcttcagcagcagaagcttgtgtcattggaatagtctgctggatgtagagaaatacaggggtgaaagtgactagaagagtaattctgtctgcacattagtccaaaaagctattgacagcttctcctctgccatgtctgaatagtgctgaagcattactgatccctaatagcagggaaccaagcttctcacacttcaaagtctcactgatgtttggagtgggaagttgatgttctacaacaaattcttttactcttagcacatgcacaaattaatcaaattattgttg

SEQ ID NO: 61427 - DNA, 600 bp, Chicken  19866894321972_2
agaagagtaattctgtctgcacattagtccaaaaagctattgacagcttctcctctgccatgtctgaatagtgctgaagcattactgatccctaatagcagggaaccaagcttctcacacttcaaagtctcactgatgtttggagtgggaagttgatgttctacaacaaattcttttactcttagcacatgcacaaattaatcaaattattgttgaaatccttacaagacacccttcaggtcagaatacagagcttactgttacaggtgggacgggaccttctaaaatgcaaatcattascccagtaatttgggtggagttcgtctccagttccttttatttcaatggcagtgccagtcattcgaatagctttgatgccaatctgtctgtgggagctgctgcttcctgccccaaacctatcttattttctaaagtattctgccaagctgtctgagagtaaacgtgatctcataggcaccctcactcaggtagcaaaaccacaacacggatgtgtgggaaccaaacccacacagagaagccacaactcagaataaatgcaagaaaaccacgtcatactgaaaagacatggcttatggcaga

SEQ ID NO: 61428 - DNA, 600 bp, Chicken  19866894321986_1
gccctgcggagggcaaggaggaaccggagggatggtgtaggagtctacgctcaagttcctctgccatacgtcagcccgtacgcctacgtggccagtgactcggagtactcggcagagtgcgaatctctgttccactccaccgtggtggacacgagtgaggatgagcagagcaactacacgacgaactgctttggagacagcgagtcgagcctgagtgaggtggagttcgtcggggagagcaccaccaccagcgactccgatgagagcggaggtctcatttggtcccagtttgtccagacrctccccatccagaccgtcaccgctccggagctgcatgaaaaygcagcaaaggcctttgtcaaaatcaaagcctcccataacctcaagaagaaaatcctgcgctttcggtcaggctccctgaagctcatgacgaccgtctagtggagtgacttggtggaatgtatctgtttctgctttgggaagcaaggtgcttttgtgtacatatttccacagattttttttttttatacaaatatttaaaacttaaggtaaattatgtcgcttgtcttcagaactggggtggatactagtgccttttaa

SEQ ID NO: 61429 - DNA, 600 bp, Chicken  19866894321986_2
gtctacgctcaagttcctctgccatacgtcagcccgtacgcctacgtggccagtgactcggagtactcggcagagtgcgaatctctgttccactccaccgtggtggacacgagtgaggatgagcagagcaactacacgacgaactgctttggagacagcgagtcgagcctgagtgaggtggagttcgtcggggagagcaccaccaccagcgactccgatgagagcggaggtctcatttggtcccagtttgtccagacrctccccatccagaccgtcaccgctccggagctgcatgaaaaygcagcaaaggcctttgtcaaaatcaaagcctcccataacctcaagaagaaaatcctgcgctttcggtcaggctccctgaagctcatgacgaccgtctagtggagtgacttggtggaatgtatctgtttctgctttgggaagcaaggtgcttttgtgtacatatttccacagattttttttttttatacaaatatttaaaacttaaggtaaattatgtcgcttgtcttcagaactggggtggatactagtgccttttaaatggaaataaaagaccattacacttgtttaaaaaaccataac

SEQ ID NO: 61430 - DNA, 599 bp, Chicken  19866894321989_1
  misc_feature (1)..(210): n is any nucleotide
nnnnnnnnnnnnnnnnnnnnnnnnnnnnnnnnnnnnnnnnnnnnnnnnnnnnnnnnnnnnnnnnnnnnnnnnnnnnnnnnnnnnnnnnnnnnnnnnnnnnnnnnnnnnnnnnnnnnnnnnnnnnnnnnnnnnnnnnnnnnnnnnnnnnnnnnnnnnnnnnnnnnnnnnnnnnnnnnnnnnnnnnnnnnnnnnnnnnnnnnnnnnnnnnnntcctcctcctgagaccctctcccttaggagctgtagttgtaagcatgcagaacatttgcagcttcaggttctctctttcctaagtcttcrctggcgtagaaagcgccgcacttctgctttaggtttctgactaccgtggtgtcctgctagacagaaggagaagaaccaaggctgggggtgtttgaggtgaagtattagtgtggctttttggattgcttgttttatggaatcactgggagtagttcaggttggaaaagaccaccgaggtcatccagtgccaccatcaaccagcccacggggtgcaccaaccggtgggaacatagctggagtcgtgggttaggtgtgtgtcagaaggctgtgccacttgtgtgcatgcatgccgtgttcct

SEQ ID NO: 61431 - DNA, 572 bp, Chicken  19866894321996_1
aaactttactcagggtttgctcacccattactttgtcttttcctcaccctctactccaggtttactcacactttatttcaagttaacttatactttactccaggtttacctaaactttatctcagattttactctcacactttactctgggtttactcttacttttctctgggtacaccaacactttattctgtgtgttcccacaccttaatcttttttttctcacttttgactccaggttcactcagtttactctgggttcactcacactttacttcagttttactcccagtttactcsgtgtgtgcccacactttacacagtattttacttgcaattttcaccagactttactcacattttactcatgatttactcccatgttactctgcatttattctcacatttttctctgttttactaacagtttacactgggtttgcacactctttactccaggtttacccttactcttactttgggtgtactcacaatttactctggatcttactcacagttttctttattactcacatttttatattactcacagttttattcatattactcac

SEQ ID NO: 61432 - DNA, 599 bp, Chicken  19866894321998_1
  misc_feature (1)..(248): n is any nucleotide
nnnnnnnnnnnnnnnnnnnnnnnnnnnnnnnnnnnnnnnnnnnnnnnnnnnnnnnnnnnnnnnnnnnnnnnnnnnnnnnnnnnnnnnnnnnnnnnnnnnnnnnnnnnnnnnnnnnnnnnnnnnnnnnnnnnnnnnnnnnnnnnnnnnnnnnnnnnnnnnnnnnnnnnnnnnnnnnnnnnnnnnnnnnnnnnnnnnnnnnnnnnnnnnnnnnnnnnnnnnnnnnnnnnnnnnnnnnnnnnnnnnnnnnngatgtggtcgtggggagtgtttcttgtctgccagtgcatcctcagcagcctstgctggtgttttctcttccctcttcctactcctctcctgaccgcctgactcctcaaagctggagaggttcctccttctgacttttctgagcactaggcttcctgtgctgagtgcctaggcgaacgctgaggaaacatactaagcagctctgccttccgttcattggctctcttcaggaggctgatgagcaaagataaaccctgcagcggatctcagatggggtaaaaatggaggagattattcaagcctgagtttaatatcaaaaagaaaatctttgctttggggagctagtaagaaaa

SEQ ID NO: 61433 - DNA, 600 bp, Chicken  19866894322001_1
gtcgttttgtaaatgcttctacagcttcataccaagcaccggcttcacactgtcattaattacaacaaactgcatgtgattagaagcatctccctctaaatgatagtgcatgtttattttgtcctgaacttagcatacttgaagaacctcaggcagcttatcaagtatcttaattaaaaaagcactcagtgctgcattttaatagcttccactttttgtttgtaatgcctctaaaaactctggagttgttcatcttattcgtattgctcttttccacttggctaataaagctctgttgtwcctagctcagctagtactgcaggccttaaggtgaatcastgcatcttgatggctgactgaagtgaggtgaatcctacactatgtggctatgtggggagacaagatagggtagttcacatgaagatcatgttttgttcctaatagttttatagctttgaagcttactcagtatagtaggttaacgtgaaaagcaggttgttgtctaaatggatacactaacttggttccagaggaatgagatctggaattagtaatcaaggaaaggtaatacaggtgatacagtacggaagtagttctact

SEQ ID NO: 61434 - DNA, 600 bp, Chicken  19866894322001_2
cggcttcacactgtcattaattacaacaaactgcatgtgattagaagcatctccctctaaatgatagtgcatgtttattttgtcctgaacttagcatacttgaagaacctcaggcagcttatcaagtatcttaattaaaaaagcactcagtgctgcattttaatagcttccactttttgtttgtaatgcctctaaaaactctggagttgttcatcttattcgtattgctcttttccacttggctaataaagctctgttgtwcctagctcagctagtactgcaggccttaaggtgaatcastgcatcttgatggctgactgaagtgaggtgaatcctacactatgtggctatgtggggagacaagatagggtagttcacatgaagatcatgttttgttcctaatagttttatagctttgaagcttactcagtatagtaggttaacgtgaaaagcaggttgttgtctaaatggatacactaacttggttccagaggaatgagatctggaattagtaatcaaggaaaggtaatacaggtgatacagtacggaagtagttctactgcttgtttgaaataaactgaagtaataaatcttagaaga

SEQ ID NO: 61435 - DNA, 600 bp, Chicken  19866894322007_1
tttgtttgtctaattgaagtgcagaaaactgatgccttgtcacctgagacttatttcctttacttctgtgaaagctggtggaacagccaaatgtgaatatcttagcaaatttccacttagttcttcacagaaaaagacagcagtggtgaacttattttcatcctgcaatgactgtccttgccttctttcctctccaaatgcagtgttcagatttctgacgttgtcctctcattgtgacagtctatctcctcaatcttttctctcattcttaattcctgcagctgatttcaagatttcttratctcttcaacagttcacacagattgatcaagacctgatcaatcctgtctacagacgcaaaagagtgtcattaagtggaatgcctgaccagtatgagtggcgataaataacaygtatttttcttgctgatatttcgccagcatgttttaaggctgatagaagttcctgagagcaggtgctccatgccatcccaccataccaagtaactatgccaggcatgtgcaatctgtgagctgtatgcaactcagtacagctcacagtgtggctctaccccagcgcatgccatcactgtggtggctc

SEQ ID NO: 61436 - DNA, 581 bp, Chicken  19866894322007_2
cacttagttcttcacagaaaaagacagcagtggtgaacttattttcatcctgcaatgactgtccttgccttctttcctctccaaatgcagtgttcagatttctgacgttgtcctctcattgtgacagtctatctcctcaatcttttctctcattcttaattcctgcagctgatttcaagatttcttratctcttcaacagttcacacagattgatcaagacctgatcaatcctgtctacagacgcaaaagagtgtcattaagtggaatgcctgaccagtatgagtggcgataaataacaygtatttttcttgctgatatttcgccagcatgttttaaggctgatagaagttcctgagagcaggtgctccatgccatcccaccataccaagtaactatgccaggcatgtgcaatctgtgagctgtatgcaactcagtacagctcacagtgtggctctaccccagcgcatgccatcactgtggtggctctgccctgcagagtggcccagccttgccccaggcacacaacccttacccaagcaaatatgggctcttcttaggaggaagtttttcacacagaggg

SEQ ID NO: 61437 - DNA, 600 bp, Chicken  19866894322009_1
gaaaccacaaggtcattcaaaaaggctcataattcatatgtatatccttataactcttgatttttaagccgaaatcatgatgtttggaggcccaactcaagtcttatgaattcctagaggctgacagtaccgagtgagaaaagggcaaaattagcacatgggaagaaagagggttgccaaaggtatgagagcaagtcagtgggagagccaggcctcctgcctcctcgccccaagtactagccacattgtctggcctccttccccaaaggaaactaagaggccttaaagaaatcctagctrtttyagtcttgtgtttccatcttccttttgatgctcttattttcagcaacatgtacatttcgcagcatcctgctgctccccatagggtattattccatctctggggctcgtggccatgatagtgtgtgctgatgacagctgtgggagtttgcaagtagcttaacatttgcatgccatgaatatgcagctctgagcatggcccagttctctgtgcagccatcctgtgcacgtttacaagggacggcagcatcctgcatatttcaggatcccaggagacaccagttcctagtgccttaggtg

SEQ ID NO: 61438 - DNA, 600 bp, Chicken  19866894322009_2
ccacaaggtcattcaaaaaggctcataattcatatgtatatccttataactcttgatttttaagccgaaatcatgatgtttggaggcccaactcaagtcttatgaattcctagaggctgacagtaccgagtgagaaaagggcaaaattagcacatgggaagaaagagggttgccaaaggtatgagagcaagtcagtgggagagccaggcctcctgcctcctcgccccaagtactagccacattgtctggcctccttccccaaaggaaactaagaggccttaaagaaatcctagctrtttyagtcttgtgtttccatcttccttttgatgctcttattttcagcaacatgtacatttcgcagcatcctgctgctccccatagggtattattccatctctggggctcgtggccatgatagtgtgtgctgatgacagctgtgggagtttgcaagtagcttaacatttgcatgccatgaatatgcagctctgagcatggcccagttctctgtgcagccatcctgtgcacgtttacaagggacggcagcatcctgcatatttcaggatcccaggagacaccagttcctagtgccttaggtgacat

SEQ ID NO: 61439 - DNA, 600 bp, Chicken  19866894322014_1
ctgatgtgcactgactgcattttcatatgaaattaaatagacaggagcctcagctgagaaggttgcacacttctggactatgacattattttgagagtgtgctgtctacatgtttacagcctagtgtaattcaatctctgcacaataaatagactcaaaacaccagctaccgttgacaactaaaccgttttaaaaagcatgtgaatacataaaatcttcctttaacactacagataatacaaaataaacccaggtttttactgaggaaaatataccctgtaaaaggtaattctctatctygctcagtaactggtaactggacatctccaccagcccatgattaaccatttgcttttactaacacctgggaccataacaggtccattagcatttctgcacttgttggagagttcactcaaaaagttttaaggatacaaaatatacataataacaaagtaaactgtatgaattgtgttatttattaaatacgtttagtatgtttaaagctgtaccacatatggatttgcttttaacagttattgcaagaaagaacttgcctaggaagtagatcagaatatatttatgaaatgcaggaagaaa

SEQ ID NO: 61440 - DNA, 600 bp, Chicken  19866894322014_2
tggtaactggacatctccaccagcccatgattaaccatttgcttttactaacacctgggaccataacaggtccattagcatttctgcacttgttggagagttcactcaaaaagttttaaggatacaaaatatacataataacaaagtaaactgtatgaattgtgttatttattaaatacgtttagtatgtttaaagctgtaccacatatggatttgcttttaacagttattgcaagaaagaacttgcctaggaagtagatcagaatatatttatgaaatgcaggaagaaactgactgctyatattcttattacccagaatgtgagatccataaatattaatgttattttaaaaattatagttcttatgttgtattatggatatttcatgtgaaagaaggaagggaactattagggagaaaaaccggaaaatggtcaggttgtgacagttaagtaaatgagaactgatatgtgaagccatatgaatattagtagcctcccatgttgtcactgtaattttcttccttgaatgaaatgtcttccttgaacttctgacttttggagtacagcaaaaaggttcaagaaggcagattatcacaaat

SEQ ID NO: 61441 - DNA, 600 bp, Chicken  19866894322017_1
ctaaattatagagtttccaatgaaagtgtgataaattaagcttatgacgtgagttaatctttatggcctataaaaaagcattttctacatatataataaagttgttagaaccacagaatcattaaggctagaaaagatctctaaaatcctcctgtccaactgtcaatgcattgccactgagggacatgctatcagtgccacacctggatagactggatcaaagggccaaggtaaactgtatgagtttcaatagggccaagtgtcgggtcctgcattttggtcacaacaaccccaggcaaycctacaggcttggggaggagtggctggaaagctgcctgatggaaaggaccttggtgttctgatggacagtcagctgaatatgagccagcagtgtgcccaggtggccaagaaggccaatggcatcctggctggtatcaggaaaggtgtgggaagcaggactagggaagtaatcctgcccacgtacttagcattggcgaggcctcaccttgagtactgtgttcagttttgggcacctcagtacagaaaggaatggaggtgctggagcaggtccaaagaagggcaacaaggcttgtgaagggg

SEQ ID NO: 61442 - DNA, 599 bp, Chicken  19866894322030_1
  misc_feature (1)..(137): n is any nucleotide
nnnnnnnnnnnnnnnnnnnnnnnnnnnnnnnnnnnnnnnnnnnnnnnnnnnnnnnnnnnnnnnnnnnnnnnnnnnnnnnnnnnnnnnnnnnnnnnnnnnnnnnnnnnnnnnnnnnnnnnnnnnnnnnnnnnnnnnnntgtattttattgggccttaatatacgtcttgaatggctgaaggcacccaaggcgtgtattaatggaacaataaaatacactgttgtctcttcatgctatatttatgcctaaagcaatgccaccacctcgggctcttgctggaattcacaggcaaagcagggayacatccaatcaaaaagtggacaagtgaacgcyaaggaaaatctaatactgtaaaaagggtttccagcaattctctaagtcccacttctcgttctgcgttacaaatacactgagtattcccatgaagtacagaaggtgttgggtaggagcaggacaggagcactgtccccttgagcctgtgccaatcctgacgccttgccaaggaagctgagcacgcagcaatatgctgaggctctgtcttctggctacagcctgaaaatgggttctgcctgatggtgaacccctctgctgacctgatgc

SEQ ID NO: 61443 - DNA, 599 bp, Chicken  19866894322030_2
  misc_feature (1)..(105): n is any nucleotide
nnnnnnnnnnnnnnnnnnnnnnnnnnnnnnnnnnnnnnnnnnnnnnnnnnnnnnnnnnnnnnnnnnnnnnnnnnnnnnnnnnnnnnnnnnnnnnnnnnnnnnnnntgtattttattgggccttaatatacgtcttgaatggctgaaggcacccaaggcgtgtattaatggaacaataaaatacactgttgtctcttcatgctatatttatgcctaaagcaatgccaccacctcgggctcttgctggaattcacaggcaaagcagggayacatccaatcaaaaagtggacaagtgaacgcyaaggaaaatctaatactgtaaaaagggtttccagcaattctctaagtcccacttctcgttctgcgttacaaatacactgagtattcccatgaagtacagaaggtgttgggtaggagcaggacaggagcactgtccccttgagcctgtgccaatcctgacgccttgccaaggaagctgagcacgcagcaatatgctgaggctctgtcttctggctacagcctgaaaatgggttctgcctgatggtgaacccctctgctgacctgatgctttctgcaaaagacggagctgcatcactgcta

SEQ ID NO: 61444 - DNA, 600 bp, Chicken  19866894322033_1
gggagccagggccacatggagcacaagtgctcccatatgccggcacgaggcagggctcagctctgggcctcaggacgcaccggtgaagaagatgtagtcaaacttgttctccagcagcctggtggtctcctccacgccagcagtcaccacagcaaagcagtcctgtggtgtaaaaggaaaaatccccatgtcagcatctgcctgagccaatctgtcccggtccccattagcagcagcctgagctgctcagatcacaaacactggctgagcatggagcaggcatggcagcaccccagagcrgggcagccgtgatgctggtgcatgcaaattggtgtgagcaggggttggaatgccctggccacaggcaggggtaatgacagggacaaggagaatttcttacactgtccaggtagcaggtcagcatttcagccacaagcctctcagtgttcttggatatctctgagggtttgatgaccacacagtttcctggggggagacagagagaacgtcagagcagtctaaactagggacagagaccccatccaggtcccctygcctgcatcctccaggcaggggatgtgcctggctctctgcagcctg

SEQ ID NO: 61445 - DNA, 600 bp, Chicken  19866894322033_2
caaacactggctgagcatggagcaggcatggcagcaccccagagcrgggcagccgtgatgctggtgcatgcaaattggtgtgagcaggggttggaatgccctggccacaggcaggggtaatgacagggacaaggagaatttcttacactgtccaggtagcaggtcagcatttcagccacaagcctctcagtgttcttggatatctctgagggtttgatgaccacacagtttcctggggggagacagagagaacgtcagagcagtctaaactagggacagagaccccatccaggtcccctygcctgcatcctccaggcaggggatgtgcctggctctctgcagcctggcctcaccagcagcaatagcaccaatgaggggtacaaggaggaggtggatggggtagttccagggcgcgatgatgagcaccaccccataggggtctttgcggatgaaagctgagtccagctgtgttacctgcaagaaaggcgcctcagtgctgctcctgaagcagctctgccccttcccagttggcctcccgcttgcaaggagccagagattctgccctaccaggttcttgtccacgtgctcgtccttcgccca

SEQ ID NO: 61446 - DNA, 600 bp, Chicken  19866894322033_3
aggagccagagattctgccctaccaggttcttgtccacgtgctcgtccttcgcccagtgagacaggttgttgagggtgtcatggagctcattcttgcagaggagaatctcggtgaaataggcctcaaaggatggctggggacagacatcagcatcagcatcaccccaacatcagcaccatctcctcccacccacagatgtctccctttctcctgctcacgaaggcagagcagaagaagctattaaggagaagctattaagcagaaagagctattagccctgcagctactggggagtatcrtggccaccaacattttataacagttggtatttggtcagagagaaaaataatatttgatgtcttttgggccacactgtgctctcacactggtaccactgcccttgaggccacaagttgctgccttctgaccacttgggagctggaggcagagcctagtgcctccttccactgcctccgcgcagccgctgggctcaaagctctgcattgttccagcaggaacgcgatgaagaccgaacacttcgtgactgagctgggctgygcagcaccaggcaggaaaatccctgcagctgtgggcctcct

SEQ ID NO: 61447 - DNA, 600 bp, Chicken  19866894322033_4
gcagaaagagctattagccctgcagctactggggagtatcrtggccaccaacattttataacagttggtatttggtcagagagaaaaataatatttgatgtcttttgggccacactgtgctctcacactggtaccactgcccttgaggccacaagttgctgccttctgaccacttgggagctggaggcagagcctagtgcctccttccactgcctccgcgcagccgctgggctcaaagctctgcattgttccagcaggaacgcgatgaagaccgaacacttcgtgactgagctgggctgygcagcaccaggcaggaaaatccctgcagctgtgggcctcctgtagcgagccggaacacggccgggccgggcaggttgggtgagacatggggaggaaacaaacccagcaggttgctcccagatacgccatctcaacacgtggtgactaaaatcgctgtgaattgggagcggcgcaatcctgccgaggcatttcctgcccacacaggtcctctccattgacagaaggatggcagagtcggtttgtgatggagaagcacgaggacacgaggagttagctcagaaggaccaacttcccctccat

SEQ ID NO: 61448 - DNA, 600 bp, Chicken  19866894322041_1
agtttgactataaagctattatagaatacagatcaaaatatgctgcaagcaaaactaacttgtcctttataatacaagtctaatgtaataagagtactcaaaaaaaacaaaaaaaactctaagaaaaacatcacacaccactccatcaacgtgctagatgtcctaaccaaatttaccaatggcacgcaatagtgcgtctttgctgtgctgctatcttctcttaccatttccctgcctcacctgctgactctttagatcctacaaccttaaaatagtatgacaagcaattatggttaaggrcaccgagcactgccaygtcagttcagaaagatgatggaaatttaaggattaggatacttttagacaaatatctgaagtatctctacgtaattatttcttaatacataatggactcataacaattctgcagatgctcttcagagaggaaaaacaaatgaaagaactcattctaagcttttaaataatctttttttcttttaattaagcaacttgtctttctacataaacagctcatttcaaaaggagggaatcacctgaaaatatttcatggctactagctctaaccttacctttagaaat

SEQ ID NO: 61449 - DNA, 600 bp, Chicken  19866894322041_2
tattatagaatacagatcaaaatatgctgcaagcaaaactaacttgtcctttataatacaagtctaatgtaataagagtactcaaaaaaaacaaaaaaaactctaagaaaaacatcacacaccactccatcaacgtgctagatgtcctaaccaaatttaccaatggcacgcaatagtgcgtctttgctgtgctgctatcttctcttaccatttccctgcctcacctgctgactctttagatcctacaaccttaaaatagtatgacaagcaattatggttaaggrcaccgagcactgccaygtcagttcagaaagatgatggaaatttaaggattaggatacttttagacaaatatctgaagtatctctacgtaattatttcttaatacataatggactcataacaattctgcagatgctcttcagagaggaaaaacaaatgaaagaactcattctaagcttttaaataatctttttttcttttaattaagcaacttgtctttctacataaacagctcatttcaaaaggagggaatcacctgaaaatatttcatggctactagctctaaccttacctttagaaatgtctttttaaatagct

SEQ ID NO: 61450 - DNA, 600 bp, Chicken  19866894322041_3
tacgaatgcttgtattaaggaagaataaaaacagaagagtccatccagaagctctctcttatttattcttcagaatcatattaacaagttaaaaacattaaggcttcccagctaaaacatgcatcattcttgggagccacatgacgatttaaaacctcagcagagaaatggacattttctacaggttactgacttccataaacaacacattaagaaaaaactagttgtaaaaagctttgagatttaacacagatttattctgccaaagtactgactaataccttcaaccacttcctactkcaaaccagtagatgaacctatgccagatcttaatggactccattatgtgacagttttctgcagaacaaaggcatgctttagccataaggtaacagtgagttactgtcactcagcctctacttactaacatgsagcccagcgcctcatttgtcatttggacacgagggcccggaacctccatgagagtcaaacatctgaagactgaaaacaggtcagaagaaaaggtggttaatatgattttgcttcagatgagttttcataggttcctcagcagaagggggaaccattttcagtttctta

SEQ ID NO: 61451 - DNA, 592 bp, Chicken  19866894322041_4
ggagccacatgacgatttaaaacctcagcagagaaatggacattttctacaggttactgacttccataaacaacacattaagaaaaaactagttgtaaaaagctttgagatttaacacagatttattctgccaaagtactgactaataccttcaaccacttcctactkcaaaccagtagatgaacctatgccagatcttaatggactccattatgtgacagttttctgcagaacaaaggcatgctttagccataaggtaacagtgagttactgtcactcagcctctacttactaacatgsagcccagcgcctcatttgtcatttggacacgagggcccggaacctccatgagagtcaaacatctgaagactgaaaacaggtcagaagaaaaggtggttaatatgattttgcttcagatgagttttcataggttcctcagcagaagggggaaccattttcagtttcttattctggtttttgataggccttcaaggggcttgtcaaggcctccactcctacatttaaagcaggttagtaattcatggctcaaatggatgctgttgaaaacgaagtcataaataatgaaacatga

SEQ ID NO: 61452 - DNA, 597 bp, Chicken  19866894322044_1
cagcacttcagagaagaaaaatgcaaatcccagaggaaatcatgacatattaacccctggaagtctttatgtgacttaacagtttattcagccctttttccctcgatataaatgcaagaactatattaagtcagcagaactaatagattttagcacttctacttttaagctttttgtttcccaatacttttatatacaccaggaagggttgattaaatcatactgtcagttttcagaagtgattggcatgagcttaaatccatgtcttagttgtgggtatgaatcaccatacatatgggktttgtgggacaacatcttggcagaggttagcagtaaaacagctctttaactaactcaaaacctcattactaagcactctacagttattaaacctaacaagacataaaacaactgttgatttcttggccaaaaggtccaggagggaaagaaaaaacttcagataattttgagtgttcatatatcaactcattaatattatgtaaactgaaaattagcatcttggtttttggacttcgtacttagccaatgaagtctactatatggatgaatattatatatatatatacatgtacgttt

SEQ ID NO: 61453 - DNA, 599 bp, Chicken  19866894322045_1
  misc_feature (1)..(158): n is any nucleotide
nnnnnnnnnnnnnnnnnnnnnnnnnnnnnnnnnnnnnnnnnnnnnnnnnnnnnnnnnnnnnnnnnnnnnnnnnnnnnnnnnnnnnnnnnnnnnnnnnnnnnnnnnnnnnnnnnnnnnnnnnnnnnnnnnnnnnnnnnnnnnnnnnnnnnnnnnnnnnncattgaaaaggcaaagtgctgagctaatattttgctgcaggctagaaagtccagctggaacgtgaagtttgctagcctgcagtttccagaaagttggggctagaagggcacggccaaataagatggtagctgtgtgtctgakggctcccacttgggccagcatgtgaagtccttctgtcccttcttcgtaaagagatttaattttagctagaacaaattgtttgacttcagggcaaacaggatgtatgagacataggagaaaaaggtatctctagagagtagcggaagacttaggagacttcagggaacttgcatttttgaggtgttcctttgcaaacacaagaattacggtctttgtttttctgctctttttccataaatggcagttcggatgccaagtgagaaacttgtgggttcataagctttgctaccagtccgccc

SEQ ID NO: 61454 - DNA, 599 bp, Chicken  19866894322047_1
  misc_feature (1)..(58): n is any nucleotide
nnnnnnnnnnnnnnnnnnnnnnnnnnnnnnnnnnnnnnnnnnnnnnnnnnnnnnnnnngatccatatgttattctataacataaaagacttatttttattatactaaaaagctggtttgaaaaccaataatctttttttcttttctgtttccttgacaatgctattgattttcttgtcaaaccgcttgtgccaatagtagagatgcgtgccctgataatcatctcagacaggacagcaacatgactgctggaagtggctttggctggtactgaaatactagtttagtgaaaaccatgggrycttgcaaatggaggcccaaagaaaaatgatctaacgtccaagcatgcttctccatccaacctctgtatgtgaacctcaaattcacatagcccatgaaaatgagcacttgtagaaagactacagttttaatttccctctgtgtctcttctaggtttagattcacatagttctgaaagccaggcaccttaggaagcctggactatgggacagcaaaacagccagctcgtagctgtgcatactgtctgcaggccaggtcttctgagctctattgacttttctgtctgtttttagaggtttt

SEQ ID NO: 61455 - DNA, 599 bp, Chicken  19866894322047_2
  misc_feature (1)..(57): n is any nucleotide
nnnnnnnnnnnnnnnnnnnnnnnnnnnnnnnnnnnnnnnnnnnnnnnnnnnnnnnnngatccatatgttattctataacataaaagacttatttttattatactaaaaagctggtttgaaaaccaataatctttttttcttttctgtttccttgacaatgctattgattttcttgtcaaaccgcttgtgccaatagtagagatgcgtgccctgataatcatctcagacaggacagcaacatgactgctggaagtggctttggctggtactgaaatactagtttagtgaaaaccatgggrycttgcaaatggaggcccaaagaaaaatgatctaacgtccaagcatgcttctccatccaacctctgtatgtgaacctcaaattcacatagcccatgaaaatgagcacttgtagaaagactacagttttaatttccctctgtgtctcttctaggtttagattcacatagttctgaaagccaggcaccttaggaagcctggactatgggacagcaaaacagccagctcgtagctgtgcatactgtctgcaggccaggtcttctgagctctattgacttttctgtctgtttttagaggtttta

SEQ ID NO: 61456 - DNA, 450 bp, Chicken  19866894322047_3
aagaaaaatgatctaacgtccaagcatgcttctccatccaacctctgtatgtgaacctcaaattcacatagcccatgaaaatgagcacttgtagaaagactacagttttaatttccctctgtgtctcttctaggtttagattcacatagttctgaaagccaggcaccttaggaagcctggactatgggacagcaaaacagccagctcgtagctgtgcatactgtctgcaggccaggtcttctgagctctattgacttttctgtctgtttttagaggttttaagattcctgtggtttaaartgattttgttggaaataccacatttagcctataggacataaaaagaatcggaggagtaacttctctgtagctgttattcccagggaaactgagaatttatccaagtaaagtgaaaacaaactgagattgtttgcatgaagcagacttgga

SEQ ID NO: 61457 - DNA, 600 bp, Chicken  19866894322049_1
attttttttcccacagtttcagtgcagaccacgcgtgccatcaatatttggtcaattaattcaataggcttacaatggaacatctgcatgaaagttttttctaagcatttcttatttcccaggagaaagagaaacattttttcctttgggcttcttggttacacaaatctcagtgcctactcttttatcttcagtaggaacttaaaaagaaaaataacatttttagattaaaatctattgcttcccatttttgccatactctatttttgaatttagtctagaaaacgtagacagcagctrattaaacaagcactccttgtgctgtcagggtttattctagggcctacttcagtcttacaaaaaaacaaacatgcagatagacaaagccccaaaatgaaacaaaaacccacaaagagaacaaattcttttaaacaccagtctaaaatgactactctccacctttatcagagctatcaacagtcagatctctgtgacagtcagagagactaactgctgacagcagtcctcagcttccttctgtgcaacagacacacagatgccaccttctaaagtcagcctgatgaaacttttcatgtcgaa

SEQ ID NO: 61458 - DNA, 599 bp, Chicken  19866894322051_1
  misc_feature (1)..(22): n is any nucleotide
nnnnnnnnnnnnnnnnnnnnnnccctatggaaaacacaccactaacaactgccttgccagtgaccattaacgcagaatcttttactgcatatccccattatgatccaaacatacagcttctgtagagatgcacgttgcagctttctacacctgtgaagaccaaacttcagaaggtattcacagagactaagttcatcaacttataacagctaattcaaaaggcttcgaagagtctatacctaagactctaatctgtgtatggtttcctgttctcagatcacccctcagtcttttctcaargctgaacagacccaggttgctcagcctttcctcataagagaggtactccagaccctttatcatctctgtggccctctgctggactcttcccaggaatccttgtctttattgtactggagagcccagaactggatacagtaccccaggtgaggcctcaccaaggcagagcagacggggaggatgacctcccttgacctgctggccacactccttttaatgcaccccaggatgctactggccttcttggccgccagggcacactgctggctcatggccaacctgctgtccaccaggaccca

SEQ ID NO: 61459 - DNA, 600 bp, Chicken  19866894322057_1
aaaacagcacgttgtgcccaagtatttcaatggagtcagaaggtgtgtcttattccctcccgccccaaaacatccctatttataggtgtcagaagttggcaggtacatggaggaggagcagctgccgaggcctcacacactctgcacagcaacagctctgttgtaacagattaacaggcagagagagagagagagagagagagatgggaaagcgctgcactttccttctttacacacgtccctgctttcaggcacagcctcacagtggcaatgacagtcacggtgtgtctaaagccaagsaggacaagagccaaggcctgcccaccccagccatggcggggtccagcgtggaggaggcggccgaggaatcgctctcctaaggacagggcaagtatcagtaaagggggagggcggtcagcgtgtcagagaaacggcaaagttagttttcatttcctgtcggttttaatctcatcaagaggctttgctagctgctacttccattttctggcctgcctgctgaggactcactccctgtgcccgacggcagcaggcccctgctcagcgcagccctggtgcccacagacccacccctcgccgaga

SEQ ID NO: 61460 - DNA, 600 bp, Chicken  19866894322057_2
gaggcggccgaggaatcgctctcctaaggacagggcaagtatcagtaaagggggagggcggtcagcgtgtcagagaaacggcaaagttagttttcatttcctgtcggttttaatctcatcaagaggctttgctagctgctacttccattttctggcctgcctgctgaggactcactccctgtgcccgacggcagcaggcccctgctcagcgcagccctggtgcccacagacccacccctcgccgagaaccaggctgcagccccaaatccctgccccgtcccacctcacagctggacaaaygagcacacgtcagtgcttccactgcttagaagagagaaacgcactgagtgtgtgaaagcagacatgtgacttttcttccacggtctcagatcttcctgctaccccttgaggggtctggccatccaaaaacaactctgtgctcatttagccgctggattttacactcagtgggctcttcgattttcttggaactcccaatgcactcctgtgctctctgcaggtgatccctgaaacacaccgcaccatttgcacgtgggcacagagagcttgctaacctgatgggaattagtgacaaattgc

SEQ ID NO: 61461 - DNA, 580 bp, Chicken  19866894322057_3
gagagcttgctaacctgatgggaattagtgacaaattgcgatcacagccgggcgcaggctcagcaaggtccagataagtgctgcacctatgtgactcctcagaacaaattaatgacaattactgatagctctgcaaaaagggttcatatgtccctcggccacagcgcgctggtaatataagcatttatgtgcactggctttcaaaagcagccatcaaatcactcagccatccaacccaagatgcgagacgcagcctggcagggggtgaaaccctgcagcaaaggtggctgaggacaggcrggcgtcgagctaggagagcagaaggcaaaggtacaagcgatagagcacagggttcgtgttgcttaaacagcacagtgtgtgccaggagcagtaattcctaccctgggtgaactgtgatcaggagcaacacccgaagtcatgtgcagcagaggaagccatggctaaaagagatggaaaaggaaaaatcacccactcctcagcctgagcacttctctgaagatttatctcatccttaattccttccccagtttccaagaactgccagtccatgcacacagcg

SEQ ID NO: 61462 - DNA, 599 bp, Chicken  19866894322061_1
  misc_feature (1)..(63): n is any nucleotide
nnnnnnnnnnnnnnnnnnnnnnnnnnnnnnnnnnnnnnnnnnnnnnnnnnnnnnnnnnnnnnnacttgtaacattttgttacagtagttaccttgtatcagacaacttgacggcagtaaactgttcaggaggactagggccttcgtcatcttaggaatgaacgttccattagttacgtagtatgtgttacacacagtatttaacctgttaacactgcagtttcaaacaagctgaaaaacaatacaactgccactgctaaatactacggaaatccgcaatactgcatttctttaacaattyctttagaatatccacattctttaagaaaaacaatggaggtgcttacttacattcaagtaaaacagaacaaatataacccttgttctaaggaatttacagtcaataatgttttgcaattctccaggtgacgttgaaaactgcaattttgttgtaatattattttctcaataataaaattatagtttgtctccagcaacagagccctaaaccctaacaagctactagcctctccattcctcaaaaccaaagtgagataatactgtcattgctggtttgaactcattctaaagatgaaatac

SEQ ID NO: 61463 - DNA, 599 bp, Chicken  19866894322070_1
  misc_feature (1)..(58): n is any nucleotide
nnnnnnnnnnnnnnnnnnnnnnnnnnnnnnnnnnnnnnnnnnnnnnnnnnnnnnnnnnttaaactctaagggaatcccaacagctaggatccttctccagcctgtaggtttttctgcatatttcaggcttacatcagttaacagcacatattgtgttgaatttaaatgcatgcttgagatctagatgagagtttataacacctgcttaggtttctttaaataaaaaaagctattcctctaactttgattgtgcctctgctttagaagtttacttctgttctaggttaaactactatatgrcatcaaggaactgtaagaaactattcctcatgtcttttgccaaarcttctatatttccaaatacctaaaaaatgtgaacaccacttttagtgcataagggcataaaggccaaaaaacaactcagaatgaataatttcatacctgtgcagaagagacaagaacaactcaaagaccactctttttgtagatcaggctgagtgcaattgccaaggcccaaaaaaatcagttatgaaaacgtcaaatttaatggttcctaaatgcagttttactactggaaaacaaaaacagataaggaaaat

SEQ ID NO: 61464 - DNA, 599 bp, Chicken  19866894322070_2
  misc_feature (1)..(13): n is any nucleotide
nnnnnnnnnnnnnttaaactctaagggaatcccaacagctaggatccttctccagcctgtaggtttttctgcatatttcaggcttacatcagttaacagcacatattgtgttgaatttaaatgcatgcttgagatctagatgagagtttataacacctgcttaggtttctttaaataaaaaaagctattcctctaactttgattgtgcctctgctttagaagtttacttctgttctaggttaaactactatatgrcatcaaggaactgtaagaaactattcctcatgtcttttgccaaarcttctatatttccaaatacctaaaaaatgtgaacaccacttttagtgcataagggcataaaggccaaaaaacaactcagaatgaataatttcatacctgtgcagaagagacaagaacaactcaaagaccactctttttgtagatcaggctgagtgcaattgccaaggcccaaaaaaatcagttatgaaaacgtcaaatttaatggttcctaaatgcagttttactactggaaaacaaaaacagataaggaaaattagtactaaaaataaaacttataatatagcactttccaagaataa

SEQ ID NO: 61465 - DNA, 580 bp, Chicken  19866894322072_1
agaagtataaagcaaacggatggcccttgccacgcagagcatctccaagccaaggtggaccattttatgctgtttgctgacgggtgctgcaccacgcagaggggcactgctttattcctgcttatattttcagtgccttgggaggtgatagggaattctgtgctgctcattttggtagaagacataaagcgtaagtcctgtttttaccaccccaattccattatgttttgttaggaaacgcccgcagaagcttgatcaacgtgcaggtgaactcaatttacagtggaggctcatttacargtgcagtgctgcctgcctgaaggtcagatgkgtgctttgtgccagggctgtacactcaggtctggagagaaggggagagtcagcccgcactatctcagtgctacacgagcacatgcttttctctggttatcttttttgcatcttcctgttttttcatcagcacaccctgacttgcctccatttcctctctctctttttattctttggtctgttctgatagcatcaccaggtcaccctcagcagataactccccggagaaggcagaattacgaaaatcaca

SEQ ID NO: 61466 - DNA, 549 bp, Chicken  19866894322072_2
acgcagagcatctccaagccaaggtggaccattttatgctgtttgctgacgggtgctgcaccacgcagaggggcactgctttattcctgcttatattttcagtgccttgggaggtgatagggaattctgtgctgctcattttggtagaagacataaagcgtaagtcctgtttttaccaccccaattccattatgttttgttaggaaacgcccgcagaagcttgatcaacgtgcaggtgaactcaatttacagtggaggctcatttacargtgcagtgctgcctgcctgaaggtcagatgkgtgctttgtgccagggctgtacactcaggtctggagagaaggggagagtcagcccgcactatctcagtgctacacgagcacatgcttttctctggttatcttttttgcatcttcctgttttttcatcagcacaccctgacttgcctccatttcctctctctctttttattctttggtctgttctgatagcatcaccaggtcaccctcagcagataactccccggagaaggcagaattacgaaaatcaca

SEQ ID NO: 61467 - DNA, 600 bp, Chicken  19866894322074_1
actatcctgctggaaggatccttgaaacatgttaaataatgttactggcaaatagctggcatgctctgcttattactaatacatacagatttaagcatatgaaaaatatgatgtgggtgatctcacctcattacctttgtttggagaggagtctgtgtcatactctgagtgatacagtgatgcactggcactataaactgctggagagggagggaaaatattttcctttttcagtcatacaatgcataagatatgaaatgaatgttgtagttgatgagcagctgcaagtagtagatttgmcagaaaacatataggatttcactggaatcattgcatctcagcttctctagacattgatataattatctcaaatgaatgaaagttgttctagctttactaagaaaaaggaagaaatgatatgactggagttttggcataacttccatgtcaacagattgtatgcagaaactacttttttttttttttttttttttttttccttattttactccaaatattttaactatatcaggtactttggaaattttctttcagtgtcacttgtccaaaatctcagtcttggttgcagtagtacaagaa

SEQ ID NO: 61468 - DNA, 599 bp, Chicken  19866894322077_1
  misc_feature (1)..(8): n is any nucleotide
nnnnnnnntttgcatccttatacaggagtgccacaatgacatcagtaagattttcctggagtttataatgagatttaggtgattggtgtgggagggaagccccacttctggtggtgggactggtcacagagtatctgctttgccaaaggcctggcaaggggcacaaaaatatagaggaaggaaaatgtgcttggttcagaaaagcagaattctgatcctggatgctttgctcccctctttccacaggaccactgttcacacataccttacatccccacctcaatcctctgccttcctccrtgcgcagctctcaccgagttctgaatgcattgtacggagcagtgtaaatcaatagtaactgctgaccgcccactcggggctccgttacgcaatatcgcataccgtgtacactgagacaaaaagggaaaaagctcacacaggctttacattcaaaagctcttgcataattttgcttttctacagccaaaaaaaaaaaaaaaaaaaaaaagggaaataacagatggggagccttgcagttttttcccttttctcaggctttaccgaagggagttcttttaacatccatggtcattttcagt

SEQ ID NO: 61469 - DNA, 600 bp, Chicken  19866894322084_1
attacacaaagatatctgttaaaattgtttgtttccagattgctgtaacttttatttgatttttaaataggatgtatagtttcagaaatagacctgtatctcagtactcatagaatctcccactgtggctgatacccagagggacttctgggcccatctggctcaagcagggacactcagcaggatactcaggaccatgtccaggtgacttctgaagagctccatggaggagacacagcatctgtgcctgttcttagtcacatgcacagcacagaagtgcttcctgatgttgcgagggaktatcttgtgtttcagtttgatccatttgcctcttgtcctgccattgggcaccactatccagagcccaactctctcttctgtatgcccttccttcaggtatagataaactttcaggagattccctctgccctgagcttcctcttctccaccccgaaccgtcccagctgtcaccttttcctcatagcagagatactgcaatgccttcatcatctttagtggtcttttgcaggaatctctctagtctatcatgcctctctcatactggggagcccagaacaggactccaggtgtggcttcacc

SEQ ID NO: 61470 - DNA, 600 bp, Chicken  19866894322089_1
caggttctcaaatgcatcaaataaatagtacttgtacaacatccatgtgaagtgtttaggatccatagcaaggcctgggatcttctttaaagactttattaggtactattcatcaaggattgtttcagcatcagtgagctgcagatttagaaaccaaataaatagaagaagaaaacttgatatcgtgcagctgaaaggattttattgagaatgacagatgggatttatcagagcactgcaacactgcagggaacaacacagagggattgaattaaatttacatgatagcaaaggaaaaasggattaagtagagcacaaggagatcttgaacagagatctcatgcaaaggggggctggcatctaagcttgctccttgggctggctgagggtgcagccagctcctggcaatgccctctgatagctgcacctctgtgcttgctcagaggactgcggatttgctcctgttcctgttcctgacaggtcggggggggcgatggaggtggtagagtgatgcagggcttcacagagcagaattctacccggctggtgtggcaggggtaggagtagcggccggctgcagcacgacctaccaagctctgg

SEQ ID NO: 61471 - DNA, 600 bp, Chicken  19866894322109_1
gatgtggcaggtggtattccatcaaggagccagaaggagaggctgggcagagcctgggaatggagtatgacagagccatcctttttccttgcacttatgtgactgctcctctgtgagcccctttcttgttaaaacctgcgcaccccttttcataatctcctgctcttaagtgccctgtaactgtgcttcagtggtgtcagagttaacttctgagccatctgctgggcatttttcttttaccagtctgtaaactttgtgtggtttccttaatgggaagaatttaatacagcttctggcacraactgcatttcctagtgaaagtttatgctgctcagggtgttctttgcaggacgtgcagtgtccgagtgctaactgaagttgttaacagctgacagaatggtatggcatcaaacacagagggaaacaaaaagtgcagctcttggcagtgcagtgtgtctccctgctgagagcagagggagacggacacttgcagtttgcaaggagatggcataatttgggaacctcccaktgcctcttttgaggctctgtgtgctcctgcacagcccagtaaaatccctctgcagacatcttgtggttctg

SEQ ID NO: 61472 - DNA, 600 bp, Chicken  19866894322109_2
ttttcttttaccagtctgtaaactttgtgtggtttccttaatgggaagaatttaatacagcttctggcacraactgcatttcctagtgaaagtttatgctgctcagggtgttctttgcaggacgtgcagtgtccgagtgctaactgaagttgttaacagctgacagaatggtatggcatcaaacacagagggaaacaaaaagtgcagctcttggcagtgcagtgtgtctccctgctgagagcagagggagacggacacttgcagtttgcaaggagatggcataatttgggaacctcccaktgcctcttttgaggctctgtgtgctcctgcacagcccagtaaaatccctctgcagacatcttgtggttctgggrttaaagcatggtcagcagggaggataagccagagttacacaggcactgttggctgccttgagcttctccccaagttgcttagttcaggcccagttcctctccctctccaaaggaagctatctgcattctttgctttacagctgcaatgtgttatccctgaaacaagggcgtcccaggagtctttatgttgagtttgagttccctataaatagtttccctctcaatc

SEQ ID NO: 61473 - DNA, 600 bp, Chicken  19866894322109_3
tgcatttcctagtgaaagtttatgctgctcagggtgttctttgcaggacgtgcagtgtccgagtgctaactgaagttgttaacagctgacagaatggtatggcatcaaacacagagggaaacaaaaagtgcagctcttggcagtgcagtgtgtctccctgctgagagcagagggagacggacacttgcagtttgcaaggagatggcataatttgggaacctcccaktgcctcttttgaggctctgtgtgctcctgcacagcccagtaaaatccctctgcagacatcttgtggttctgggrttaaagcatggtcagcagggaggataagccagagttacacaggcactgttggctgccttgagcttctccccaagttgcttagttcaggcccagttcctctccctctccaaaggaagctatctgcattctttgctttacagctgcaatgtgttatccctgaaacaagggcgtcccaggagtctttatgttgagtttgagttccctataaatagtttccctctcaatcagctcgttcaaattggtagttgggtcctaattgcagcatttgagcacggtgtgtgcctgtccctgaccagtgca

SEQ ID NO: 61474 - DNA, 600 bp, Chicken  19866894322116_1
taatgcaccacgttcaaattcctttgatttcccctgttagttctgccagtgaatgctgatattcttctgattcacgatacacggttttggaaagcctgcccttgtctctacagtttaacaggccaaggagtgacacaaggccaaatgtagactgcatgcctcttcaacaggcccctggcactgttgaggataactcatgctaatgaaagcatggtctgttgtcctacaggagagtattggatagagagtttttgcattaaatactgaaataaatattctttgttaagtaatactgaggcrctaaaatactaagttggcttttccttctttatgaatgcctttgacaagcaacaagttgttttgtcctcatgagtcactcatggctggcaattcagggcagaaggytttttagaaaggtttcagaggaaccttctgttgatgaacaaatttgtcctgtcccacatgtgataggtatgatcaaggagaaatgtgtcatgggttgcttataagaaggagagrwgtgtgtcttaaagcacagataaatccccatatatccaatctctgagtggatcacagcaggcagataaaatgtttgaataa

SEQ ID NO: 61475 - DNA, 600 bp, Chicken  19866894322116_2
ctctacagtttaacaggccaaggagtgacacaaggccaaatgtagactgcatgcctcttcaacaggcccctggcactgttgaggataactcatgctaatgaaagcatggtctgttgtcctacaggagagtattggatagagagtttttgcattaaatactgaaataaatattctttgttaagtaatactgaggcrctaaaatactaagttggcttttccttctttatgaatgcctttgacaagcaacaagttgttttgtcctcatgagtcactcatggctggcaattcagggcagaaggytttttagaaaggtttcagaggaaccttctgttgatgaacaaatttgtcctgtcccacatgtgataggtatgatcaaggagaaatgtgtcatgggttgcttataagaaggagagrwgtgtgtcttaaagcacagataaatccccatatatccaatctctgagtggatcacagcaggcagataaaatgtttgaataaccatgcacgagctgctcatagcaggtttgaaaaacttccctcatgacattagtccaaggctaaggcaaccagtcacagcaaaaacagctgtgttgccatgaccca

SEQ ID NO: 61476 - DNA, 600 bp, Chicken  19866894322116_3
tgtcctacaggagagtattggatagagagtttttgcattaaatactgaaataaatattctttgttaagtaatactgaggcrctaaaatactaagttggcttttccttctttatgaatgcctttgacaagcaacaagttgttttgtcctcatgagtcactcatggctggcaattcagggcagaaggytttttagaaaggtttcagaggaaccttctgttgatgaacaaatttgtcctgtcccacatgtgataggtatgatcaaggagaaatgtgtcatgggttgcttataagaaggagagrwgtgtgtcttaaagcacagataaatccccatatatccaatctctgagtggatcacagcaggcagataaaatgtttgaataaccatgcacgagctgctcatagcaggtttgaaaaacttccctcatgacattagtccaaggctaaggcaaccagtcacagcaaaaacagctgtgttgccatgacccacagcttttaaaagaacaaaacaattagtatagctgtttataactacttttggaaagcctaagtcatacatggcagtttttactttgtgttcctaataaactaagtatcacttaa

SEQ ID NO: 61477 - DNA, 600 bp, Chicken  19866894322116_4
gtcctacaggagagtattggatagagagtttttgcattaaatactgaaataaatattctttgttaagtaatactgaggcrctaaaatactaagttggcttttccttctttatgaatgcctttgacaagcaacaagttgttttgtcctcatgagtcactcatggctggcaattcagggcagaaggytttttagaaaggtttcagaggaaccttctgttgatgaacaaatttgtcctgtcccacatgtgataggtatgatcaaggagaaatgtgtcatgggttgcttataagaaggagagrwgtgtgtcttaaagcacagataaatccccatatatccaatctctgagtggatcacagcaggcagataaaatgtttgaataaccatgcacgagctgctcatagcaggtttgaaaaacttccctcatgacattagtccaaggctaaggcaaccagtcacagcaaaaacagctgtgttgccatgacccacagcttttaaaagaacaaaacaattagtatagctgtttataactacttttggaaagcctaagtcatacatggcagtttttactttgtgttcctaataaactaagtatcacttaaa

SEQ ID NO: 61478 - DNA, 600 bp, Chicken  19866894322122_1
aattaaggtcgtaacctcttgtatttactttcgggatgtggtaaattagagctttggcttcattgcaaaaattaattaaagcagtcacacaatggtaccattcattgctgttctcgtccctccccgcagtctgtcctcatgtcagctctctttggttttagtcccaaattccagtacgtgctcgcctgaatgtattatttgggtaagtaggctagatttttctttttgtctatcgcctttgcttcgttggaagagctcctcttgtttctgattcttctgtttccttttctgaagaaagcrcacgccggcagccttcagccccatcttacctacccagaagctttcrcctgtgtagtttgcagcagaactgggctcacaggaaagcactcacctcaagatttctcctcaccgacatcccaggtgtctggttccgtaaaagaggatcggtgttcaagttgctttcatcagaatttcaaaaagtaaacacagctaaataggaagaaaaatatatatatattccatacttttgtggagctggaagtctgcccattgaaatatgttgtggctttttttttttttttcaaaagcctttcttttgtg

SEQ ID NO: 61479 - DNA, 600 bp, Chicken  19866894322122_2
tagagctttggcttcattgcaaaaattaattaaagcagtcacacaatggtaccattcattgctgttctcgtccctccccgcagtctgtcctcatgtcagctctctttggttttagtcccaaattccagtacgtgctcgcctgaatgtattatttgggtaagtaggctagatttttctttttgtctatcgcctttgcttcgttggaagagctcctcttgtttctgattcttctgtttccttttctgaagaaagcrcacgccggcagccttcagccccatcttacctacccagaagctttcrcctgtgtagtttgcagcagaactgggctcacaggaaagcactcacctcaagatttctcctcaccgacatcccaggtgtctggttccgtaaaagaggatcggtgttcaagttgctttcatcagaatttcaaaaagtaaacacagctaaataggaagaaaaatatatatatattccatacttttgtggagctggaagtctgcccattgaaatatgttgtggctttttttttttttttcaaaagcctttcttttgtgaatgtaatgcttgttttcaaagctggatttatagactggcaaaata

SEQ ID NO: 61480 - DNA, 599 bp, Chicken  19866894322123_1
  misc_feature (1)..(21): n is any nucleotide
nnnnnnnnnnnnnnnnnnnnntagaaaattccttgtggtcaaaaggaagataagaaatttccaaactaggcctacactcagcacaggctagcaactgactgattaagccttggtcaaaagtacctgtggatcacagcagaacacaatttctacatgagccacttgtgctctttcatgtttaataaatcacaagagtttttaactacaccaggaggagagcagtcaaaagatttcaggaggttacattcctcctctatttggcagagactcacctggaacattttgtccagttttgtgacycccacacagctaaacgaggacaaaatataaagaagaggtttcattagaagctgttatggtcaagtgacatcaaaggacattttgaagaagaggacaagagtgtgggatgcagtacatctatagcttacaaatttttaaataactgagagaatgatataaagacaatgtagcagaactcctttagttactggcaggttgtacaaaagataataacaaataaatccacaatgagaagaacactgtagcactggaaaatgttgtccagaaaggtgtgcaaaccctgccattggaagctttca

SEQ ID NO: 61481 - DNA, 599 bp, Chicken  19866894322133_1
  misc_feature (1)..(59): n is any nucleotide
nnnnnnnnnnnnnnnnnnnnnnnnnnnnnnnnnnnnnnnnnnnnnnnnnnnnnnnnnnncacacacatccatccagacacaacccaactgaaactgctggaatctagtatttttttctatctagtgccagttcaaaatcttcttttgactgtaacaatagcgtaagaaataagagatccctgaagatcccaaagtaactattattaacctttcagaagatgcataaaaataaaatccagcgtcactaaatgtcttcaagattctaatctgacttttcacataagcaagtattacttctgstactgaggacagattccaagtctgaagattaaatttcatctctatcttgtgtgctgtgatctatcagtgggctatggtataactggtatggatttctcagaaactgcaaactgtgcaagcrcacagtggtaagaggacagcagaatggagaattgaaagggacttctgcccmatgacaagatttctcaagcatcaatgttatacttccctacaactttcaccccatcactcttcttgggatgataccacttcacagttagaaataatctcctggcccagatttacatcytgggccttac

SEQ ID NO: 61482 - DNA, 600 bp, Chicken  19866894322133_2
tagtgccagttcaaaatcttcttttgactgtaacaatagcgtaagaaataagagatccctgaagatcccaaagtaactattattaacctttcagaagatgcataaaaataaaatccagcgtcactaaatgtcttcaagattctaatctgacttttcacataagcaagtattacttctgstactgaggacagattccaagtctgaagattaaatttcatctctatcttgtgtgctgtgatctatcagtgggctatggtataactggtatggatttctcagaaactgcaaactgtgcaagcrcacagtggtaagaggacagcagaatggagaattgaaagggacttctgcccmatgacaagatttctcaagcatcaatgttatacttccctacaactttcaccccatcactcttcttgggatgataccacttcacagttagaaataatctcctggcccagatttacatcytgggccttacatcckttcttcttgatgccagttttgttcttgtcgaggttctggctccatttgttccagttccatgactgatgagctggagrgatccacagacctacaccctgggagagrggaaaaggggaa

SEQ ID NO: 61483 - DNA, 600 bp, Chicken  19866894322133_3
gagatccctgaagatcccaaagtaactattattaacctttcagaagatgcataaaaataaaatccagcgtcactaaatgtcttcaagattctaatctgacttttcacataagcaagtattacttctgstactgaggacagattccaagtctgaagattaaatttcatctctatcttgtgtgctgtgatctatcagtgggctatggtataactggtatggatttctcagaaactgcaaactgtgcaagcrcacagtggtaagaggacagcagaatggagaattgaaagggacttctgcccmatgacaagatttctcaagcatcaatgttatacttccctacaactttcaccccatcactcttcttgggatgataccacttcacagttagaaataatctcctggcccagatttacatcytgggccttacatcckttcttcttgatgccagttttgttcttgtcgaggttctggctccatttgttccagttccatgactgatgagctggagrgatccacagacctacaccctgggagagrggaaaaggggaaagggtggggagatgggcctaaaaacaaaacagcgccaacaaggaggaaact

SEQ ID NO: 61484 - DNA, 600 bp, Chicken  19866894322133_4
attacttctgstactgaggacagattccaagtctgaagattaaatttcatctctatcttgtgtgctgtgatctatcagtgggctatggtataactggtatggatttctcagaaactgcaaactgtgcaagcrcacagtggtaagaggacagcagaatggagaattgaaagggacttctgcccmatgacaagatttctcaagcatcaatgttatacttccctacaactttcaccccatcactcttcttgggatgataccacttcacagttagaaataatctcctggcccagatttacatcytgggccttacatcckttcttcttgatgccagttttgttcttgtcgaggttctggctccatttgttccagttccatgactgatgagctggagrgatccacagacctacaccctgggagagrggaaaaggggaaagggtggggagatgggcctaaaaacaaaacagcgccaacaaggaggaaactaatttactaaatacgataacagaatgcaagataacacactataatacaatataattggaattgaagctaataaacaagatgagtgtgtctaaaaactgaaggccttactctaatgct

SEQ ID NO: 61485 - DNA, 600 bp, Chicken  19866894322133_5
gaggacagattccaagtctgaagattaaatttcatctctatcttgtgtgctgtgatctatcagtgggctatggtataactggtatggatttctcagaaactgcaaactgtgcaagcrcacagtggtaagaggacagcagaatggagaattgaaagggacttctgcccmatgacaagatttctcaagcatcaatgttatacttccctacaactttcaccccatcactcttcttgggatgataccacttcacagttagaaataatctcctggcccagatttacatcytgggccttacatcckttcttcttgatgccagttttgttcttgtcgaggttctggctccatttgttccagttccatgactgatgagctggagrgatccacagacctacaccctgggagagrggaaaaggggaaagggtggggagatgggcctaaaaacaaaacagcgccaacaaggaggaaactaatttactaaatacgataacagaatgcaagataacacactataatacaatataattggaattgaagctaataaacaagatgagtgtgtctaaaaactgaaggccttactctaatgctgaaggcgacacagct

SEQ ID NO: 61486 - DNA, 576 bp, Chicken  19866894322133_6
actggtatggatttctcagaaactgcaaactgtgcaagcrcacagtggtaagaggacagcagaatggagaattgaaagggacttctgcccmatgacaagatttctcaagcatcaatgttatacttccctacaactttcaccccatcactcttcttgggatgataccacttcacagttagaaataatctcctggcccagatttacatcytgggccttacatcckttcttcttgatgccagttttgttcttgtcgaggttctggctccatttgttccagttccatgactgatgagctggagrgatccacagacctacaccctgggagagrggaaaaggggaaagggtggggagatgggcctaaaaacaaaacagcgccaacaaggaggaaactaatttactaaatacgataacagaatgcaagataacacactataatacaatataattggaattgaagctaataaacaagatgagtgtgtctaaaaactgaaggccttactctaatgctgaaggcgacacagctagggagcacatagcacagagatgagcagaaaaagaagggcagtctcgtgactc

SEQ ID NO: 61487 - DNA, 548 bp, Chicken  19866894322133_7
actgtgcaagcrcacagtggtaagaggacagcagaatggagaattgaaagggacttctgcccmatgacaagatttctcaagcatcaatgttatacttccctacaactttcaccccatcactcttcttgggatgataccacttcacagttagaaataatctcctggcccagatttacatcytgggccttacatcckttcttcttgatgccagttttgttcttgtcgaggttctggctccatttgttccagttccatgactgatgagctggagrgatccacagacctacaccctgggagagrggaaaaggggaaagggtggggagatgggcctaaaaacaaaacagcgccaacaaggaggaaactaatttactaaatacgataacagaatgcaagataacacactataatacaatataattggaattgaagctaataaacaagatgagtgtgtctaaaaactgaaggccttactctaatgctgaaggcgacacagctagggagcacatagcacagagatgagcagaaaaagaagggcagtctcgtgactc

SEQ ID NO: 61488 - DNA, 600 bp, Chicken  19866894322134_1
attggtcaaagaaataacaataggcttttttcacagaagagaagaataatgtgtatttgctcacccaaagcaaagatgtaaattcatattgtcttcattacatggattttggaaggagccttcttaaatattgcttaatatttggattatcatactgttttgatttcaattattctccccaaaaatacattttgactaagatacagtgccaagaatgttgtttaatatggtgaaacagatgtagagttgacaaaaacaatcaagttgagttcaagctcttgcacaccaggacttttcaaygagagcagagttctctacaatagctagtcctctgtgcatgaatactagcatctccaaattgcattactggaaaataaaatgtttacttgtaccatgtgaagatggaaaaaaaaagttagactatgtttgggtataattaggtccaccttccctactttactgcaacgtatctagagtagcttaactccctgggtagttctgctggactaaaactctacagaatgaagactcaaaactactaatctaattgcacttctaaaatgaataggttatcaggaaatactgatctaaatactcagg

SEQ ID NO: 61489 - DNA, 600 bp, Chicken  19866894322144_1
accaagacccccaagctcttctctgcagagctgttctcaatgagttcctctcccattctgtatgtataactggaaaaactccagcctagatgcaatgccctgtgtttgatcttgttgaacctcatttggttcttgtgggcccactcttcaagcctctggacttccctttcttcttttgtatcaactgcatcactcagcttggtgtcatcacaaaactttttgagggtgcattttattccactgtccaggtcatttgtgaagatgttgaaggggaccagtcccaaggggcaacactcatcracatcctccacctggacaaagagacattgaccacaaccgtctggctatgaccatgcaacaaattctttatcaactgagtagtcaactcttcaaacctctcattccaatttagagataaaagtgtgtgggagcatactaaggctttttagaagtccagatagacaatatcagtttctcttcctttgtctgctgatgccatcactcaatcacagaaggccatcaggtaggtcaggcatgatctgcctttggtgaagccatgctgggtgtcttggattagttctttgtcttgcgtgtgcctca

SEQ ID NO: 61490 - DNA, 599 bp, Chicken  19866894322161_1
  misc_feature (1)..(118): n is any nucleotide
nnnnnnnnnnnnnnnnnnnnnnnnnnnnnnnnnnnnnnnnnnnnnnnnnnnnnnnnnnnnnnnnnnnnnnnnnnnnnnnnnnnnnnnnnnnnnnnnnnnnnnnnnnnnnnnnnnnnnntgcatggggtgctgtgcaccgtggatgtgcccctgctgtgttccgggtgctcatgggctgcatttggggcagcagccacataggatggagttttgaggaatgggacactgaagaggaagttgcaaacgcaaatgagtttctaaattagtggtagctgtcttaggctattaactgttggaagyggggagggtgtcttgagatgccagctgggccgacacaataagcctttaatcctgtgtggaccttgtgaggtgtggctgtggtgcaaggactaatgctattccagccctcccacgtggytttttgttcctacccttctctcatctagaactcgaattccacttctcaaatggtattttagctgataaaaagaggtgtttacccrgccatgtccccaagcagtgagcacagygtgccatgcagtgagagctgagacacctctgtagaggtatttggcacacacagcgtggtgctgggcagt

SEQ ID NO: 61491 - DNA, 600 bp, Chicken  19866894322161_2
tgcatggggtgctgtgcaccgtggatgtgcccctgctgtgttccgggtgctcatgggctgcatttggggcagcagccacataggatggagttttgaggaatgggacactgaagaggaagttgcaaacgcaaatgagtttctaaattagtggtagctgtcttaggctattaactgttggaagyggggagggtgtcttgagatgccagctgggccgacacaataagcctttaatcctgtgtggaccttgtgaggtgtggctgtggtgcaaggactaatgctattccagccctcccacgtggytttttgttcctacccttctctcatctagaactcgaattccacttctcaaatggtattttagctgataaaaagaggtgtttacccrgccatgtccccaagcagtgagcacagygtgccatgcagtgagagctgagacacctctgtagaggtatttggcacacacagcgtggtgctgggcagtcctgatgctgggttcaatgtggtcaactcactgccagccttaccctgagtctggggaggaaggagagagtgtctgtgcacagcacacctggagcagagctgctcgtggcctccctgccc

SEQ ID NO: 61492 - DNA, 600 bp, Chicken  19866894322161_3
tggagttttgaggaatgggacactgaagaggaagttgcaaacgcaaatgagtttctaaattagtggtagctgtcttaggctattaactgttggaagyggggagggtgtcttgagatgccagctgggccgacacaataagcctttaatcctgtgtggaccttgtgaggtgtggctgtggtgcaaggactaatgctattccagccctcccacgtggytttttgttcctacccttctctcatctagaactcgaattccacttctcaaatggtattttagctgataaaaagaggtgtttacccrgccatgtccccaagcagtgagcacagygtgccatgcagtgagagctgagacacctctgtagaggtatttggcacacacagcgtggtgctgggcagtcctgatgctgggttcaatgtggtcaactcactgccagccttaccctgagtctggggaggaaggagagagtgtctgtgcacagcacacctggagcagagctgctcgtggcctccctgccctgccaggaggccatggggctgattctaatgtgcatggtaatttgcatgcctaatcaaaatgaaatgcaaacagacttttctgctg

SEQ ID NO: 61493 - DNA, 600 bp, Chicken  19866894322161_4
gaggaagttgcaaacgcaaatgagtttctaaattagtggtagctgtcttaggctattaactgttggaagyggggagggtgtcttgagatgccagctgggccgacacaataagcctttaatcctgtgtggaccttgtgaggtgtggctgtggtgcaaggactaatgctattccagccctcccacgtggytttttgttcctacccttctctcatctagaactcgaattccacttctcaaatggtattttagctgataaaaagaggtgtttacccrgccatgtccccaagcagtgagcacagygtgccatgcagtgagagctgagacacctctgtagaggtatttggcacacacagcgtggtgctgggcagtcctgatgctgggttcaatgtggtcaactcactgccagccttaccctgagtctggggaggaaggagagagtgtctgtgcacagcacacctggagcagagctgctcgtggcctccctgccctgccaggaggccatggggctgattctaatgtgcatggtaatttgcatgcctaatcaaaatgaaatgcaaacagacttttctgctggcttgaacttgcctctcatgattgctg

SEQ ID NO: 61494 - DNA, 600 bp, Chicken  19866894322166_1
agaaatagaagacttgatattctaggtgatacctgtaggggctacttagacctgtttcacaatatgttttcattgattattaaatcatttcatttctgtcctttcattggattttaaaaatttgctgagagagacttatcataaccaaattattttgggaaattatatcaagcacttagaataaaattcagcatatgacttaagtgtgcactaaactttaagcattttcttcagtatcagtttgttttttataccttattataagctaaaatgagaggatactacatacccatacatgcrgtaatagagaattgtatacaacaatggcacttatgtgacagattttattcagtactgtaggtttttctgaaatttaactctcgctactcttaatcctctaaactttggactgtgtaaaattccatggtaaaactaccctacttttttctttctttcttccttgaatgttatttttcctcccgccctgaaggcatagaattataaatatgtctacacctaatacctgaggatctacaggaccttgcagtgatgacaaagattctcaattcctgccaacatttagttagtttgaagtcatga

SEQ ID NO: 61495 - DNA, 600 bp, Chicken  19866894322167_1
gtacagaggtagagcactggctgcttctctcattcagcaatacctaaatgctgcacactgcctcctgtactgctgcagagaataatcacgtaaaatggcaggtaaatccagtgaaagagaaatatgccactaagtgctcccagggcagcaataacataatgtagcttgtagtatgaggtaataatgattctcactagttaattgtacagcactttgaaatcctcaaatgcaaggcaacagctaagtgcagtgattgactttttattattattgttgtttccttctgtctgttattccttrtcctcctttccttgtgaagtttgtactctagtcctaagagtaatctgaaccaattttaattggtttaaatcattttattctagtatcaaattttattctagtatcaaatgatgatcttttaacaaggagaagagtayggactgtgatcccattacttattaagttatgttttaaaggacatggtagcccacactttctcaatgtaatcycatgactgcccttgaaaggctagaatttccaggcartgctcttttgctatgatcttctgcttcagaattgtctttgttagtgtgcctggga

SEQ ID NO: 61496 - DNA, 600 bp, Chicken  19866894322167_10
ctacacaggtgtaccacccagcagggacatttttgattcactcttygtgtgattcttcaggtttttccattgcttaaaacctgctctggaagccaagcccctaaagttttgcctaaggtaggatgtgtctgaatgtgtgaggcacctagtttacacacttgaagtctcccgtgtatctttggataggcatgcaaagcccaagattgctgcattgaagggcacatwaaagccacaccaggatgcataagccaaccactgcaccactgacaatccatggagccctcraacagatctatctcsgtggtgtttatgctactctcagtcttgcctgttgcaatgctcctctgcctcctctgaaggaggctgttgagctgcaaccctgatcagcagctggggcacatgttcctcctggttcttctctccctgtctctatgtctcccagagcgtggaataaaagtaaactcaacatctaatcatttcctaccatcaagggcaggtagcatttgcctctggtcaccctcacaggttttaggaccgaattgggcactgggcaaatcagtctgagtagaggctacagtatcttccttcttatatgcagta

SEQ ID NO: 61497 - DNA, 600 bp, Chicken  19866894322167_2
tcccagggcagcaataacataatgtagcttgtagtatgaggtaataatgattctcactagttaattgtacagcactttgaaatcctcaaatgcaaggcaacagctaagtgcagtgattgactttttattattattgttgtttccttctgtctgttattccttrtcctcctttccttgtgaagtttgtactctagtcctaagagtaatctgaaccaattttaattggtttaaatcattttattctagtatcaaattttattctagtatcaaatgatgatcttttaacaaggagaagagtayggactgtgatcccattacttattaagttatgttttaaaggacatggtagcccacactttctcaatgtaatcycatgactgcccttgaaaggctagaatttccaggcartgctcttttgctatgatcttctgcttcagaattgtctttgttagtgtgcctgggaagatctaggagccagcacagagatcgtcaggccttctactgcctcsgacgactactgcagtcaaagagtagggcaaaattcagatgactcagaggacttgatcaccttcctctgttttttttccattacattgtcag

SEQ ID NO: 61498 - DNA, 600 bp, Chicken  19866894322167_3
cactttgaaatcctcaaatgcaaggcaacagctaagtgcagtgattgactttttattattattgttgtttccttctgtctgttattccttrtcctcctttccttgtgaagtttgtactctagtcctaagagtaatctgaaccaattttaattggtttaaatcattttattctagtatcaaattttattctagtatcaaatgatgatcttttaacaaggagaagagtayggactgtgatcccattacttattaagttatgttttaaaggacatggtagcccacactttctcaatgtaatcycatgactgcccttgaaaggctagaatttccaggcartgctcttttgctatgatcttctgcttcagaattgtctttgttagtgtgcctgggaagatctaggagccagcacagagatcgtcaggccttctactgcctcsgacgactactgcagtcaaagagtagggcaaaattcagatgactcagaggacttgatcaccttcctctgttttttttccattacattgtcagcattcttcttgtagtttgagcttacatttctacttggcttattggcatggcacaaactgcagatcatcacac

SEQ ID NO: 61499 - DNA, 600 bp, Chicken  19866894322167_4
tgcagtgattgactttttattattattgttgtttccttctgtctgttattccttrtcctcctttccttgtgaagtttgtactctagtcctaagagtaatctgaaccaattttaattggtttaaatcattttattctagtatcaaattttattctagtatcaaatgatgatcttttaacaaggagaagagtayggactgtgatcccattacttattaagttatgttttaaaggacatggtagcccacactttctcaatgtaatcycatgactgcccttgaaaggctagaatttccaggcartgctcttttgctatgatcttctgcttcagaattgtctttgttagtgtgcctgggaagatctaggagccagcacagagatcgtcaggccttctactgcctcsgacgactactgcagtcaaagagtagggcaaaattcagatgactcagaggacttgatcaccttcctctgttttttttccattacattgtcagcattcttcttgtagtttgagcttacatttctacttggcttattggcatggcacaaactgcagatcatcacacaaagtaaaagtggcataaagccagcatggagttctc

SEQ ID NO: 61500 - DNA, 600 bp, Chicken  19866894322167_5
gaaccaattttaattggtttaaatcattttattctagtatcaaattttattctagtatcaaatgatgatcttttaacaaggagaagagtayggactgtgatcccattacttattaagttatgttttaaaggacatggtagcccacactttctcaatgtaatcycatgactgcccttgaaaggctagaatttccaggcartgctcttttgctatgatcttctgcttcagaattgtctttgttagtgtgcctgggaagatctaggagccagcacagagatcgtcaggccttctactgcctcsgacgactactgcagtcaaagagtagggcaaaattcagatgactcagaggacttgatcaccttcctctgttttttttccattacattgtcagcattcttcttgtagtttgagcttacatttctacttggcttattggcatggcacaaactgcagatcatcacacaaagtaaaagtggcataaagccagcatggagttctctagaattacctttgcttgaaagcaatgctgatgctactttaaagtgacaaatgtatgcttcaattagcctgtgaattatgctgttgtgtagtttgcctcat

SEQ ID NO: 61501 - DNA, 600 bp, Chicken  19866894322167_6
tgctaggaagaagctgacattcaattaagctgaacatgacagggcttgagttactcatgtactgagttcacatgagcactggcatactgtctgcacgtgtgatccatggctgcttatatgtctggatgcaatatggtagcacatcagagtcctacatgtacattagtgtaaattaacatcacgtttctttgcatttattctgcatgggaataagcagctaatataaatgaaaagtcataacctatccagctagaggttaacagagtacgacatcaagaaggccagttaaattttggactscctacacaggtgtaccacccagcagggacatttttgattcactcttygtgtgattcttcaggtttttccattgcttaaaacctgctctggaagccaagcccctaaagttttgcctaaggtaggatgtgtctgaatgtgtgaggcacctagtttacacacttgaagtctcccgtgtatctttggataggcatgcaaagcccaagattgctgcattgaagggcacatwaaagccacaccaggatgcataagccaaccactgcaccactgacaatccatggagccctcraacagatctatctc

SEQ ID NO: 61502 - DNA, 600 bp, Chicken  19866894322167_7
gagttactcatgtactgagttcacatgagcactggcatactgtctgcacgtgtgatccatggctgcttatatgtctggatgcaatatggtagcacatcagagtcctacatgtacattagtgtaaattaacatcacgtttctttgcatttattctgcatgggaataagcagctaatataaatgaaaagtcataacctatccagctagaggttaacagagtacgacatcaagaaggccagttaaattttggactscctacacaggtgtaccacccagcagggacatttttgattcactcttygtgtgattcttcaggtttttccattgcttaaaacctgctctggaagccaagcccctaaagttttgcctaaggtaggatgtgtctgaatgtgtgaggcacctagtttacacacttgaagtctcccgtgtatctttggataggcatgcaaagcccaagattgctgcattgaagggcacatwaaagccacaccaggatgcataagccaaccactgcaccactgacaatccatggagccctcraacagatctatctcsgtggtgtttatgctactctcagtcttgcctgttgcaatgctcctct

SEQ ID NO: 61503 - DNA, 600 bp, Chicken  19866894322167_8
atgaaaagtcataacctatccagctagaggttaacagagtacgacatcaagaaggccagttaaattttggactscctacacaggtgtaccacccagcagggacatttttgattcactcttygtgtgattcttcaggtttttccattgcttaaaacctgctctggaagccaagcccctaaagttttgcctaaggtaggatgtgtctgaatgtgtgaggcacctagtttacacacttgaagtctcccgtgtatctttggataggcatgcaaagcccaagattgctgcattgaagggcacatwaaagccacaccaggatgcataagccaaccactgcaccactgacaatccatggagccctcraacagatctatctcsgtggtgtttatgctactctcagtcttgcctgttgcaatgctcctctgcctcctctgaaggaggctgttgagctgcaaccctgatcagcagctggggcacatgttcctcctggttcttctctccctgtctctatgtctcccagagcgtggaataaaagtaaactcaacatctaatcatttcctaccatcaagggcaggtagcatttgcctctggtcaccctcacag

SEQ ID NO: 61504 - DNA, 600 bp, Chicken  19866894322167_9
taaattttggactscctacacaggtgtaccacccagcagggacatttttgattcactcttygtgtgattcttcaggtttttccattgcttaaaacctgctctggaagccaagcccctaaagttttgcctaaggtaggatgtgtctgaatgtgtgaggcacctagtttacacacttgaagtctcccgtgtatctttggataggcatgcaaagcccaagattgctgcattgaagggcacatwaaagccacaccaggatgcataagccaaccactgcaccactgacaatccatggagccctcraacagatctatctcsgtggtgtttatgctactctcagtcttgcctgttgcaatgctcctctgcctcctctgaaggaggctgttgagctgcaaccctgatcagcagctggggcacatgttcctcctggttcttctctccctgtctctatgtctcccagagcgtggaataaaagtaaactcaacatctaatcatttcctaccatcaagggcaggtagcatttgcctctggtcaccctcacaggttttaggaccgaattgggcactgggcaaatcagtctgagtagaggctacagtatcttcc

SEQ ID NO: 61505 - DNA, 600 bp, Chicken  19866894322170_1
tatgcatgtagtaatggagatcactctgtaaatacagagacaaagacaagtccagtctgtgcacttcagctttctggctaattctccaatgacctgttgcttgagcagtgacttatactaactagggtgtgctggcatttaacgttcactctgtgtggctattgatcttcataggtcagcagcccactgcttccatagaatcataaaatcattaaggttggaaagaccaacaagatcatctagtccaacatagcatgttagaaaagaaaaggaaatatagtttataataatattatatayattatatataatataataaataaagttagaaaatactccttgagaaaggagtatgagtgacactggggacaaagctgccatctgggggctgaggccctgaaagaacaaacattcttgttgagctttgtgtgctttcccactaagtgttagatgctaagtctgattaatacagcccttctcttgctttgtcatcaaaacctttggtgttgtctaaattcatgaaaaacatgtttcttttaccaacaaattgatttgattttctttgataaattatgagttaccataaaagaagaagcactc

SEQ ID NO: 61506 - DNA, 600 bp, Chicken  19866894322177_1
cacttattttccattctaaatttctaataagctattaaaacagtggaaaccatatagtgggcaggaagtgttttgaaaaataataacattgaatacctgactccatttccaaagaatgaatgcagtgtggataaattgtcgaaatctgaaatacagtttcttttgctgtagatcattaaggtcatgtcatgagcaatagtgcacaaaaacactgtttacaacaggaccaacaagtagagtaaaatcagattttctttcctggattgaaattccactagccttttgggcactaatggtacrttacctggtagaagtttcattgcattaactgtattttgagatttaccagtaaacaatgctgtaaatgtaataataatcataaagcattccacagatttacaagcatataatgaatttaattaatataaaatcaaagctaaaactcaccaaactactcatccagcaacaaaaccgtttccttgggcggtatgatacagacgattagcttcttgatattcattagataaaggatctgttttcattctcaaccttaagcatctaattagccctctcacaaagacaatacctgaggaagaatgt

SEQ ID NO: 61507 - DNA, 599 bp, Chicken  19866894322180_1
  misc_feature (1)..(12): n is any nucleotide
nnnnnnnnnnnnttaactgggagaccattagaggagtctgagtattatatcactaaaaataattaaacgataccatgaatactaaagctattacctagcaaaaatatcagaacatgatttaaaaaaaaattaatgaaacatgaagacatgagtcaccaccctgaattgttctttatgtttagaaaatgtattaacttcaggaaaggtacatacataaaagtgcacaacgcttgcatttctctgattgtaggatctggctgaaattgagtcttctagttttcaaaagttctgaaaaaatawcaacaccccactgtgaagcagcatgacattacagtcacatataaattgatctacactgtagaaatctatagaagaaacagggatacagttgacacagtaactaagaggtgtacagtctcaattgtttttgcctgaaggtagrgtgcattcagccaaagatccaagaattgataacatgcacttgaagtgtgcagtgggagagtcagacttgaaacaagcttgtaccaaaaatacatctttgttttatgatcttgcttacaaatcaacaatctgaaaatgtaacatgcatttctttgcac

SEQ ID NO: 61508 - DNA, 600 bp, Chicken  19866894322180_2
aagacatgagtcaccaccctgaattgttctttatgtttagaaaatgtattaacttcaggaaaggtacatacataaaagtgcacaacgcttgcatttctctgattgtaggatctggctgaaattgagtcttctagttttcaaaagttctgaaaaaatawcaacaccccactgtgaagcagcatgacattacagtcacatataaattgatctacactgtagaaatctatagaagaaacagggatacagttgacacagtaactaagaggtgtacagtctcaattgtttttgcctgaaggtagrgtgcattcagccaaagatccaagaattgataacatgcacttgaagtgtgcagtgggagagtcagacttgaaacaagcttgtaccaaaaatacatctttgttttatgatcttgcttacaaatcaacaatctgaaaatgtaacatgcatttctttgcactacatagcattaattctgctttagcaattgaagaccyccattgagaaatttaatcagttcaacagaaaccataaactcatatttgtaattaagtcagattacagcaaaaagaaaacattttaacaggcatagtttttccatta

SEQ ID NO: 61509 - DNA, 597 bp, Chicken  19866894322180_3
acatataaattgatctacactgtagaaatctatagaagaaacagggatacagttgacacagtaactaagaggtgtacagtctcaattgtttttgcctgaaggtagrgtgcattcagccaaagatccaagaattgataacatgcacttgaagtgtgcagtgggagagtcagacttgaaacaagcttgtaccaaaaatacatctttgttttatgatcttgcttacaaatcaacaatctgaaaatgtaacatgcatttctttgcactacatagcattaattctgctttagcaattgaagaccyccattgagaaatttaatcagttcaacagaaaccataaactcatatttgtaattaagtcagattacagcaaaaagaaaacattttaacaggcatagtttttccattaaraagaaacttctgaggaaaatcaacatttcattccaaaaatacttccttactgctatttcaaaatactctatgtaatttcttcttgtggaataagattttactccacaacttcagacttgttctataagtacagataaatttctcctttctctaatcttttagatttacaagtagtaaaaaacaacatct

SEQ ID NO: 61510 - DNA, 489 bp, Chicken  19866894322180_4
gcattcagccaaagatccaagaattgataacatgcacttgaagtgtgcagtgggagagtcagacttgaaacaagcttgtaccaaaaatacatctttgttttatgatcttgcttacaaatcaacaatctgaaaatgtaacatgcatttctttgcactacatagcattaattctgctttagcaattgaagaccyccattgagaaatttaatcagttcaacagaaaccataaactcatatttgtaattaagtcagattacagcaaaaagaaaacattttaacaggcatagtttttccattaaraagaaacttctgaggaaaatcaacatttcattccaaaaatacttccttactgctatttcaaaatactctatgtaatttcttcttgtggaataagattttactccacaacttcagacttgttctataagtacagataaatttctcctttctctaatcttttagatttacaagtagtaaaaaacaacatct

SEQ ID NO: 61511 - DNA, 447 bp, Chicken  19866894322186_1
  misc_feature (1)..(31): n is any nucleotide
nnnnnnnnnnnnnnnnnnnnnnnnnnnnnnnaggcggcaggagaaagccatgagaacgcgaggcggggcgaaatgaggcgtggcgggagcggcgggccaatggcagcgcggggcggggcactgccgggcccccctgcccgcccgcccggagagcagccgacgtgcgggcaccgagcgcagccccggccccgctgcagcccgagccccgggcggccgtggctgctatgtggcttcgcggcgcgcggcctccaccgggtaagagggtgcgcaccggggccggttaccccgggctgggactcmtcgcggccgctcggtgggcggcaccgggctgccccgcgttcggtacccggggactcggacgcttctctcccgcggcgcgttaccggtggaccgcggggctttcctccttcccctccctcccccctcctccgtagccggtaacggccg

SEQ ID NO: 61512 - DNA, 600 bp, Chicken  19866894322196_1
gctgatatatacctcagctgcagtacagcatagctgtcagccctgtaccaggcatgcctttagcctggaatatctcataacctaacaatcaggctgttgcactataatctgaaagtcagtgcataaagtggatgaagaaatcaagctacagttactccaataaattataattcaacacgggtttttttgttgttgttgttttgttttgttttgtttttaatttctcagataacaccaatacagtcatatatccaccaacgtttcagctcttaagaagtacctaaattaagactcatcatmcattcagatccctgcctccttgttgggaaataaaaggcttttatgtagggtaattcagcatagctgaaatccagatcaattcccaagatcctgccagtacattaaaatctattaccacagagccctttcctctggaaacggaactcttctgtttcaggaggaccattcccaacgatgcccagtgaagggttcagtaaaggatgttgtggctcttgaggctttaagtgtttttctggctgtctgacattgtattcacctactcataagcagaaagtaccaaattccaaaagatcttattta

SEQ ID NO: 61513 - DNA, 599 bp, Chicken  19866894322201_1
  misc_feature (1)..(79): n is any nucleotide
nnnnnnnnnnnnnnnnnnnnnnnnnnnnnnnnnnnnnnnnnnnnnnnnnnnnnnnnnnnnnnnnnnnnnnnnnnnnnnnttctggtgccctctaaaacctcgagacagaaacgtgtgcagatccgtggtcacaacacacccacaacagcactaactggccccatcccctcctagggacgtggctctgagcatccatccctgtatgcaaacccttctacctgtgatggggtccgtccccggacaaggggctccattctgggaaggttcagctgtttgattttgtcattgttccctgtacakgacaactgggtttggggttctgataacatcatcccctccccaggaagttttccaactctcattgcagagtggatggctcagtctctgtgctcaggacaccaccagcaattgtggttgtgttacagcctcgtccaagctgcccacgccttgcccagggtctcttctgggccacattgatgttcatgcccatccttcactgtgctgaagtgttggctgatgagggagaggaaatatgggatctgggaaaacacattgtgagggctgaccactccaggctttagaacaggttttaaaggaag

SEQ ID NO: 61514 - DNA, 599 bp, Chicken  19866894322214_1
  misc_feature (1)..(85): n is any nucleotide
nnnnnnnnnnnnnnnnnnnnnnnnnnnnnnnnnnnnnnnnnnnnnnnnnnnnnnnnnnnnnnnnnnnnnnnnnnnnnnnnnnnnnaaaataatggcatatagtacacatgcagtgaaaaaaagatagcgttttaccctttttaggagttgggcacttgcaggctgttcagagttgtatttagagtaatgttgagaagatacggagtgtgagataatagttaatgatgatctgatggcaaattccatgcatatctgtagtaaaaaactacatttggctaaatacacattgtactttgtgtrtggaaactcaccagcagagcttaaacaatgttttgaaccttgtgatcctttcttatgattaatatcgcaaattccyattggctttcttctggggaattcatccacgtgaagaattactgtgtgatatgacatygtgtgacactcttcggtgtctgaaatgacttaggcttccagaatatgccttttcctttggactttgtccttgcagaagagtctgaagaggcctttgtataccaatatattctgtaaaaacaaatacttagcgtgttcattcttatccccttctttttgtcaattta

SEQ ID NO: 61515 - DNA, 599 bp, Chicken  19866894322214_2
  misc_feature (1)..(9): n is any nucleotide
nnnnnnnnnaaaataatggcatatagtacacatgcagtgaaaaaaagatagcgttttaccctttttaggagttgggcacttgcaggctgttcagagttgtatttagagtaatgttgagaagatacggagtgtgagataatagttaatgatgatctgatggcaaattccatgcatatctgtagtaaaaaactacatttggctaaatacacattgtactttgtgtrtggaaactcaccagcagagcttaaacaatgttttgaaccttgtgatcctttcttatgattaatatcgcaaattccyattggctttcttctggggaattcatccacgtgaagaattactgtgtgatatgacatygtgtgacactcttcggtgtctgaaatgacttaggcttccagaatatgccttttcctttggactttgtccttgcagaagagtctgaagaggcctttgtataccaatatattctgtaaaaacaaatacttagcgtgttcattcttatccccttctttttgtcaatttagtggcaacaaaacatcccatagctctgagatcttatcatatggaaagttgtattttggcttttgactatgtcaagg

SEQ ID NO: 61516 - DNA, 600 bp, Chicken  19866894322214_3
accctttttaggagttgggcacttgcaggctgttcagagttgtatttagagtaatgttgagaagatacggagtgtgagataatagttaatgatgatctgatggcaaattccatgcatatctgtagtaaaaaactacatttggctaaatacacattgtactttgtgtrtggaaactcaccagcagagcttaaacaatgttttgaaccttgtgatcctttcttatgattaatatcgcaaattccyattggctttcttctggggaattcatccacgtgaagaattactgtgtgatatgacatygtgtgacactcttcggtgtctgaaatgacttaggcttccagaatatgccttttcctttggactttgtccttgcagaagagtctgaagaggcctttgtataccaatatattctgtaaaaacaaatacttagcgtgttcattcttatccccttctttttgtcaatttagtggcaacaaaacatcccatagctctgagatcttatcatatggaaagttgtattttggcttttgactatgtcaaggtacaaatgtactggcctgttgggtctaatacttatctttttgggggtcaaaactggtt

SEQ ID NO: 61517 - DNA, 599 bp, Chicken  19866894322224_1
  misc_feature (1)..(145): n is any nucleotide
nnnnnnnnnnnnnnnnnnnnnnnnnnnnnnnnnnnnnnnnnnnnnnnnnnnnnnnnnnnnnnnnnnnnnnnnnnnnnnnnnnnnnnnnnnnnnnnnnnnnnnnnnnnnnnnnnnnnnnnnnnnnnnnnnnnnnnnnnnnnnnnnnttatttcaggatgcgtacattagctcaggtattcttaatatctaaaccaggtcactttgacagagctacgttaggtaacaattgcacaaggagttatgtggacagatagggaggagctgatgtctgtgagcatgggacagggaggagcagttgcwgatgggctgtaaatatgaccattttcacctggcacagctgtagccagaccacttttgattgcaaccgtatcttatctgttctgttttaaagcataaatgctgtttattttgttattaaaagcagttcaaaccaaagtatttccttcctcaaagagagtgaaagcaaacactaattcttaccacattcgtggaaggaatggaaatttactattttgcagatgggaagtctccagtataaccattgtgtgtgagatkataatatgggtgttgcagtgttggattatacctcggaacagtgt

SEQ ID NO: 61518 - DNA, 600 bp, Chicken  19866894322224_2
gaggagctgatgtctgtgagcatgggacagggaggagcagttgcwgatgggctgtaaatatgaccattttcacctggcacagctgtagccagaccacttttgattgcaaccgtatcttatctgttctgttttaaagcataaatgctgtttattttgttattaaaagcagttcaaaccaaagtatttccttcctcaaagagagtgaaagcaaacactaattcttaccacattcgtggaaggaatggaaatttactattttgcagatgggaagtctccagtataaccattgtgtgtgagatkataatatgggtgttgcagtgttggattatacctcggaacagtgtgttaattttmtgtcagtttttctgctggctgagtttcaagtgtagttgatgagtacttcaagtggatgaagtgggatatgttaacttttgccacmcagattgttcttccctcacaaccattttttcttttttaaatcattttcatttttctcttgatccttccacaacacttgaaaacttgattgtgctgccagtatctgctgctaaagaaccttttaagaactaaaaataaatcttaccctgtggcagaaggcat

SEQ ID NO: 61519 - DNA, 600 bp, Chicken  19866894322224_3
taaatatgaccattttcacctggcacagctgtagccagaccacttttgattgcaaccgtatcttatctgttctgttttaaagcataaatgctgtttattttgttattaaaagcagttcaaaccaaagtatttccttcctcaaagagagtgaaagcaaacactaattcttaccacattcgtggaaggaatggaaatttactattttgcagatgggaagtctccagtataaccattgtgtgtgagatkataatatgggtgttgcagtgttggattatacctcggaacagtgtgttaattttmtgtcagtttttctgctggctgagtttcaagtgtagttgatgagtacttcaagtggatgaagtgggatatgttaacttttgccacmcagattgttcttccctcacaaccattttttcttttttaaatcattttcatttttctcttgatccttccacaacacttgaaaacttgattgtgctgccagtatctgctgctaaagaaccttttaagaactaaaaataaatcttaccctgtggcagaaggcattggaggctgtagaaatggtagttggcaagaagtagttgtcaccagcatttctgg

SEQ ID NO: 61520 - DNA, 600 bp, Chicken  19866894322224_4
aaatgctgtttattttgttattaaaagcagttcaaaccaaagtatttccttcctcaaagagagtgaaagcaaacactaattcttaccacattcgtggaaggaatggaaatttactattttgcagatgggaagtctccagtataaccattgtgtgtgagatkataatatgggtgttgcagtgttggattatacctcggaacagtgtgttaattttmtgtcagtttttctgctggctgagtttcaagtgtagttgatgagtacttcaagtggatgaagtgggatatgttaacttttgccacmcagattgttcttccctcacaaccattttttcttttttaaatcattttcatttttctcttgatccttccacaacacttgaaaacttgattgtgctgccagtatctgctgctaaagaaccttttaagaactaaaaataaatcttaccctgtggcagaaggcattggaggctgtagaaatggtagttggcaagaagtagttgtcaccagcatttctggcgtgatcttggcctaggatgtggtcttgtgcttacctggtgctttggggcactctgccagtttttggctctcagaactcactcat

SEQ ID NO: 61521 - DNA, 600 bp, Chicken  19866894322225_1
tgctcagtgtttacagaggtcacagatgagctgtttcctgctgaaagtctgtcaggcagaaaaggggattgcttgtttataaatacggagtgatttcttggtgcaggcagttgccctttgctcttccaggcccttcagcagaagaatgtggagtgtgctcgtgtctacgcagagaatgccatccgcaagaagaacgaggggctgaactggctccgcatggcttcccgagtggatgcggtggcctccaaggtgcagacagcagtgacaatgaagggggtaagagcctctgttcttcagcayggggttctgagagcagtctgtgccctgtgtagagtgttggctcctcccttctcatctgcctcgaaccttggacttccttgttctcagatgaggatcctgtaaagctttgcagtgagccgagtcactctcagtttagtgaagcttccgacatgcccacagagagctctccagcctgctttattctggctctcattaaggaggttcatccctgctctcttgtctgtgctagccattgcatatrtgtttatagagagatgggctgggacctgtcttgctcggagctgcaggccaggtgtggca

SEQ ID NO: 61522 - DNA, 563 bp, Chicken  19866894322225_2
cctccaaggtgcagacagcagtgacaatgaagggggtaagagcctctgttcttcagcayggggttctgagagcagtctgtgccctgtgtagagtgttggctcctcccttctcatctgcctcgaaccttggacttccttgttctcagatgaggatcctgtaaagctttgcagtgagccgagtcactctcagtttagtgaagcttccgacatgcccacagagagctctccagcctgctttattctggctctcattaaggaggttcatccctgctctcttgtctgtgctagccattgcatatrtgtttatagagagatgggctgggacctgtcttgctcggagctgcaggccaggtgtggcacctctggctgtgctctgcctagggctgtgtgccagggttttactttcagcagggatgactttgcttctggacagcatccatgaagcaatatcctcttgcaggtgacgaaaaacatggctcaggtgaccaaggctttggacaaagctctgagctccatggaccttcagaaggtgtctgcagtgatgggataagttcgagcagcag

SEQ ID NO: 61523 - DNA, 600 bp, Chicken  19866894322227_1
agctgtaatgagggagggcaatcagatgttgggaaggaattgagtgccagactagtagctttatttcttcttattaccataatgctttcaaagcaacagaaagccagtagttaacctagtgcctcctcttgctttctttaccacaggcagcaaggtcctgtaggaggcagcagaagctctgtgccagctcaggagctgcatgagtagatcctcacagatggacttctactccaggctggggctatgtccccagatcttctcactcggagccctttcattccttacctccagccttgtccygggagcaggaaaactgtggtgcctcattctggatgcccaatcattgtgcaatggaggggtgagaaacagtctattcatctaagatatctcatagaacactggtgtattttcaacattactttggccacaaatccaaaacagtaccttacaggcttctctgaaggaaactaagtccatctcagccagaccaagtgcaatactttattgctgtggggcttttttagatttgcatttgaattttgtctcgtctaaaaaaaaaagaggggcattttttttaatcacattaggagaaaatcttag

SEQ ID NO: 61524 - DNA, 600 bp, Chicken  19866894322227_2
tagatttgcatttgaattttgtctcgtctaaaaaaaaaagaggggcattttttttaatcacattaggagaaaatcttagattttatgaaatatggcctgtctggatcctgctgcaaggaacagagaaccaactcagccctacagcatagaagcatccttggctttgtatcacccactggaaagcaaaaagacataggtttgggcatagtcaaagtgttgtttgataggcagatttgttacctagtgtgcagtaggccagtctcacatacagaaatgagatactgatttattgtaaagttscacaagtttgggtgctrtgtggccttycatgaagctagcacaccccaggatttttgtgacatgtttttatacctactcttatcacttggccattaccccracacagccttcagccttcaattggtcagctaaagatagggctaatttccctatttgctggttagctagacatgctaattaaccacaagttttctcaagatgctcatatcttcaaagacaattttagtcatggcattgtggttatgagttcctctacttaatcactttagcagcttcaaggatggtcatcctgatttaaat

SEQ ID NO: 61525 - DNA, 600 bp, Chicken  19866894322227_3
tttgtctcgtctaaaaaaaaaagaggggcattttttttaatcacattaggagaaaatcttagattttatgaaatatggcctgtctggatcctgctgcaaggaacagagaaccaactcagccctacagcatagaagcatccttggctttgtatcacccactggaaagcaaaaagacataggtttgggcatagtcaaagtgttgtttgataggcagatttgttacctagtgtgcagtaggccagtctcacatacagaaatgagatactgatttattgtaaagttscacaagtttgggtgctrtgtggccttycatgaagctagcacaccccaggatttttgtgacatgtttttatacctactcttatcacttggccattaccccracacagccttcagccttcaattggtcagctaaagatagggctaatttccctatttgctggttagctagacatgctaattaaccacaagttttctcaagatgctcatatcttcaaagacaattttagtcatggcattgtggttatgagttcctctacttaatcactttagcagcttcaaggatggtcatcctgatttaaataaaaatacatatttgct

SEQ ID NO: 61526 - DNA, 600 bp, Chicken  19866894322227_4
ctaaaaaaaaaagaggggcattttttttaatcacattaggagaaaatcttagattttatgaaatatggcctgtctggatcctgctgcaaggaacagagaaccaactcagccctacagcatagaagcatccttggctttgtatcacccactggaaagcaaaaagacataggtttgggcatagtcaaagtgttgtttgataggcagatttgttacctagtgtgcagtaggccagtctcacatacagaaatgagatactgatttattgtaaagttscacaagtttgggtgctrtgtggccttycatgaagctagcacaccccaggatttttgtgacatgtttttatacctactcttatcacttggccattaccccracacagccttcagccttcaattggtcagctaaagatagggctaatttccctatttgctggttagctagacatgctaattaaccacaagttttctcaagatgctcatatcttcaaagacaattttagtcatggcattgtggttatgagttcctctacttaatcactttagcagcttcaaggatggtcatcctgatttaaataaaaatacatatttgctatatctaagg

SEQ ID NO: 61527 - DNA, 600 bp, Chicken  19866894322227_5
ctggatcctgctgcaaggaacagagaaccaactcagccctacagcatagaagcatccttggctttgtatcacccactggaaagcaaaaagacataggtttgggcatagtcaaagtgttgtttgataggcagatttgttacctagtgtgcagtaggccagtctcacatacagaaatgagatactgatttattgtaaagttscacaagtttgggtgctrtgtggccttycatgaagctagcacaccccaggatttttgtgacatgtttttatacctactcttatcacttggccattaccccracacagccttcagccttcaattggtcagctaaagatagggctaatttccctatttgctggttagctagacatgctaattaaccacaagttttctcaagatgctcatatcttcaaagacaattttagtcatggcattgtggttatgagttcctctacttaatcactttagcagcttcaaggatggtcatcctgatttaaataaaaatacatatttgctatatctaaggatatgcatacaaaggtttgtatgcgggattctatgatgtttcttactctttcacttttcttgcttcatttacc

SEQ ID NO: 61528 - DNA, 599 bp, Chicken  19866894322229_1
  misc_feature (1)..(154): n is any nucleotide
nnnnnnnnnnnnnnnnnnnnnnnnnnnnnnnnnnnnnnnnnnnnnnnnnnnnnnnnnnnnnnnnnnnnnnnnnnnnnnnnnnnnnnnnnnnnnnnnnnnnnnnnnnnnnnnnnnnnnnnnnnnnnnnnnnnnnnnnnnnnnnnnnnnnnnnnnntatcagatgataagtatagatccaagagtattctttgacagtggacacaatcacctttgtaatgagtctgtactatatgaagaacaaacaatgggctagaggccaggcatcttaataacaatgtaaaaaaagccttattttaaacmtgtatttgttcctactgctgttcttacctctatctttttacttatcgtcagtgttgtgaagcccactggtctgatggttttatgactcggtaactttctggcaacttctgcaaagtgcaggtttgtagttttgattttaaatgatgtctttgacaactgtacatttcaaatgccttgtgtatatagctcagcaataatgcaaagtctggtgatgctcagccaaactgttcactgcgtagtgaacttcattgcttgtgcttttccgtagtgatagaagatgacctgaaacagttaagaac

SEQ ID NO: 61529 - DNA, 600 bp, Chicken  19866894322233_1
tctttttggcattgccagaaacacatagtaagctgtgtagctcaaaggtttgatagggtgtaataacttccaggtatgctctgtgcagcagatcataagtcaggaacaaggcaggtagggtttcttctacatataaccaactcctgctgagtttctgatatgacctgcaaaaacttggattcagatctcagcccttctcagtaggttgccaccgggtttgcttagtgttagaacacatgtagagtaagtggtattcgggtatgcagtaagtggcttgctcaagtccattggctgactcartgcaaatatctctgaaaattcctgatagacgaagtgtatgagttgtttttactcttggggcaaatatttaaggatgttcagttaaactctaaatattggtgttggcagagagagtataatgttgtttgtcacattgctgtaaaagcctgtttcatttatttctgttacattctttggagtcatgctgtaggaaagtgagatgtctgttcttttgtggcttgtgtgtgtgtcttcaaggggaagtgtgggtacatacataagatggctaaagttaacatgccacatccacttgtgggtgcc

SEQ ID NO: 61530 - DNA, 600 bp, Chicken  19866894322237_1
tgaggctgaaaatgccatgaaatggaataatcgcttctgaagcttctgcaaactctaagatacattgaaattcaaatgaactcagaaacaagcaagttgctcaaaagtagtttgctgacagaagaaatcagtggggaaaaaaaaacaaaaaacctttgctcttagcgcacagttatctcttgactcttccataagggaaagcagaatattctctatcatcacactgttataaagcccagcacacatcaatagttaaacatgcttagttcttcctgcttttgaaatactaataaacaaacrctcagctgcactgacagaaaacatagcgtaaaaacactctaaagtaacatctgctataacaggaactctacctccaacattattagtaatgtcagctgaaattacactacactagatggcttccacatgcatacaaagcatgatctaatatragaacaaaaatgccctcaggcacctttcacatagaaattacctctacattcctggaataytgtcatcatggaaaggctgcacgctgtccagtagtcaccaatttacaaaaaatagtataaatagaaagctactccaaatatgtatcag

SEQ ID NO: 61531 - DNA, 600 bp, Chicken  19866894322237_2
cctttgctcttagcgcacagttatctcttgactcttccataagggaaagcagaatattctctatcatcacactgttataaagcccagcacacatcaatagttaaacatgcttagttcttcctgcttttgaaatactaataaacaaacrctcagctgcactgacagaaaacatagcgtaaaaacactctaaagtaacatctgctataacaggaactctacctccaacattattagtaatgtcagctgaaattacactacactagatggcttccacatgcatacaaagcatgatctaatatragaacaaaaatgccctcaggcacctttcacatagaaattacctctacattcctggaataytgtcatcatggaaaggctgcacgctgtccagtagtcaccaatttacaaaaaatagtataaatagaaagctactccaaatatgtatcagttatcatacacagacaggttataaaactagaaaaaactactgtggccatctaacataaacagagcaaagggaattttgcagattagttcatgttagaaatacactacgtaacagcatccagtggcaggcagcaaccacaaataaattccctg

SEQ ID NO: 61532 - DNA, 600 bp, Chicken  19866894322237_3
ctatcatcacactgttataaagcccagcacacatcaatagttaaacatgcttagttcttcctgcttttgaaatactaataaacaaacrctcagctgcactgacagaaaacatagcgtaaaaacactctaaagtaacatctgctataacaggaactctacctccaacattattagtaatgtcagctgaaattacactacactagatggcttccacatgcatacaaagcatgatctaatatragaacaaaaatgccctcaggcacctttcacatagaaattacctctacattcctggaataytgtcatcatggaaaggctgcacgctgtccagtagtcaccaatttacaaaaaatagtataaatagaaagctactccaaatatgtatcagttatcatacacagacaggttataaaactagaaaaaactactgtggccatctaacataaacagagcaaagggaattttgcagattagttcatgttagaaatacactacgtaacagcatccagtggcaggcagcaaccacaaataaattccctgctttaagcattgtatacaccatttctcctttaaatataccgaacttcaaactgtggccaa

SEQ ID NO: 61533 - DNA, 600 bp, Chicken  19866894322238_1
acaatggaatacattcatcacaccaaagcaagtcattgtgttctttataatactccagtgtgtgcactatgctgacaagttctggcaataaggatatgaataaagatatgaatcacatattcacaatccaagaatgataatggaaacgttaatgaagagctaaagagctttcattctgccaaatgagatctgcatgttgcacactgatattaaaatcatacatgtaaaagtagtcaaacagaactaatgcagaaagatccggaactctttgatgcatgttgtatttgtagaatcatttgytttacagctggcaagtagctttgaaagcgtactcgttcatgtacctcygcccatgctcagtgggtgaagatcttaaaattcaaaacattcataaaatctgctttcttacagtgcagtatcttaaaatttttagttttactattacgataccttcaagtctacagtaaaattggatgcattattctgatacctgctttatcatagaatggcttgggtagttctccatcaaacctgcctgtgctagtaataaaataggaagcataagtactgacatgactcccaatatcttttcatcatgtc

SEQ ID NO: 61534 - DNA, 600 bp, Chicken  19866894322238_2
aatactccagtgtgtgcactatgctgacaagttctggcaataaggatatgaataaagatatgaatcacatattcacaatccaagaatgataatggaaacgttaatgaagagctaaagagctttcattctgccaaatgagatctgcatgttgcacactgatattaaaatcatacatgtaaaagtagtcaaacagaactaatgcagaaagatccggaactctttgatgcatgttgtatttgtagaatcatttgytttacagctggcaagtagctttgaaagcgtactcgttcatgtacctcygcccatgctcagtgggtgaagatcttaaaattcaaaacattcataaaatctgctttcttacagtgcagtatcttaaaatttttagttttactattacgataccttcaagtctacagtaaaattggatgcattattctgatacctgctttatcatagaatggcttgggtagttctccatcaaacctgcctgtgctagtaataaaataggaagcataagtactgacatgactcccaatatcttttcatcatgtcattcagctaagtgttacttgaacacacatattgcaacataacacatta

SEQ ID NO: 61535 - DNA, 599 bp, Chicken  19866894322243_1
  misc_feature (1)..(171): n is any nucleotide
nnnnnnnnnnnnnnnnnnnnnnnnnnnnnnnnnnnnnnnnnnnnnnnnnnnnnnnnnnnnnnnnnnnnnnnnnnnnnnnnnnnnnnnnnnnnnnnnnnnnnnnnnnnnnnnnnnnnnnnnnnnnnnnnnnnnnnnnnnnnnnnnnnnnnnnnnnnnnnnnnnnnnnnnnnntatgcttttgctgatccaatcactgctaacctggaaggtgctgttacatttgaggcaccagagctgcctgaagagacactcatggaggtaggtatatctgtacagggacttgttaggggcagagcacargggacaataaaaggaaagtggatccagaggttctctggctccacatctgtagccaaagtggtcacttccaaagatggtgtgaactggcttcaggagagctgggcgacacagtgctcaggaaatttaggatatacttagcacagtggtttttgagcctgctgttgagctttttagtccttgagacagcgcatgaatggagttaaattcatgatttcaaaagctgaaattgcaggttggaagtgtcagttacctggtgtgttctgcatcatgagtttctgaagagaactgggatactttgg

SEQ ID NO: 61536 - DNA, 600 bp, Chicken  19866894322243_2
gaactggcttcaggagagctgggcgacacagtgctcaggaaatttaggatatacttagcacagtggtttttgagcctgctgttgagctttttagtccttgagacagcgcatgaatggagttaaattcatgatttcaaaagctgaaattgcaggttggaagtgtcagttacctggtgtgttctgcatcatgagtttctgaagagaactgggatactttgggccttttcccttttaaaaggctcagtgttagtaatagctgacctgagtgagggagtagcttggatatatcaaatgcctgcytgctgcatgtacttatggactcagtgatacagcctcagctgaaagggtctgaaaaaaagtaaacgtgacayttgtgttactgatggggggaaggggaacgtgacatgctttgcacaagaacagctgaaccagattgctgatctgaaaractgccaggctccccttctctgcaggctgtaggctggctgaagcagagcgaatgcttttgtagctgagatatagttgaaatgtaggtcagagtacccattttggaggataggtgagagactgaatcagtcatggattcagctctatttgtaa

SEQ ID NO: 61537 - DNA, 600 bp, Chicken  19866894322243_3
gagcctgctgttgagctttttagtccttgagacagcgcatgaatggagttaaattcatgatttcaaaagctgaaattgcaggttggaagtgtcagttacctggtgtgttctgcatcatgagtttctgaagagaactgggatactttgggccttttcccttttaaaaggctcagtgttagtaatagctgacctgagtgagggagtagcttggatatatcaaatgcctgcytgctgcatgtacttatggactcagtgatacagcctcagctgaaagggtctgaaaaaaagtaaacgtgacayttgtgttactgatggggggaaggggaacgtgacatgctttgcacaagaacagctgaaccagattgctgatctgaaaractgccaggctccccttctctgcaggctgtaggctggctgaagcagagcgaatgcttttgtagctgagatatagttgaaatgtaggtcagagtacccattttggaggataggtgagagactgaatcagtcatggattcagctctatttgtaatgccttcttggaccacctaggactgggaaaggctctttccattggaatcttgctggtgtttcaaaaaccac

SEQ ID NO: 61538 - DNA, 600 bp, Chicken  19866894322243_4
gcaggttggaagtgtcagttacctggtgtgttctgcatcatgagtttctgaagagaactgggatactttgggccttttcccttttaaaaggctcagtgttagtaatagctgacctgagtgagggagtagcttggatatatcaaatgcctgcytgctgcatgtacttatggactcagtgatacagcctcagctgaaagggtctgaaaaaaagtaaacgtgacayttgtgttactgatggggggaaggggaacgtgacatgctttgcacaagaacagctgaaccagattgctgatctgaaaractgccaggctccccttctctgcaggctgtaggctggctgaagcagagcgaatgcttttgtagctgagatatagttgaaatgtaggtcagagtacccattttggaggataggtgagagactgaatcagtcatggattcagctctatttgtaatgccttcttggaccacctaggactgggaaaggctctttccattggaatcttgctggtgtttcaaaaaccacttggatatctgcagacatctgcatgcattgtttgtagagtgtggatttgctcaattagctgcagagctacagggcta

SEQ ID NO: 61539 - DNA, 599 bp, Chicken  19866894322251_1
  misc_feature (1)..(41): n is any nucleotide
nnnnnnnnnnnnnnnnnnnnnnnnnnnnnnnnnnnnnnnnncctgctgtataaacccagagaagctgtctcttgcaactgtagtgttcccttctggcagtccttttttcttcctttttcttctgtcaaatatgcagaaaatacctttgaaaatgtacacagtgttcacaataaatggaaataacacagatgcacgcgtgtacatttatggaagtgtaataattctgagaacagtacagagagctcagttaacagactacagtaaacgatgccaggttacctaaacctcatagtcccaaarggaaggattttagacagcttgctgatgttcacagtgtcatgacgtatgtcagcaccaagcccacgtaacgggtttaaatgatctattgacctccaacggatattatgaacatgggtatcatccttcattgttaataaaaagggaaccaactgagacattttgattcttgtttgtcctgcttcaccgttattcagacccttccatattggaaaagcatgaagagacagcaagcagtttcaattcagtgtttctgaactggggatccattgtgataggaaagatttcaagttaaagtgaga

SEQ ID NO: 61540 - DNA, 493 bp, Chicken  19866894322262_1
tacattcctatatgagtatagggagaaaagcaagtatttaagggtaaaaatgagtagtaaacaaaggcaaggatggtataaaaaacacgcacacacacacaaaaattagtgtataatacatgcctttcctataaagaaatcaagcactgaaaaccatgacagtcagtgatcgaatcagctctttttgcctattctggtccatgttgttataacttgaattcatcagccataaatacatttcagcttcttttatgtgaaagttaccatgcaacacatgaagactgtaaacttaattcaagstaacatacacagacttaatacagcttttagatttactccactttttctctcagtttgctatcaaatggcagtatgctgttatattcaacactgtatagaattccatgaagacatgatagcttctatttaaaacagttaacaatcttggtttaatatgagagatagcacacaacacagaaagtaaggatagtta

SEQ ID NO: 61541 - DNA, 600 bp, Chicken  19866894322267_1
cctccttcctgcgctgcctcgttggctcagcatctcccctcgtgccgctcccatcctcatcccagcactcctcacggcccgcacggagctgcctttgctttggtggggggggaaaataagcacggagggtgagctcaaggaggatgcgcgatgcacgaggatgagtcacggccagcagagccgggcagagcttccctctgcctccagcttcctccctgacccctggcagagggccggagctgtcggcatcccctgagcagctctgcctggggaagtggggaggcacagcgctgtggctgsgggagatgccagcagctcggataaaaacacagcaggggtgaagggggccctcatggcacaaacacacagcgtgcsgtggtctcctctcccacccaagtggcagcagctccaggaggtgcagcggggatgggatgagcccatgtggctgcagccagattgcagcctgggggacgccstcaggttcagacctgagggggaaactgaggcataggactgaaaagggaatggcccatccagagggggcaaatgcagagcacgcgggtctggatgccagcggggatacagagatgttgagggctc

SEQ ID NO: 61542 - DNA, 600 bp, Chicken  19866894322267_2
ggcccgcacggagctgcctttgctttggtggggggggaaaataagcacggagggtgagctcaaggaggatgcgcgatgcacgaggatgagtcacggccagcagagccgggcagagcttccctctgcctccagcttcctccctgacccctggcagagggccggagctgtcggcatcccctgagcagctctgcctggggaagtggggaggcacagcgctgtggctgsgggagatgccagcagctcggataaaaacacagcaggggtgaagggggccctcatggcacaaacacacagcgtgcsgtggtctcctctcccacccaagtggcagcagctccaggaggtgcagcggggatgggatgagcccatgtggctgcagccagattgcagcctgggggacgccstcaggttcagacctgagggggaaactgaggcataggactgaaaagggaatggcccatccagagggggcaaatgcagagcacgcgggtctggatgccagcggggatacagagatgttgagggctcaaaccccaggtgggaggaaggggaaagcacaggcagggccacttggtttggatgtacatctcctgaaaggacccc

SEQ ID NO: 61543 - DNA, 600 bp, Chicken  19866894322267_3
agagccgggcagagcttccctctgcctccagcttcctccctgacccctggcagagggccggagctgtcggcatcccctgagcagctctgcctggggaagtggggaggcacagcgctgtggctgsgggagatgccagcagctcggataaaaacacagcaggggtgaagggggccctcatggcacaaacacacagcgtgcsgtggtctcctctcccacccaagtggcagcagctccaggaggtgcagcggggatgggatgagcccatgtggctgcagccagattgcagcctgggggacgccstcaggttcagacctgagggggaaactgaggcataggactgaaaagggaatggcccatccagagggggcaaatgcagagcacgcgggtctggatgccagcggggatacagagatgttgagggctcaaaccccaggtgggaggaaggggaaagcacaggcagggccacttggtttggatgtacatctcctgaaaggacccccagcttcctagcagccggcagctctgtctcactcccaccgctatgctgagccaggcgtggggcagtgactcactgcgtcgtgcagcaaagcgctgccaaac

SEQ ID NO: 61544 - DNA, 600 bp, Chicken  19866894322267_4
ggtctggatgccagcggggatacagagatgttgagggctcaaaccccaggtgggaggaaggggaaagcacaggcagggccacttggtttggatgtacatctcctgaaaggacccccagcttcctagcagccggcagctctgtctcactcccaccgctatgctgagccaggcgtggggcagtgactcactgcgtcgtgcagcaaagcgctgccaaaccccttctccacacaggcattccatgcacagcctggggagaggcagcaggggggcgaacccgaggttgtacagggcctgagagcrcaaaaccctgcagagctgctgtctccatcaccccttcgcatctgtaccactgcaggagagctgcagggtcagggctcagcaaggcatcccgccgctctgacttcagctgctcaggcaaatcgctctggaaatcaattccaacctatcaggcatcaggaaagccataaactgcccctcaagacaccaaatcgatgcttcctcttagcccagagcagagcggggggtggggagaggcgggtcggggtcctgctgcaaacaggagggaaagaaacagcccacccggtcagagggaaatgaccc

SEQ ID NO: 61545 - DNA, 599 bp, Chicken  19866894322270_1
  misc_feature (1)..(248): n is any nucleotide
nnnnnnnnnnnnnnnnnnnnnnnnnnnnnnnnnnnnnnnnnnnnnnnnnnnnnnnnnnnnnnnnnnnnnnnnnnnnnnnnnnnnnnnnnnnnnnnnnnnnnnnnnnnnnnnnnnnnnnnnnnnnnnnnnnnnnnnnnnnnnnnnnnnnnnnnnnnnnnnnnnnnnnnnnnnnnnnnnnnnnnnnnnnnnnnnnnnnnnnnnnnnnnnnnnnnnnnnnnnnnnnnnnnnnnnnnnnnnnnnnnnnnnnnaaacccagaagtggttgtactgcttcctccctcctggtggtgtgaggcaaayggtgagggcctcagtggcacctcaaagatgtgtgggacaaatggcagaactcttccactgacgttctacagatctctttgctgactaaaactacatttcaagatgaagctgaggttgctgtttctgtatgagtctcaggtaaagaaaccaagctcatagatcagtacaggtcttcagtgagtcactccatggctactgccctgctagctgagcacagcagcaygctcagaagcctaggtctgcacctgggttaacagccagggctgtgactgacatctatctgctgaaccttgcctttt

SEQ ID NO: 61546 - DNA, 599 bp, Chicken  19866894322270_2
  misc_feature (1)..(25): n is any nucleotide
nnnnnnnnnnnnnnnnnnnnnnnnnaaacccagaagtggttgtactgcttcctccctcctggtggtgtgaggcaaayggtgagggcctcagtggcacctcaaagatgtgtgggacaaatggcagaactcttccactgacgttctacagatctctttgctgactaaaactacatttcaagatgaagctgaggttgctgtttctgtatgagtctcaggtaaagaaaccaagctcatagatcagtacaggtcttcagtgagtcactccatggctactgccctgctagctgagcacagcagcaygctcagaagcctaggtctgcacctgggttaacagccagggctgtgactgacatctatctgctgaaccttgccttttccctccccttcttggctcagtactccattttggtagaccattccttctgcttggccrcctgccccaagggagggcacgggttmccagtaaggtcagcctcctgcacaggagcctgtaaaaggagttacattgcgtatagacatatttcctccaggtaaacagcttttactcactcctttttactgcgtgctttacacataccaacagtgaatcaaagggaaac

SEQ ID NO: 61547 - DNA, 600 bp, Chicken  19866894322270_3
actgacgttctacagatctctttgctgactaaaactacatttcaagatgaagctgaggttgctgtttctgtatgagtctcaggtaaagaaaccaagctcatagatcagtacaggtcttcagtgagtcactccatggctactgccctgctagctgagcacagcagcaygctcagaagcctaggtctgcacctgggttaacagccagggctgtgactgacatctatctgctgaaccttgccttttccctccccttcttggctcagtactccattttggtagaccattccttctgcttggccrcctgccccaagggagggcacgggttmccagtaaggtcagcctcctgcacaggagcctgtaaaaggagttacattgcgtatagacatatttcctccaggtaaacagcttttactcactcctttttactgcgtgctttacacataccaacagtgaatcaaagggaaacaagactgtattttaggtttaagtttggatgtgggtgactgttacttttgtctcagttttaagaagagacacgtgagaatatctgactatgtaacgcgcccaacttgtcctgacttccctccaacctgtctcatt

SEQ ID NO: 61548 - DNA, 600 bp, Chicken  19866894322270_4
gactaaaactacatttcaagatgaagctgaggttgctgtttctgtatgagtctcaggtaaagaaaccaagctcatagatcagtacaggtcttcagtgagtcactccatggctactgccctgctagctgagcacagcagcaygctcagaagcctaggtctgcacctgggttaacagccagggctgtgactgacatctatctgctgaaccttgccttttccctccccttcttggctcagtactccattttggtagaccattccttctgcttggccrcctgccccaagggagggcacgggttmccagtaaggtcagcctcctgcacaggagcctgtaaaaggagttacattgcgtatagacatatttcctccaggtaaacagcttttactcactcctttttactgcgtgctttacacataccaacagtgaatcaaagggaaacaagactgtattttaggtttaagtttggatgtgggtgactgttacttttgtctcagttttaagaagagacacgtgagaatatctgactatgtaacgcgcccaacttgtcctgacttccctccaacctgtctcattgcagcaaaaagaccaagatcaggatg

SEQ ID NO: 61549 - DNA, 600 bp, Chicken  19866894322282_1
atgatgccaggaccaatgtcaggactgaggcagagcaatgcatagacttcccaatgcattccacaatccgttaagctcatgcatcctatttactgttacctgtaagtgtgtctatattaatatatctgggaggaatttcctgagttttggaaatgaagcacttctacagtgtgctcattttaatttaagtgcagagaatacaaaataactttttataattcatcttctgtctcctccttccaattgcatctcgtctgctctcatatgttcaaaacagcaggcaaacggggaaaaaaatgmacataaaacccctctggttctataatacatatctggttcaggcctttgcaatttttaccatggttattgagttactttcatagcccaagtagggtttttatacaattgatttcagtgagtggttgcattagtcattactgggttttatgtgtttgctgtaaaacactgaccaggttttaaaagcatattggccagtaaaatgcaaaggtggtaattgccaaagtatygagacaatagctgtagcctgttctcattttgaacatgtggggggttttccatgtggggggttccaggggactg

SEQ ID NO: 61550 - DNA, 449 bp, Chicken  19866894322282_2
tgtctcctccttccaattgcatctcgtctgctctcatatgttcaaaacagcaggcaaacggggaaaaaaatgmacataaaacccctctggttctataatacatatctggttcaggcctttgcaatttttaccatggttattgagttactttcatagcccaagtagggtttttatacaattgatttcagtgagtggttgcattagtcattactgggttttatgtgtttgctgtaaaacactgaccaggttttaaaagcatattggccagtaaaatgcaaaggtggtaattgccaaagtatygagacaatagctgtagcctgttctcattttgaacatgtggggggttttccatgtggggggttccaggggactggtatttcttactcaggaaatattaggtctcagttgcttaaacgtctcgatttaagtactaggaaacatatgaggag

SEQ ID NO: 61551 - DNA, 600 bp, Chicken  19866894322287_1
ggcttttttagcatttactccaggtggagtgcacacagggacagtcactgagactgacactcagtagcttgtgaggatggggtaaccagtgccattcgtgtccttagtcactggcatttttcagtgtgaaaacacaacacctttgaatgcaggagcttgtcacatccacactctcattttccctggcacacccactgtttttcttacacgctgtatagagctgctgtctaataaatacaggaaaggtggtaaaatgtttggctttcctctcagaaagaatggtgagatattggcacaggygggagtggagtcactgtccctggagatgttccaggaatgtggagacatggcactgagggacgtggttagtgggcatggcggggatgggttggtggctggacatgataccttggaggtcttttccagccttaatgattgtatgattcacaccctgccttctccttgcctcagctccttaccaatgagaccaggcctcaagccaggatgataaaagcaaaaggcctgaaacacaggtaaacacaccaraagcaagaggatgaatccccttacccagtccttagacagataagctggaaaaca

SEQ ID NO: 61552 - DNA, 600 bp, Chicken  19866894322287_2
tggtaaaatgtttggctttcctctcagaaagaatggtgagatattggcacaggygggagtggagtcactgtccctggagatgttccaggaatgtggagacatggcactgagggacgtggttagtgggcatggcggggatgggttggtggctggacatgataccttggaggtcttttccagccttaatgattgtatgattcacaccctgccttctccttgcctcagctccttaccaatgagaccaggcctcaagccaggatgataaaagcaaaaggcctgaaacacaggtaaacacaccaraagcaagaggatgaatccccttacccagtccttagacagataagctggaaaacagggactaggaacataaaaatgaagagtgcagttagaaaaatgacaaacaaggacatttgagcagcttgcttggcaccaggatttactcactcagcaggaacactgacccagataccgtctgcacagtcactaacctctcagcactcagcaggaacaggggtgtgatggagtrgaaggaggggaataattcctgttggatccgagcatgtcctggatgaagatctttggtggcaggcagccagctca

SEQ ID NO: 61553 - DNA, 600 bp, Chicken  19866894322287_3
tccttaccaatgagaccaggcctcaagccaggatgataaaagcaaaaggcctgaaacacaggtaaacacaccaraagcaagaggatgaatccccttacccagtccttagacagataagctggaaaacagggactaggaacataaaaatgaagagtgcagttagaaaaatgacaaacaaggacatttgagcagcttgcttggcaccaggatttactcactcagcaggaacactgacccagataccgtctgcacagtcactaacctctcagcactcagcaggaacaggggtgtgatggagtrgaaggaggggaataattcctgttggatccgagcatgtcctggatgaagatctttggtggcaggcagccagctcattccctgcaagttcatcaaaccccggcgatgaggggagatggcatttcccttgggagaaagagcagcccacaggagatacacttccaaggaaggtatgtaaggctgctaagctggttgagagatcttgcagttaccatracctcattttcacacagttccactttgctttgtactagaacatggaccgggctaaagctgattttccttgagctatctcatcttcat

SEQ ID NO: 61554 - DNA, 600 bp, Chicken  19866894322287_4
ctcactcagcaggaacactgacccagataccgtctgcacagtcactaacctctcagcactcagcaggaacaggggtgtgatggagtrgaaggaggggaataattcctgttggatccgagcatgtcctggatgaagatctttggtggcaggcagccagctcattccctgcaagttcatcaaaccccggcgatgaggggagatggcatttcccttgggagaaagagcagcccacaggagatacacttccaaggaaggtatgtaaggctgctaagctggttgagagatcttgcagttaccatracctcattttcacacagttccactttgctttgtactagaacatggaccgggctaaagctgattttccttgagctatctcatcttcatggaaggcaacaaagcactccttcattaggcagctgtacttcccattagaaacatccactttctagacaygcactccatttgttctccttcattagatccaagttgctccatgcccaaagatgtgattgcaatcgctctcaccaaggtatcattttattaagagtaacagcatccttacacgtctcatcaaaagctgctttcttcagattactt

SEQ ID NO: 61555 - DNA, 592 bp, Chicken  19866894322287_5
gctcattccctgcaagttcatcaaaccccggcgatgaggggagatggcatttcccttgggagaaagagcagcccacaggagatacacttccaaggaaggtatgtaaggctgctaagctggttgagagatcttgcagttaccatracctcattttcacacagttccactttgctttgtactagaacatggaccgggctaaagctgattttccttgagctatctcatcttcatggaaggcaacaaagcactccttcattaggcagctgtacttcccattagaaacatccactttctagacaygcactccatttgttctccttcattagatccaagttgctccatgcccaaagatgtgattgcaatcgctctcaccaaggtatcattttattaagagtaacagcatccttacacgtctcatcaaaagctgctttcttcagattacttctacagcttttctctacactcctttcaatttactcaccttcaaaataggatcaccagacctggatgtaccactgccatgattgaaggagtaacatagagcatggcaagacacagctcattttgtctttaggtaagacatacaccaaag

SEQ ID NO: 61556 - DNA, 479 bp, Chicken  19866894322302_1
cgcctggctgcccctcacctgtgcgggaatgagctgggaggcttttagaaggatttgagaccataagaaaataacaaggcctgctggtatttccccttcgaatttccattggcttaagctataaagaaataaggggcgggggggtgaaaaaatctcttgtggaaagcaataaaagctgatttatttacctggcagaacagagctcagcattcttggctggaggtccagcacagccctccaacggctctgcctcccttaccccaacctggagcagctccactgcttctgctgttggcatcygattccctgcggcagccctgatcagctgaaccccatcattgccacagatgaccccaaaatgaatgaggagaccacggtgatacccacagtcagggagaggcgtctctccccagggggggtggagagaaggaagggaatcttttaggatcatctgagcttacctcacacagactctgatc

SEQ ID NO: 61557 - DNA, 600 bp, Chicken  19866894322304_1
ttaaatgcgctgacttccaaacccttattttcctccctgcccttctgcagttagtttggtttaaaaatagtaaatgtgaaaccttactattattccaattttcctgttgttttcataactaaatgttttatttgtaaagattttaaggattatgagtaattctatagcagtacagctagggactttgagaaaaagcggtgtgttttccaaggctgagtacgtgactgtaggaattaacaatactgtgaaatctggttagaaattaattctccatacaatttgaactgtgattctggattygcargccaggtccagtagtggtttgcagaaataaacaattccctggacagcaggccataaaacaggtcagcgttaaaatatgcagtaacatctttcaaaaggctgtataggctactctgcctgcctgaattcttttgcaggatccaatttgttacatgcgttttgagttttgtcacctgagaggcatagggaaagtagcagtggcttttctgggagtcttygtggccacccaccagaggggcaatgtttgtgtgttctcttagaatttggaaatgtcattctaatttggcaaaagcagcc

SEQ ID NO: 61558 - DNA, 600 bp, Chicken  19866894322304_2
atgcgctgacttccaaacccttattttcctccctgcccttctgcagttagtttggtttaaaaatagtaaatgtgaaaccttactattattccaattttcctgttgttttcataactaaatgttttatttgtaaagattttaaggattatgagtaattctatagcagtacagctagggactttgagaaaaagcggtgtgttttccaaggctgagtacgtgactgtaggaattaacaatactgtgaaatctggttagaaattaattctccatacaatttgaactgtgattctggattygcargccaggtccagtagtggtttgcagaaataaacaattccctggacagcaggccataaaacaggtcagcgttaaaatatgcagtaacatctttcaaaaggctgtataggctactctgcctgcctgaattcttttgcaggatccaatttgttacatgcgttttgagttttgtcacctgagaggcatagggaaagtagcagtggcttttctgggagtcttygtggccacccaccagaggggcaatgtttgtgtgttctcttagaatttggaaatgtcattctaatttggcaaaagcagcctcca

SEQ ID NO: 61559 - DNA, 600 bp, Chicken  19866894322304_3
tgactgtaggaattaacaatactgtgaaatctggttagaaattaattctccatacaatttgaactgtgattctggattygcargccaggtccagtagtggtttgcagaaataaacaattccctggacagcaggccataaaacaggtcagcgttaaaatatgcagtaacatctttcaaaaggctgtataggctactctgcctgcctgaattcttttgcaggatccaatttgttacatgcgttttgagttttgtcacctgagaggcatagggaaagtagcagtggcttttctgggagtcttygtggccacccaccagaggggcaatgtttgtgtgttctcttagaatttggaaatgtcattctaatttggcaaaagcagcctccatgtttgtgtcccccacgctacttttgttcctcgtactgtttattttgttgtgcaagttgataatgtttatcctactgggcagttctctcaagttggttaggtacgtaaaatttgttcttaaggctaaaaattctgaggccaaaagataatgtagagcagttacccgtggtgcagcactgcactgtcctgtgtcacagcttctgtgtagccctgacct

SEQ ID NO: 61560 - DNA, 600 bp, Chicken  19866894322309_1
cttgcataaatttgaatttctatttacattgcatcccgaaaatgccattgttaatagagttctgacatcttatttcccttattgctgtcttggtagcattttatttctgatgttttaataactcaacgtagactgaaaggataaaacggagggaattgactgaagtaattagaccctgatttgtctggctgtccagcacctgacaaacatgtctttgacataaacagaatgaaacattttttgccattagccacttacaaatagctattttggcagggctttgaaactattgaattctckgggtatattgtgctgggtaaggctaaggcaccaattcagcctttttcttttgccattgcaactcctccttcctgtctgtgttgaaggagagtcatatttagtagcttcacaaaaactcaaaggcagttagtgtagttatcaccctaacaaactgagtatttctgagaaagtggaaatgttcccatttcaatttctggttaatgacacacttgagtatgggatctgaaatgtcagtctttgtattttcaaacctgtagaaacttgaataaagcttatacataagagcaatcaactctaata

SEQ ID NO: 61561 - DNA, 600 bp, Chicken  19866894322316_1
atttggatgcaattagaataaaacaatattgacttcttgtagtgggaaaccttcacttcagcagagcaagctgcagtctcctggggagcaaggaggagcctgcaaactttgtttgggatttccccctgctgtaattgtgcttgttcccatcttcctgcagtgctgaattgatttctgctgctgtgcttgcagcaccttgctctagatccaaggacaccagtgtctccctgactgcagctggcaatggcttctgccccttgtcctgctccctgccacaaagcagtggtgttgggggctgarctgggggatggcagatctcagagcagcagcagacgggtggacgccaggggatgctccccagytctgcagctggcggcatcacgcaggctatttctgcatccgcaggcacgtgctccctctcttagaaaatacagattaaaaaatagctcttcgcaagaatcctagaacaggtgaaaaatgtaatccccagcccaaatgaccaacacagacgtctgttgaaagcaagcttaaaataaagctgttactggggagagatgaaagcttagcattgggaaagcgcaacaagacttgtatgtaatt

SEQ ID NO: 61562 - DNA, 600 bp, Chicken  19866894322316_2
agagcaagctgcagtctcctggggagcaaggaggagcctgcaaactttgtttgggatttccccctgctgtaattgtgcttgttcccatcttcctgcagtgctgaattgatttctgctgctgtgcttgcagcaccttgctctagatccaaggacaccagtgtctccctgactgcagctggcaatggcttctgccccttgtcctgctccctgccacaaagcagtggtgttgggggctgarctgggggatggcagatctcagagcagcagcagacgggtggacgccaggggatgctccccagytctgcagctggcggcatcacgcaggctatttctgcatccgcaggcacgtgctccctctcttagaaaatacagattaaaaaatagctcttcgcaagaatcctagaacaggtgaaaaatgtaatccccagcccaaatgaccaacacagacgtctgttgaaagcaagcttaaaataaagctgttactggggagagatgaaagcttagcattgggaaagcgcaacaagacttgtatgtaattaaaatcaaattcatcaggactagcattcattacagggattttttttcagatggcagaaacga

SEQ ID NO: 61563 - DNA, 600 bp, Chicken  19866894322324_1
gaagtgaatttacaaatcaaaacatctatggcgctgacagtggtgtagcaggaagatatgagagataagaacgcaaattatttactaaactgtaaataaataaatattttccctttttcctttataatgaagttaggataactgcttttagaacgttcattattttctttgtcttagacaaaagaaaagattgaaaaactgaaagcccaagctgagtgcttttgtcagcgactagggaaatacagaatgccattcgcctggattcccataagtctaactaatttcttcaacgtttccacrcttgaacgagaagtatctgaggctgaaggtttgaacggtactggtctaagttttcttactaacacaaagcaactctttggtggttctgtgcttaggatgcaatgtcattcattttgtcctcaagagcaaatgacagattcagattcatatcttctctgctttcctttttagtcctacaaacaaaagttaatattctcactatttcacctccgcatatgtatttttatgtattctaagtattcttctgtattctaggctcagttttagttgaactggcctttactacctggaatccctttg

SEQ ID NO: 61564 - DNA, 600 bp, Chicken  19866894322325_1
ggaggtgttcaaggaaggggtaaatgtggcgctgagggacatggtctagagcagtcacagtcatgggctgatggttggactggatggtctttagtggtctttccaactttaatgattatatgattctatgattcaaagcttacactatagatatcttcattgcttgaggtgttcttctatcccagcaagacttggaacaccttgtttccataccaactctagcgtgaaaatatttgtacctgtgttttcctcagctcatacatgcctctctgaggtaggctgtaatgctcttatcttctkacccatgccagatctcaaaccacaaactgcactgactcaggctcagagagagtgctgtgaccaggaacagggtggtgacttggtctctggtctctagggaaggagattctgctccatgctgaaatttatgttgtgcacaacaggctacaacacacgggctgaagcagaacatctctgttttgccaaaaacagtgttcctgcctaggaaaagaaggtagtcaaaatgagaacaaaaatctgctgtgttcgcctattttttgttcagtctatgcgtatggttttaaaagatttttaacttga

SEQ ID NO: 61565 - DNA, 600 bp, Chicken  19866894322336_1
catctcattaagtgtcttgcaatacttgtttttgtaatcattttccatgctgtctacacaaaaagctatctgggaagccagaagaactacattccttacacatggaccctttccagactcatcccaatactttctgtgcttaaggtcctataccttcgtgaacacggatcattacaggccgagcagttaattcattttcaagttgccctaattttgaggctaaatgctttttaaacttctccgtccctgatgttcccgtaactcttggagggagttagactgcctcccaaattctctcartccattgttgcaacaatggcacttcagcatcctgacttgccctctgataagccactgagccagtctgcatttctgtgcacacagagggcaatttgcattaactactacagacacagcatctttccttccaagaacttcggagtgagaagccacttgtattcctgtcctgcaagagttgaaaaggaaaagctggaaaaccttttcctgctctttcctcatcaccttcattctgaaaggttacagctcacggaccccctggtagatgccaaggcctttggtgaatcaatgaacggctgtttg

SEQ ID NO: 61566 - DNA, 600 bp, Chicken  19866894322346_1
cactgccttggtgcagcaactgaactgaatgaaagactctgtgtatgcgtggggaacataaatgggatattaattattaattttgacaagtctgaatgccttaataatgtattattttaagctgcagggtttttaaaaagccattgaggctaaaacaagctgactttgcggcttgggctctcattcctccacatataccaaaatgcacagcgacaacaaaatgggttgtgacagactttggcgagagtggtcttgttttgtatatttaataaagggttgataaatacaatgtttgaagtrtaaggcttggaatatatcagccagaaaacacgacgtgttaaccaacctgacacacaaggtgatttaaattcatacttgcacaaaccaactcagtcgttgatcccctcctgccttagcacttccagtaacgtagtgccagtgcaggtgacattattttttacatacaaatgttgaattggtgcagcaaaacgtgtcatttactaatcccactggcttctgcaagcaatgggaactatatgttcgatctctgccacttaacaatcagctgctgggtaaaactgttaggtaaaactgcaggtt

SEQ ID NO: 61567 - DNA, 600 bp, Chicken  19866894322348_1
aatttggtgtagagtccattcaagaatctccaaagtgtatttagaactgttttgctcctaactttactttgcttaccaggcaaggaaagggattgttccactgctctgcctgctacagcctcacctcaagcacagggtgcaagtttgggtgccatagtgtaagaaggacataaaactattacagaagatgttacaaaaaaaaaaaaaaaaaaaagtgtatatggatgctagcaggagtgatatttgagcttatatgtgttgaggcaatctttggcattacttgaacaactgagtggtgcyagggtagctgtcacattataaaggaagaaatagtttatttgccccccttttccttctgtacatggggaatgtgtgcaagcatcactgggttaaaataccttgtgtctgctgcctattggttaagctctgtacatgacactttgccaatgagctattcatagtctttctatgagcagatgggaaagacaataaagattaaaaaggcaagtgtttggaagcaagtaaaaaaattaagctcctagatatgcaacccaactctctatgtatgtcttgtagaatttatagcaaattgggtttaaa

SEQ ID NO: 61568 - DNA, 600 bp, Chicken  19866894322367_1
gtgtcctggacccagaccccagttctctccacacagtgagccaggagctatcacaagacgacttacatgaagtctgatgttgccctctgttggagaataaatactgggttagatccatcttttagctgagccagctattgtgctaggaacatttgtatcagttaaagcagcctggagtaaaatttatcttagatgtaaccctttccagtaaagcagggagtcagaggttctctgtctttgacctgggtttccatacaattcctctgtggtggcagagcccttcacagcagaaaatgagcyggctttctgctaagtctcaatctctgcaaatgatctccaggatcattctacagagcactggaaaacagtcaaaagaaaaagaaacctcacaattttagatatacacaaactcagggtgtttgcaagaattaagtctcccttcgcttttcatctatgagatgaagcatagcctttttttgcatttagtatgtattgacattaatccaaacatttctgagagctgtattagaagcctctgatcaaaatttgcattttacttctaccttgtgaaggaaaacagcccatactgtgtgataaacc

SEQ ID NO: 61569 - DNA, 600 bp, Chicken  19866894322369_1
tcagaagaggcatttgtctgcgttatttcccattaagctcttaaaatagcaaatattttggtctgcctgctatgtctctatgtaaagacatacgtgtgtatttgtttttagagctgagtgaataattggaaacaaataatttatttaacatgttttcctttagctgagtctacaaagaaatgcagtgtaattgggaaagcagctcagtgcctttcactgcagagactctgtgagtagggctgatacaaaaattgcctgcaagtcatttctgaagaaaatatcactcttcatcagaaatcrgggggraaaaaagttttctgcatttcttccttccaaggaaaacatttatttatttatctattatgagcaaaagcaacgggggccaaggagtgggaagcatcttctccaaaacaattcattgtcaaggcttgggtcaaggatttcttgcactaaagaacaggagtgggatctctgctgtgcagccaacracctgacaatgcccaagttcttatgagcatagcacaaggatgtgacacgtggctgagaataacattctcggtggtaaaacacaacccagagaaccacttctcaaattattaa

SEQ ID NO: 61570 - DNA, 600 bp, Chicken  19866894322369_2
gaggcatttgtctgcgttatttcccattaagctcttaaaatagcaaatattttggtctgcctgctatgtctctatgtaaagacatacgtgtgtatttgtttttagagctgagtgaataattggaaacaaataatttatttaacatgttttcctttagctgagtctacaaagaaatgcagtgtaattgggaaagcagctcagtgcctttcactgcagagactctgtgagtagggctgatacaaaaattgcctgcaagtcatttctgaagaaaatatcactcttcatcagaaatcrgggggraaaaaagttttctgcatttcttccttccaaggaaaacatttatttatttatctattatgagcaaaagcaacgggggccaaggagtgggaagcatcttctccaaaacaattcattgtcaaggcttgggtcaaggatttcttgcactaaagaacaggagtgggatctctgctgtgcagccaacracctgacaatgcccaagttcttatgagcatagcacaaggatgtgacacgtggctgagaataacattctcggtggtaaaacacaacccagagaaccacttctcaaattattaatttaat

SEQ ID NO: 61571 - DNA, 588 bp, Chicken  19866894322369_3
aattgggaaagcagctcagtgcctttcactgcagagactctgtgagtagggctgatacaaaaattgcctgcaagtcatttctgaagaaaatatcactcttcatcagaaatcrgggggraaaaaagttttctgcatttcttccttccaaggaaaacatttatttatttatctattatgagcaaaagcaacgggggccaaggagtgggaagcatcttctccaaaacaattcattgtcaaggcttgggtcaaggatttcttgcactaaagaacaggagtgggatctctgctgtgcagccaacracctgacaatgcccaagttcttatgagcatagcacaaggatgtgacacgtggctgagaataacattctcggtggtaaaacacaacccagagaaccacttctcaaattattaatttaattacagggttgaggaggagtgtgtttgaacagaattgaccttataccattggtacctaatgacacaacaaagcctgatattttccgctggtcttctcagctccagtgggtcattttaagctggggaattaaagctctctggctcacatcagcaaatgcctgctattatttg

SEQ ID NO: 61572 - DNA, 599 bp, Chicken  19866894322372_1
  misc_feature (1)..(123): n is any nucleotide
nnnnnnnnnnnnnnnnnnnnnnnnnnnnnnnnnnnnnnnnnnnnnnnnnnnnnnnnnnnnnnnnnnnnnnnnnnnnnnnnnnnnnnnnnnnnnnnnnnnnnnnnnnnnnnnnnnnnnnnnnnnatttatgagagtcccccatctcaaaatataatatattgaatttaatatgcaacttctgaaaatcatattgggaacatatgttaatagaaactttccacaaaagcagatgacaagaagtgtaaaatataaggtgaggagagtttgtttttcttaagtgtatctatattcatgttatcyttctaacagccatggtttctgtcaggggagataactgcacaacctcaggtgtatttgtcaagtgaattcctaacttcacagcctcttttaaccccatttgctaatgaggagagacatttccagcagggttatcttatgttcccatcaggcatgttcttaataacctttcaaacccattgccaaytttggtcctatttgcaaatgcgtacaggcctcaaggagttctgctttttctgtgaaactatggagctgtgtggacaatcttagtgagtcttagtgagggacttagttgactggaa

SEQ ID NO: 61573 - DNA, 600 bp, Chicken  19866894322372_2
atcatattgggaacatatgttaatagaaactttccacaaaagcagatgacaagaagtgtaaaatataaggtgaggagagtttgtttttcttaagtgtatctatattcatgttatcyttctaacagccatggtttctgtcaggggagataactgcacaacctcaggtgtatttgtcaagtgaattcctaacttcacagcctcttttaaccccatttgctaatgaggagagacatttccagcagggttatcttatgttcccatcaggcatgttcttaataacctttcaaacccattgccaaytttggtcctatttgcaaatgcgtacaggcctcaaggagttctgctttttctgtgaaactatggagctgtgtggacaatcttagtgagtcttagtgagggacttagttgactggaagttgaatgtgaatcaaagatggggacgggtttacagggaggatgtgtgaggggcggctgaggtctgtggtgtgctcagcccagagcagagcaggctgaggggaggcctcatggcgactgcagctcctcatagggagtgcaggggcagcgctgagctctgctctgtgtgtgacaacgacaggtctt

SEQ ID NO: 61574 - DNA, 600 bp, Chicken  19866894322375_1
tgtttttaaaactggaagtgtaaattactgttcagtttgttcaggcccaaacatgtatgacagagatcttaaataatgctgatcactttgtctgaggatgtttttcctctaaaattggcaggataagtagacaaactgtaaagcctctttcaaaatgataggaatgttataaagatccatttctctgcttgaatttttttaatacttttggagtattgtattaagattgaaaatcatacaaggaccatataatcatataagacaaaatcatacaattaggggttgcagaggattatctarggcttaactgggagaaagttgccactcttttccctgcatttggtagtaatgaaaaatccctggcattagtgtcattgcttaaatctctgcacctctgraagtggtgatctttcaaattatgcatttccaaatcttacatccaaaaccatttttctgtctcttgtatctgaaaacattagttttggagattatcaatgcacttttattaccatacagttaaaatcttactgataatgaacaaacaaggtcataggagaacaagttggtatcatgactgctttgctttcttacagttttttt

SEQ ID NO: 61575 - DNA, 600 bp, Chicken  19866894322375_2
tgtttttcctctaaaattggcaggataagtagacaaactgtaaagcctctttcaaaatgataggaatgttataaagatccatttctctgcttgaatttttttaatacttttggagtattgtattaagattgaaaatcatacaaggaccatataatcatataagacaaaatcatacaattaggggttgcagaggattatctarggcttaactgggagaaagttgccactcttttccctgcatttggtagtaatgaaaaatccctggcattagtgtcattgcttaaatctctgcacctctgraagtggtgatctttcaaattatgcatttccaaatcttacatccaaaaccatttttctgtctcttgtatctgaaaacattagttttggagattatcaatgcacttttattaccatacagttaaaatcttactgataatgaacaaacaaggtcataggagaacaagttggtatcatgactgctttgctttcttacagttttttttgttaggtcayggttccactaacataccacttaatgcacattttccccactaaatatatagacctcaaagaaaaaaaaataaaattctttagttcaga

SEQ ID NO: 61576 - DNA, 600 bp, Chicken  19866894322375_3
gagaaagttgccactcttttccctgcatttggtagtaatgaaaaatccctggcattagtgtcattgcttaaatctctgcacctctgraagtggtgatctttcaaattatgcatttccaaatcttacatccaaaaccatttttctgtctcttgtatctgaaaacattagttttggagattatcaatgcacttttattaccatacagttaaaatcttactgataatgaacaaacaaggtcataggagaacaagttggtatcatgactgctttgctttcttacagttttttttgttaggtcayggttccactaacataccacttaatgcacattttccccactaaatatatagacctcaaagaaaaaaaaataaaattctttagttcagattgtttcctcagctcagaattgcttcaatgtcaaacagcagctagaaaagaaaccctaagataccaggtgtctgaaccatactttttccttatggatctgcccttgatttttctactttgtagtctgctttctttcactgctgcttttctagtctgtaagaagcgtgacccccgaaaagtctcctagtttctgagaccatatttatttatttt

SEQ ID NO: 61577 - DNA, 600 bp, Chicken  19866894322380_1
actcctggaagccgaacaagtatgacacaaacaaacagaaagaaggaaaaaacagttttgacttgtatttatataagtcaaatatttacacaactggagaccttgtctgcattttataaacttacagtgtaggataattgcagtaaatgttgataaaaaatagaagtgagcagcagaaaggtggaagtgaatggcaaagggagaagttaaagaagactgaactactgaggtttttaatcccaaagatacaatttgggatgatatttgaactaaaggaatttgaatggagcagactgatgstgatgcatcagtgaaacatatgttgcagcattagcacaattaaatttaatatttctgaatgaaaatagtaatacaataatttgtgaagtgtcatagacaaggaactatattaattcagtataatgcaatgcatatgagcttcagtctgctgaacgatgctctaggggttaccaaggagattctatcagcagaggcttgaaggtgtcagaagagacccaggtcccttctggtcaaaaggcagttcttacttgagtgcatgggaactgctgaatcacagcctaaacctctgattgatcaccc

SEQ ID NO: 61578 - DNA, 600 bp, Chicken  19866894322385_1
agtgttgtgctgggaaaagcactacatgccatacacagccccatattggctgtgcacatccaccacccttctgtcgacacagcctggtgccctacccccaaagtcctcatctcacacagcagccatggcagccaaagccatcccaggtacacgtagtaagggcaggaagaaggtggggattgcagctggccccatactcacctgcttcaatgctaggacagcgtttcagttcacactttacttatttatggagctggtgctacgttcaaagcctgagggttgcatccttcccttggtgtsgagctgctctgttggccagctccgtgcaaagcacaagtggaaaattttgcttagcaggtactattttggacaaagccaaccacaagcaaagaggcagtatggggagtaatgccttaaaaaagcctccagagcatccaagtaacctgagctcattggatgagctctccagaatcgctaaccttgtgccacagcttagcatcctcctttccaaatctatcctaccccttcctcctctgcctgcccatctgctcctgaccccagagccctccactgctggcaaaaaccagggtggccacctgt

SEQ ID NO: 61579 - DNA, 600 bp, Chicken  19866894322386_1
caagagatgctgggaggaagtttctttagtatgacataggtccaatgatagctttggaaaattcaaggatgcagccaaagcagaggcctgctgtacccataaggtaaaagtagaccaagatgctttagcattgccttgctttaaacccagacataagcacactgaaatatggtatttggtaacaacgtctgtgcattttgtaacactgtaatattactagtagtattttataacaaagctatgcataaatatgcaaaactgcaaatggaaggagactcgtggtacacttggccaaactamgcacaggaaaacatgcaaatmgtaaaccttgcaagataagagcaaagcatgtaaagcaggcaagaaagatatgtgatgaaagctgaataaacctacagaacaaagaggagataagtctgatggaacaagaataatcctacaaaacaactaagatgttggcaagaccagggtcttacttcccaaaatagtacgaactgtgtcagaagcagataacatcacacccttttcttctggggaggcagcaatgtgcttaaaacgctaagcaaaagagatagtaactaatgaatatcataaaacttt

SEQ ID NO: 61580 - DNA, 594 bp, Chicken  19866894322386_2
ttctttagtatgacataggtccaatgatagctttggaaaattcaaggatgcagccaaagcagaggcctgctgtacccataaggtaaaagtagaccaagatgctttagcattgccttgctttaaacccagacataagcacactgaaatatggtatttggtaacaacgtctgtgcattttgtaacactgtaatattactagtagtattttataacaaagctatgcataaatatgcaaaactgcaaatggaaggagactcgtggtacacttggccaaactamgcacaggaaaacatgcaaatmgtaaaccttgcaagataagagcaaagcatgtaaagcaggcaagaaagatatgtgatgaaagctgaataaacctacagaacaaagaggagataagtctgatggaacaagaataatcctacaaaacaactaagatgttggcaagaccagggtcttacttcccaaaatagtacgaactgtgtcagaagcagataacatcacacccttttcttctggggaggcagcaatgtgcttaaaacgctaagcaaaagagatagtaactaatgaatatcataaaactttcacttctattccagt

SEQ ID NO: 61581 - DNA, 600 bp, Chicken  19866894322394_1
ctgtcagtgttctcatcttctgtagcacctgggagaaaagatgtatccaaaataactcctctccatttttcaaggccatcagttcttgctgatgggaaggaggggtcatcacaaactctccagcactttggggatgtgcgctgaggttaccgaactctaaaaagaaaggtgtgtttctgtttccaaactcccaggggtcatccgatgcctgggtggatcaatttgcgcgatctgggaacttgtcagctcttgatacggaatttgagcaggcaaagactgctgtggaggtaaagctgaagmaggaggaggaggagggctggggtaacatctgagagcccatgacagggttgactctcctatgcatgttgtgaggagggctagaaacatttaagaaggcatgctttgtggtggttgtagaactcaattaaaagttgaggtactccagtcactttttgttctcccttcagtcagatgtggatttctgggacaaactccaggcagaatgggaggagatggccaagagagatgcagaggctcatccttggcttactgattacgatgacctcagctcctcttcatatgacaaggtaatacatgaca

SEQ ID NO: 61582 - DNA, 600 bp, Chicken  19866894322397_1
acaatgggcatctgctttttccttaagttgtttttgagtcaattgtcttttatttaacctgatattgtaacatggttaatgcccactccacagtttttttatattaaaaaaaaacttcatcaattattaaatacttatgttatctgaggtacttcaagttttatatttcacttgaatatgcttatggctaaaggatttctaatcctcataaaatctgtgttagtgttgaggcttcctaggataaaagaattgtataaatttttttccttgcagtatatttagtgcaggtgtataatctartgggtcacttgcccacttaaggaaaaaaaaagaaaaaaagaaaaaatattacagctttgtcactgtcactttcagggagcttcagcaaactgtgaaggtatttattgttttgctttttaagagcgtcttcagtcactctcagttgaaggactgtgaggggcaaaagcaaatctccatttaaaatgcagttgtttaacaactgtgtatggtggaagttaggtgcatgtttaaaggttgtgatgagataacctagtgattatttatttactcaattataaataagttcagttagggtaatca

SEQ ID NO: 61583 - DNA, 599 bp, Chicken  19866894322399_1
  misc_feature (1)..(131): n is any nucleotide
nnnnnnnnnnnnnnnnnnnnnnnnnnnnnnnnnnnnnnnnnnnnnnnnnnnnnnnnnnnnnnnnnnnnnnnnnnnnnnnnnnnnnnnnnnnnnnnnnnnnnnnnnnnnnnnnnnnnnnnnnnnnnnnnnnncaactaaatgtgaagcccgtagactgtgtatgtttacatccagttgctgtgaagggactgaagtggaatgaacaagataaatatttttctagaataatccctctagaactcctgctaattacgaaggcactgcaggacttacagatgggtgttttaagctatcaaagcrtgccagcaaatattttgtgcctagcgttgccatgctggctggtcgatgcatgtcgatcactgtagaacagacctgggaggccttacaaggacctttctccagctcagcctggatctggccrtgctccgatggccatagctcagggtgagacgtcctggtgctcggggcacagggtgtggggtgctggggctgctgcgagtcacagtaagcccaggggctgcagtggtcgcactgttagggttgcttgaggaggttctggtgcgtgtcaatacaaagacatcgtcggaacttctggggat

SEQ ID NO: 61584 - DNA, 599 bp, Chicken  19866894322399_2
  misc_feature (1)..(10): n is any nucleotide
nnnnnnnnnncaactaaatgtgaagcccgtagactgtgtatgtttacatccagttgctgtgaagggactgaagtggaatgaacaagataaatatttttctagaataatccctctagaactcctgctaattacgaaggcactgcaggacttacagatgggtgttttaagctatcaaagcrtgccagcaaatattttgtgcctagcgttgccatgctggctggtcgatgcatgtcgatcactgtagaacagacctgggaggccttacaaggacctttctccagctcagcctggatctggccrtgctccgatggccatagctcagggtgagacgtcctggtgctcggggcacagggtgtggggtgctggggctgctgcgagtcacagtaagcccaggggctgcagtggtcgcactgttagggttgcttgaggaggttctggtgcgtgtcaatacaaagacatcgtcggaacttctggggatttcactttgcttttttgaggagcctagaaagctgcattggtggaaagtcatggtaacagtgattgctagagtaatctcggaagcatagcacacgctgcatgcagtgctatgagacttgcac

SEQ ID NO: 61585 - DNA, 600 bp, Chicken  19866894322402_1
aacttgaaatatagttcactttatactctctaaatgtatttgctgatgtagggaaacacaaccaaagaatgagtctccatttaatagtggaaacacaaatgatatttgattttttattaaaataacatgtgaaagatgtattacagattgaacttccttttggaaactttagctgtcctgggagacaacacagcctataatatttcttactaagaatatccataatagttttggaaaggtcttaaaaataaaatctaaaatatgcatgaaatatgtttttcatgattttttcccatcttytcctcatgcgctataaaatgccaattttaatgttttaatatttaattcaattcagttagacttttcaccctttgccttttagaacatactagagaaaagttgaaaagttaaagaaagggggaayttatctaattaaaatgaaatcttttaatgatgttatgaaaccactcaaagcaatgttttagatttgctcctgctgttgtttgaagctgtggtgttaaaaatgccctggttagagttacagactgttctaaaaaactgtgaggaatttatgtaggatttaaaacagacacatgcttt

SEQ ID NO: 61586 - DNA, 600 bp, Chicken  19866894322402_2
acatgtgaaagatgtattacagattgaacttccttttggaaactttagctgtcctgggagacaacacagcctataatatttcttactaagaatatccataatagttttggaaaggtcttaaaaataaaatctaaaatatgcatgaaatatgtttttcatgattttttcccatcttytcctcatgcgctataaaatgccaattttaatgttttaatatttaattcaattcagttagacttttcaccctttgccttttagaacatactagagaaaagttgaaaagttaaagaaagggggaayttatctaattaaaatgaaatcttttaatgatgttatgaaaccactcaaagcaatgttttagatttgctcctgctgttgtttgaagctgtggtgttaaaaatgccctggttagagttacagactgttctaaaaaactgtgaggaatttatgtaggatttaaaacagacacatgcttttaaagtcgagaaccttcaaatactacagctaatccacacaataattcaacaaccaacccatgctcaaattcctaacagatgccatatgcaacctgtaataaaaactgcatcaaggtattccaag

SEQ ID NO: 61587 - DNA, 600 bp, Chicken  19866894322403_1
aagaaactgttgatgcatggtaggttacaggtctagctgcagcaagcgacttttcacaatggctatttaatacaagttgaggtaggtcagaataagccattctgtcttggaaaatgtctgttgctggtctcctcaaatatggaacaaggcagcaaaaacagcatttgcatgggaaatggactgcaaaattgtcccttgctgcttgctagtagcagcccacaggctggtaacagctgattgccagcagcaagctggctgcaggtacttacattttatcttaagtcaatagctacagcaccraggaggcaggaaatgctaccacaacttgtatgaaacggcttgctgcagcaccagggtgttgctgctaccacagttacagggaggcaagcaaaagggctttgagaagcccttagcatccagttcagactgtggctctgaacctcaaggacttggctcacagctaatgaccaaagagggagccaggttgcagatgctcagcaccataacatttcaggcaaatgccacagttgcactttttaggctctctttcgcttttctccaccaaagaaaacaagcttgcttttagggcagacacttttc

SEQ ID NO: 61588 - DNA, 414 bp, Chicken  19866894322404_1
ggctggtttgtgttaagcctgtgtattgtgtgctgcttatgaaaactggtgttttataactctgcaactgagtgtcctgctgcttcagtagcatggctctgtaatagggcagaaatttccctgccatggagccagtgggactggggcaggcaggagcagcctgaatcgttagtgcccagtgtcagagaaacagataggcctggttgtggatctctcccatgagctgtgctggcaaagcacttgctgatgtttatagacatgctcaggaggagcccactcagtttccctgcccatcacctyctcaccttgggtgaaccagcactgccctgctgctacctcagtgctgagtctattccagctgggggatccggctcttactgtaacacttgcacacatcctcttgctccattattt

SEQ ID NO: 61589 - DNA, 600 bp, Chicken  19866894322409_1
atgtatgttgtagatgactaaaatgatttccttgtcttctaatttttcagtgttagtgaatttccattgaggtcatgagagatatctgtattgggtttcccaaacgaagtttatagcattaatttcaaagtctagagacgataggataacttaacaaatggcatgtgtgagatgcatatatattttgtcttggagatatacatgtgaatgtgcatataaagaggtaaagagataggaaaagaaaacattgttatattaatgttgtcggatggctataattcatgtagctgaagttttatyaaaaaaaaaaaaaaaacctatcctgaggcaataccagtttcaggcatgaacagccccatatccttgaactctatccaaaacaatcagactcctgcagtgttaaatcaaaatgttttttggaacattagtgttttttttttaatatgcttacatcagttgtagatggtgtacatgttttgagagtaatatcatttccatgcttcatcacagcaaaaaaaatcaattactctatgctgtctctgagttccagcattttgttgtttgacaaaatattctgacaacaggaaaagcagcattctc

SEQ ID NO: 61590 - DNA, 600 bp, Chicken  19866894322411_1
ttttcccccccaaggcttcttttgtctttaacttaaaaaaaaaaagttatagtagctgctccttcccctaaggatgcagcagctccttgctcacttgctctccctgcagggccagtgccaggcagcagctcccacgcaggaccgagcacactcctccagtcctcctcccgtggccctgctgaggctcctcccgccccggtgctcccaggaggagcatgctgcccaccagcagctcagtgccccatggactcttccctttggcactggagttgcttctccaccttgcatcagaaaatttaraaagcggtggctggagctgcagcagagggatgcaggaaagatccagtcacgtccccccttgggcgtacggagtccacaagcagcacgagggccgagatgggagcatggggctgggctggcagcaaagacacccccagggcctcactgagctgctgggcacccactgagcgctgcagctgccgacccaccaggcagcccagcaaggaggcactgagggcggaggccttgctgtagtgcacgtgaggaggctggggccgcacaccaggcccaaccagagatgcacatccaagtaggccgctt

SEQ ID NO: 61591 - DNA, 599 bp, Chicken  19866894322412_1
  misc_feature (1)..(252): n is any nucleotide
nnnnnnnnnnnnnnnnnnnnnnnnnnnnnnnnnnnnnnnnnnnnnnnnnnnnnnnnnnnnnnnnnnnnnnnnnnnnnnnnnnnnnnnnnnnnnnnnnnnnnnnnnnnnnnnnnnnnnnnnnnnnnnnnnnnnnnnnnnnnnnnnnnnnnnnnnnnnnnnnnnnnnnnnnnnnnnnnnnnnnnnnnnnnnnnnnnnnnnnnnnnnnnnnnnnnnnnnnnnnnnnnnnnnnnnnnnnnnnnnnnnnnnnnnnnnatacttgtgttaattacataaattatgtcaacagcaaatgacatgttyttaaaatgttagagttgctcttctgaaacggtccragtatatatttttagcttctacaacctcttctgattacaccgcttgcaaaggtatcgtactccttgtagtatctagctatagtaccgtgttagtagctgcactaccgctgattcccctgcataaagcactgtacaatatacttcaaatactggctttttgtgtgtctcacacaagtagtcattaataccaagagaacagcatgctactgttccaggttttctaagaactaatcctatcgctctccaccagctcctgttgccagc

SEQ ID NO: 61592 - DNA, 599 bp, Chicken  19866894322412_2
  misc_feature (1)..(217): n is any nucleotide
nnnnnnnnnnnnnnnnnnnnnnnnnnnnnnnnnnnnnnnnnnnnnnnnnnnnnnnnnnnnnnnnnnnnnnnnnnnnnnnnnnnnnnnnnnnnnnnnnnnnnnnnnnnnnnnnnnnnnnnnnnnnnnnnnnnnnnnnnnnnnnnnnnnnnnnnnnnnnnnnnnnnnnnnnnnnnnnnnnnnnnnnnnnnnnnnnnnnnnnnnnnnnnnnnnnnnnnnnatacttgtgttaattacataaattatgtcaacagcaaatgacatgttyttaaaatgttagagttgctcttctgaaacggtccragtatatatttttagcttctacaacctcttctgattacaccgcttgcaaaggtatcgtactccttgtagtatctagctatagtaccgtgttagtagctgcactaccgctgattcccctgcataaagcactgtacaatatacttcaaatactggctttttgtgtgtctcacacaagtagtcattaataccaagagaacagcatgctactgttccaggttttctaagaactaatcctatcgctctccaccagctcctgttgccagctccacaatgcctttattatttatgcttttactctt

SEQ ID NO: 61593 - DNA, 584 bp, Chicken  19866894322415_1
catttttgaccataagagtaaagaaagactactaagttctgaacacaaatgtaggtcattagccccagttatcttttcattcaaatatacttatggctactagttcattaacaaaccaatgatttccatttgatatttatagttgcattacataattgtagctttcaacactgcttagaaatgccagtgtactgaatttaataacactaacacttaaaagcttctcctcctagaaaatcctaggtattggatatgtacaaccattgaaagaaaatgactttcaaatcacaatcaagaccrtttagaaaaatgatctttttccttaataaaatatttattcataaaaaaatgcacagcaataaaaaaacaaaacaacattatttcctaagttcaagaagagcccttctttgtctttttactttaacatgctttggcagaaactcaaaagcaactttccttgcctctggtgcagaagggagactactggccatcctgttccatttgcaacactgttttttctaagaggatttccttccaaaccagtgcagtgaggttcaagttcacagggacagccaatcccagct

SEQ ID NO: 61594 - DNA, 600 bp, Chicken  19866894322421_1
ttcataccctttgatgaaattagttttcctatatggctgtatggcacagctctttatatatgttgaagaacaagttggttgaaaatccactggcagtagaaatagcattttttttcagttgtgtgaatatcctggaagatgttaaaataacagataatttttaatactaagaccggggagaataccaatattggtataaataaagtaacttcaaagttacaagagagacaaaaaaaagttactttttgcaattcactcactaataaaattaaaaacactattagtgaaagcattgattgyctatttatatgcacaatatatcacaatcgcatccagaaaaaaagattattaaaacataattaaaatttgtgttcrccaagtgaatcattcatcatatgggaatgccaaataagaattatccatttagctctggttggtcatcccacttacagtgtttattgcacattatttttttcccagagagagacacctcttggcaataagatgccaaattaatttgcctgattcatgctttctagtaaaacctctgtattaaaagggctgagtttatgaagagtcattttcatagctatatcactg

SEQ ID NO: 61595 - DNA, 600 bp, Chicken  19866894322421_2
tggttgaaaatccactggcagtagaaatagcattttttttcagttgtgtgaatatcctggaagatgttaaaataacagataatttttaatactaagaccggggagaataccaatattggtataaataaagtaacttcaaagttacaagagagacaaaaaaaagttactttttgcaattcactcactaataaaattaaaaacactattagtgaaagcattgattgyctatttatatgcacaatatatcacaatcgcatccagaaaaaaagattattaaaacataattaaaatttgtgttcrccaagtgaatcattcatcatatgggaatgccaaataagaattatccatttagctctggttggtcatcccacttacagtgtttattgcacattatttttttcccagagagagacacctcttggcaataagatgccaaattaatttgcctgattcatgctttctagtaaaacctctgtattaaaagggctgagtttatgaagagtcattttcatagctatatcactgcctataamgtggtggtgaagttggcttcaagaaagctagcactagcatttagagcatccaaagtacttggctttc

SEQ ID NO: 61596 - DNA, 600 bp, Chicken  19866894322421_3
atgcacaatatatcacaatcgcatccagaaaaaaagattattaaaacataattaaaatttgtgttcrccaagtgaatcattcatcatatgggaatgccaaataagaattatccatttagctctggttggtcatcccacttacagtgtttattgcacattatttttttcccagagagagacacctcttggcaataagatgccaaattaatttgcctgattcatgctttctagtaaaacctctgtattaaaagggctgagtttatgaagagtcattttcatagctatatcactgcctataamgtggtggtgaagttggcttcaagaaagctagcactagcatttagagcatccaaagtacttggctttcagtaggacctaattccccagtaatacaagaaatttaaaattaaaatgcaggtattccattttctacatgtcaccgtgaggagagctagaggcagctaaactcacaaagggaatttgtgtgcacatgcaggcccttcacatgcaggtagagagcagcagaatactaacaagatatgtgctatgctttagtatttaattcttttgaagttcaagccagtcctcgttcaatgatga

SEQ ID NO: 61597 - DNA, 600 bp, Chicken  19866894322422_1
atattaaggaagatctgaagcatcttctaagcacctctcacctctacatcatcttcaaaaaggaggtagttatactatctaattgctactggactcaaagacttgctgtaggttacaaatgttggcatagaaatatcttgccattggtgtaacgtcggtggtttatggatcatgagatgttcctgactgctcagatgagctatcctatgtcattctaagaatgaataaggactaagctgtgcttaccggatcagtgagtttgaatgtttggctatttctatattttcaaggaagattttytttcattttataaaaataagtgaagttctaaaggatgtggatgctgctgtgggtcatatacagtttatttttttgagacagagagctctgaaatagtataggtctgtacttgaattgctatctgaaggtgtatcctatcatagtagcaccctgatgaaagacagtctgatctcctaagcaaatagggagtatatgtgaaaatgtcaatatcttttatccacagtgtagtaactcatgctgcagttgtttccttgtgcatttttcacaccaggtaacttactaacagctccccttgccttg

SEQ ID NO: 61598 - DNA, 599 bp, Chicken  19866894322435_1
  misc_feature (1)..(107): n is any nucleotide
nnnnnnnnnnnnnnnnnnnnnnnnnnnnnnnnnnnnnnnnnnnnnnnnnnnnnnnnnnnnnnnnnnnnnnnnnnnnnnnnnnnnnnnnnnnnnnnnnnnnnnnnnnngttcctccatcttcttacttcctgtagaacactgacaaatggtgtgcgtaagccagagttgaacaagctgtgaagagcaagagcatgttttcttctgaacagtataagacctcaaagtaactgagatattagaatggatacttttttttttactatgaaattctcttgtatctcttgtctgaaatgtaaaatrcaaacttatctgctagcaattagagaccaggctctagaatgagcatgcacatagatgcttcagtacaggcagaacataacctgtagcttgatctgaaatctgtggagggttgccttrckttccattcctgcttttcacactgtttttgtgctgcagacggatattaacttgccataccttacaatggatgcctctggaccaaagcacttgaacatgaaactgagtcgctcgcagtttgagggcattgtagcggatctgatcaaaaggacagtagcaccatgccagaaagccatgcagga

SEQ ID NO: 61599 - DNA, 600 bp, Chicken  19866894322435_2
cttcttacttcctgtagaacactgacaaatggtgtgcgtaagccagagttgaacaagctgtgaagagcaagagcatgttttcttctgaacagtataagacctcaaagtaactgagatattagaatggatacttttttttttactatgaaattctcttgtatctcttgtctgaaatgtaaaatrcaaacttatctgctagcaattagagaccaggctctagaatgagcatgcacatagatgcttcagtacaggcagaacataacctgtagcttgatctgaaatctgtggagggttgccttrckttccattcctgcttttcacactgtttttgtgctgcagacggatattaacttgccataccttacaatggatgcctctggaccaaagcacttgaacatgaaactgagtcgctcgcagtttgagggcattgtagcggatctgatcaaaaggacagtagcaccatgccagaaagccatgcaggatgcctgaagtcagcaagagtgacattggtgaagtcatcctcgtcggtggcatgaccagaatgccaaaggtatgagctgtccctgccccagacataactggcacagcttctcactgctt

SEQ ID NO: 61600 - DNA, 600 bp, Chicken  19866894322435_3
tcttacttcctgtagaacactgacaaatggtgtgcgtaagccagagttgaacaagctgtgaagagcaagagcatgttttcttctgaacagtataagacctcaaagtaactgagatattagaatggatacttttttttttactatgaaattctcttgtatctcttgtctgaaatgtaaaatrcaaacttatctgctagcaattagagaccaggctctagaatgagcatgcacatagatgcttcagtacaggcagaacataacctgtagcttgatctgaaatctgtggagggttgccttrckttccattcctgcttttcacactgtttttgtgctgcagacggatattaacttgccataccttacaatggatgcctctggaccaaagcacttgaacatgaaactgagtcgctcgcagtttgagggcattgtagcggatctgatcaaaaggacagtagcaccatgccagaaagccatgcaggatgcctgaagtcagcaagagtgacattggtgaagtcatcctcgtcggtggcatgaccagaatgccaaaggtatgagctgtccctgccccagacataactggcacagcttctcactgcttac

SEQ ID NO: 61601 - DNA, 600 bp, Chicken  19866894322435_4
tgcttactgttaagggtgatctgtagcagaaaagatgggagtctggtaatctcataggtccagtagctgaagatcccaggagtagatgtgccaagtggccacgtgaaaggggtggtgaggcactctcctcctgctgctcagtgtgggtctgggggctgtagctgagttacagtttaaaaagacaagtgggggaattactgggaattgaaaattcagcttgatttttctgttgctgactgaatgtatgaggtgctggtgagatgtacagaatgttttatcctgtccacctttatcacatascaaattccacttcaataatagctgtttgatagtctttgctttccagtagctttctttacctgtgtagggcacgtgcagcaggcaatgaagaaactgcaccagcacaacttttgttacctgctggttgtgtgtgtgtttgcttgcttgaggttgtactggctgttgtcaagcatatttacttggcttttctgaacactcattacctaacacctgttcctggtgttctggtgataagctccaagtaacttagaggcttgctctgctgacatgtactgtcttgcagataaggcactgcctcct

SEQ ID NO: 61602 - DNA, 531 bp, Chicken  19866894322436_1
tgctgtctacctggacttgtgaaaggcctttgacatggtcttgcaccatatacttacctctaaattagagagatggctatggaaggtggactattttgatgcataaaaagttgcttggatggtcactgtcagaggattgtggtcaatggctctatgtccaagttgaagtcagtcacaagtggtgtcctccagggttctatttagagacaggtgctcttcaacatctttatcaatgacagaaactatggaataaattgtaccctcagcaaatatgctgatctagtgggtggcaatcctgcwcaaggcacagggttggaactgtatgattttaaatatcccttccaatctaagccactctacagttctatgattccatgattctatgatttcttggttgaatctgagggacagaactgtgtttattttgcatgaagctacttctcagccctagctggtgagggaaaggaatagattttactagattgtttgatagcatatctatcactctttctgaccaaaagtcattttcat

SEQ ID NO: 61603 - DNA, 600 bp, Chicken  19866894322439_1
agagcatcggtcccagtgtggacccctgaggttctctatctggacactgagacattgactgctactctctgggtatagtcctgttccttgtggaacaagacatagctttaataattgttcattcatggtgaacaggaacactgtacaaggtataaaacctgctctcttgcaaagtacagtttcttaattaaaacaccaaagaaaaaagattcttctaattagggaaatacttgtttgaactcttgctgtattgcactgaatgcttatgaaccaaagaatctgaggaggaaaaaaaaaaawgagaggaaacatgagtattcattaaaaagygatcctyrgtgaatgttgagctgggtcttatcttcagaggtttttgcctctactgtctctggtactggcagatccctgttgtctttggattgactgctgtgaatctgacaagctaattttctgcgtccagttgtatactatcaactctkaatgagcttcttagcttgctattgaccagtctgttctgtgtactgcttagctgccatccagttttacaacaggagtatggatgtaaaagagaaaccaatttcatatgcccaaggaggcgta

SEQ ID NO: 61604 - DNA, 600 bp, Chicken  19866894322439_2
gttctctatctggacactgagacattgactgctactctctgggtatagtcctgttccttgtggaacaagacatagctttaataattgttcattcatggtgaacaggaacactgtacaaggtataaaacctgctctcttgcaaagtacagtttcttaattaaaacaccaaagaaaaaagattcttctaattagggaaatacttgtttgaactcttgctgtattgcactgaatgcttatgaaccaaagaatctgaggaggaaaaaaaaaaaagagaggaaacatgagtattcattaaaaagygatcctyrgtgaatgttgagctgggtcttatcttcagaggtttttgcctctactgtctctggtactggcagatccctgttgtctttggattgactgctgtgaatctgacaagctaattttctgcgtccagttgtatactatcaactctkaatgagcttcttagcttgctattgaccagtctgttctgtgtactgcttagctgccatccagttttacaacaggagtatggatgtaaaagagaaaccaatttcatatgcccaaggaggcgtatatcttccactgaatgcttcagaagcctag

SEQ ID NO: 61605 - DNA, 600 bp, Chicken  19866894322439_3
atctggacactgagacattgactgctactctctgggtatagtcctgttccttgtggaacaagacatagctttaataattgttcattcatggtgaacaggaacactgtacaaggtataaaacctgctctcttgcaaagtacagtttcttaattaaaacaccaaagaaaaaagattcttctaattagggaaatacttgtttgaactcttgctgtattgcactgaatgcttatgaaccaaagaatctgaggaggaaaaaaaaaaaagagaggaaacatgagtattcattaaaaagygatcctyrgtgaatgttgagctgggtcttatcttcagaggtttttgcctctactgtctctggtactggcagatccctgttgtctttggattgactgctgtgaatctgacaagctaattttctgcgtccagttgtatactatcaactctkaatgagcttcttagcttgctattgaccagtctgttctgtgtactgcttagctgccatccagttttacaacaggagtatggatgtaaaagagaaaccaatttcatatgcccaaggaggcgtatatcttccactgaatgcttcagaagcctagctgtttt

SEQ ID NO: 61606 - DNA, 600 bp, Chicken  19866894322439_4
tctggacactgagacattgactgctactctctgggtatagtcctgttccttgtggaacaagacatagctttaataattgttcattcatggtgaacaggaacactgtacaaggtataaaacctgctctcttgcaaagtacagtttcttaattaaaacaccaaagaaaaaagattcttctaattagggaaatacttgtttgaactcttgctgtattgcactgaatgcttatgaaccaaagaatctgaggaggaaaaaaaaaaaagagaggaaacatgagtattcattaaaaagygatcctyrgtgaatgttgagctgggtcttatcttcagaggtttttgcctctactgtctctggtactggcagatccctgttgtctttggattgactgctgtgaatctgacaagctaattttctgcgtccagttgtatactatcaactctkaatgagcttcttagcttgctattgaccagtctgttctgtgtactgcttagctgccatccagttttacaacaggagtatggatgtaaaagagaaaccaatttcatatgcccaaggaggcgtatatcttccactgaatgcttcagaagcctagctgttttt

SEQ ID NO: 61607 - DNA, 600 bp, Chicken  19866894322439_5
tttcttaattaaaacaccaaagaaaaaagattcttctaattagggaaatacttgtttgaactcttgctgtattgcactgaatgcttatgaaccaaagaatctgaggaggaaaaaaaaaaaagagaggaaacatgagtattcattaaaaagygatcctyrgtgaatgttgagctgggtcttatcttcagaggtttttgcctctactgtctctggtactggcagatccctgttgtctttggattgactgctgtgaatctgacaagctaattttctgcgtccagttgtatactatcaactctkaatgagcttcttagcttgctattgaccagtctgttctgtgtactgcttagctgccatccagttttacaacaggagtatggatgtaaaagagaaaccaatttcatatgcccaaggaggcgtatatcttccactgaatgcttcagaagcctagctgtttttgggcttagacagcaacgtgattccagcaattaaacatgctggaaagtgatttaaacattgtcatcaagtaacattgcagttccattcaaaatgggactacagtaatgtcattagactacataagtgagattgaatgactgt

SEQ ID NO: 61608 - DNA, 600 bp, Chicken  19866894322449_1
actaaggacaaagccaacccagtggctgagacctctccccaacccgctgcaccgtgccagtgcactgcaaggactccctcagtgcttcctaagcatggctcgaaagcgactgaacatcatttttatccacggggaaactgaggcacgggcagccccgggggctggctcaggctcaggacacacagcagcatcagggctgccagctgaccctcctcccaagggatctctcctttgctctttcagcagcagggcaaagcatctccgaaatgcagcgcggcggccagctggccctggtaggarggcgttcatagagccctgctgggtacacctactgcctttggtgtcaccctgcgtgcacgcacacacacatacagcaaccgggataggcagctggaaagctccaggctggctttgtgctttggggctggttccctgagccctcagcccatcatcctgcagcacccaagcgtgcaggagatggagctgggatacgatgcttcctggaagctcgccccgaacccrcagtgcagcaaactgccccggtttacggcccttataaaaacatctatacagaaacagcrtgttccaatgcatataagg

SEQ ID NO: 61609 - DNA, 600 bp, Chicken  19866894322449_2
atctctcctttgctctttcagcagcagggcaaagcatctccgaaatgcagcgcggcggccagctggccctggtaggarggcgttcatagagccctgctgggtacacctactgcctttggtgtcaccctgcgtgcacgcacacacacatacagcaaccgggataggcagctggaaagctccaggctggctttgtgctttggggctggttccctgagccctcagcccatcatcctgcagcacccaagcgtgcaggagatggagctgggatacgatgcttcctggaagctcgccccgaacccrcagtgcagcaaactgccccggtttacggcccttataaaaacatctatacagaaacagcrtgttccaatgcatataaggccagtcccttcagccttgggcaggtcccaacaccatattcaggaggagggaacacgccggcttcccggtgagcagcacacatccaaagctggacacaaagcagcagcagctccaacaacctccctgcgagctatatatggagcgtggagagcaggctggccagctgcaggcagggaggagaggctgggagagctgtgctgaccagcactggagatatggctg

SEQ ID NO: 61610 - DNA, 600 bp, Chicken  19866894322449_3
cagctggccctggtaggarggcgttcatagagccctgctgggtacacctactgcctttggtgtcaccctgcgtgcacgcacacacacatacagcaaccgggataggcagctggaaagctccaggctggctttgtgctttggggctggttccctgagccctcagcccatcatcctgcagcacccaagcgtgcaggagatggagctgggatacgatgcttcctggaagctcgccccgaacccrcagtgcagcaaactgccccggtttacggcccttataaaaacatctatacagaaacagcrtgttccaatgcatataaggccagtcccttcagccttgggcaggtcccaacaccatattcaggaggagggaacacgccggcttcccggtgagcagcacacatccaaagctggacacaaagcagcagcagctccaacaacctccctgcgagctatatatggagcgtggagagcaggctggccagctgcaggcagggaggagaggctgggagagctgtgctgaccagcactggagatatggctgcaagaactggtgcctgaaagactaaagagaggacccccagcaataaaaagcaaaacata

SEQ ID NO: 61611 - DNA, 600 bp, Chicken  19866894322451_1
atctggcataaatttgcctagaaagtagaaggaatgcatgaaatattatttcttagttcacataggacttttctgccagcacgccatgtaatattgcatcgctaataaaaggaagtttattcctgcttctggaagagagcaccacttgcacggcatagcagtgggaaaggggttcatgcgctgctcaggcggccaacacaatgtatgaatatcaaatcatgtaaggtaaagtatgaattaaatgcttgaaaatgaagacctgaaggaacatgaagggtttaagaagtggcccgtatcgtwctgcagtgcctcrggattcctgctgagctcagcaggacttggagcagccctttcctacctggggttgagtggtttcctgtaaagtatggagagcagatctgggttcccagggcagaccaacgcttaaaaacgggctgttagtggggttgtatattggtataacacaccttggactaatctagttcctaatggcagcattgtgcatggcagcccggttgtttgtttgcctgccttctcccagcctctctcttaccctatttatatacgcacacatgcaaaaaatatgagagttaaagaaaa

SEQ ID NO: 61612 - DNA, 600 bp, Chicken  19866894322451_2
ttgcctagaaagtagaaggaatgcatgaaatattatttcttagttcacataggacttttctgccagcacgccatgtaatattgcatcgctaataaaaggaagtttattcctgcttctggaagagagcaccacttgcacggcatagcagtgggaaaggggttcatgcgctgctcaggcggccaacacaatgtatgaatatcaaatcatgtaaggtaaagtatgaattaaatgcttgaaaatgaagacctgaaggaacatgaagggtttaagaagtggcccgtatcgtwctgcagtgcctcrggattcctgctgagctcagcaggacttggagcagccctttcctacctggggttgagtggtttcctgtaaagtatggagagcagatctgggttcccagggcagaccaacgcttaaaaacgggctgttagtggggttgtatattggtataacacaccttggactaatctagttcctaatggcagcattgtgcatggcagcccggttgtttgtttgcctgccttctcccagcctctctcttaccctatttatatacgcacacatgcaaaaaatatgagagttaaagaaaaatgtcaaccatat

SEQ ID NO: 61613 - DNA, 600 bp, Chicken  19866894322456_1
ggcagtttttttgtgtctctgctcctatatatttatttattttgagtaaatgcataaaaataaggtgacacttcatgtggaaagggacagaagctaaaaatactatctcttgagtgtgatgaatagggttgcctctttctcctgtaattcacaagctgctctgctttgcccctacttcgcagcatttaggggtgggggagaatctcatctttattgtggtatggcactttgcagtgcaaagagttaaatgatgcatgaaatgacctgtcacactgcattatatgccacagtgacacgtasggagcagtgcttctttccttttyggtcagaaaaaagcaattccctaggcctggctgttttcttgctttgaagagttaatgtggtgtgtgtatatgtgtatttctacataatttgctttagctcagacaggagcccatcagatgctgaataaaaacaggaaggatgtgtagggttgtttccctcctccayttattagggaggagatcagtggaaactggatgcctgtgacaggactcctgtctagaaaaaacaaaagccatttccatgtttcagattggaagtagtgtttgaaatactttc

SEQ ID NO: 61614 - DNA, 600 bp, Chicken  19866894322456_2
cctatatatttatttattttgagtaaatgcataaaaataaggtgacacttcatgtggaaagggacagaagctaaaaatactatctcttgagtgtgatgaatagggttgcctctttctcctgtaattcacaagctgctctgctttgcccctacttcgcagcatttaggggtgggggagaatctcatctttattgtggtatggcactttgcagtgcaaagagttaaatgatgcatgaaatgacctgtcacactgcattatatgccacagtgacacgtasggagcagtgcttctttccttttyggtcagaaaaaagcaattccctaggcctggctgttttcttgctttgaagagttaatgtggtgtgtgtatatgtgtatttctacataatttgctttagctcagacaggagcccatcagatgctgaataaaaacaggaaggatgtgtagggttgtttccctcctccayttattagggaggagatcagtggaaactggatgcctgtgacaggactcctgtctagaaaaaacaaaagccatttccatgtttcagattggaagtagtgtttgaaatactttctaaatggctccaagtaaccttgt

SEQ ID NO: 61615 - DNA, 600 bp, Chicken  19866894322456_3
gggtgggggagaatctcatctttattgtggtatggcactttgcagtgcaaagagttaaatgatgcatgaaatgacctgtcacactgcattatatgccacagtgacacgtasggagcagtgcttctttccttttyggtcagaaaaaagcaattccctaggcctggctgttttcttgctttgaagagttaatgtggtgtgtgtatatgtgtatttctacataatttgctttagctcagacaggagcccatcagatgctgaataaaaacaggaaggatgtgtagggttgtttccctcctccayttattagggaggagatcagtggaaactggatgcctgtgacaggactcctgtctagaaaaaacaaaagccatttccatgtttcagattggaagtagtgtttgaaatactttctaaatggctccaagtaaccttgttactgtggctaaggttaggcttgtgtatatgaagctctaaaaaaggagtagaaaatgctcatacactctatttcttagttcactgtgataggttccagctcatgctgtacggttccatctagttttgcttgcagctgatagtgcattgaagctcaggttgaagcaa

SEQ ID NO: 61616 - DNA, 600 bp, Chicken  19866894322458_1
attgttccatgagcttgctgggagagttggtgaaggaagtcggtacagcagcacctgcactatgtctccttagaaagcctggatcagttggggtgtgtgtctcataacaatcaacaaccaacatgaaattcatgatgttttacataaatagctttcagaactacagattgaactccttctagggtaatgtttaaggctgatttactttgtagctggaatttcattctcataagttctctagagtttacatgtagtagcaaaatcaggaagcataaatattaattaatgaatttgacaaayggtggcagtgttgattccacttgtgtttgaatcctaaagggataagtgcacttgtcccatatgtttccatctctcccctgagaagtatttaggatacgtctgaaaacgaaaaccagaaagaagtacttcaggctgtctgtcattgtttgaactctgggaaagaggaggctgcttctggcatggagtgctggcttttgaggacaagtcagggccaagtgacagctctaatttttaatttttttattccgtgggttgaagacaggctccaaccagctgtctgtggtaatgaagtactaagtg

SEQ ID NO: 61617 - DNA, 600 bp, Chicken  19866894322469_1
gtcttcttctagatttaagttatctttttattttatcagaataagtctctgtgtcattgtattctgttaagcagtctcatttccttgcaagctagtgtgaagtcattctgccttaacctggtcaccacctgagtctatgcaactgagcattccagttatttcactgaaataatttgaaatctttttttttcagtttgtaaagtattgttttatattgaaatgaatgccagtttttttttttttttcttaactatgtgtatctactgttctgaagaaaagtaaaagttagggaagaaattwtttaattacctctgcacacatgaaagaacatttcattaaagatgtccttccctaatttttgtatatcaggcgtgttaatgtaggtatcaagtcaacgcgtaggacaaagttggttatagtragatgtacctgggaactgctaaagatactgcagaactcattttagaactcttttctttactttctgaataaggagatrttttgttgttgttgttgttgttgtttgcttgtttgtttttgtttctgttttttggctgacatgccacttttgtaatgtcctgtcaggttacacctgtggcc

SEQ ID NO: 61618 - DNA, 600 bp, Chicken  19866894322469_2
tcaccacctgagtctatgcaactgagcattccagttatttcactgaaataatttgaaatctttttttttcagtttgtaaagtattgttttatattgaaatgaatgccagtttttttttttttttcttaactatgtgtatctactgttctgaagaaaagtaaaagttagggaagaaattwtttaattacctctgcacacatgaaagaacatttcattaaagatgtccttccctaatttttgtatatcaggcgtgttaatgtaggtatcaagtcaacgcgtaggacaaagttggttatagtragatgtacctgggaactgctaaagatactgcagaactcattttagaactcttttctttactttctgaataaggagatrttttgttgttgttgttgttgttgtttgcttgtttgtttttgtttctgttttttggctgacatgccacttttgtaatgtcctgtcaggttacacctgtggccakggactgaggaagtcctgagatcatggttaaatttaatctccggtggttaaatttaatattatcaccaaaataaaatgtctttgttcctcgtgtttctcagattcttttgctggggatat

SEQ ID NO: 61619 - DNA, 600 bp, Chicken  19866894322469_3
aagtattgttttatattgaaatgaatgccagtttttttttttttttcttaactatgtgtatctactgttctgaagaaaagtaaaagttagggaagaaattwtttaattacctctgcacacatgaaagaacatttcattaaagatgtccttccctaatttttgtatatcaggcgtgttaatgtaggtatcaagtcaacgcgtaggacaaagttggttatagtragatgtacctgggaactgctaaagatactgcagaactcattttagaactcttttctttactttctgaataaggagatrttttgttgttgttgttgttgttgtttgcttgtttgtttttgtttctgttttttggctgacatgccacttttgtaatgtcctgtcaggttacacctgtggccakggactgaggaagtcctgagatcatggttaaatttaatctccggtggttaaatttaatattatcaccaaaataaaatgtctttgttcctcgtgtttctcagattcttttgctggggatattctgctttatcacatcagttgcagatatttctgcaacttacattgaatcttcatattagcttatacttgaacgctatt

SEQ ID NO: 61620 - DNA, 564 bp, Chicken  19866894322469_4
taattacctctgcacacatgaaagaacatttcattaaagatgtccttccctaatttttgtatatcaggcgtgttaatgtaggtatcaagtcaacgcgtaggacaaagttggttatagtragatgtacctgggaactgctaaagatactgcagaactcattttagaactcttttctttactttctgaataaggagatrttttgttgttgttgttgttgttgtttgcttgtttgtttttgtttctgttttttggctgacatgccacttttgtaatgtcctgtcaggttacacctgtggccakggactgaggaagtcctgagatcatggttaaatttaatctccggtggttaaatttaatattatcaccaaaataaaatgtctttgttcctcgtgtttctcagattcttttgctggggatattctgctttatcacatcagttgcagatatttctgcaacttacattgaatcttcatattagcttatacttgaacgctattcttttcttttaattggttctttttttactagttaatttgtgttcaggacacttaagatttctttgaa

SEQ ID NO: 61621 - DNA, 599 bp, Chicken  19866894322486_1
  misc_feature (1)..(90): n is any nucleotide
nnnnnnnnnnnnnnnnnnnnnnnnnnnnnnnnnnnnnnnnnnnnnnnnnnnnnnnnnnnnnnnnnnnnnnnnnnnnnnnnnnnnnnnnnnatgccacgttaaaatcttacacgtgcacaacatgattcagctgcctcagcaagagaggaaaggcctctttcaacactgtacctttgacattcacaggtaggaggatttgatggagtcaaccggctccgcactgtggaagcctacaacccagccgccaacacgtggcgcgtcgtccccaccatgttcaaccctcgcagtaactttggcatygaagtggtggacgatctcttgtttgtggttggtggctttaatggatatgccaccacgttcaacgttgagtgctacgacgaaaaagctgacgagtggttcgatgctcaggacatgagcgtctaccgcagcgctctgagctgctgtgtggtgccagggctgtgcaacgttggggattacgctgccaaaagagattagtgtggagccctcgcagcaaggggggatcagaggcacttcttcaccgagtccccagcctgcacaaacagctccagttagctaataaagtcttctaagcagcaaaa

SEQ ID NO: 61622 - DNA, 600 bp, Chicken  19866894322486_2
caaacagctccagttagctaataaagtcttctaagcagcaaaagaatgcattcgcttaatctaaaagaaaacagaattgattctcactagaagaacaattagtaacgaaaaccttcattccatggcacaaaaaatccccaaatgtgatttagaggaattggctacaccttgtttaacagctcaaaaccaataacgggacgatgcacagcagaatgctagagaaataaatggtttatttcgttagttcacttacaacaagctccggtacagtgtgtcttacgtgaagaacgttacagcggragtgtttccaacagcctacacagatactactttaccttactggaagataagtacaggagtgctgcttgcccaagcattctcttgaagtctacattaacactgaggagagtacagctgccgtgatccacagtgacatggacctatgaggagtatcttactattaatggtctgcaaacatctaattagccccacacttttcattcatattagtaacaggattagatcctcagaagcacctgttttatcagacttccacttacaactgtcaaatcagagataccatttagattctaaaacaat

SEQ ID NO: 61623 - DNA, 600 bp, Chicken  19866894322486_3
atgtgtgaggaaacgttattaaaaatatatacaaaactagcatagtaacagaatattcaagtccttataaaacaggatgtgcatatatggcacctacctagacgtgactgcagggaccacgcagcgctaggcagcacgtgtcctacttcactgatacctcgagcagacggacaggatgtgaaacatgcattttgtggcacgtgttcagtacagctatacaggtatgattgtcttagggaggaaaaataccatctgatgttcctttgcaaggacagaaatcagccttgtagtgcttaacayacactaggatcttactgacatttgactacccactacacacacaaaaggattcccaagctgttgcttataggatttttttaaagtgaatactcagcaagctacagcagtcaggggccagaatgcatttgttacacaattcacaggttagttagctaaattacagccagattcaattcttctcaacacctacaggtgaggcaacagatagtgagacttgtcagtttaaaactgtgtaatgcagtaggtccacttaaagtcaaggctataaaaatccaaccacttaaaaactccacagcattg

SEQ ID NO: 61624 - DNA, 600 bp, Chicken  19866894322491_1
tggcatgggtactgaaactagatgattttgaagaccctcccaaaacatttaataactctaagaattcatattgtgaccaagcaggtctgcaccatcctattggactgcccagccaaacagcccatctgcttgattctgttgggggggggttgaacctgcctaagcttttggctaatcactaagaatagggcaatgctcgtactggggacctttctgtttctttcctgccagttataccagatgttctcctacgttctggattatttgcccggcccacataacaatatattcaaagaaatkgatgctgtaaaagcctttgtggcagaagaggtaaagctgcaccaagcctccctggatcccagcgctccccaggatttcattgactgcttcctcagcaaaatgcaggaggtaaggaggcaccaagccacagctcatccccagatacacctatgctgatgacttctcccaattggctgctgcacttagcagagaaattcaatagctctgagtggaaataaaaatttggggtggcacaagaaagggacaccgttctcctttcaacttgagaaacagcacagccttttccctaggaaaaagaca

SEQ ID NO: 61625 - DNA, 600 bp, Chicken  19866894322494_1
ctgtgaggaactgaaaatacttctactcccaagattgcatacagtacctgaaatgtaactgttcatgtggagtgggttttaaattaccaacagtattctgtaagctaagatgcatcaataagtttgagacataagaatacccatcttgtgccttgacaaataatccatattaaattatccatatattcaagagcaacagttttctatcaaggctacaattatgatatacttgactagcagatgcatcaaagtgacggcatgagtactttgttattcaagcatccacctactttcacaaayaaaacttgcaagaacttttatcccaaaactcacaattctccaaagtaaaggcttccacaagcctgtcagctaccaaggagctggtctatgagtacaagtcaggcctggttttgttttaaaaacccacacatcacatctactatgcaacctgctacaccttagacaaattttatataaccaaaaggaatacctatgttgagagctgtttcctgtttgtcccctgtcagaatccatatcttaatttctgccttcattaatgtggctattgtttcaggaacacctgcttgcaggcggtcttca

SEQ ID NO: 61626 - DNA, 480 bp, Chicken  19866894322496_1
catctccttgtcaatgggcagatacagggcagggtttggtttctgcaactgtccccttgaatggggtcattgaggttcttatgtgttttattttttaacagatttgaaatttcccctgaacacttcatcaaaacaaacaaaaattagggatgtcataggccagggaaccacatcagcagaggatcacaagaaatctaatcaataagcaatgaagaagatggctcaccgcttgctttgattctctgctgggatcactctgcattcctttctgtggctgtagactttttttgtatggcttcyccttgtattttaaggaaacgtgacatggtacagctatcaaaacagaactttagacggaatgttcggcaatatagcactttaattgctgtggaagcattgagcgtggggcacctaacagcccattgcagtggtctagatggctcctctcacctttaggttaatggcttgtgtgtttagctg

SEQ ID NO: 61627 - DNA, 600 bp, Chicken  19866894322500_1
acttgaatgaatgtttcagcttggagtctgaggcacaaatgattccaggagtatttttgattacaaagcactggaatatttcaggcattaacttttttgagcagtagattcttgtaaatgaaaaaagaaaaaaaagacgtatgcaaaaaagtatggtattatattgtgttcctgtactgtatgttgatgttaaaagcaagttatctgactgaacactaccagcaggctactcaaatgtgaacactgctgaattaggacaataatggtaagtggtagcaaagtacagccatgaaggtcaasattatggaaatttttagtgagtttctgcacagagaagttgtggattctggaaaaaaagactacaaagataaaattcagagctagaaaaagaactcgaccattaacatttatatagctacactacaaagcagagaagacagtcagaaaggtcaggtaataaaatgtataggatttttatgacccagaagtgctctgagggatgttaaattggttaaggctaatgtttgactgcttaatgaaaagcaaaattttctatctgttcagcttcagacttttcacaaaatgtaaaaatgttaacct

SEQ ID NO: 61628 - DNA, 600 bp, Chicken  19866894322500_2
ctacactacaaagcagagaagacagtcagaaaggtcaggtaataaaatgtataggatttttatgacccagaagtgctctgagggatgttaaattggttaaggctaatgtttgactgcttaatgaaaagcaaaattttctatctgttcagcttcagacttttcacaaaatgtaaaaatgttaacctttctatttttacctaaagatgtaggcacaaagaattgtgaaaaaacaggaagtttggtgactgtttgaaattccaattgtatgttagaagtatgaaaaaatacaagaggaaagaracgttattatttgctgtatcagaggtaaatgaaataaaggaagaaaatcataaaactggattgatgataaataatagaaataacaaacccagtcaaacgtaacttattattttctggaaatctatccagtttcccaggtaactgactttcatcagtacttttttatttatttgtttatttatctttttccttctgatccatgatctgatggtgtcctgtcattttatttctgcattatttcttctttttattcatttgcttttctgatttctctgcatggtttctttatccaatacgtat

SEQ ID NO: 61629 - DNA, 600 bp, Chicken  19866894322504_1
tatagataaaacactgatgatatctttgagcttccttctcttttatgttgacaaaatatgctaccactgaatttaaggattttatccaaaggaatatcttttatcaaatgccattctcactttctgatttcttatgttatttctgaaaaagcctttatacagttctgatactttgctggcttcactttatttgaagacaaattagttaaaaatgtgaagttaaaaaatacttcatttacgcacttggaaagcgtaacattgaaaccacttaagcagatttaagaatactgagaaatcctyttcatttggcttgctagtccgttttgcaaataaaaagcacttctgctttatgtatttgtcttaaagcctaagcatgtgtaatcaatgtatctttaatctgttattttggcatcaagagttaacatctgcaaatattttatattgaaacatgggctgcagatgtttggttttctgttgcctcctgcttcccccttaagtagttgcatgctgcggtaggtaacatcttcttgagagggaggaaaggaaataaattttagtgcaggtgagaccttgtctcttagtataaagaggaatcagaag

SEQ ID NO: 61630 - DNA, 599 bp, Chicken  19866894322508_1
  misc_feature (1)..(20): n is any nucleotide
nnnnnnnnnnnnnnnnnnnntagattttgtagaattttgtaaattatttaaagcgttctaaggaagtattttttataatgatttttagtgctcacattactacagaatgctgtagctcttgtagataaggagacaccgcctaatcgtgctttaaattatgaggcctctaatcgtgttaaaaggaaacctgtttgggtgcagaatatatttgtcagtctgtgatgagatcccaggcaaacacagcatttactgacagcgcagtgctttggaagctcactgcctgccatgtgtttacactcragctgccttaggacaatcctgtgtccccggggactgcggagtgaactcaccaagcagaactccagcagagttggtgcggctgcaggtgcagagatctggctatgaagatccaaatgcaaatccacgcaagcaaagagggtcagtctgtctgctcctcccctgtacagcaaccacagtggccagggaaagtacctttggaatgctgaaaaccttctgctagcagatgattcaaagcacaattgcagttggaatgaagtgaaggatgtctgttcagacagcatgacttctgtggatgtcac

SEQ ID NO: 61631 - DNA, 600 bp, Chicken  19866894322508_2
actcaccaagcagaactccagcagagttggtgcggctgcaggtgcagagatctggctatgaagatccaaatgcaaatccacgcaagcaaagagggtcagtctgtctgctcctcccctgtacagcaaccacagtggccagggaaagtacctttggaatgctgaaaaccttctgctagcagatgattcaaagcacaattgcagttggaatgaagtgaaggatgtctgttcagacagcatgacttctgtggatgtcactagacttgggtgttgctgggcctgcaaggctgaaacaatttcctygctactcttgagtctaattctgatgccctgcagttacccagcaatgtgtttggatttttccaaatgaactttcttcaactgagtgcccttacttttctttytcagaagtggtttctaagatgttacatttctgtgaacttctactttcatttacaatttttgtgcaatagagcaaagctgtatttgctgtaggaagtccctagcagaaacgccaaggatattttcagcactgttctttcatacttagagagttttctctctttttccagcacccaaaataaagcaatttttcactactgt

SEQ ID NO: 61632 - DNA, 600 bp, Chicken  19866894322508_3
tgtctgctcctcccctgtacagcaaccacagtggccagggaaagtacctttggaatgctgaaaaccttctgctagcagatgattcaaagcacaattgcagttggaatgaagtgaaggatgtctgttcagacagcatgacttctgtggatgtcactagacttgggtgttgctgggcctgcaaggctgaaacaatttcctygctactcttgagtctaattctgatgccctgcagttacccagcaatgtgtttggatttttccaaatgaactttcttcaactgagtgcccttacttttctttytcagaagtggtttctaagatgttacatttctgtgaacttctactttcatttacaatttttgtgcaatagagcaaagctgtatttgctgtaggaagtccctagcagaaacgccaaggatattttcagcactgttctttcatacttagagagttttctctctttttccagcacccaaaataaagcaatttttcactactgtcttttttatttgaactgactttaaatggcattcgagcaatgcttttatatcacaatgaaagtgttcgcgcaccagttccactgaaaaatccaaaaggtgtg

SEQ ID NO: 61633 - DNA, 600 bp, Chicken  19866894322518_1
gtatcaataatagaaattatcccatagtttagcacagtacgctgatttactcaaacattcgtataagatttttaaaaagcattttaactgtggcatatatttactgagaatagcccacttccactctgataataattttactggttctgaatggctgagcatgtgtagtcctctgcttcttcgtttctgtgggattcagcagcgcaccaatgctttgttctgtgtcagaaagtaaatgaagtactctcatcacctaatgtcacatgcctaaatttagaagttgcttgcatgattcactgkgaggaagctctcacgcaaaacaattcaaaattcagagcagagctcaatttattccatttgagttgccatctaaagaagcttttctcttaactatataaatagtagatagataactcctcctaaattgaactgttaaagctacaagcggcgatgtacctggctgcagacagtcagtgtacttgctggcatcttcctttatcggggaaacagtgcagatagatccagttctccatttggcagatagtgcagtgctttcagaatgatagtttagtctgtaagccacacagtccttgagctttc

SEQ ID NO: 61634 - DNA, 600 bp, Chicken  19866894322518_2
gcatcttcctttatcggggaaacagtgcagatagatccagttctccatttggcagatagtgcagtgctttcagaatgatagtttagtctgtaagccacacagtccttgagctttctgtaagtcttgtagttcattatgatggtaattttttatgaggactatagctcattagaatcttgactgaaactaggaattattattggccatcaaatagtttcagctggcagtaattcctggatgtcattgatctggggcaaatttgtaccaatgacctagagcttcatatcccattactcacawcttgaatccttaaagctttagatgtttgctcttgaaacagtttaaaaatggggaatatgtttgagtttctgatttatttcttgttcctgtggtatttaaaattcatgtatcgatgaggagcctgagtataagttgttgtgtatgtgagtcagacgtaaccttttatatgcctgacttttatatgggctggatgatcagaggggagaaaagacattgcatcttaaacacaactggaatattttgatctattaaatacaacacagcagagtggttgtagtctctgagcttttggcttgtcca

SEQ ID NO: 61635 - DNA, 600 bp, Chicken  19866894322524_1
ccaaagtttcttatttcagaacctgacttctggcaaatttcaaagctacaaaagcccagaactttgctggatgcagaaacctcaggagtttatactaagtcaaccatcagaacatctagtgctactgcctgtagaagacccacaggcagaagttaaggctacttccccccccaatacaaccagtttccaatgtacaggaattaaactgaagattaggttctcaattcagacagcgatctatccaaactatgtaaagattgttacagcactacacttcattcacatataggaatacttacrtatttacatattgactacagctttttttaggccaatgatcatcacagagaagtgaccaattytagtatttccaaattattatggaaccacctcttactgtactggagaagaattaaagcatgaagtatttacagaagtcatatttgtgtgaataaattacaatttacagagctggcagtccatgcctaaawctctaaacacacgactttcaccgttagtttagcagcaacagggctgataatttaaatttatttatttagtttccacactactatctgtagagactggagaattttgttg

SEQ ID NO: 61636 - DNA, 600 bp, Chicken  19866894322524_2
tttgctggatgcagaaacctcaggagtttatactaagtcaaccatcagaacatctagtgctactgcctgtagaagacccacaggcagaagttaaggctacttccccccccaatacaaccagtttccaatgtacaggaattaaactgaagattaggttctcaattcagacagcgatctatccaaactatgtaaagattgttacagcactacacttcattcacatataggaatacttacrtatttacatattgactacagctttttttaggccaatgatcatcacagagaagtgaccaattytagtatttccaaattattatggaaccacctcttactgtactggagaagaattaaagcatgaagtatttacagaagtcatatttgtgtgaataaattacaatttacagagctggcagtccatgcctaaawctctaaacacacgactttcaccgttagtttagcagcaacagggctgataatttaaatttatttatttagtttccacactactatctgtagagactggagaattttgttgccaaaggcatgtttaaacttagcctctgggctgcactcacacatttttctaaggtaattaca

SEQ ID NO: 61637 - DNA, 600 bp, Chicken  19866894322524_3
gtacaggaattaaactgaagattaggttctcaattcagacagcgatctatccaaactatgtaaagattgttacagcactacacttcattcacatataggaatacttacrtatttacatattgactacagctttttttaggccaatgatcatcacagagaagtgaccaattytagtatttccaaattattatggaaccacctcttactgtactggagaagaattaaagcatgaagtatttacagaagtcatatttgtgtgaataaattacaatttacagagctggcagtccatgcctaaawctctaaacacacgactttcaccgttagtttagcagcaacagggctgataatttaaatttatttatttagtttccacactactatctgtagagactggagaattttgttgccaaaggcatgtttaaacttagcctctgggctgcactcacacatttttctaaggtaattacagcaagactggggctgtccaggtttaaaaccagttcagatacaaagtgagatttactactggtgactgagctctttccacatggttacctttaaatggttatattattaaaatatgttcatgtaatggca

SEQ ID NO: 61638 - DNA, 600 bp, Chicken  19866894322524_4
tgcctcttgcagggaaaattggtgcatgactcactgacattaatgcatcattcccaagaagttaaatgactctttagttaatagctcttcatgccaagtgtttttcctcttaccctacagatgtattggttccgctcgcctggcgagaaggtttgtgagcgcacaatcatgctgttcctgacaaagggacgctgtcttgagctccagctggctctgtccttgggtcggactgttgcattctcgttaactgattcctcagtgttagtctctttatcaacctatcaaaaggaattcagtttrtaagaactattatgmccagacacatgccactacgtaggttttttgtctttgaattttacaagcattcttgtcaccttggatgggacggaaaaagatcagtagcaaaaaaccatctcgcccaccatgcgacaccaagcaaggaaacacaaaactacagaaatacttaggggagtctgggcagcctttgaaagtaactctctctcctctagaaccatagcttctgcctttgctgccctgtagattttctgatccagccagggtacaacaagcatcttgatttaccatttgaagagatagtta

SEQ ID NO: 61639 - DNA, 600 bp, Chicken  19866894322524_5
aaattggtgcatgactcactgacattaatgcatcattcccaagaagttaaatgactctttagttaatagctcttcatgccaagtgtttttcctcttaccctacagatgtattggttccgctcgcctggcgagaaggtttgtgagcgcacaatcatgctgttcctgacaaagggacgctgtcttgagctccagctggctctgtccttgggtcggactgttgcattctcgttaactgattcctcagtgttagtctctttatcaacctatcaaaaggaattcagtttrtaagaactattatgmccagacacatgccactacgtaggttttttgtctttgaattttacaagcattcttgtcaccttggatgggacggaaaaagatcagtagcaaaaaaccatctcgcccaccatgcgacaccaagcaaggaaacacaaaactacagaaatacttaggggagtctgggcagcctttgaaagtaactctctctcctctagaaccatagcttctgcctttgctgccctgtagattttctgatccagccagggtacaacaagcatcttgatttaccatttgaagagatagttattatacatttgtatt

SEQ ID NO: 61640 - DNA, 600 bp, Chicken  19866894322524_6
caggggtttggccatgctcgagatggtgcctatgcaaacaaagcagcagctgggatgggttcttccatacatccaccaagggccagcggagcggtgcctcatggcaacgtgcagagctgcaccagccacaggccactgctagctccctgccccaagaaaggactgctgcccagtacagttgtccctcacatgtcatgaggagcctcgggtgccgacaaccctgtaggagtcgccgtctgtgcttacacgcagcaatcatcttgacagcagggacagaacgagcactgcagcagctggcayatgtggtgttactgatgtgcactggggcattttcttcaactggggtaatttaatgaagttcacggttttgtatgcgtaggtgataaatacaaggacctaaatagcacaactgcaaccctgagaggatctggcacaagatgatctatactgtggcttgtttataatcagatctgcagtgtctttcctttactgtccaggtccacccagccctggcaccgcaaaagacttatgtgcgtgtctaaccttcagatgttctccttgacgtctccccttgctgagttagagctttgatctatattt

SEQ ID NO: 61641 - DNA, 600 bp, Chicken  19866894322525_1
ctgtttaactttatgcacatgagtagtctaattcaatttagtctgatgaaatgacttgtatgaaaccaagtgtttgtggaacaagaatttcagacagtatggttcttcagggcaatagcttctgcttgctgaaactttatatggttcttagcacaggaaattgtatttagatcatctaggatctctctttgaaccatagctgtagtaagaagagaaatgataaagtgaaaaagaacaattcttgcaagctaaattactttctacttctttttcttcctcttctaagaatctctttactaytaagtgaaatcattctggtcattccttcataacaagctatcaaactgctgctgttggccttctggtagccactgacaaagttaaatactgttgtttatatatgctagaatctcttatatgttctaatcatcatctcctatctggatggaaccagattcttcctgaaacttattattattcaatgcattcaacacttactacaaggaagagttatgaatgagcagcaatgcagatattcaccatcttccccaagaaaacatcaatgtgccaaataagagaacagggtttttgctgctctct

SEQ ID NO: 61642 - DNA, 600 bp, Chicken  19866894322530_1
gtacctggttttttttttttttttttgccgttgggtttgtagcttatggaaaaggacaactaattccaatgaaataaattttccaatgaattccaatgaaactggttaactaaacagattactgctttgaaagtcaaagtctgatttcatattttcaattgcagactgcattctgctccagaactctccttccataagtattttactggtcttgacaaaaaatgactgtcattattctgtttgttattccaaagagacaacactgaaaggagaaggaattcagaaagtaaatattgtgawgcaataattcccgctctatctcagttgactgacacaatgggacaaaaatttctgtttctacagattgttacagaaatgcgcatcaaattgaaagatgatcattttgatattatggtgcttggattcagacctgggagtgtgattgttgattttatttctgtactgcaaaaacaagagcctgttgatgtagatattgtgcaggaatacctaagccaaatattaaaaagcaagtttggtgatcaaactgaagtaacagtacaatgtaagtaatgttaaaaacatcttttctgtgatgatgtg

SEQ ID NO: 61643 - DNA, 599 bp, Chicken  19866894322540_1
  misc_feature (1)..(244): n is any nucleotide
nnnnnnnnnnnnnnnnnnnnnnnnnnnnnnnnnnnnnnnnnnnnnnnnnnnnnnnnnnnnnnnnnnnnnnnnnnnnnnnnnnnnnnnnnnnnnnnnnnnnnnnnnnnnnnnnnnnnnnnnnnnnnnnnnnnnnnnnnnnnnnnnnnnnnnnnnnnnnnnnnnnnnnnnnnnnnnnnnnnnnnnnnnnnnnnnnnnnnnnnnnnnnnnnnnnnnnnnnnnnnnnnnnnnnnnnnnnnnnnnnnnntctattgctttcctagaaatacccgaaaaatcatccctaaacaaacagcacttgcrtgtaagagcaaaaagaaccagcgagcagatttaatcatcaccttcctgccaacttctaccaagatacagggcagctttttgcttctcatgttgtcaaagctctggtcttaaagtaagcattaagaatttatacacattttaaccccaactagaacgaacctagctgtacaaatgcagcgtttatgggaagtgtttgttttgcattagcagtacggttgtttgtacatgaaaatatcacctgatggcataataacagtctgagtaaacagaatattcacttaaagtgaatttcacctccg

SEQ ID NO: 61644 - DNA, 600 bp, Chicken  19866894322556_1
tgtatgtatatttataaatatatatgttgtctatagggtaagaaaagggaaaaacaaatgttgatttggaaaaagtaattttctaaagaatcttaaatgaggtcttcttaattacacattacatggtgttctgttgtctactttcctgggcttattaattatcttcctttttattcatatttggctagcttcttgtatgtctactaatgagtcttgtccctttaagtccttagggatgcctagagataggctttatagacaagttacaagctgagtatcaagaatcaagatacaagaaaygagttgaatactgggatcyaagttgttgtggggggattcatttcagtgatgagcaacaatgcaaaaaggagcaatggacagaaacaggaatgcaggaacttccatattaacacaaagaaaaaaaaattactgtcacagtagtggagcactgaaataggctgcccagagatatgatgtagactccttttctggagatattcaaaaccaacccggatgctttcctatgtgacgtactgtagggaacctgcttcatcagggggttggactacaggatgtcccagaggtccattccaacccctg

SEQ ID NO: 61645 - DNA, 600 bp, Chicken  19866894322556_2
atatatgttgtctatagggtaagaaaagggaaaaacaaatgttgatttggaaaaagtaattttctaaagaatcttaaatgaggtcttcttaattacacattacatggtgttctgttgtctactttcctgggcttattaattatcttcctttttattcatatttggctagcttcttgtatgtctactaatgagtcttgtccctttaagtccttagggatgcctagagataggctttatagacaagttacaagctgagtatcaagaatcaagatacaagaaaygagttgaatactgggatcyaagttgttgtggggggattcatttcagtgatgagcaacaatgcaaaaaggagcaatggacagaaacaggaatgcaggaacttccatattaacacaaagaaaaaaaaattactgtcacagtagtggagcactgaaataggctgcccagagatatgatgtagactccttttctggagatattcaaaaccaacccggatgctttcctatgtgacgtactgtagggaacctgcttcatcagggggttggactacaggatgtcccagaggtccattccaacccctgcaattctgtgactctgtga

SEQ ID NO: 61646 - DNA, 599 bp, Chicken  19866894322573_1
  misc_feature (1)..(82): n is any nucleotide
nnnnnnnnnnnnnnnnnnnnnnnnnnnnnnnnnnnnnnnnnnnnnnnnnnnnnnnnnnnnnnnnnnnnnnnnnnnnnnnnnncaaaaagaacaaaaaacaccacccaagctctgatgagaaagataaattctcaaaaacagtgacagacgccccaagcagatactggaggagaaacgccaccaagatccgattagcccggtgaatcagcgctgcaaacagtatctctaaaccaaaacacccttccttttccccttctcacactcctcttcccatcactgcaaagctctcccagccctcasaytctctgcccactgctcccatgcatygcctgcccagggtctgacgttggcttatcaacacyttccattgacgctggtgaagtcagtgctggcaggggcaccaggccctcattgctgggtcactaacacgacagttatcccttctgcctttggggtgattcaaacaacttgggctggccagtagggagaaatctcattttttgtgaaagaggaaagtctgctttttaaatcaaaggagggcacaaagcaaacaagtgggtaaagctctcgtgtgtttgcagtccgttctctgctttgtg

SEQ ID NO: 61647 - DNA, 599 bp, Chicken  19866894322573_2
  misc_feature (1)..(80): n is any nucleotide
nnnnnnnnnnnnnnnnnnnnnnnnnnnnnnnnnnnnnnnnnnnnnnnnnnnnnnnnnnnnnnnnnnnnnnnnnnnnnnnncaaaaagaacaaaaaacaccacccaagctctgatgagaaagataaattctcaaaaacagtgacagacgccccaagcagatactggaggagaaacgccaccaagatccgattagcccggtgaatcagcgctgcaaacagtatctctaaaccaaaacacccttccttttccccttctcacactcctcttcccatcactgcaaagctctcccagccctcasaytctctgcccactgctcccatgcatygcctgcccagggtctgacgttggcttatcaacacyttccattgacgctggtgaagtcagtgctggcaggggcaccaggccctcattgctgggtcactaacacgacagttatcccttctgcctttggggtgattcaaacaacttgggctggccagtagggagaaatctcattttttgtgaaagaggaaagtctgctttttaaatcaaaggagggcacaaagcaaacaagtgggtaaagctctcgtgtgtttgcagtccgttctctgctttgtgag

SEQ ID NO: 61648 - DNA, 599 bp, Chicken  19866894322573_3
  misc_feature (1)..(55): n is any nucleotide
nnnnnnnnnnnnnnnnnnnnnnnnnnnnnnnnnnnnnnnnnnnnnnnnnnnnnnncaaaaagaacaaaaaacaccacccaagctctgatgagaaagataaattctcaaaaacagtgacagacgccccaagcagatactggaggagaaacgccaccaagatccgattagcccggtgaatcagcgctgcaaacagtatctctaaaccaaaacacccttccttttccccttctcacactcctcttcccatcactgcaaagctctcccagccctcasaytctctgcccactgctcccatgcatygcctgcccagggtctgacgttggcttatcaacacyttccattgacgctggtgaagtcagtgctggcaggggcaccaggccctcattgctgggtcactaacacgacagttatcccttctgcctttggggtgattcaaacaacttgggctggccagtagggagaaatctcattttttgtgaaagaggaaagtctgctttttaaatcaaaggagggcacaaagcaaacaagtgggtaaagctctcgtgtgtttgcagtccgttctctgctttgtgagctacttgtaccaacacaacaggttt

SEQ ID NO: 61649 - DNA, 599 bp, Chicken  19866894322573_4
  misc_feature (1)..(20): n is any nucleotide
nnnnnnnnnnnnnnnnnnnncaaaaagaacaaaaaacaccacccaagctctgatgagaaagataaattctcaaaaacagtgacagacgccccaagcagatactggaggagaaacgccaccaagatccgattagcccggtgaatcagcgctgcaaacagtatctctaaaccaaaacacccttccttttccccttctcacactcctcttcccatcactgcaaagctctcccagccctcasaytctctgcccactgctcccatgcatygcctgcccagggtctgacgttggcttatcaacacyttccattgacgctggtgaagtcagtgctggcaggggcaccaggccctcattgctgggtcactaacacgacagttatcccttctgcctttggggtgattcaaacaacttgggctggccagtagggagaaatctcattttttgtgaaagaggaaagtctgctttttaaatcaaaggagggcacaaagcaaacaagtgggtaaagctctcgtgtgtttgcagtccgttctctgctttgtgagctacttgtaccaacacaacaggtttcctctagaggctcattggagataaacctcctggaa

SEQ ID NO: 61650 - DNA, 599 bp, Chicken  19866894322576_1
  misc_feature (1)..(81): n is any nucleotide
nnnnnnnnnnnnnnnnnnnnnnnnnnnnnnnnnnnnnnnnnnnnnnnnnnnnnnnnnnnnnnnnnnnnnnnnnnnnnnnnnagaatgtttattttatgagaatatgtatctggctataatcagagcagaacgtgagtaatttatcttttgtttacaaaaatttgtttgacatgcctaatgctttattaaggacacttttgagaaggaagtacagcattctggtagtatagtaacacttgtacgtatattttccatgtttgccactcaactattcagtaagaattggagactgaatatctktataaaatcagtgctctaaatcgaagtagtaagttaaaacaatgttgtgaaaggttcagcttaaggcaaaactagaatttgtatctatgtagtttcggctcatagagaatatagagaaatgcatacctagcctattacacttgttaaaccagtatgggatcaagtgcattatcaaattatgttagttatgacagtgactttctgataaagtratactcaagattgtggcagatctacaattcgaccagtgcttccatctgaaaataattgcccatcgcaggtgctcatttttccacaga

SEQ ID NO: 61651 - DNA, 532 bp, Chicken  19866894322576_2
agcattctggtagtatagtaacacttgtacgtatattttccatgtttgccactcaactattcagtaagaattggagactgaatatctktataaaatcagtgctctaaatcgaagtagtaagttaaaacaatgttgtgaaaggttcagcttaaggcaaaactagaatttgtatctatgtagtttcggctcatagagaatatagagaaatgcatacctagcctattacacttgttaaaccagtatgggatcaagtgcattatcaaattatgttagttatgacagtgactttctgataaagtratactcaagattgtggcagatctacaattcgaccagtgcttccatctgaaaataattgcccatcgcaggtgctcatttttccacagagaaagtgcagctgtgtgcattgcaattaaacacagctcctgaatcagtgataggattgcatgtgagaaaatgacaggcagtcagaggtgagactaaggtcaagataggtaggatggttttgtaagcagaagacagagaaaaaaaa

SEQ ID NO: 61652 - DNA, 600 bp, Chicken  19866894322579_1
ctgtgcagttatttggaattgtttcatagttggtcgtgaattggtaatgtagatcagttttgatataagcaaaaagtgtgagtctcaatagattccttttacttaaaaagtgcctctacttgctgaaggaataactggcaaaagtatcaattttctacatttcatatcacaagactgaagactaggattctgtatatgttcacattgcattgataagcccatccataagtgggagacctcattgtggctttccagtacttgaagggagcataaaaacaggagggggaacagttgtttacragggtggatagtgataggacaagggggaatggtcttaaactgagacagggggaggtttaggttagatattaggaggaagtttttcacccagagggtggtgaccgcactggaacaggttgcccaaggaggctgtggatgccccatccctggaggcattcaaggccaggccggatgtggctctgggcagcctggtctgctggttggcaaccctgcacatagcagggggttggaactggatgatcattgtggtccttttaaacccaggccattttagggttctatgagcagtatcagggtctc

SEQ ID NO: 61653 - DNA, 352 bp, Chicken  19866894322586_1
catctatatcccattatctatattcatgttctggaaagggggattgagtgctgtccacagggatctggacaggctagatcagcggactgagtcttactgtatgaccgttaacaagaccaagtgttgggtcacttggtcacagcaatcccatgcatcacaacaggcctggggcagaggaaacctgcagggaggaaaaggatctggaaatattaattgacagctgactgaacatgagccagcacagtgcccaggtggccaagaaggccagtggcatccaggcttgtatctgaaatagcgtawttacagggagtggctgagggaactggggttgtttaatctggaggaagctcag

SEQ ID NO: 61654 - DNA, 600 bp, Chicken  19866894322587_1
tgaggccaaatatataacccaaatgcctagataattaattagtggtcaagccaataagaaaccaatccagattttatgctggaaaatttctaaggttaaatgacatttacagaataagaagttcaaggtctctaatgctgtcctttacaggtataaagtcttcctactcagcctggagcatcaagggcggatgccctcaagatgaatgtgtccccagaagtgcagtagagactgaggtccaggcaggtgaatagcactggtgtgagcaatgagggaggaaggagaggacaggctgcaatkcacagtgctgttcagctctattggggtgggatgaatggagttccccttctctcagctacttcatgcatccacacctggtgactgactctcctgaatagtttcagagtaatagctccaartaaaaagattgggaggcccaygtgctaactgctttggagaacagtttttgtaagatcttttctgctgtagacattgactcagttctgaccctggaaaaaatgtgcctgctggctgtaccaagtgtgtgaaaatttcttgggataatcatagagttctgaaccagagctctctgctaccaac

SEQ ID NO: 61655 - DNA, 600 bp, Chicken  19866894322587_2
agttcaaggtctctaatgctgtcctttacaggtataaagtcttcctactcagcctggagcatcaagggcggatgccctcaagatgaatgtgtccccagaagtgcagtagagactgaggtccaggcaggtgaatagcactggtgtgagcaatgagggaggaaggagaggacaggctgcaatkcacagtgctgttcagctctattggggtgggatgaatggagttccccttctctcagctacttcatgcatccacacctggtgactgactctcctgaatagtttcagagtaatagctccaartaaaaagattgggaggcccaygtgctaactgctttggagaacagtttttgtaagatcttttctgctgtagacattgactcagttctgaccctggaaaaaatgtgcctgctggctgtaccaagtgtgtgaaaatttcttgggataatcatagagttctgaaccagagctctctgctaccaacacatgttggagtttcagccattttactactttagccttgcagggctgcttctgatggctgagggatattttgtaactgggcgcagaccaaatcttatgttgggtgttacgaaaaatttc

SEQ ID NO: 61656 - DNA, 600 bp, Chicken  19866894322587_3
ttcaaggtctctaatgctgtcctttacaggtataaagtcttcctactcagcctggagcatcaagggcggatgccctcaagatgaatgtgtccccagaagtgcagtagagactgaggtccaggcaggtgaatagcactggtgtgagcaatgagggaggaaggagaggacaggctgcaatkcacagtgctgttcagctctattggggtgggatgaatggagttccccttctctcagctacttcatgcatccacacctggtgactgactctcctgaatagtttcagagtaatagctccaartraaaagattgggaggcccaygtgctaactgctttggagaacagtttttgtaagatcttttctgctgtagacattgactcagttctgaccctggaaaaaatgtgcctgctggctgtaccaagtgtgtgaaaatttcttgggataatcatagagttctgaaccagagctctctgctaccaacacatgttggagtttcagccattttactactttagccttgcagggctgcttctgatggctgagggatattttgtaactgggcgcagaccaaatcttatgttgggtgttacgaaaaatttctt

SEQ ID NO: 61657 - DNA, 600 bp, Chicken  19866894322587_4
tcctttacaggtataaagtcttcctactcagcctggagcatcaagggcggatgccctcaagatgaatgtgtccccagaagtgcagtagagactgaggtccaggcaggtgaatagcactggtgtgagcaatgagggaggaaggagaggacaggctgcaatkcacagtgctgttcagctctattggggtgggatgaatggagttccccttctctcagctacttcatgcatccacacctggtgactgactctcctgaatagtttcagagtaatagctccaartaaaaagattgggaggcccaygtgctaactgctttggagaacagtttttgtaagatcttttctgctgtagacattgactcagttctgaccctggaaaaaatgtgcctgctggctgtaccaagtgtgtgaaaatttcttgggataatcatagagttctgaaccagagctctctgctaccaacacatgttggagtttcagccattttactactttagccttgcagggctgcttctgatggctgagggatattttgtaactgggcgcagaccaaatcttatgttgggtgttacgaaaaatttcttctcaggaggagtggtgagg

SEQ ID NO: 61658 - DNA, 600 bp, Chicken  19866894322600_1
ttgtgctgagctgtggctgtggccaaggttttgctcagcaaattgcagaaagcctggaaaagggaaaaagcctgccccggtttctgcccatcccatgcattattggcagtttcaggatgaacgagaagggttggtgaccatacgggtctggagccaggcgtcactgctctgaacagcagagctcatacatgcactgctttctctttcagctcctgtgatgtctaaactgccttcaatacgaggatttgttccgtctaagacagaaggtaaatcacctcccataacgtctggcattggtayttttttccyagtaacaaatagcacagtgtggatccctcaggacaggcagcagtgggtatgtctcttcttgacagatgcctctgggtcctgagaatctgtccaaggagagcctggatccgcacagccttataagcagactcactgagtagagagtctggtaggatatttaaagggtttctgcacaacttgaccaaaatggagcaaagagaatgattacatgtttttaaattaaagttccttgtaaagccccttattaaatttaatgagcatatgttctcctagctgatacaaagcaaaata

SEQ ID NO: 61659 - DNA, 600 bp, Chicken  19866894322600_2
gctgtggctgtggccaaggttttgctcagcaaattgcagaaagcctggaaaagggaaaaagcctgccccggtttctgcccatcccatgcattattggcagtttcaggatgaacgagaagggttggtgaccatacgggtctggagccaggcgtcactgctctgaacagcagagctcatacatgcactgctttctctttcagctcctgtgatgtctaaactgccttcaatacgaggatttgttccgtctaagacagaaggtaaatcacctcccataacgtctggcattggtatttttttccyagtaacaaatagcacagtgtggatccctcaggacaggcagcagtgggtatgtctcttcttgacagatgcctctgggtcctgagaatctgtccaaggagagcctggatccgcacagccttataagcagactcactgagtagagagtctggtaggatatttaaagggtttctgcacaacttgaccaaaatggagcaaagagaatgattacatgtttttaaattaaagttccttgtaaagccccttattaaatttaatgagcatatgttctcctagctgatacaaagcaaaatatgaagtgga

SEQ ID NO: 61660 - DNA, 599 bp, Chicken  19866894322608_1
  misc_feature (1)..(4): n is any nucleotide
nnnntcagcttcagaacagactactgaaggctgtatctgcagcttggcagctacagcacttgtctcaaacatgtgaggagcaaacctgggcctcacgttactgttgtggggggaattaaaaatagaaagggctcaaatttcttctaatggtgaatcaaatcaaaataatgcattctctcataaaactgaaaaactgtttttcaggtggccctaaggactgacaagtggtattaatcacttaggaagctgttttggccacttctctgagaatctttcagttacaaagtcatcaggcagggrgtggctaggatacacacctacagacgtgctgccattaaccctgttaacctggcactgtggtgtattgtgctgcgtaacaagaaggactgcagaaaggttcagctgcccagaatatccatcctgtaatcctgtgttgcagtctgaactcccctcacttggaacctgtaacctgctaattgccttatcctcatttatatgataagtggttcatttcctttattgtgattgaatcccctccctacattacaagaaaactggagctgcagagagtgcttgattggatttcattgctgtaggcc

SEQ ID NO: 61661 - DNA, 600 bp, Chicken  19866894322608_2
tacagacgtgctgccattaaccctgttaacctggcactgtggtgtattgtgctgcgtaacaagaaggactgcagaaaggttcagctgcccagaatatccatcctgtaatcctgtgttgcagtctgaactcccctcacttggaacctgtaacctgctaattgccttatcctcatttatatgataagtggttcatttcctttattgtgattgaatcccctccctacattacaagaaaactggagctgcagagagtgcttgattggatttcattgctgtaggccatttcttaaacaggttacrggttgacaaacatagaagggggatcaatatccattctttgcctcattgacaagctaatcttttcagtaaacatttcatcagtacctgccatttgtatatacacctgcctcatgaggatggagaaagctctgctttataaggtttaggtaactaataaatgaaaagmcaagaatrtaagcggagcaaatcatcaagataggatttttagggaaatagcctttcattgtctgcagaatccaaccaagcacattttcaaccgttcttaattttaattaggttgcattacattcaggyccagtg

SEQ ID NO: 61662 - DNA, 600 bp, Chicken  19866894322608_3
tcctcatttatatgataagtggttcatttcctttattgtgattgaatcccctccctacattacaagaaaactggagctgcagagagtgcttgattggatttcattgctgtaggccatttcttaaacaggttacrggttgacaaacatagaagggggatcaatatccattctttgcctcattgacaagctaatcttttcagtaaacatttcatcagtacctgccatttgtatatacacctgcctcatgaggatggagaaagctctgctttataaggtttaggtaactaataaatgaaaagmcaagaatrtaagcggagcaaatcatcaagataggatttttagggaaatagcctttcattgtctgcagaatccaaccaagcacattttcaaccgttcttaattttaattaggttgcattacattcaggyccagtgccagcttctggttctgtaatcctctgattctcctctctcgtcagaggcaaaaggactgtttgaatcggggtagcaatgaagctatggctccrctaaatacttagaaatcgtgagtcatactccagaagaaagcgagagagttttgttcagtgagtttggagacatc

SEQ ID NO: 61663 - DNA, 600 bp, Chicken  19866894322608_4
tatatgataagtggttcatttcctttattgtgattgaatcccctccctacattacaagaaaactggagctgcagagagtgcttgattggatttcattgctgtaggccatttcttaaacaggttacrggttgacaaacatagaagggggatcaatatccattctttgcctcattgacaagctaatcttttcagtaaacatttcatcagtacctgccatttgtatatacacctgcctcatgaggatggagaaagctctgctttataaggtttaggtaactaataaatgaaaagmcaagaatrtaagcggagcaaatcatcaagataggatttttagggaaatagcctttcattgtctgcagaatccaaccaagcacattttcaaccgttcttaattttaattaggttgcattacattcaggyccagtgccagcttctggttctgtaatcctctgattctcctctctcgtcagaggcaaaaggactgtttgaatcggggtagcaatgaagctatggctccrctaaatacttagaaatcgtgagtcatactccagaagaaagcgagagagttttgttcagtgagtttggagacatcttttttgt

SEQ ID NO: 61664 - DNA, 600 bp, Chicken  19866894322608_5
gttacrggttgacaaacatagaagggggatcaatatccattctttgcctcattgacaagctaatcttttcagtaaacatttcatcagtacctgccatttgtatatacacctgcctcatgaggatggagaaagctctgctttataaggtttaggtaactaataaatgaaaagmcaagaatrtaagcggagcaaatcatcaagataggatttttagggaaatagcctttcattgtctgcagaatccaaccaagcacattttcaaccgttcttaattttaattaggttgcattacattcaggyccagtgccagcttctggttctgtaatcctctgattctcctctctcgtcagaggcaaaaggactgtttgaatcggggtagcaatgaagctatggctccrctaaatacttagaaatcgtgagtcatactccagaagaaagcgagagagttttgttcagtgagtttggagacatcttttttgtttgcttttgtgtcacacgctgaagtctccttcccccacaagcacgtgggctggaaactggcattgtctctgacagaagtgagggccaagattatcgctatttttaggcttctcttacatt

SEQ ID NO: 61665 - DNA, 600 bp, Chicken  19866894322608_6
tgtatatacacctgcctcatgaggatggagaaagctctgctttataaggtttaggtaactaataaatgaaaagmcaagaatrtaagcggagcaaatcatcaagataggatttttagggaaatagcctttcattgtctgcagaatccaaccaagcacattttcaaccgttcttaattttaattaggttgcattacattcaggyccagtgccagcttctggttctgtaatcctctgattctcctctctcgtcagaggcaaaaggactgtttgaatcggggtagcaatgaagctatggctccrctaaatacttagaaatcgtgagtcatactccagaagaaagcgagagagttttgttcagtgagtttggagacatcttttttgtttgcttttgtgtcacacgctgaagtctccttcccccacaagcacgtgggctggaaactggcattgtctctgacagaagtgagggccaagattatcgctatttttaggcttctcttacattcctgtgtattagaattacacagttgaatgatgaatgctgcaaaaattagcaatgctgaatttcagcccatcctgagagagagtgcgaaagcactcacg

SEQ ID NO: 61666 - DNA, 600 bp, Chicken  19866894322617_1
gtgcagatctcgggtggacctgcatcactccccacagaaaacagttatactgtttgcttggagcagagctgaaggtaccttctatctggactatctgtgctctggagccacgaataaatcaacccacacctgcctacccttccaattagagtcagccagcccttgcaaagcctggagtggattttggtagtgattcaccccctgtctggtttcctcacaaatggtttccccgagcagaaccccctgtgttaacctctggctacctgtgactcgcagtccagcaggcggatggacttgtcrttcacttgcagcagcatctcctgtgtccaaattttctccttggagttgagcaataggagttttcggatggcatcatccactgtcacgatggactcgctcttgtccatgatgaaggtggccaaatgctgaagttgagagggggagagaacaggtaaaaaaaaaaaaagctttggtgatgggtgtattgtaagtcagtggtaaaaccatctctggaagtttggacagttatttgttctttatcgcacaggctgaacagagccgccgtgcaaagtatgcattctgcatattacatgactgcac

SEQ ID NO: 61667 - DNA, 599 bp, Chicken  19866894322624_1
  misc_feature (1)..(207): n is any nucleotide
nnnnnnnnnnnnnnnnnnnnnnnnnnnnnnnnnnnnnnnnnnnnnnnnnnnnnnnnnnnnnnnnnnnnnnnnnnnnnnnnnnnnnnnnnnnnnnnnnnnnnnnnnnnnnnnnnnnnnnnnnnnnnnnnnnnnnnnnnnnnnnnnnnnnnnnnnnnnnnnnnnnnnnnnnnnnnnnnnnnnnnnnnnnnnnnnnnnnnnnnnnnnnnnggagcagttactctacctctgctccctgccccaaggaaattccctactggatcatcaggacagttttatggccattggtaccacagaccaaaygtacagtgagtgattaacttccattttgaataagctgttatttgtcatttttgatctctggtgagatgttgtgtatacaataaattataaaaaatctggcctctcacttataaaaacaaataccaactgtcctgctatcattgtggagcaataaatctcccccggccttggaaaaatacatcacttgtggactttcacccactttataccttatttgcaaaacaaacacttatttttattcctcgtaagtacagatgatgacaaaaactgagtaaagctacagtagtggccatctgtag

SEQ ID NO: 61668 - DNA, 600 bp, Chicken  19866894322626_1
cagggcacaggaacacgcatgaaaacatcaacgcaaggaagtttttctgagatccagaagtacagatcgtgaagtaaaatacaggactgcaaatgctaagggctgcattggcagaggattacaggatgccacaaacagctgagctccagtaaattaagagactgcacaaatctgcactgggaagagtcaggttgagtaccagggaaaggttcctaaccagagggacaccaggcactggaataggctcccaggcccaaagctgccagagtttgggcagtactctcagaaacatggcttgawtttggggcatagccaccgactcctgtatttacaaggtctcatcccaagaaagctaatttaatgatgatgaagaaaaatcgtgaagtctgaatccatcagaggccatgagcttgccaagaagatggcttttttctttaatcaattgtaaatacaagaggacaaccactacactgcattgcactgcatgtaccttatttattgccattattcattttcccagctacaatgtacaagagctgctctcaaagcaatgcctcctattttattatgtcgctccatgatgtcagaggtggatggtgg

SEQ ID NO: 61669 - DNA, 600 bp, Chicken  19866894322626_2
ttttcccagctacaatgtacaagagctgctctcaaagcaatgcctcctattttattatgtcgctccatgatgtcagaggtggatggtggtgggatggcagtagaagttaaatcttcccaccaatattccattacagtttattgccacatgagagatggcagcagaggggcagtctgtgagaacgggtatgacatggaagtgtggatgaagcaaaggtgtgtgtcattgagttcctcacagaaaaaatggcacccagtgacattcatagagaccaagcagtggatgtgagcacagtgaggyggtgggtggtgcgtttcagtggtggaatcagcaacagggaagacaagccctgttgggggcagccatgcagatttttttttttacaagcatggcatacaggctcttggtcattgctggtgtaaaggacagctaatggtggtggctatattgaaaaacagtaaattgcatctgagaatctgctctatcaaatagagtgcatctgttgtagtttccatggaaataaatgagagacattactttcagagcagccagtgtagtaaaacaaaggtgatcacaaatcaatatttgctcatcttctga

SEQ ID NO: 61670 - DNA, 507 bp, Chicken  19866894322632_1
agctcctgccagagggatatgggacagttatgtcattttataatgtgtaggagtgtgatattttacatgcacaacatgtgcaagttttctcctgtgccaaattactcacggtccccgtggagcagttctaagtcagtgttctttctgtgagacttggctctcagaaattaattttcaatatctgtgaaatatttcattcatatgtacgagtcttcccttggcaattttactttctgtgaatccatagcattctgacccagcttctaccacagtactgacagaaagacagtcaggcctttkcaaacacgagcggaagctacattgatcttctacgtcagccatcagcatggatcagcagccttacactctgtcctagaatctgacggcgtgaggattcaataaaggagtttcttctaatagggaaaatgtaactcattatctggtttttttcacacgactaattaggatatcaaaaacatcctctactcccacttattactagcctgc

SEQ ID NO: 61671 - DNA, 582 bp, Chicken  19866894322634_1
caggcactgttccagcgcaggttgccatgggcagcagctctccccagccctgtgccactgcaggcctctctccacggggtgcagcttcagcccaagctgctcctgcgggggtatccacgggctgtacctccttcaggcctcatccactgctgcactgcgggctcttctatggctgcacgtggagatctccgtgtagtgcccatgggctgcagagggacagcctgctcctctgtgggcctctcctgggctttagggagcacctggagcacctcctgcctgcgctccttctgcactgacctyggtgtctgcagggctttctctcacacttctcactcctctctcccagctgccgttgaatccagctataactggcttttatctcacagcttctcatgactggaaatatgaacatgcagaccaaaagctctgacactaccggtctgctcccagggtgggaacgaagcagttagaaggcccccagtgatcatgggacactaacagaactcttggggtcttgggaagttaaaacacgcagatattcaatcttacaccagaactaccaaattcctctatctcattctg

SEQ ID NO: 61672 - DNA, 600 bp, Chicken  19866894322636_1
tagtaattagctaacagtgaaaagagatgaatactgaaattacttctccgggctctgaaggagagtccttgggaaatcagtgtgtaatgtccaacctcaactcatcttcaacttatgcagtgcccttcttctcattttattatgttcatgaaggccacaactgcacttaaatgcattataaaactcaaaactgacattgctttacattgtaataaaggaacactatgatttattaagtgtcttaaaatactgtaaattctttctgccaatatacctttccaaagccagtttccagaaagratgatgaacaacaggttttcctagaaagatacaactgcatgcccgaacagaggacttcctttggaagcccattacgagatttcaggtattacttacattactgagtaattccagatcacacatacttaggggactgcagaaataagaatgaaagatcattcccatgctgaagaagctatacactacagaaaagcccattgaacagctaggaaagtaacaccaccacgtactgactgcttctctacagttactctcacactggccctgctgccatccttcttccaagaaacaatcctgaag

SEQ ID NO: 61673 - DNA, 600 bp, Chicken  19866894322637_1
gtaaaggctgtattgcagtgttgccattgctatgttcgcttaatgcccctggagttttcttaaaacactgttctgaactctgcaagtgtaactttgactttaatggcactgagccacagatgcattggcccagtttcctaaaattccacagcctgttgttaagataaacaattctgggttcccaagaatacagatgcatgtatatggtaatacactgggtatacagagcaacctttaaacgaccatctgttattttcctatttcatttttcctatttcatttttgatgcttgagcacaarcttcgtaagcaggaaactgacttgagagaataattgtgccggcttctaaatgatgttttgagaacagctgttgggtttctcccttctgctgctgactttgtatggaggctgaaggagggcggtctcacagagatggttgtgctgagatgcaccctggttagtcagcagctcctgtcccagtgccgggaagcccacgtgaccggagcttgggtaggaggccaaggattgctggttgcttaggttatttgtggtcttgttgtgtctctcctcagcacttgtacctaagaggcttttaaggcc

SEQ ID NO: 61674 - DNA, 600 bp, Chicken  19866894322640_1
ttgtaaccgtgatgcttcaaattcaacagcgcgtacagcatgaatgccatctctgaacaccacagctgccttctttccttaccaaacgaaccaaaaggaacctacaggcacacggagcagaggggcagcagcatctcctctcctctcctacgttaccgcctctctcgcgacgacaacaatttgttcacattcacggtagttaattctccgcttggggggtggggaggaaacagagaaagaagaaagaagaaaaaaagcaaaggctaaaaaaaaaaaaaaaaaaaaaagagcaaaaagagmccaaaagagagcagcagaagtgtctgtgcacaccaactctgcagaagggctgcacacaccgcctgcacacagagctgcagtggtggatctccagcagtgctctcccggagcgcagcacygcagtgcgcatcccatgggctgagcggggcccagagccattcccaagcactgaagggcacctgaactgccatgaaacgtacgtattttgtacagattattcaaagagaagagaacgagtatttttttttattaaagatgatattttactccaaagtactgaatatagtatcttttgcttta

SEQ ID NO: 61675 - DNA, 600 bp, Chicken  19866894322640_2
gaggggcagcagcatctcctctcctctcctacgttaccgcctctctcgcgacgacaacaatttgttcacattcacggtagttaattctccgcttggggggtggggaggaaacagagaaagaagaaagaagaaaaaaagcaaaggctaaaaaaaaaaaaaaaaaaaaaagagcaaaaagagmccaaaagagagcagcagaagtgtctgtgcacaccaactctgcagaagggctgcacacaccgcctgcacacagagctgcagtggtggatctccagcagtgctctcccggagcgcagcacygcagtgcgcatcccatgggctgagcggggcccagagccattcccaagcactgaagggcacctgaactgccatgaaacgtacgtattttgtacagattattcaaagagaagagaacgagtatttttttttattaaagatgatattttactccaaagtactgaatatagtatcttttgctttaataggtataacattcaaaaagatttaagaaaggatgaaaatttagtttcctgtctcgctcggaaacgaacttctgctgcatggcagaaaggtactggtgtgttgtgaacaacctacgct

SEQ ID NO: 61676 - DNA, 600 bp, Chicken  19866894322645_1
ttaaactctgcgtaacttgtaattttctactttaaaatatgttattaatttacaatgcctttttgtggtattcaatttatgttagtatacttacactgatatattttaacaagatgattatgtcaaaggttatcatcaacagttcataacaaaaagttatgctcaaaaacccaacttattatttatagtttagactgcataataaagtactagcaacacaaaatgttaattaatttctaattctctattcttttatttagatttcatgaaggttgattggacttgatccatcattttacrgaaaattaattatttcaaatacatgcaccactttatgcaacctgcctgatttgcattgaggaaaattcagcagaagtaattgaggcacaagcaaatactggcactgactgaactcaattttcattccaaatttctgcaaaatcccaagacacaacaatatcagatgcagggggaaaacaaacaaaagcaatgtgtaaagggaacatgaagagagaatattacaagaatcagagaacaaagggattgcaaaactattttagtgccatagatgaacagtgagggcctcattcaggcaaggtg

SEQ ID NO: 61677 - DNA, 600 bp, Chicken  19866894322652_1
agtgaatatgttgctttttcaaaataataataataataataataataatgcctgtgatctcatgatttggtgttccagtacctctttccatacatcatgagccttggacatgtatcttgattttgatgaattactatcagccttaacacacacacacatgcacgcatgcacatcactgggttggaacacatcaatggtcttcttgagccagacagacctgttggtcatgctccccatatgacagaaagaggaagggtgagcataagcatggagagtaagactgatagagggtaagactgrtagttctggatatcctctagagaggtgagctgcactgaggaaaagttctaaggctgcttataaagttgatctcagcactagtgtggacatcagggactttcaagcaagttaattgtctgaaaactgctgaaccaaagctgtctgttatcagtacagtttgttaggatgctcagtcagtcacagattgggtacatctatttactaattttctagaactgtgaaactttgaaacacatttccttactgactcttgctttgcagcattatattatacagagtgaagtttgggcacagaaatga

SEQ ID NO: 61678 - DNA, 600 bp, Chicken  19866894322652_2
gacattctgcgcgtacatgagtcagtcagtccccttgttctgctgtctagaccttggaccttagacagcaggagaacacagtggatagcagattacctctctgcattcctgatttatgaatgctctttacattgctcttaatgtggaccagatggttctgtaaggcacttcaggtactgctttgtaagtacaatgtaatttgccacttctaatgaaacgatgcacacagagtcaaattcattcattttggatcctattatgccacataaagttgttacatattcattatctgtagcagcrtttgggctaatcattacttctggcaaagctgaaactacttggaaagtaacattactgtatttaatccatgcacaagacagatctcttctggctttaaataagaagagtttttgattgtgattctggatatttayatccagtcatsccttttctgtctgcagtaacagtgaggtgcccaaaagtatagcctctgaggtacttagctcagatatgcataacaatctatctgcatcaacccagagctcaaggtgtgctgttttaccctgcttctaattttgctagcttaaaattagctcagat

SEQ ID NO: 61679 - DNA, 600 bp, Chicken  19866894322652_3
ctcttaatgtggaccagatggttctgtaaggcacttcaggtactgctttgtaagtacaatgtaatttgccacttctaatgaaacgatgcacacagagtcaaattcattcattttggatcctattatgccacataaagttgttacatattcattatctgtagcagcrtttgggctaatcattacttctggcaaagctgaaactacttggaaagtaacattactgtatttaatccatgcacaagacagatctcttctggctttaaataagaagagtttttgattgtgattctggatatttayatccagtcatsccttttctgtctgcagtaacagtgaggtgcccaaaagtatagcctctgaggtacttagctcagatatgcataacaatctatctgcatcaacccagagctcaaggtgtgctgttttaccctgcttctaattttgctagcttaaaattagctcagatatctgtgctacatatcagtcacatctgtatctgtttggatatagtcatgttccattatcacttaaatgacaattctgcttcatgaagcgtaacattggcccctttcccagcatgtgaaatctattctgcagaat

SEQ ID NO: 61680 - DNA, 600 bp, Chicken  19866894322652_4
gaccagatggttctgtaaggcacttcaggtactgctttgtaagtacaatgtaatttgccacttctaatgaaacgatgcacacagagtcaaattcattcattttggatcctattatgccacataaagttgttacatattcattatctgtagcagcrtttgggctaatcattacttctggcaaagctgaaactacttggaaagtaacattactgtatttaatccatgcacaagacagatctcttctggctttaaataagaagagtttttgattgtgattctggatatttayatccagtcatsccttttctgtctgcagtaacagtgaggtgcccaaaagtatagcctctgaggtacttagctcagatatgcataacaatctatctgcatcaacccagagctcaaggtgtgctgttttaccctgcttctaattttgctagcttaaaattagctcagatatctgtgctacatatcagtcacatctgtatctgtttggatatagtcatgttccattatcacttaaatgacaattctgcttcatgaagcgtaacattggcccctttcccagcatgtgaaatctattctgcagaatggattttaatg

SEQ ID NO: 61681 - DNA, 600 bp, Chicken  19866894322655_1
tgaaagacacggatgaaaatgcctggatattgtgcccactgcaatcttgctataaaactggttatagaaaggaaggagagttggagggaaacatgtaaataatgagctattaaatatcttcattttttaatgtattgcaccatttctcagagatgccatattaaaattcccattcttgatagtaagatttcttcagttgaactcaagcaagaagaacatttttcaactgagacactgaaagaataaggaattattcaaatgtgtaagaaaaaaaaatgcagattctcaactgtaaacagwaaatatctgtcagtactcaaaaaacaggacaggcatcaggaacagtacagctattccattcagataagctatctggtgtaacagatactgctgactgtgccatttacactctctggtacaacgaacagggaaccactacttccttaaaggagggaaaaaaaaggcaagtaaagaatgatccagaagaaaggtatgccttgcattacttagcaaagcctacgttgtgctgacactgcctcttttctccaatatatagtaacttacctttgctttttcactgggttcactggttgtgccata

SEQ ID NO: 61682 - DNA, 599 bp, Chicken  19866894322663_1
  misc_feature (1)..(79): n is any nucleotide
nnnnnnnnnnnnnnnnnnnnnnnnnnnnnnnnnnnnnnnnnnnnnnnnnnnnnnnnnnnnnnnnnnnnnnnnnnnnnnntcatagaatcatagaatccccaaggttggaaaagaccttcaggatcacccaggccaaccatccgcccttcaccaatggttctcactaaaccatgaccctcagcaatgtccaaacattccttgaacacctcccagggtcggtgactccacccacctccctgggcagcccattgcagtgccttccagtgcttgtgttatcagcacagcatctgcctgggacaygtgccctggctgcagagcgcccatctttggggatctaccttctaaaatccagaaaacatgtgagaaaagggattttgaggacaaaaattaaaactggagcaggttgcacacaagctccacgctgcagcatcccacccacggtgtctccctttatcagctttccatgaatagaygaagctttctgaacagaygcaggattaagctggttgcgagttcaaggagctgcctggatgtactcacagaagaggtttgaaaagaatatttcttggatggttttcttgaagctctctgaatggcag

SEQ ID NO: 61683 - DNA, 600 bp, Chicken  19866894322663_2
accctcagcaatgtccaaacattccttgaacacctcccagggtcggtgactccacccacctccctgggcagcccattgcagtgccttccagtgcttgtgttatcagcacagcatctgcctgggacaygtgccctggctgcagagcgcccatctttggggatctaccttctaaaatccagaaaacatgtgagaaaagggattttgaggacaaaaattaaaactggagcaggttgcacacaagctccacgctgcagcatcccacccacggtgtctccctttatcagctttccatgaatagaygaagctttctgaacagaygcaggattaagctggttgcgagttcaaggagctgcctggatgtactcacagaagaggtttgaaaagaatatttcttggatggttttcttgaagctctctgaatggcagccactgtgctgtgggaggagtgtccgtggaaccacatgagtgctgcagaacacagcagagccaacacrgccaacacagcacacagctctccgttcagcccagcaraggcaggcacctccattgcccatcacttataaccagagatggattccctctcaaaggctttatctccgc

SEQ ID NO: 61684 - DNA, 600 bp, Chicken  19866894322663_3
acattccttgaacacctcccagggtcggtgactccacccacctccctgggcagcccattgcagtgccttccagtgcttgtgttatcagcacagcatctgcctgggacaygtgccctggctgcagagcgcccatctttggggatctaccttctaaaatccagaaaacatgtgagaaaagggattttgaggacaaaaattaaaactggagcaggttgcacacaagctccacgctgcagcatcccacccacggtgtctccctttatcagctttccatgaatagaygaagctttctgaacagaygcaggattaagctggttgcgagttcaaggagctgcctggatgtactcacagaagaggtttgaaaagaatatttcttggatggttttcttgaagctctctgaatggcagccactgtgctgtgggaggagtgtccgtggaaccacatgagtgctgcagaacacagcagagccaacacrgccaacacagcacacagctctccgttcagcccagcaraggcaggcacctccattgcccatcacttataaccagagatggattccctctcaaaggctttatctccgctgagaggtgagcgggtca

SEQ ID NO: 61685 - DNA, 600 bp, Chicken  19866894322663_4
agggattttgaggacaaaaattaaaactggagcaggttgcacacaagctccacgctgcagcatcccacccacggtgtctccctttatcagctttccatgaatagaygaagctttctgaacagaygcaggattaagctggttgcgagttcaaggagctgcctggatgtactcacagaagaggtttgaaaagaatatttcttggatggttttcttgaagctctctgaatggcagccactgtgctgtgggaggagtgtccgtggaaccacatgagtgctgcagaacacagcagagccaacacrgccaacacagcacacagctctccgttcagcccagcaraggcaggcacctccattgcccatcacttataaccagagatggattccctctcaaaggctttatctccgctgagaggtgagcgggtcaaaatctgcatgcatggggttcatccaaaacggatgggtgggtggatggatggatgaaggaagaatggaaagataaatgggtggatggatggatgagcagatgratggatgcatggttggatggacagatagatgcgtgaatggatggctggatggacggatgggtggacagatgga

SEQ ID NO: 61686 - DNA, 600 bp, Chicken  19866894322663_5
tgcacacaagctccacgctgcagcatcccacccacggtgtctccctttatcagctttccatgaatagaygaagctttctgaacagaygcaggattaagctggttgcgagttcaaggagctgcctggatgtactcacagaagaggtttgaaaagaatatttcttggatggttttcttgaagctctctgaatggcagccactgtgctgtgggaggagtgtccgtggaaccacatgagtgctgcagaacacagcagagccaacacrgccaacacagcacacagctctccgttcagcccagcaraggcaggcacctccattgcccatcacttataaccagagatggattccctctcaaaggctttatctccgctgagaggtgagcgggtcaaaatctgcatgcatggggttcatccaaaacggatgggtgggtggatggatggatgaaggaagaatggaaagataaatgggtggatggatggatgagcagatgratggatgcatggttggatggacagatagatgcgtgaatggatggctggatggacggatgggtggacagatggatggatggacagataggtggatgaatggatggtggata

SEQ ID NO: 61687 - DNA, 600 bp, Chicken  19866894322663_6
ggcagccactgtgctgtgggaggagtgtccgtggaaccacatgagtgctgcagaacacagcagagccaacacrgccaacacagcacacagctctccgttcagcccagcaraggcaggcacctccattgcccatcacttataaccagagatggattccctctcaaaggctttatctccgctgagaggtgagcgggtcaaaatctgcatgcatggggttcatccaaaacggatgggtgggtggatggatggatgaaggaagaatggaaagataaatgggtggatggatggatgagcagatgratggatgcatggttggatggacagatagatgcgtgaatggatggctggatggacggatgggtggacagatggatggatggacagataggtggatgaatggatggtggataggtggatgggctgatgagtgggtggatggatgagtggatggatgggtggatgggtggatggacagatagatgtgtgaatgggtggatggatggactgatgggtggacagatggatggatggacagatagatgggtggatggatgggcagatggatgggtggatgaatggacagatggatggatggatgga

SEQ ID NO: 61688 - DNA, 599 bp, Chicken  19866894322672_1
  misc_feature (1)..(45): n is any nucleotide
nnnnnnnnnnnnnnnnnnnnnnnnnnnnnnnnnnnnnnnnnnnnntttgcagactaagtttgtctttatgtagactcttattttctttaataagacagaggagggaggatgtgctgaaaggatagtcttgaattttgacaacttaaagtaaattttagtgaagctgaaaccatgttatctatatattttaataaaaacttcataatcctcttctgtaatgactacatattttacatggtgacaatattattattaatctcaatgtttgaaattatttggagttaccctgttatgttctayatatttaaattccagctgatgtttcaagatgagtagataagatgaaattgattccctccccccmaaaaaaatttttgatgaaaaatggctcattagcatgacgttcagtttgtgaaatttcctttttttcctgctaaaatagaaaaactaataagagccatctatgtcaatattgcacgttctactgaggtttcagtaagttcctgggaaacttctgggaagcttagtatcaggcccagcacacagcttgaactggttctctcttcaaagctgtgtttccttacagttctaaggagtga

SEQ ID NO: 61689 - DNA, 600 bp, Chicken  19866894322672_2
tttatgtagactcttattttctttaataagacagaggagggaggatgtgctgaaaggatagtcttgaattttgacaacttaaagtaaattttagtgaagctgaaaccatgttatctatatattttaataaaaacttcataatcctcttctgtaatgactacatattttacatggtgacaatattattattaatctcaatgtttgaaattatttggagttaccctgttatgttctayatatttaaattccagctgatgtttcaagatgagtagataagatgaaattgattccctccccccmaaaaaaatttttgatgaaaaatggctcattagcatgacgttcagtttgtgaaatttcctttttttcctgctaaaatagaaaaactaataagagccatctatgtcaatattgcacgttctactgaggtttcagtaagttcctgggaaacttctgggaagcttagtatcaggcccagcacacagcttgaactggttctctcttcaaagctgtgtttccttacagttctaaggagtgacatgtccttgatgccatttgwcaagaaacaaaaggagacagaaggcatttttactttgtttatga

SEQ ID NO: 61690 - DNA, 600 bp, Chicken  19866894322672_3
gtttcaagatgagtagataagatgaaattgattccctccccccmaaaaaaatttttgatgaaaaatggctcattagcatgacgttcagtttgtgaaatttcctttttttcctgctaaaatagaaaaactaataagagccatctatgtcaatattgcacgttctactgaggtttcagtaagttcctgggaaacttctgggaagcttagtatcaggcccagcacacagcttgaactggttctctcttcaaagctgtgtttccttacagttctaaggagtgacatgtccttgatgccatttgwcaagaaacaaaaggagacagaaggcatttttactttgtttatgatattcttagcaagtgtacttgagccatagtttcaatgaattaaactagacttcatgtaagaaaagcacgttaactttgaaatggtaatactaatgtcttatgcagtctttattgcaatatattacacttcatgaaagaatctcattaaccttcarttcaatctaacaaaacctatcactgttaccaaaagtgtcacacttcatacaatcttaaatgtgttctttcttcaatattgcttttcctgcaagattcactt

SEQ ID NO: 61691 - DNA, 600 bp, Chicken  19866894322672_4
aagcttagtatcaggcccagcacacagcttgaactggttctctcttcaaagctgtgtttccttacagttctaaggagtgacatgtccttgatgccatttgwcaagaaacaaaaggagacagaaggcatttttactttgtttatgatattcttagcaagtgtacttgagccatagtttcaatgaattaaactagacttcatgtaagaaaagcacgttaactttgaaatggtaatactaatgtcttatgcagtctttattgcaatatattacacttcatgaaagaatctcattaaccttcarttcaatctaacaaaacctatcactgttaccaaaagtgtcacacttcatacaatcttaaatgtgttctttcttcaatattgcttttcctgcaagattcacttctgttgacttttgttattcagtcctcagtcacaccttgggaatctgggcaaactgtaaacacttattttattattattattatttaaataacaattctgaagcactgtggagataagaaagtggaaaaaacaaaacaaaacaaaatttcaaattcagttcctgaaacggcttggctgcagttcaacgttcacttttact

SEQ ID NO: 61692 - DNA, 600 bp, Chicken  19866894322678_1
aagcacacactcttcttgttctcagatgccttttcttttctcttttcttttttgattctgtgcttatgatacttgtatgtgaaatgtgtcaattaaaagggcgtgcagtggtgtcttctgaaggaggaggaagtcgttccctgcatcagagctatggaagggcgtagaggacgaccaccaaatccagacaggcagcattctagagaggagtcaagaatgagacgtcgcaaaggccgacctccaaatgttggaagcactgaatttctagacagcactgatgcgaagcttttaagaaagctrcaggctcaaggtaaggagtacttcactgctttcacgaacacatgagagtgtcagtacatggagagttaatgttttttctgaagagatgtattttagtaatacacagcgtttcattgtagaactttgtcaaatgcttttattgaagccctttcctatttcacgatcagtaaatatatgttaatcaagtttgaaagcttattctttaattactttagttacataggttaaaaaagcagacatccaatgttttggttgctcttgttgtttttattttaaatttgcataaacaaaaagatctct

SEQ ID NO: 61693 - DNA, 558 bp, Chicken  19866894322700_1
gcctcatgcacatttttgctgggctttctcacctcaggtctcgatcttccaatcagtccttcgtgcttccccagctgatgacgcgctctacctgtttccacagagtcccagctcttccctatgtattcttgaccactttgctgaggactgaggctctcagcattagcaggaatagtttttaagatacatctggtaaatgtattatatgtgcaagacatatcatgaattcacagtttgtagattttgaaggttttgctgtttaattaaaacgatctaaattgggatgtgaaaaaaaaatarcagaaaaaaaatctttttcctattaaaaagaaactggtaaatatttagcaaagtcattaaaaaaaaaaaaatctgtgattccttcatggatggtggtgcttaatttggaagctatatacagaaactgaagcatgaaaaagaatacttgaaaccctactttgagcgcagatttcaacagaatgccaactccaggagtttttacttactcttctggaataattttactttttttgactattcctttatttgtatctggga

SEQ ID NO: 61694 - DNA, 599 bp, Chicken  19866894322706_1
  misc_feature (1)..(3): n is any nucleotide
nnntgtgctcatgaatttttatggtgtatgtagattttgttttatgtaactacacatgcagtaataagtcttaaaaaatatatatatggcttttcagggggaaagtaggtgaaaggaaatgtcttgcagtgttggggcttggttacagaagatacgagttcaggttctggcctgcctccttcaaagtagaggcttcaccttaaagcattttagagtcctaacaacaagtggaagcaatacagtgagcacctaatgagtgctataaactacaccacagtaatcacataggatgaaattatyatggctttgtggtcacattttgttcttttcaaatgtgtggcaggagaacttcacaaaacaacccagccagggcactttcatcttgttaggtaatacttgctcgtgcatctgctccaaactgagggtwaaaaaggactgttatgtcttctacatcccattgattccagtaatcaacatccttcggtactaggctgctttttttggatcagattttgtgctcatgccatcagaaacacagttgtcgcaccagcactttcaggaacagttaactgcaaaaactgtcagacttgagattcccc

SEQ ID NO: 61695 - DNA, 600 bp, Chicken  19866894322706_2
agtgttggggcttggttacagaagatacgagttcaggttctggcctgcctccttcaaagtagaggcttcaccttaaagcattttagagtcctaacaacaagtggaagcaatacagtgagcacctaatgagtgctataaactacaccacagtaatcacataggatgaaattatyatggctttgtggtcacattttgttcttttcaaatgtgtggcaggagaacttcacaaaacaacccagccagggcactttcatcttgttaggtaatacttgctcgtgcatctgctccaaactgagggtwaaaaaggactgttatgtcttctacatcccattgattccagtaatcaacatccttcggtactaggctgctttttttggatcagattttgtgctcatgccatcagaaacacagttgtcgcaccagcactttcaggaacagttaactgcaaaaactgtcagacttgagattccccttttctgtgcagcagccggcactttgctcccagcttcagcacctacctgcaaatagctgggctgtgaattcctcagcactgctccctcctctcacctcgagttctggtgggagcaaactccactgaaa

SEQ ID NO: 61696 - DNA, 600 bp, Chicken  19866894322707_1
atccaataaattctacagtttatcaagtgaggaacattttacgggaggattggtttgttgttgtttttcgaagtgatatgtgcctatgttccgtaaaaaggcaaagcagcaaataaaataccaacagtacccaactctgccagtgcgtgagatcgttccacccaaaaagcaaattatgggatgctacacagaagcaagattgcaaacagattagacatgaatgcactgtaaggcagcaaagaaagcaaaaccgacctggtaacgaaaaacatgcctgccatgtaagtgttttctgatagyagaatgagaaccttgtttccacatttaatcatccaatgagctcttcccataactcatccaaactggttcctggatatgttaaagcagtctttaagaagmagcatttagaagcaagtacaatctttcctcttaactgctgagagaatcaggataccaaaaayrcattaagtacaaaagaaaacagattctgccccaaatacctacataaacaaaacctcttgcaagaacggggaatgtaatttggatcatttgtttctgcaccgttcttggaggctgcatggagtagaygtgtacagctca

SEQ ID NO: 61697 - DNA, 600 bp, Chicken  19866894322707_2
ggcaaagcagcaaataaaataccaacagtacccaactctgccagtgcgtgagatcgttccacccaaaaagcaaattatgggatgctacacagaagcaagattgcaaacagattagacatgaatgcactgtaaggcagcaaagaaagcaaaaccgacctggtaacgaaaaacatgcctgccatgtaagtgttttctgatagyagaatgagaaccttgtttccacatttaatcatccaatgagctcttcccataactcatccaaactggttcctggatatgttaaagcagtctttaagaagmagcatttagaagcaagtacaatctttcctcttaactgctgagagaatcaggataccaaaaayrcattaagtacaaaagaaaacagattctgccccaaatacctacataaacaaaacctcttgcaagaacggggaatgtaatttggatcatttgtttctgcaccgttcttggaggctgcatggagtagaygtgtacagctcacaatttacttccaaaatacccccttaggaaaagatcctccaaaagatttcctaaatgctcgtttgtacactatgtgttttaattaacgtacagaataga

SEQ ID NO: 61698 - DNA, 600 bp, Chicken  19866894322707_3
ccaaaaagcaaattatgggatgctacacagaagcaagattgcaaacagattagacatgaatgcactgtaaggcagcaaagaaagcaaaaccgacctggtaacgaaaaacatgcctgccatgtaagtgttttctgatagyagaatgagaaccttgtttccacatttaatcatccaatgagctcttcccataactcatccaaactggttcctggatatgttaaagcagtctttaagaagmagcatttagaagcaagtacaatctttcctcttaactgctgagagaatcaggataccaaaaayrcattaagtacaaaagaaaacagattctgccccaaatacctacataaacaaaacctcttgcaagaacggggaatgtaatttggatcatttgtttctgcaccgttcttggaggctgcatggagtagaygtgtacagctcacaatttacttccaaaatacccccttaggaaaagatcctccaaaagatttcctaaatgctcgtttgtacactatgtgttttaattaacgtacagaatagaaattaccatttagataagataatgctccccagccaccccactcttgcttcctgaaactctgc

SEQ ID NO: 61699 - DNA, 600 bp, Chicken  19866894322707_4
caaaaagcaaattatgggatgctacacagaagcaagattgcaaacagattagacatgaatgcactgtaaggcagcaaagaaagcaaaaccgacctggtaacgaaaaacatgcctgccatgtaagtgttttctgatagyagaatgagaaccttgtttccacatttaatcatccaatgagctcttcccataactcatccaaactggttcctggatatgttaaagcagtctttaagaagmagcatttagaagcaagtacaatctttcctcttaactgctgagagaatcaggataccaaaaayrcattaagtacaaaagaaaacagattctgccccaaatacctacataaacaaaacctcttgcaagaacggggaatgtaatttggatcatttgtttctgcaccgttcttggaggctgcatggagtagaygtgtacagctcacaatttacttccaaaatacccccttaggaaaagatcctccaaaagatttcctaaatgctcgtttgtacactatgtgttttaattaacgtacagaatagaaattaccatttagataagataatgctccccagccaccccactcttgcttcctgaaactctgcc

SEQ ID NO: 61700 - DNA, 527 bp, Chicken  19866894322707_5
ttttctgatagyagaatgagaaccttgtttccacatttaatcatccaatgagctcttcccataactcatccaaactggttcctggatatgttaaagcagtctttaagaagmagcatttagaagcaagtacaatctttcctcttaactgctgagagaatcaggataccaaaaayrcattaagtacaaaagaaaacagattctgccccaaatacctacataaacaaaacctcttgcaagaacggggaatgtaatttggatcatttgtttctgcaccgttcttggaggctgcatggagtagaygtgtacagctcacaatttacttccaaaatacccccttaggaaaagatcctccaaaagatttcctaaatgctcgtttgtacactatgtgttttaattaacgtacagaatagaaattaccatttagataagataatgctccccagccaccccactcttgcttcctgaaactctgccaggtttatcagcccctcatccactcgtttttgctagcaatcctcaggccccag

SEQ ID NO: 61701 - DNA, 600 bp, Chicken  19866894322718_1
cattaggatgctttccttatcaacactaaggtattacctacataccagtgattatttttgttggtacccattttacagagcggtggaaaaaatgcatgcagtgtagaaaaggaagagggattgtcacagggctcacttgctcttacccatgacaacatgagcatacaacgccatcttgggttgtagttacaagtggagctacaacaactccagtttagtcttcagcacaggtctttgtagtagtgacagttctcagataggctccaaggagcttggccttgtgtaaatctcttccagtgygctcacacatacagcttagagaaaacagaaattgacctgtaacctagtacagtttaggtagagctgagcattcagggcaagaacaaggacaagggtatgcagcaacatcagcatagccagtgctttataaggtgttagtatctatgctaactgtaaagcagtcaaggctacagtaaatactgtaaatactggcctggggtcttaatattgtgttaaatgctggcttcttttagtactgagaactacagtaggatatgtctctgcagtaagttattatatggtttctatttcaaataattt

SEQ ID NO: 61702 - DNA, 599 bp, Chicken  19866894322743_1
  misc_feature (1)..(176): n is any nucleotide
nnnnnnnnnnnnnnnnnnnnnnnnnnnnnnnnnnnnnnnnnnnnnnnnnnnnnnnnnnnnnnnnnnnnnnnnnnnnnnnnnnnnnnnnnnnnnnnnnnnnnnnnnnnnnnnnnnnnnnnnnnnnnnnnnnnnnnnnnnnnnnnnnnnnnnnnnnnnnnnnnnnnnnnnnnnnnnnncgtgacaccagtattaagtggagacaggactctgcattgtactcccatcccagctgctccacgcacagtgccgctgtgcacccagcagctgtccccaggcgctccctctccttgctatgctccktggctgctgagtggaacaggagtctcatgtgcagggaatctactcccctgtgtttgtcgtctgggcccttgcacgattcagtcccacagagcagctcctgcacagccagtatgaaaaagctaaaggacgaaaatacgcaggagagtacagaaaggagaggaaatccctgttttaatatacaccacatgcacaacatgtctgtgctgcagccctcgggagtcataattttgaatgtcctgacttctgtgtgtttaaaatctcaactgcagcattacaactttcttttttcrtttactttt

SEQ ID NO: 61703 - DNA, 557 bp, Chicken  19866894322743_2
ctatgctccktggctgctgagtggaacaggagtctcatgtgcagggaatctactcccctgtgtttgtcgtctgggcccttgcacgattcagtcccacagagcagctcctgcacagccagtatgaaaaagctaaaggacgaaaatacgcaggagagtacagaaaggagaggaaatccctgttttaatatacaccacatgcacaacatgtctgtgctgcagccctcgggagtcataattttgaatgtcctgacttctgtgtgtttaaaatctcaactgcagcattacaactttcttttttcrtttacttttttttcttaaggaaagaacaaagtatgctttaccatatagtcaaaaagaccccttgattaatagtcaaataaatrtcatccacacatttatgtgtacgattaagccattggacgctcaacaaaatagaaccgagtgcatttatttgaataacctccaaggtatttggtggtacataaagaaaacagtgacagcaagacatagaccttttcattgtttaaaacagtgcaactctggagtaactcctgtga

SEQ ID NO: 61704 - DNA, 474 bp, Chicken  19866894322743_3
cgattcagtcccacagagcagctcctgcacagccagtatgaaaaagctaaaggacgaaaatacgcaggagagtacagaaaggagaggaaatccctgttttaatatacaccacatgcacaacatgtctgtgctgcagccctcgggagtcataattttgaatgtcctgacttctgtgtgtttaaaatctcaactgcagcattacaactttcttttttcrtttacttttttttcttaaggaaagaacaaagtatgctttaccatatagtcaaaaagaccccttgattaatagtcaaataaatrtcatccacacatttatgtgtacgattaagccattggacgctcaacaaaatagaaccgagtgcatttatttgaataacctccaaggtatttggtggtacataaagaaaacagtgacagcaagacatagaccttttcattgtttaaaacagtgcaactctggagtaactcctgtga

SEQ ID NO: 61705 - DNA, 600 bp, Chicken  19866894322744_1
aaattaatatgcttttatttctaagttattttgaaaaccaaaaaaaatgattttccttcgtcctgtcttaattatatcactggattttgtcaactgaaatttactcctctttaattaatgtgcatccaggagcacgggtgtggtttttggggtgggcaggcggtggcaaactgtagtaagagcagtcgatcaaaagtttaagtgaagcatttatgtagaaatgaattgatagcctgatatcagtgactcaggactgagaaagcaaagaattattttctttggcagctgtttacgatcagyaaataatgcagtggacaggtgagatttcaacagagagctgtgtgtttgtgtcaggaggaagcgccgactccttgggctgragggctcagcagatatgtgcagccgtgactgagaagggcctgacagatgtggtactctttcagttcagaatggatgggcagtttttattactggtgatcagagatctttggcaatgcggaatttcccagagaatgacaattaatgagaaggcttcttcagttttgcattttaatttattatgaaatgaaaattggcgtttcttctgatttgcaaatcaca

SEQ ID NO: 61706 - DNA, 600 bp, Chicken  19866894322744_2
tggattttgtcaactgaaatttactcctctttaattaatgtgcatccaggagcacgggtgtggtttttggggtgggcaggcggtggcaaactgtagtaagagcagtcgatcaaaagtttaagtgaagcatttatgtagaaatgaattgatagcctgatatcagtgactcaggactgagaaagcaaagaattattttctttggcagctgtttacgatcagyaaataatgcagtggacaggtgagatttcaacagagagctgtgtgtttgtgtcaggaggaagcgccgactccttgggctgragggctcagcagatatgtgcagccgtgactgagaagggcctgacagatgtggtactctttcagttcagaatggatgggcagtttttattactggtgatcagagatctttggcaatgcggaatttcccagagaatgacaattaatgagaaggcttcttcagttttgcattttaatttattatgaaatgaaaattggcgtttcttctgatttgcaaatcacatttattgaagtgagtctccaatgcactgcagtgatagttcacattcagaatagatgcactgaatcaacattgtaatgctt

SEQ ID NO: 61707 - DNA, 587 bp, Chicken  19866894322744_3
ggtttctttatgaagtttaatggtgtccttttggtggtctcccctccgctggcgctgctcacatcttctcctcaatctccttaacctgagaggacacgactttgccgtcaatcacctcttcgacaattgtcttgatctttttaattttacttgattctggtaacgaaatcaagcagtaaattaataaagatggagtgtgtattgacagaatgatattactgtagtactggcagcaatttcactaatgagaaaatagacaaaggcatcttttcaatgcacagtcactaggaagtaaacttytgggaratgcaggatatggtttatcttccttctaatattctgtatgttgaccataatactatyctggacattgtactacataactgttcatcattatgtttttgcttcagattagcacagatttgcaaacctgaaaactaggaacttgcttacacagggatttttttgctgtcaaagtgcgtgcacttcattcaggagcctaatctgcctgtgcggtcagtggagagaagcagaggcctctgaaagcctttagaaaggaattccataaccttgccattcatctggcc

SEQ ID NO: 61708 - DNA, 581 bp, Chicken  19866894322744_4
tttatgaagtttaatggtgtccttttggtggtctcccctccgctggcgctgctcacatcttctcctcaatctccttaacctgagaggacacgactttgccgtcaatcacctcttcgacaattgtcttgatctttttaattttacttgattctggtaacgaaatcaagcagtaaattaataaagatggagtgtgtattgacagaatgatattactgtagtactggcagcaatttcactaatgagaaaatagacaaaggcatcttttcaatgcacagtcactaggaagtaaacttytgggaratgcaggatatggtttatcttccttctaatattctgtatgttgaccataatactatyctggacattgtactacataactgttcatcattatgtttttgcttcagattagcacagatttgcaaacctgaaaactaggaacttgcttacacagggatttttttgctgtcaaagtgcgtgcacttcattcaggagcctaatctgcctgtgcggtcagtggagagaagcagaggcctctgaaagcctttagaaaggaattccataaccttgccattcatctggcc

SEQ ID NO: 61709 - DNA, 524 bp, Chicken  19866894322744_5
tcttctcctcaatctccttaacctgagaggacacgactttgccgtcaatcacctcttcgacaattgtcttgatctttttaattttacttgattctggtaacgaaatcaagcagtaaattaataaagatggagtgtgtattgacagaatgatattactgtagtactggcagcaatttcactaatgagaaaatagacaaaggcatcttttcaatgcacagtcactaggaagtaaacttytgggaratgcaggatatggtttatcttccttctaatattctgtatgttgaccataatactatyctggacattgtactacataactgttcatcattatgtttttgcttcagattagcacagatttgcaaacctgaaaactaggaacttgcttacacagggatttttttgctgtcaaagtgcgtgcacttcattcaggagcctaatctgcctgtgcggtcagtggagagaagcagaggcctctgaaagcctttagaaaggaattccataaccttgccattcatctggcc

SEQ ID NO: 61710 - DNA, 600 bp, Chicken  19866894322746_1
aatcagttaacgattacgctgctatgacaggcctttgccctcctaattagatgctagtgggggaaagatatcacattgggtctggctgagataggttaactttctccagagcagcccatatggtgctgtgttttgcatttgtgactaaaacagtgctgataacacatggatatttcagctgatgtcacacagctctgccttgcagcaagtaggattgggttgggcaaaaggccaggggggaacccagccaggacagctgactcaaagccaccaaagggatatgccacactgtgtaccacratacacagcaataaaactggaacgtggtattttcaaggtagtggatgtttgaaragtgcctgggcagcaggctgctggtgagagggtgagcctttgattcacttgtttttgtgtttagggttgctttgcattttttccacctttccctatcattcacttatcaaactgtccttatcttggtgaggttttctcacttgctgagggggtggtgaatgaacagctggttagtgcttagttgctggcaagagtcagcatagatattcaatatatttaatagattcatgttgtatagaagtagtt

SEQ ID NO: 61711 - DNA, 600 bp, Chicken  19866894322746_2
tagtgggggaaagatatcacattgggtctggctgagataggttaactttctccagagcagcccatatggtgctgtgttttgcatttgtgactaaaacagtgctgataacacatggatatttcagctgatgtcacacagctctgccttgcagcaagtaggattgggttgggcaaaaggccaggggggaacccagccaggacagctgactcaaagccaccaaagggatatgccacactgtgtaccacratacacagcaataaaactggaacgtggtattttcaaggtagtggatgtttgaaragtgcctgggcagcaggctgctggtgagagggtgagcctttgattcacttgtttttgtgtttagggttgctttgcattttttccacctttccctatcattcacttatcaaactgtccttatcttggtgaggttttctcacttgctgagggggtggtgaatgaacagctggttagtgcttagttgctggcaagagtcagcatagatattcaatatatttaatagattcatgttgtatagaagtagtttaaaaaacgagaacagattaataatagttcatagtcttaacagcttattctctc

SEQ ID NO: 61712 - DNA, 600 bp, Chicken  19866894322759_1
cttgcctcactgcagctatggtctgtactgattaactgtcccagctttcaaactttcgggagcagaaaagtaatttattgctacctgctgttcaaactgccatttaaaagcttaccttgtggcatggagtagctcgattctccagtcagtgaattatctgctgaggctcaagaaaagttatgctcctgcttatgttttttgatgcttttcctctgttgttgtacacctgattctcatattaacttaattattcctgtctgtgtagagccagtagctgttgcttttatttatcacagaacktagctcacagataaagacagagaactgtaatatgtaatatgaaaaaaaaaagaagaaaaaaaaggtagtttaagagcagaaagggagtagatctaagatgttacagaagcagttagttattttccagagtagacccatatttgaaaattactcaaaaaaacatgttaaatttatccaaaaagtatacattaacatttacccctatttgacgttttaagagtgtaatttataaatgttatgcaaaattaaggcaatggacaaagtagattctataacacaattctttgtccttcttcatgg

SEQ ID NO: 61713 - DNA, 600 bp, Chicken  19866894322777_1
ccattctatgattctacgattctatgatcttactcaacccattcaatgcattattttggtgcacttgagtcttgcagttcatgcaaagtagtgttgtgaacgtgcaaaatggattccaggattaagacttaagaaatttatctccttctgagccacttaacatcctcatgaaaagatatatatttctttctgttttaactgcaacatcccacatttgtgtaccaaatgtgtactacatttctcatgcaatagctatccagggagacttttcatgtgcctcagcacacttttcattttttwaaattccctgcctgattaccagctctacttactcccagcagtgctatccatccttcatcttacttgtgaactccaaataggatcagggagaataaaagatttgctatcttattcttttgtccattggtgcaggaaaataagcacaagactgtttcctaatataatgacacactttgagtattccattcagtaaattccaaatcatttgtccaaaattcatgtgttctttgcttagaaatcaaattttcctttatgtatataaaacttgtttagcattcttatctcatactgcagcttcat

SEQ ID NO: 61714 - DNA, 600 bp, Chicken  19866894322778_1
atccatggcatattccagggcaggcagggaccttaggctgaaattacagccttgcttactaattgctgcatgttctctctccataggtatatcattgccagcaattagcacaaaatcctttcccactcttgttaagttcctgtgctgcagttaaatactcccagatcccatttaaatgatttcaaatgcaattcattctggctcgttaaataattccacagcagtgtttgtcgtcttctctctctgttttccaacagccactttctcccagaaagaatatgatgactaaagaatgggaargggaagtgagatgtaaactgagaaatttgaggtccatcctctctgcctatatttttacttctttcttcctcctcttctccagctgtgacttctcccagtagatgggccttatgggggtccatatgacacaatttctgttggtttcaccaactcagtgaggtggtggcttcaatgtgcgctccctgaggcatggggtccaccatctgtttgcaaggaatcatcaaaaaagttgcaaagaaaagcaatttcctttctgccactcagcagtctacgacagcgttcccattggaagatttgtag

SEQ ID NO: 61715 - DNA, 599 bp, Chicken  19866894322783_1
  misc_feature (1)..(81): n is any nucleotide
nnnnnnnnnnnnnnnnnnnnnnnnnnnnnnnnnnnnnnnnnnnnnnnnnnnnnnnnnnnnnnnnnnnnnnnnnnnnnnnnnacttgctcccacagttctatgtctttcttatgctgggggccctggcttactgttgtgcaagacatcttaggtcttagagaggtgcccaagtgttcaactactggcactttgccctcgtgctatgaagggttttcctcaaaatcatgtcatgcaaacaaggccattattgcagaagtttttcgtatgtggcaggaagttctgtggcagtagaaaaaaagragcataatatcaaaacatgagcaaacatgagcacagtctaccaaatatgaagtcagcagcatagctgtaactcatcttgaaaatcctctccccagcctagaggggaacatgtgactgtaaaaagcagaaccagcaatggtatggaacaagtgacaggaagacaaaggacaactccccaacaatcaaatacatttctgtggtttttaataataaatggaaccatgtcatatgcttcttttcccacacttagctatgcaagcaccaaattagcaacccctggctgccaaacctttgtgacc

SEQ ID NO: 61716 - DNA, 483 bp, Chicken  19866894322791_1
tacacttgggtcaggacaatctcaggtatgtgtactgactggtagaagaacgtcttgagagcagccctgctgagaaggatttgagggttctggtggatgaaaaaaatctatgcaagacaacagtatgtgcttgcagtccagaagaccaactgtatcctgggctgcatcaaaagaggagtgcccaggaaggagaagcaagtgattgtccacatctgctctgctcacacaagtccctgtctaaagtacagatctggagcgcccagcacaagaaggacgtggagttgttggtgaagatccagrggaggccatgaagatgatcagaggtctgaagcacttgcttgtgaagaaagtctgaggaagctgggcttattctgcctggagaactgaagtctctagtaagatctcattcacaccttgcaatacttaaaaggagcttataaayaagatggagactgactttttatgtgggcagatactgaaagg

SEQ ID NO: 61717 - DNA, 341 bp, Chicken  19866894322791_2
agaccaactgtatcctgggctgcatcaaaagaggagtgcccaggaaggagaagcaagtgattgtccacatctgctctgctcacacaagtccctgtctaaagtacagatctggagcgcccagcacaagaaggacgtggagttgttggtgaagatccagrggaggccatgaagatgatcagaggtctgaagcacttgcttgtgaagaaagtctgaggaagctgggcttattctgcctggagaactgaagtctctagtaagatctcattcacaccttgcaatacttaaaaggagcttataaayaagatggagactgactttttatgtgggcagatactgaaagg

SEQ ID NO: 61718 - DNA, 599 bp, Chicken  19866894322803_1
  misc_feature (1)..(111): n is any nucleotide
nnnnnnnnnnnnnnnnnnnnnnnnnnnnnnnnnnnnnnnnnnnnnnnnnnnnnnnnnnnnnnnnnnnnnnnnnnnnnnnnnnnnnnnnnnnnnnnnnnnnnnnnnnnnnnnggtcctgaaagatcctaaatccatggaatggacagggttagaaggacccttgaagatcatagaaacagagaacggttgggtggggtttgaaggaaccttaagaccccagagccgttgaatctcagcacagttgggttggggaactgtatggcaaacagataccccataccccatccaatgtggtctctsccraagccttctcctcagagctgctctccatgagttcttccctatctgggattatcccaacccaacaccccacactcagcctgaaartcttgctgggtttacatagacccacttcatgaacatatttcaggaaaacacccccaacctgagccaacaaatccgaggcagcccgggcacatccaattcccatttgcatccggggttgttcaggggctgctatgggcaaaacccaaagcaaaagagaatggctgtggttaactggaggagcatcacccacccaacccgttcagtgtgccgcg

SEQ ID NO: 61719 - DNA, 599 bp, Chicken  19866894322803_2
  misc_feature (1)..(108): n is any nucleotide
nnnnnnnnnnnnnnnnnnnnnnnnnnnnnnnnnnnnnnnnnnnnnnnnnnnnnnnnnnnnnnnnnnnnnnnnnnnnnnnnnnnnnnnnnnnnnnnnnnnnnnnnnnnnggtcctgaaagatcctaaatccatggaatggacagggttagaaggacccttgaagatcatagaaacagagaacggttgggtggggtttgaaggaaccttaagaccccagagccgttgaatctcagcacagttgggttggggaactgtatggcaaacagataccccataccccatccaatgtggtctctsccraagccttctcctcagagctgctctccatgagttcttccctatctgggattatcccaacccaacaccccacactcagcctgaaartcttgctgggtttacatagacccacttcatgaacatatttcaggaaaacacccccaacctgagccaacaaatccgaggcagcccgggcacatccaattcccatttgcatccggggttgttcaggggctgctatgggcaaaacccaaagcaaaagagaatggctgtggttaactggaggagcatcacccacccaacccgttcagtgtgccgcgggg

SEQ ID NO: 61720 - DNA, 599 bp, Chicken  19866894322803_3
  misc_feature (1)..(24): n is any nucleotide
nnnnnnnnnnnnnnnnnnnnnnnnggtcctgaaagatcctaaatccatggaatggacagggttagaaggacccttgaagatcatagaaacagagaacggttgggtggggtttgaaggaaccttaagaccccagagccgttgaatctcagcacagttgggttggggaactgtatggcaaacagataccccataccccatccaatgtggtctctsccraagccttctcctcagagctgctctccatgagttcttccctatctgggattatcccaacccaacaccccacactcagcctgaaartcttgctgggtttacatagacccacttcatgaacatatttcaggaaaacacccccaacctgagccaacaaatccgaggcagcccgggcacatccaattcccatttgcatccggggttgttcaggggctgctatgggcaaaacccaaagcaaaagagaatggctgtggttaactggaggagcatcacccacccaacccgttcagtgtgccgcggggggagcagacaccacaacggctgtgggtggagggagcaggatcgcgggggaggaaatttctcaggggggmttttgtttgtgctca

SEQ ID NO: 61721 - DNA, 525 bp, Chicken  19866894322803_4
acactcagcctgaaartcttgctgggtttacatagacccacttcatgaacatatttcaggaaaacacccccaacctgagccaacaaatccgaggcagcccgggcacatccaattcccatttgcatccggggttgttcaggggctgctatgggcaaaacccaaagcaaaagagaatggctgtggttaactggaggagcatcacccacccaacccgttcagtgtgccgcggggggagcagacaccacaacggctgtgggtggagggagcaggatcgcgggggaggaaatttctcaggggggmttttgtttgtgctcacagattacagggcagcacggagcctgctcagcctgcaagtcatcccagtgccttcaggagcacttcaggtttttgtttttgcactgtattcggaggaaatctgtgcactcggagggccgagtgctgccmcgtttcatccgttggtgctcttcgttaggggagaagccattggagtaattaaacatccccaaagagagaaacagagcgcaa

SEQ ID NO: 61722 - DNA, 381 bp, Chicken  19866894322803_5
gctatgggcaaaacccaaagcaaaagagaatggctgtggttaactggaggagcatcacccacccaacccgttcagtgtgccgcggggggagcagacaccacaacggctgtgggtggagggagcaggatcgcgggggaggaaatttctcaggggggmttttgtttgtgctcacagattacagggcagcacggagcctgctcagcctgcaagtcatcccagtgccttcaggagcacttcaggtttttgtttttgcactgtattcggaggaaatctgtgcactcggagggccgagtgctgccmcgtttcatccgttggtgctcttcgttaggggagaagccattggagtaattaaacatccccaaagagagaaacagagcgcaa

SEQ ID NO: 61723 - DNA, 599 bp, Chicken  19866894322804_1
  misc_feature (1)..(220): n is any nucleotide
nnnnnnnnnnnnnnnnnnnnnnnnnnnnnnnnnnnnnnnnnnnnnnnnnnnnnnnnnnnnnnnnnnnnnnnnnnnnnnnnnnnnnnnnnnnnnnnnnnnnnnnnnnnnnnnnnnnnnnnnnnnnnnnnnnnnnnnnnnnnnnnnnnnnnnnnnnnnnnnnnnnnnnnnnnnnnnnnnnnnnnnnnnnnnnnnnnnnnnnnnnnnnnnnnnnnnnnnnnnngagggggaacagctgtttatgagggtggacagtgataggacaagggagaatggtttaaaactgagacaggggaggtttasgttggatattaggaagaagtttttcactcagagggtggtgacgcactggmacaggttgcccaaggaggttgtggatgccccatccctggaggcattcaaggccaggctggatgtggctctgggcagcctggtctggtgattggcgaccctgcacatagcagaggggttgaaactacatgatcactatggtccttttcaacccaggccattctatgattctatgatttactggtcaacctgagaaaggttgttcaacttgctggctgctgttccaccattctttatttatactcatcata

SEQ ID NO: 61724 - DNA, 599 bp, Chicken  19866894322804_2
  misc_feature (1)..(170): n is any nucleotide
nnnnnnnnnnnnnnnnnnnnnnnnnnnnnnnnnnnnnnnnnnnnnnnnnnnnnnnnnnnnnnnnnnnnnnnnnnnnnnnnnnnnnnnnnnnnnnnnnnnnnnnnnnnnnnnnnnnnnnnnnnnnnnnnnnnnnnnnnnnnnnnnnnnnnnnnnnnnnnnnnnnnnnnnnngagggggaacagctgtttatgagggtggacagtgataggacaagggagaatggtttaaaactgagacaggggaggtttasgttggatattaggaagaagtttttcactcagagggtggtgacgcactggmacaggttgcccaaggaggttgtggatgccccatccctggaggcattcaaggccaggctggatgtggctctgggcagcctggtctggtgattggcgaccctgcacatagcagaggggttgaaactacatgatcactatggtccttttcaacccaggccattctatgattctatgatttactggtcaacctgagaaaggttgttcaacttgctggctgctgttccaccattctttatttatactcatcatatgctgcttcttttgacatctttggttgtataacactcagcttatctgctc

SEQ ID NO: 61725 - DNA, 600 bp, Chicken  19866894322805_1
ttggaggatagatcactgtgcaggtgaagaccagtgagtgtatgtttcagtgtgtgcatttaagggtgcatggatgtacacagtgacattcctctacatttctgaactcagaaatgtgttcctcatgtatagtaaattttctccacatcctggtaatgcttagctaaggcttggctaacactatagaagcatgctcctggcagtgttcattgtcctgttccccgtatcactggatgcaggtctaaccaaaactatcagacttgagtatttcctaagtttctggctgtatgtggtcttgamttctgtaaagtytcatatttattttcaattcagagaggactgaaaatttaatgaaaacgctgggataayttttattagggatctgagccagctaatttgaaattgttggaaaaactttgatgtagcattcgcaacatgtaaagcagcctgtgatgcaaatgcagttttgttagtattagatacctcggggcagaactcagctgctcagggttcgtgccgagtgtggttctgtactgagctatgcctaaacagtggcttctaaatgtttgctttgagaaaagcaaaagcttgagaaagctg

SEQ ID NO: 61726 - DNA, 600 bp, Chicken  19866894322805_2
tcactgtgcaggtgaagaccagtgagtgtatgtttcagtgtgtgcatttaagggtgcatggatgtacacagtgacattcctctacatttctgaactcagaaatgtgttcctcatgtatagtaaattttctccacatcctggtaatgcttagctaaggcttggctaacactatagaagcatgctcctggcagtgttcattgtcctgttccccgtatcactggatgcaggtctaaccaaaactatcagacttgagtatttcctaagtttctggctgtatgtggtcttgamttctgtaaagtytcatatttattttcaattcagagaggactgaaaatttaatgaaaacgctgggataayttttattagggatctgagccagctaatttgaaattgttggaaaaactttgatgtagcattcgcaacatgtaaagcagcctgtgatgcaaatgcagttttgttagtattagatacctcggggcagaactcagctgctcagggttcgtgccgagtgtggttctgtactgagctatgcctaaacagtggcttctaaatgtttgctttgagaaaagcaaaagcttgagaaagctggggctagaaaca

SEQ ID NO: 61727 - DNA, 600 bp, Chicken  19866894322805_3
atggatgtacacagtgacattcctctacatttctgaactcagaaatgtgttcctcatgtatagtaaattttctccacatcctggtaatgcttagctaaggcttggctaacactatagaagcatgctcctggcagtgttcattgtcctgttccccgtatcactggatgcaggtctaaccaaaactatcagacttgagtatttcctaagtttctggctgtatgtggtcttgamttctgtaaagtytcatatttattttcaattcagagaggactgaaaatttaatgaaaacgctgggataayttttattagggatctgagccagctaatttgaaattgttggaaaaactttgatgtagcattcgcaacatgtaaagcagcctgtgatgcaaatgcagttttgttagtattagatacctcggggcagaactcagctgctcagggttcgtgccgagtgtggttctgtactgagctatgcctaaacagtggcttctaaatgtttgctttgagaaaagcaaaagcttgagaaagctggggctagaaacatctctgaccgccatgtgacccagatatgtaccagatggaacaaatccagagggactt

SEQ ID NO: 61728 - DNA, 599 bp, Chicken  19866894322811_1
  misc_feature (1)..(175): n is any nucleotide
nnnnnnnnnnnnnnnnnnnnnnnnnnnnnnnnnnnnnnnnnnnnnnnnnnnnnnnnnnnnnnnnnnnnnnnnnnnnnnnnnnnnnnnnnnnnnnnnnnnnnnnnnnnnnnnnnnnnnnnnnnnnnnnnnnnnnnnnnnnnnnnnnnnnnnnnnnnnnnnnnnnnnnnnnnnnnnntgtatcttaggaagttgcttagctagtactcctgttctgttttatagaccttgaccagttttatagtcccagtattcacaatatcccatgacaataagtttcatgactgttagttaaccttctcrctaaaagctagcccattctgatggtacagaaactgccacgtgttttcttttgctgcatgttctgctttgcaccttgtaggagatctagcggcatagtcaataatcagtgtgctgcatggtgttattttactggctggattgcacaatgtttaaagacatgttagggaaggaaacttgtcatcggtacaggataaaacttagtttgttggaagcagacacacacttgagccttacaccatgacctttagggtggaatgagataattttaaaaggccrtcttgcttcagggaagccaaaat

SEQ ID NO: 61729 - DNA, 600 bp, Chicken  19866894322811_2
catgactgttagttaaccttctcrctaaaagctagcccattctgatggtacagaaactgccacgtgttttcttttgctgcatgttctgctttgcaccttgtaggagatctagcggcatagtcaataatcagtgtgctgcatggtgttattttactggctggattgcacaatgtttaaagacatgttagggaaggaaacttgtcatcggtacaggataaaacttagtttgttggaagcagacacacacttgagccttacaccatgacctttagggtggaatgagataattttaaaaggccrtcttgcttcagggaagccaaaatggagtgggaaatgggggaatcattaaaaacatgagtactaaattgtttttgggctgtgttaggttcagatatttgtcctaacatctggttcctctaccactttcatcttaaatcttagctggattctcttggtaaacaaccagtaaattcatcactgagctttctaaaaggcattataagttattttaaagatctttttggagttttattttaattgcacaataagcttccattcatgaataaagatgcctgcttggggcgtcaacaaccatttttt

SEQ ID NO: 61730 - DNA, 599 bp, Chicken  19866894322817_1
  misc_feature (1)..(75): n is any nucleotide
nnnnnnnnnnnnnnnnnnnnnnnnnnnnnnnnnnnnnnnnnnnnnnnnnnnnnnnnnnnnnnnnnnnnnnnnnnngtaaactgacttgctaagcttcttccctaagtattgccttaattaatacatatttaagaatcacaggacaaaagatcgaagagtacaagcagctaaaatttgtgttccatttaattagatcagaagtgtcacagaaataggatctcttgcaagtacagaattggcatggagatgaagcaacctaaacttaccttgttcaacttattcttaagaaacacttattasggaacctaaacaaatcttttcttagcaggcaggtgctaccagaaaaagcctaacttatttattaagccttttcacacttagagaagtgtttaaataaggtcagcctggagcattccagagctgaacatccaattttacacgttacacatgtgattcaaygccacaggtaacctttagcagtagaactcagtcacatcactaaaaagcaaagcaacaggtaattctcagtgaaatgtgacttcattgtcccttcagtacaccagccttcaaatcccaggataccaaattcgggcacacaa

SEQ ID NO: 61731 - DNA, 600 bp, Chicken  19866894322817_2
acaagcagctaaaatttgtgttccatttaattagatcagaagtgtcacagaaataggatctcttgcaagtacagaattggcatggagatgaagcaacctaaacttaccttgttcaacttattcttaagaaacacttattasggaacctaaacaaatcttttcttagcaggcaggtgctaccagaaaaagcctaacttatttattaagccttttcacacttagagaagtgtttaaataaggtcagcctggagcattccagagctgaacatccaattttacacgttacacatgtgattcaaygccacaggtaacctttagcagtagaactcagtcacatcactaaaaagcaaagcaacaggtaattctcagtgaaatgtgacttcattgtcccttcagtacaccagccttcaaatcccaggataccaaattcgggcacacaacacgcatatgcaaaaacacattccacacaactcaatatcactttttcatttttgttactttgtagagccaaactgagaaacagttaatgtataattaaccactaacacagtagataggttaacacggtctactgtgacaaagaatacttcagttgatgaa

SEQ ID NO: 61732 - DNA, 452 bp, Chicken  19866894322817_3
acctcatctactacaactagaccaaggtcatcaatcctatccgtttcaatcaaagaattcacaagagcatgtcctttttctatggtggcaatataaagtgacttctttattcttctcttgatgggtggaaatcttcccttacttcctgcatattcttcaaccaggaaacccaattctatcccaaagcttgataaaccccaaacctgtaaaaaaaaaaaaatgcaacatcagttggaaaacaaactcatgctcattctgaatttcagacctgcctcaaatacccaaccacacatgtaaccyacccatgcctgaattaactgtgtaaagaaagcaaaacatcagctatgactactttcctcagttgaaaagcaaaggcattcacaaacttcatcaaggggtggtttaacttttctctaccttcattctgattcagtaagagtagtatctgtttt

SEQ ID NO: 61733 - DNA, 600 bp, Chicken  19866894322820_1
acagaaagtctttggcttgaaaaaagcagtgtatggttctctcatgggaaggagagcttgaagggcactcacagaacctggcatgagcacgagtgttcagtgagctcccagaataggtgggaagaaccccttgtatgcaggagagcaatgggagattgagagaaacatgtcacatggttggtctacaagcagcaaagggagtgatcctgcagccttcagaaattagtacatgcacaatcaccatggttttctctttcaaaagctccctttcagccccagcctttacttcttcccttttawtgctctgagcagaagttgtctctgatattttctcaaagcctgtagatcccacacagttctctaactgactgtgagagaacatgaaaattcctctacttgctcctcattcatctttcttctactgcctcttttccttcttcctcacatttttttaaagagattcttcttttagctgtccaggtcaatcacgcttcttccacccttagctccttctgcagtctgtgaaagacaatattatcatctctgtaccataagggatccaccagcacagttttacagccccagaaggtttggaattgt

SEQ ID NO: 61734 - DNA, 599 bp, Chicken  19866894322824_1
  misc_feature (1)..(37): n is any nucleotide
nnnnnnnnnnnnnnnnnnnnnnnnnnnnnnnnnnnnnttgacaggagcagcctctgcatttcatcaggctgctatgaacacttccagcagtttccctaaatcccttgatttgtgtgagagtgcacagtggataattagggaaaaaaaaaaaaaaaaaaaacacagaaagaagagatgttggaattctccttaactggcagcactggggcttggccttgtacagacatatgctgggcaaacctctgtcatgggaaaatgggaggggctggatgcagaggccatccctgagctctttgcaartgacggggccagcagggatgatgtcacaagtaggaaggtgaggtcacagagaaagtcctttcctattggtcccgccaggcaaggggcaccctggtttccactgggttggtgagcacagggtctcagcctgcagagaagaaggctggagctgaagcccttcctcagggaagctcggctgyggtggagaggtccttgcctgagtgcgtggggccacccagccactgacacctctagactgggctggtagaggtggagcaggcagaaaacaccagcaagggccagaaaatacatcaagagca

SEQ ID NO: 61735 - DNA, 600 bp, Chicken  19866894322824_2
ggaattctccttaactggcagcactggggcttggccttgtacagacatatgctgggcaaacctctgtcatgggaaaatgggaggggctggatgcagaggccatccctgagctctttgcaartgacggggccagcagggatgatgtcacaagtaggaaggtgaggtcacagagaaagtcctttcctattggtcccgccaggcaaggggcaccctggtttccactgggttggtgagcacagggtctcagcctgcagagaagaaggctggagctgaagcccttcctcagggaagctcggctgyggtggagaggtccttgcctgagtgcgtggggccacccagccactgacacctctagactgggctggtagaggtggagcaggcagaaaacaccagcaagggccagaaaatacatcaagagcaggcaagaaaagcatacaaggaagatcagccttcacagcatggagagacctgtagaagcaagcagcatgcccggaatggatggggtctgcactgcacctgagcagaagagggagcctgaggcatcgtgctctggggagccctccaggcgccgagaagcaaaggtcaaacagagtcgctcct

SEQ ID NO: 61736 - DNA, 600 bp, Chicken  19866894322831_1
ctttctagcgtgtcaactgcaccactcagcttggtattgtctgcaaacttgctgaggttgcattgaatcccagtgtccatgtcacctacaaagatgttaaataacattggttccagcaccaatccctgaggaatgctgcttgtcactgttctctacttggacattgagccattgaccacaactctctgagcatgaccattcagcctatttcttatccagtgagtggtccatccatcaaatcatatccatccaatttctccaatttggcaaccagtgtggcatgcaggacagtgtcaaacrctttgcacaagtccaggtaggtgacatcagttgctcttcctttatctgctgacgctgtaattccatcataaaaggccgccaaatttgtcaggcatgacttgcccttggtgaagccatgttggttatcaccaatcacttcatctttattttccatgtgccttagtagtgccttcaggagcatctgttccacaatcttgccaggcacagaagcaagactagctggcctgtcattcattcatcctagagaaggcaactgagttccttcctgggagatgtattggagaaaacactaccagtttc

SEQ ID NO: 61737 - DNA, 600 bp, Chicken  19866894322832_1
aaacttggtaggagtgagactgtggttgtgctgtacatggacgtgggaaaaaacatgagcctaaaaatgtctagatttgcagttgtttttctctgtatccaaatgtgatatttgattctgatcttaacagcaggataactcaagactgtcaacttaaaaaacatatcttggtatacctgcacgacaaaggatacttgaaagtagactttaaaactttgaattttcttctactgatgatgtaggactatatttggcagtttgtattaggtttaaataaatgtctccaaaacacataatagraaatagttgacccagttgtctcacataactaagatgccacagttttgatgatgaactggaagaggaatgtctttttcacctttgcatattacattgatcataatgaatggcaagtttgtaggtcagggatatccacagtatttggatagtgtgttcttccaatgaaaatccagtcctgaatggacttgagcactttatcactgcaaatatcaagcagtcttaaaaactcagtaaaccaatatggatgttattcagtctgattagccaagattatctccaactgctttagtttttactatt

SEQ ID NO: 61738 - DNA, 600 bp, Chicken  19866894322834_1
ccacagagtgcattgcaaagttgtgtgggaatcactgagcactgttccaaggatatccctgcccagtaccctgtctttgacactggctaatggtggacattcaggcagcaggtgaacgagctaccattaaaagctatcatttcccgagaacatttttcagcttctgataatccagagtttcaggagcaggaatttgccccaagagcagtataaataagctggtctcaaggagtatctatcacattctggaaatattcttcccatggatattcccactgctaaagcaacaacaacaacagygcatttattttgggcacatcttctaccattctttcaccaccgctttcccatggcacccaccatggtatccaccaaagtcacattctcctccaagggagtttttgaatgttcagatgcatccctgtggtttaatctggtgggttaagtctttcccactcatttccttgatagtgaatgacaaacataacacatttttcatacactatcaagtgatgatgtctacagtaatgacagactattggaatctcagagtcctttggtggcatttgcagttatcccatgaattttaagtagcaccaa

SEQ ID NO: 61739 - DNA, 600 bp, Chicken  19866894322837_1
ctcatgccctccatccctccattccccagaagaatttattaccatctccacctggctctggaaacagaaagggaaccaattcatctccaaaagaggttttcagccattttacagcatcagaaggaatcctgaaaaccaaaatctctctggatgtgtatgataggaatgtgaatgtgttattcagactgaggcttgcatgtccactgcctaactgcagagcacctccacatttatgttatgtaattcctactcaggtcaatgggtataaaagctaaaccaagtagttttcatgctttgatycatattaattgacatagttaacgtgctaggacaattaatgtaccctattctgtttttaatcttaatttgactgtgctgtttctctgcatctttatactttccaaaaatccctaggagattttgctgcttcttattaatagctgtccctatctcccaggattcagacttcaggattctgcctttggagtactatcattacatgtaaaaggcccgtttcttcagcagcacgagcacatctacagtacctcagttcttctcatgtgacttaatcaaaagcactctaacttcatcacttctgaa

SEQ ID NO: 61740 - DNA, 600 bp, Chicken  19866894322850_1
gcctaggcattcatgtctggcatgtagatttatttaaagagagacaggggttataggtttcatttaagcgctgtttagacatggtgatgtttagaagatttctgctgtaagatcacaacagagttggcaaatgtgctggttaggttcagtgaaagtaagcaaaataagcatttcctactcaaataagttatttataaccttttcctcgtcataaacctgccagttgatcttattaggtagagatgatgaaaatgcgaagctgggaccatagctctataacaatgtataccatagacaatktgtcatctcttctgtctttataagagctttatctgaactgttaaagccttgtcaaggattggcttgcacaaaaagaaatatgttcatatgtggcaaaatgtcattttgctgtgaataaaatgtaaaattaaaaattttgatgtcttcttactctatatctgctttcagaaaaataaataagtgaatagattgctgttgaactgttgaactactgaactgttttccaaacactccttgaaatgtggacactccttcacctgttcattcctctcaagtgcctccagcctggcagcacagata

SEQ ID NO: 61741 - DNA, 600 bp, Chicken  19866894322863_1
cacactttgactgataaagccttgaagaatatcagctctttgagtaagaactgaaatcagcactgtgtttatcaagcaccatcaaatgaaaaaggtcattcagaagtcctgtgtgatttaataaatacatgtataatttagctgcttgaatttcttattagtgaatgtaattgcagtattttagtttacttgccatttctacactaagagcattttcattctttatgaggcagtcagcaggtgtacacaaattcatgtcaacatctgaatactacttattgctcatttaactcaaaaatkaaaaaaaaamcagaccatgtctaaaaaaataaacaaataaaaggagaatgcagaggagttggagcagtggttttcaaagaaaaaaaataaaaccagggaggctttctcaaatactttttccaagcactgttgttataggtgtttcctgaggaagtgacggacttttccctctccacccccccacgtctcacacccttcagtttttactttttctctttaagcrcagagtctgagaggtgcaggcaaagaacagcaagcaagcacaggggacagttatttagctttgctcaatcaatgatg

SEQ ID NO: 61742 - DNA, 600 bp, Chicken  19866894322863_2
ctgataaagccttgaagaatatcagctctttgagtaagaactgaaatcagcactgtgtttatcaagcaccatcaaatgaaaaaggtcattcagaagtcctgtgtgatttaataaatacatgtataatttagctgcttgaatttcttattagtgaatgtaattgcagtattttagtttacttgccatttctacactaagagcattttcattctttatgaggcagtcagcaggtgtacacaaattcatgtcaacatctgaatactacttattgctcatttaactcaaaaataaaaaaaaaamcagaccatgtctaaaaaaataaacaaataaaaggagaatgcagaggagttggagcagtggttttcaaagaaaaaaaataaaaccagggaggctttctcaaatactttttccaagcactgttgttataggtgtttcctgaggaagtgacggacttttccctctccacccccccacgtctcacacccttcagtttttactttttctctttaagcrcagagtctgagaggtgcaggcaaagaacagcaagcaagcacaggggacagttatttagctttgctcaatcaatgatgggaggagaay

SEQ ID NO: 61743 - DNA, 576 bp, Chicken  19866894322863_3
tatgaggcagtcagcaggtgtacacaaattcatgtcaacatctgaatactacttattgctcatttaactcaaaaataaaaaaaaaamcagaccatgtctaaaaaaataaacaaataaaaggagaatgcagaggagttggagcagtggttttcaaagaaaaaaaataaaaccagggaggctttctcaaatactttttccaagcactgttgttataggtgtttcctgaggaagtgacggacttttccctctccacccccccacgtctcacacccttcagtttttactttttctctttaagcrcagagtctgagaggtgcaggcaaagaacagcaagcaagcacaggggacagttatttagctttgctcaatcaatgatgggaggagaaycagacytttttaatgccaattcaktaaagcaaagcagggaataaaggtagtcttgggcttaatttcaggcaggtgcttcastaaactatggcctccacaaagccacacaaaagcatcagtgcaattaaacaccatctagttattttatcactgtgcttcactacagtgctcttgcaactggaaagccat

SEQ ID NO: 61744 - DNA, 489 bp, Chicken  19866894322863_4
cagaccatgtctaaaaaaataaacaaataaaaggagaatgcagaggagttggagcagtggttttcaaagaaaaaaaataaaaccagggaggctttctcaaatactttttccaagcactgttgttataggtgtttcctgaggaagtgacggacttttccctctccacccccccacgtctcacacccttcagtttttactttttctctttaagcrcagagtctgagaggtgcaggcaaagaacagcaagcaagcacaggggacagttatttagctttgctcaatcaatgatgggaggagaaycagacytttttaatgccaattcaktaaagcaaagcagggaataaaggtagtcttgggcttaatttcaggcaggtgcttcastaaactatggcctccacaaagccacacaaaagcatcagtgcaattaaacaccatctagttattttatcactgtgcttcactacagtgctcttgcaactggaaagccat

SEQ ID NO: 61745 - DNA, 483 bp, Chicken  19866894322863_5
atgtctaaaaaaataaacaaataaaaggagaatgcagaggagttggagcagtggttttcaaagaaaaaaaataaaaccagggaggctttctcaaatactttttccaagcactgttgttataggtgtttcctgaggaagtgacggacttttccctctccacccccccacgtctcacacccttcagtttttactttttctctttaagcrcagagtctgagaggtgcaggcaaagaacagcaagcaagcacaggggacagttatttagctttgctcaatcaatgatgggaggagaaycagacytttttaatgccaattcaktaaagcaaagcagggaataaaggtagtcttgggcttaatttcaggcaggtgcttcastaaactatggcctccacaaagccacacaaaagcatcagtgcaattaaacaccatctagttattttatcactgtgcttcactacagtgctcttgcaactggaaagccat

SEQ ID NO: 61746 - DNA, 465 bp, Chicken  19866894322863_6
aaataaaaggagaatgcagaggagttggagcagtggttttcaaagaaaaaaaataaaaccagggaggctttctcaaatactttttccaagcactgttgttataggtgtttcctgaggaagtgacggacttttccctctccacccccccacgtctcacacccttcagtttttactttttctctttaagcrcagagtctgagaggtgcaggcaaagaacagcaagcaagcacaggggacagttatttagctttgctcaatcaatgatgggaggagaaycagacytttttaatgccaattcaktaaagcaaagcagggaataaaggtagtcttgggcttaatttcaggcaggtgcttcastaaactatggcctccacaaagccacacaaaagcatcagtgcaattaaacaccatctagttattttatcactgtgcttcactacagtgctcttgcaactggaaagccat

SEQ ID NO: 61747 - DNA, 408 bp, Chicken  19866894322863_7
accagggaggctttctcaaatactttttccaagcactgttgttataggtgtttcctgaggaagtgacggacttttccctctccacccccccacgtctcacacccttcagtttttactttttctctttaagcrcagagtctgagaggtgcaggcaaagaacagcaagcaagcacaggggacagttatttagctttgctcaatcaatgatgggaggagaaycagacytttttaatgccaattcaktaaagcaaagcagggaataaaggtagtcttgggcttaatttcaggcaggtgcttcastaaactatggcctccacaaagccacacaaaagcatcagtgcaattaaacaccatctagttattttatcactgtgcttcactacagtgctcttgcaactggaaagccat

SEQ ID NO: 61748 - DNA, 600 bp, Chicken  19866894322864_1
tttgtaagacgagggcagtaatgacccctaacagcctttggctctctcaatgcattcttaacagggcttgtttgtttttaacatggtggggtctaatggtaggggagatcctagctttcactgtgcatgaaaacacatgtgaaagagactgtgtgcccaagggcttgcaatctgaagtctcctcacacccgtgacaatcaacagtgcatcaggaggtggatttcctcagtgctggtttaattgctagtgcaagtgcaacgccttgttttggaaggtaactatggggtctggatttgcatygtgctttgtttcagagctctctcgggcacagcccacagctcagtgtgatgtctgatgcaggtccttatcaagatttgtttcacgtatcatgtttagaagtaacatactcagagtgtcaaaacaactttgtggtatatttgaacttgagacagacttagtaaaattgtggaaggcaggtaattagttaataggcactgataccttgctggttttgcattagtttcttacacagacattatggaaacaatgaaagatacagcagtccgtatcaaagacttctgagtgccgttataaacaact

SEQ ID NO: 61749 - DNA, 599 bp, Chicken  19866894322869_1
  misc_feature (1)..(14): n is any nucleotide
nnnnnnnnnnnnnntggcattctttttgttagatgtcttttcttcttctgatgttgaaatgtgtttttattttctatttatttatttatttttactggtttgcttttaacactttgtttcaaaaatctggaagtgacagtaattttagaaaattcagatcttatgctcaaaaacttgtactcctttttttttttttttattcaatcatagtaataccatattagtatttgtattctaaatttacaattttaaccacattcaaacatttcttgcatgaataccagagtctatcttgctgawagcactgagtttttagcaaagatctgagtaaatctcccttcagtgctttcttcaaaaatgaacctgaagtgctttcttctacaggtcaaaggtcttgaggggtaytttatacacattatattcctccaactgtgttagtttatggattactctcctgcactgttgagagatggtagataaatactgtgctggctgttgccacaccacacaagcagagtgactaatataattcataaaaaaattgacttagcatttatctcaccttctttctattttgcagactcctgtggtctagggta

SEQ ID NO: 61750 - DNA, 600 bp, Chicken  19866894322869_2
ttaacactttgtttcaaaaatctggaagtgacagtaattttagaaaattcagatcttatgctcaaaaacttgtactcctttttttttttttttattcaatcatagtaataccatattagtatttgtattctaaatttacaattttaaccacattcaaacatttcttgcatgaataccagagtctatcttgctgawagcactgagtttttagcaaagatctgagtaaatctcccttcagtgctttcttcaaaaatgaacctgaagtgctttcttctacaggtcaaaggtcttgaggggtaytttatacacattatattcctccaactgtgttagtttatggattactctcctgcactgttgagagatggtagataaatactgtgctggctgttgccacaccacacaagcagagtgactaatataattcataaaaaaattgacttagcatttatctcaccttctttctattttgcagactcctgtggtctagggtagagaagagtcctgtatcctccaaatctgcacatttctgacttgtgtaatatgcataaaccacatttaagatgattaggtagtaatcaagctataatattaataatc

SEQ ID NO: 61751 - DNA, 600 bp, Chicken  19866894322873_1
atgagtcagccacaaagctgttgtaatcagtgctgtacatctgcgaacggatgaaggcttcaaggtcctcgggctgagggtaggtggtggcagtgttattcctgtaggcttcttctgcaatctagaaagttgcattaaaatcccaattagtgctttatttgaatacatttaacagtattctaaagtaggaatgaggtcaaaatcaagatgacatcttctttggtgctgacagtcgtatcaagttacactgcatctgggctaacatgcagcgaaaaagattaagaatatgatgatgtatgyatttatttgtctgattcatgctgcttttgaactcttacaggataacattctgagcaggttaccctggtttgccatcttctataaagcacatacgataaatgtgatttgttccgagcctccatgcccccttgcgtttgagggaagtttattatttgccacagcctgataaaatatttctcaaaggtaaacacaaaatatcctggataggtttaattccatgtatgactggggaaagtctgtgtactttttcactgagaaatcaacaagatcagaatcaattgcatcctacgtatagctgtg

SEQ ID NO: 61752 - DNA, 594 bp, Chicken  19866894322873_2
ggagccccaaccagagctggctgagatgtgcgtattcacgtaagagtttcccttcaggtctgcatgcatgataatcacagctgaatgaggtctgaatttataccctgcatttgctattctgaaaattttcagagtatttctcccctggaaaggacaaatgccatcacttagcctttagtgccgtacaagccagagtaggtacttgtaggaataacatttcagcagagatcaggcaggaagacttgttcagtaacattttcctttctcaacacgcattcgagttatcagagacaacagagsagtttccatcactctgtttctgccacataggcagtttgatgcagcctgaggaatcttggtaccattttgacatttacaggacagagttatcatttgcctaagaagacatgagtggcaagaaggattatattattatttcaaactcagagtaagtgaagctaggggaaatgtttgatgcatgaagcctccttgttattgtttcaaaaggatattcagtaactggaatgtatttgtttacatcagtaaacaaacattctggagtttcaactctttccgtcttgtactggggttaaa

SEQ ID NO: 61753 - DNA, 600 bp, Chicken  19866894322887_1
caggacacccttggcaacttgctgtggcagactcccatgctgcagagaatgcatgctaccagccagcaccaggagctgacatttcagagcaccataccaggcttcactgcaccactgctgagcctcacagcgaacaggagcaccttgcaccctggagtgcgtgggtaatggttggtttgaaacagcccccagccaaagacttctaaagggctgcagactgcccagctccctgagggcgctgcctgcacaatgaatggtcctgctgaagtgacagatttgctcccacttctgtcccagccrtgcagcagcctggaagacaaggctgcttccttcctcctgctcagctcaaagtctgcattaaaattaagctgtttgaaaatctgttctggctaaaggatgaaattaattcagcaaaacttcacatattatatactgtccagcagtcaacatacaaataatgatgtacatacacagcatggttctctgcatgaattaagaacacaaatctagaagtgtacaaataataatgggaaagctgttaggaaatacaggcacttgtcaaagaaagctaaaagttatgggcagcagaagacagtcgca

SEQ ID NO: 61754 - DNA, 600 bp, Chicken  19866894322893_1
acaacccctatgattctgagtgatgctgtgggagtctgttgtttgccaacctgccaactccaagatagggaaaattaacttctgcattcaccaccaggaaaaaggcttctttgcatagtgctgaaggaccaaatttctttttataactacatctaggaattagtacttcattccagccacaaaatccctgcgtgctccattcatggtccagaaccagctgagctaagaagacttgtttgctcatcaaattcccaaaacagtccaatttcacaatcctgcagcctacgtgatgctaatagyacaacattcctggcagagttttggcttctgttagttgctgggccaggggaaatagaggaaggtattaggatggaggggaggagccagggctgtggggacttctcaaataccatgccccttgggtgcatgtcctgtttcctccctgcagtacgctctgcaatcacatgaggttcatcctcctgccacatctttggggtaagtggggttcttttctctttgcttttatcttggcatacctttgccagtggtcctcctcttccattactgcttttttttctacagcacaaagctgtatgtgac

SEQ ID NO: 61755 - DNA, 563 bp, Chicken  19866894322894_1
ccaacagtctccatgagcagaagattgcttcttcaggaagagacgtaatgggtattttaatacctattgtgttgcataggcaaataacttgtgaaggtttgaactgtcctgacagctacaatcaacaataaaagggaaggatccactctgaccaatgatgtgcactgttgcttgtaacagctccactgtattaatattgcttctcagatttatcttctgatccaacctggatcccaggacctattggtcacatgccaacagacagctctcatttgtttcctccctggaacctctaaaccmtaaataaaatgtgaagaaaagtcctctggaggctgccaaagctgtcactgatgcaagtggatgggagggaaagagaaactgtcatcctgctgcaaaagaaacctagtttggtgttgagagaaccatctcctcctatgcagctcctaccagctggtctcttgcaatgttttgttggaagcacagctttctcaattcttttaatgtacttggatgagccagccctgtgtaatggaggaaaaatttcttctcatcaagagtcatag

SEQ ID NO: 61756 - DNA, 599 bp, Chicken  19866894322896_1
  misc_feature (1)..(96): n is any nucleotide
nnnnnnnnnnnnnnnnnnnnnnnnnnnnnnnnnnnnnnnnnnnnnnnnnnnnnnnnnnnnnnnnnnnnnnnnnnnnnnnnnnnnnnnnnnnnnnnnctatgaccatgaataaaacccagaatttaaagcttaaagattgcagaacgtctttttggaacaccaattagatgtcaggtggctttgtctcttgcttcagatgaaggtttttacataccggccatggactactgcagatgtatttgtttctgtaatatcacctttttttttttattgcaataatcactattgcaataccttagrgatgtctgtggcaagcagacaacataattattagaaaaattgtaaaggcacttaagtgaccctcaaatcgaagcccggtcttccgttgaaaggcttttaagtcatgagtcttaaattctgtggtagaagaaagaggagattatcacctagaataacagactgctgcaaggtttaacatttctcttgtgcctgtacctgtatttgtaatgtttacctagtgtgcacaggcacacttttcatcaggtggcacaataatgcagtgctacacattcagaagaaaacagagactgagacttcat

SEQ ID NO: 61757 - DNA, 600 bp, Chicken  19866894322896_2
aaattgtaaaggcacttaagtgaccctcaaatcgaagcccggtcttccgttgaaaggcttttaagtcatgagtcttaaattctgtggtagaagaaagaggagattatcacctagaataacagactgctgcaaggtttaacatttctcttgtgcctgtacctgtatttgtaatgtttacctagtgtgcacaggcacacttttcatcaggtggcacaataatgcagtgctacacattcagaagaaaacagagactgagacttcatggtagctaaatgagaaaataatgctgataaaatcagrattgctgctgctgtcactgccttaatttatctcgtcgatactttcccaaataacaatttctacatgcttaaatagggctaacagcatgaaaaaaaaattgaatttacaactgtgctaccctacatagagatattcagctattaaaataccaatcacttcatatatattctaactgactcacacaaatgggtcagttcatgtgggaaaaacactttgcagaacttgtaccgtcagtaacttcattcatttctagtctctgacatatggaaatcccctctcacacaaatacaggggcatttg

SEQ ID NO: 61758 - DNA, 600 bp, Chicken  19866894322898_1
cccatcagatgaactgaactgcaccgtggtttgggtgcaaagcaagcgagcaggatggctggtgttctcaaacagctccaaaaataaaggaggctttttgagctgcagccaaaagaagctcagggccagggagcctctgcccgcaccgagcagtgccctgccagggcaggatggcgctttctcactgcgctcactcacattcatgagcagccatggtaccctgtgctttgctgaggcactgctgagcgtccggatgctgcagtgcttcctacactcctgtcttttacttttcaggtgctygtgtttattttattcagtttcaggagcacaagctgcggacttttttaagggctagttttattcccttcattttcttgctttatcacttcctcccaaatcgtaactcaaatccttctgcaagacaaaactccagggaagaaagaaaaacagatttggacttcagtgttcagctccaacaatcctgggagccagttctggaaacagtcattatctaatgaatcaccaagtttccagtgcttttgccctttacgcaacaaagctgcagacatttgagtcactacagtcatacaagttctcagg

SEQ ID NO: 61759 - DNA, 599 bp, Chicken  19866894322910_1
  misc_feature (1)..(126): n is any nucleotide
nnnnnnnnnnnnnnnnnnnnnnnnnnnnnnnnnnnnnnnnnnnnnnnnnnnnnnnnnnnnnnnnnnnnnnnnnnnnnnnnnnnnnnnnnnnnnnnnnnnnnnnnnnnnnnnnnnnnnnnnnnnnnnttggtcattcttgttacttcttaaatgtgaatgctaccctatcgggactagttttctcaattgagacagaaaaatcaagcctggtggcaggtactaaaatgggttctatatgcataggtatattttgaaaatgcctgctgtttagaaatagcttgatatcttagctgtgtttgyttytttttttatgaagctggaatgcagaacagatttttggcagtgaaagggttggtgctaagagaggtgtgcagtgccattcttaaaaggtggatgtttgtgaaaatccagttaatttcttcagataaggaagtaatatattagtgctgtgtagtaactggcgacgggaacttgctcagcctgctctcagagcatccctcacatcaaagtccagaagagacaggcaattaggttgcaacactcttcacacagcacatgtaaacaaactgatttaggccccctaaatccacgccactttt

SEQ ID NO: 61760 - DNA, 599 bp, Chicken  19866894322910_2
  misc_feature (1)..(123): n is any nucleotide
nnnnnnnnnnnnnnnnnnnnnnnnnnnnnnnnnnnnnnnnnnnnnnnnnnnnnnnnnnnnnnnnnnnnnnnnnnnnnnnnnnnnnnnnnnnnnnnnnnnnnnnnnnnnnnnnnnnnnnnnnnnttggtcattcttgttacttcttaaatgtgaatgctaccctatcgggactagttttctcaattgagacagaaaaatcaagcctggtggcaggtactaaaatgggttctatatgcataggtatattttgaaaatgcctgctgtttagaaatagcttgatatcttagctgtgtttgyttytttttttatgaagctggaatgcagaacagatttttggcagtgaaagggttggtgctaagagaggtgtgcagtgccattcttaaaaggtggatgtttgtgaaaatccagttaatttcttcagataaggaagtaatatattagtgctgtgtagtaactggcgacgggaacttgctcagcctgctctcagagcatccctcacatcaaagtccagaagagacaggcaattaggttgcaacactcttcacacagcacatgtaaacaaactgatttaggccccctaaatccacgccacttttatc

SEQ ID NO: 61761 - DNA, 600 bp, Chicken  19866894322910_3
gctggaatgcagaacagatttttggcagtgaaagggttggtgctaagagaggtgtgcagtgccattcttaaaaggtggatgtttgtgaaaatccagttaatttcttcagataaggaagtaatatattagtgctgtgtagtaactggcgacgggaacttgctcagcctgctctcagagcatccctcacatcaaagtccagaagagacaggcaattaggttgcaacactcttcacacagcacatgtaaacaaactgatttaggccccctaaatccacgccacttttatccacggaggagackgagactttgatttaaactaattttcagcggtgggtatgatctatgccgcggctgtcgggctgctggacaagatcgcagagttactgttggctgtttgtttctgaaatcccattgggtcttaaattatttaagacatttggttagcttttccttttctctgggagctacagagacacggcagctccgcattcgagtaaagttcacagtaggcgcctcttttaagaacggtaatggatagtttagatcaataaataagagataacaaaagtgagaaattaaagggagtagggcttaaaagaa

SEQ ID NO: 61762 - DNA, 554 bp, Chicken  19866894322910_4
tactgttggctgtttgtttctgaaatcccattgggtcttaaattatttaagacatttggttagcttttccttttctctgggagctacagagacacggcagctccgcattcgagtaaagttcacagtaggcgcctcttttaagaacggtaatggatagtttagatcaataaataagagataacaaaagtgagaaattaaagggagtagggcttaaaagaaaacaaaccagtctgatcgctgccactttgaaatgggtttcattatggtgtgttcacatacagaagtcacaagctggtgtgragatgagagccgggaagaaagcgtggtaggaaagattcctattacaggtaaaagtaatggctgcatattaacctcaaatgcggtattcaactttattatataatcaaaacacggcgtttttagggcctcgggtccgctaatagtgagtaaattcagctcctacataccgagcacaaagattaaacgtgggatcataaagtacacactcatcttcacgtaaaccaagatggaaaataacagtgcctatttaattc

SEQ ID NO: 61763 - DNA, 600 bp, Chicken  19866894322913_1
attacaggcacagaaagagaagaatgaaataactcacttttaacaggaaaaaaaaaaaacatacaggggaattcaattaaattgaaagacagaaaataaaaggtaataaaatgatttttccatgcaattaatctgtgagattcactggaacatgaaagtatgacagccaaaaacgttaccgggaataaatggaagacctgcagtgtagtaagaacagtgtgagctacaagagaacgttctgtgccaattaagactacaactctctttagggctatgtggacaccattttccacagactcrtgtttgcctatttaaatgaaatttctcacatcatcttctaagacatctggcctcatcacataatgaagctgaaatcctgctaaatgccacctctggatttaataatctcaaagtagtacctccattaagggcaagatgtacaaaatcctatgagagtcctcaaagagagggaagctgcctcctgtaatactgaatcaagtcatacaagtccactgtttgagcaatattctcattcctttgtttcaccatctatattctgtttcttatcttgtattcaagataaggcattctcccgttatt

SEQ ID NO: 61764 - DNA, 600 bp, Chicken  19866894322916_1
gtcactggggctcattcacgtggcaacatgagaaacaatgcctgggttcctgagtaccagtccaagtcaagggaggtttttgcattagctgaggtgtttcttctgtggatgtttttgatattctttagtattcaccttgaattagggcatcagatccttctcttcttgattacaaataggttggttaaacgttgcccaaagcttccatgtctaccctgctttctaactgctaagcactaactatgccttggaagtctaccagcacaaagtctaatcctggtaccacaagaaactgcagaytggatckcactgattgtcttgttggcctggtayttcagggtctggagagtaggcagttccagaagtttcacaagaatgttgaagacagtgttagggggctgtataaatttgggaatgggcaagaattaatctaacaatatcaggagtactgataattatgtgcactgtgctttctgggtttttgtatgttttgttttacaaagtgcttaggaagtggggttcgtgtcttcctttgagtgcctagtccatatagacaaagcaagcctgtaattactcctagctaagaggtgtgctattttg

SEQ ID NO: 61765 - DNA, 600 bp, Chicken  19866894322916_2
gggctcattcacgtggcaacatgagaaacaatgcctgggttcctgagtaccagtccaagtcaagggaggtttttgcattagctgaggtgtttcttctgtggatgtttttgatattctttagtattcaccttgaattagggcatcagatccttctcttcttgattacaaataggttggttaaacgttgcccaaagcttccatgtctaccctgctttctaactgctaagcactaactatgccttggaagtctaccagcacaaagtctaatcctggtaccacaagaaactgcagaytggatckcactgattgtcttgttggcctggtayttcagggtctggagagtaggcagttccagaagtttcacaagaatgttgaagacagtgttagggggctgtataaatttgggaatgggcaagaattaatctaacaatatcaggagtactgataattatgtgcactgtgctttctgggtttttgtatgttttgttttacaaagtgcttaggaagtggggttcgtgtcttcctttgagtgcctagtccatatagacaaagcaagcctgtaattactcctagctaagaggtgtgctattttggttagcc

SEQ ID NO: 61766 - DNA, 600 bp, Chicken  19866894322916_3
aacaatgcctgggttcctgagtaccagtccaagtcaagggaggtttttgcattagctgaggtgtttcttctgtggatgtttttgatattctttagtattcaccttgaattagggcatcagatccttctcttcttgattacaaataggttggttaaacgttgcccaaagcttccatgtctaccctgctttctaactgctaagcactaactatgccttggaagtctaccagcacaaagtctaatcctggtaccacaagaaactgcagaytggatckcactgattgtcttgttggcctggtayttcagggtctggagagtaggcagttccagaagtttcacaagaatgttgaagacagtgttagggggctgtataaatttgggaatgggcaagaattaatctaacaatatcaggagtactgataattatgtgcactgtgctttctgggtttttgtatgttttgttttacaaagtgcttaggaagtggggttcgtgtcttcctttgagtgcctagtccatatagacaaagcaagcctgtaattactcctagctaagaggtgtgctattttggttagcctgtaccttwtgaatgaaaactgggtt

SEQ ID NO: 61767 - DNA, 600 bp, Chicken  19866894322916_4
tcttgttggcctggtayttcagggtctggagagtaggcagttccagaagtttcacaagaatgttgaagacagtgttagggggctgtataaatttgggaatgggcaagaattaatctaacaatatcaggagtactgataattatgtgcactgtgctttctgggtttttgtatgttttgttttacaaagtgcttaggaagtggggttcgtgtcttcctttgagtgcctagtccatatagacaaagcaagcctgtaattactcctagctaagaggtgtgctattttggttagcctgtaccttwtgaatgaaaactgggttcagatccttctggtgctgagtgcttattcttgcacttaatcgttcccattctgttctatttgttcagtgaagcacattaaggctttgtgaattttctaataaaacacctaattaaccaggccaaatttgtctctagcttcacaaatggaaaccaggagaaccccatgcatgtctttgaatttggaccttcaaatgcagtttgctatataagtcatcattttttcttgtactaatttcagatatttgataagctctttttatgggttacaagtttaaaaagaca

SEQ ID NO: 61768 - DNA, 600 bp, Chicken  19866894322917_1
cagaaaataaaatttacttcatcttcattcttttcatccgtgctgtccaacgctcattgcactgagaaagaaccaggcttccagttcaacacgtccttctctttgctgagctggaaaaccttctcctggggaacagtaaccttcagatctgatattctatagaagtacataaacattatcatctcttcttgctgactttttatttttgatctccaacctgagatactttaagaggactcaaactgcagagacgtttctaagaacaggaatccaaattttctgttgctgacccccatacartgtctaccaaaaaaatgaataatttaaaaatcttaattaccagtatcttcatatgcgtaatatgttaaagttactgccactcaaatttttaaagtagtgcctaatgacaggctcagaagtacacagcatttggacaacatccagtccagtggattgcagtgacaagcacaataaagtaaccacagtacgctccacgctggagcatcctatggataaaggacaagctaaatgacacacagaaatgccacatctcaagctctgcaggtcggtgcaatgccttggattcagtgtgcagcatta

SEQ ID NO: 61769 - DNA, 431 bp, Chicken  19866894322918_1
agagcaggcttaattcatctgtttatgtgagcacattatgaaactctcctattttctctgcagtcccgtgcttgtttttaagttatggcattttcgagccatagtttgccagaactttccaccttcacaatgcgtttctctacagagatccaacaccctggagatcctggtgcctgttcctggatgctgtggtgaggtcagaggtgtagacgctgccgcagtggacacagggagccatttatcacttacagaatcatttgggttgcaaaagacccttaagatcaccaagcccagccatcwcctaacactacccagaccaccaataggccatgttcctaagcattatgtccatacatcttttaaataactccagggatggggactccaccactccctgggcagccttttccaatgcctaaccactttttcca

SEQ ID NO: 61770 - DNA, 599 bp, Chicken  19866894322919_1
  misc_feature (1)..(85): n is any nucleotide
nnnnnnnnnnnnnnnnnnnnnnnnnnnnnnnnnnnnnnnnnnnnnnnnnnnnnnnnnnnnnnnnnnnnnnnnnnnnnnnnnnnnnaggaagaggagtcgcactcggatgacgtaagtggatttctgtagtgctgcctgaggtcagacactgcgctgcaaagctgagagagttgatgcaactcttagagctaatttttaatgttttaattgtattgcaaagtcagcttgtccgaaaatggtgttaaatgtggttgtttgcattctgagctcctcggtggacgtagtggtgcagatgttaakacttccagaacagcttgtccaagtgaaactgctttatggtatcagcacaaattgctcagtccagaggatggagcccaggtggtggctggtgctgcaggaggggacctctgcctgctgygtggcaggttggtctggctctgctgttgcttgtaaatgagatgggaaacyggggagcacattagtgttctggaaatgacatgcagagtcgtgcaaatggttggcctcgaatgctcctgcaatacaagttagtcatttggagaaaaatgactttcttgacaaacacttctagaaaactgggc

SEQ ID NO: 61771 - DNA, 600 bp, Chicken  19866894322919_2
gatttctgtagtgctgcctgaggtcagacactgcgctgcaaagctgagagagttgatgcaactcttagagctaatttttaatgttttaattgtattgcaaagtcagcttgtccgaaaatggtgttaaatgtggttgtttgcattctgagctcctcggtggacgtagtggtgcagatgttaakacttccagaacagcttgtccaagtgaaactgctttatggtatcagcacaaattgctcagtccagaggatggagcccaggtggtggctggtgctgcaggaggggacctctgcctgctgygtggcaggttggtctggctctgctgttgcttgtaaatgagatgggaaacyggggagcacattagtgttctggaaatgacatgcagagtcgtgcaaatggttggcctcgaatgctcctgcaatacaagttagtcatttggagaaaaatgactttcttgacaaacacttctagaaaactgggctggtctggctctccagagatgatcttgctccccccgacagacgcctgtctagcctgttctcccaatcctttgttattacagaggcagtgcagtcctgaggcaagccattcccgttcttg

SEQ ID NO: 61772 - DNA, 600 bp, Chicken  19866894322919_3
agttgatgcaactcttagagctaatttttaatgttttaattgtattgcaaagtcagcttgtccgaaaatggtgttaaatgtggttgtttgcattctgagctcctcggtggacgtagtggtgcagatgttaakacttccagaacagcttgtccaagtgaaactgctttatggtatcagcacaaattgctcagtccagaggatggagcccaggtggtggctggtgctgcaggaggggacctctgcctgctgygtggcaggttggtctggctctgctgttgcttgtaaatgagatgggaaacyggggagcacattagtgttctggaaatgacatgcagagtcgtgcaaatggttggcctcgaatgctcctgcaatacaagttagtcatttggagaaaaatgactttcttgacaaacacttctagaaaactgggctggtctggctctccagagatgatcttgctccccccgacagacgcctgtctagcctgttctcccaatcctttgttattacagaggcagtgcagtcctgaggcaagccattcccgttcttggctgtcctgccattatacaccagaattaacttgtatgtcaaatctttgca

SEQ ID NO: 61773 - DNA, 600 bp, Chicken  19866894322920_1
tgctgctcatcttcattattgcctatgacactcctgtcatagttcaaatagaataaaactgattttgggtggttttacttgcaactcatttaacagacgaatttgtggaagttcggcttatgtgtccatttgcataaatagatgagaaagggcagcccattgtaggaaagtctttaaaaaattgtatgtgtaatttctttcagtaaaaggcaatttaagaaaaagattgtgaacatgaggggaggatttttagctcaagtgaaaaagtagggatgatgatagttggatgacatacagtaygaagratgctttgcatacaatataacagaaagaataaatccaccagaaaagatgaacagagaatgaatacacatattctgaactttttcatactattttttttttctgaagtagatgtgttcaaatgtgtaactgaaacctggttctttgggattcttcctcagaatggagatgctctttcagcaacattcagtagtcatttatttaaaaaccaaaataatcaagttaagattaaggaaaactgttcacaggtaatgagagtcttgtgaggtttgctgccttccgggagccaagatccgg

SEQ ID NO: 61774 - DNA, 600 bp, Chicken  19866894322920_2
ctcatcttcattattgcctatgacactcctgtcatagttcaaatagaataaaactgattttgggtggttttacttgcaactcatttaacagacgaatttgtggaagttcggcttatgtgtccatttgcataaatagatgagaaagggcagcccattgtaggaaagtctttaaaaaattgtatgtgtaatttctttcagtaaaaggcaatttaagaaaaagattgtgaacatgaggggaggatttttagctcaagtgaaaaagtagggatgatgatagttggatgacatacagtaygaagratgctttgcatacaatataacagaaagaataaatccaccagaaaagatgaacagagaatgaatacacatattctgaactttttcatactattttttttttctgaagtagatgtgttcaaatgtgtaactgaaacctggttctttgggattcttcctcagaatggagatgctctttcagcaacattcagtagtcatttatttaaaaaccaaaataatcaagttaagattaaggaaaactgttcacaggtaatgagagtcttgtgaggtttgctgccttccgggagccaagatccgggatgt

SEQ ID NO: 61775 - DNA, 600 bp, Chicken  19866894322921_1
taatatttttccttatatccaatctagttctcctctgcttttgtttgaaactatttccccttgtcctatcacagcagaccctgcataaaagtctgccctcttccttctcatagctcccatttagatactgacaagccactctcaagccactctctgcagccttctcttctccgggctgatcagccctggctctttcagcctgtcctcacagtggagatgctccatttctgggatcatttttgtggacctcttttggacacgctccaacaggtcactgtctctcctgtactgaggaaactmatttccttaagaagatcattacctctgctctcttttttatgtgctcaggtttttttttctcatttgaccctagacttgcacaattcagtgaagggattttcagaagtgacttaggagtttatggcttgaataatctgaagactcttaatctctcagctctgaactgtgcgctgttcagggcatgtgtaccacatggattatagacatagtcccggtatgaggcagctgatgtataaatcaacactgtaccatctagccagctttgatgacaaaatagatgtctcatctcagctagaagag

SEQ ID NO: 61776 - DNA, 600 bp, Chicken  19866894322922_1
tttttattttttccaactacttttacacaactaacattcagaataggaatttgaaatagcctcaatatttattgagacacttacagaattatgaaatgaatgagggggtgagtgatgatgaaagacacatgccttcatgataaggcatgaagttctctagatatgaccagatatgaagtgagacagcagaagagcttttttattttctgaaatattctttcatacaacctgcagctagattatttcttgtattattcatggatcataataaaatgttaacctttgatctgccaaaagcaytgaaaagccttttcagccttcaaaaaggaaaaaaagagctacaacattcccacattgtgttaagattaatttgcatataacaatgaagcttatctaacaacttaccatcatttccttttcttcctactcctcccacctctttccacccccctctatgttctcaatagccaaacagttccaccctctaaccctcttcctttgccatattttgtcactcatcagatttctctgggcaatgatgcgactcaccagctcattaatagccactttctttgcttggttaggtccccatcagcttag

SEQ ID NO: 61777 - DNA, 561 bp, Chicken  19866894322922_2
agctcattaatagccactttctttgcttggttaggtccccatcagcttagtgagctgatagctaagtaagctgcaggaataaatgtccaggggagagaggttgtgagagagagaagcaagatgctttctcttagcaccacacagtcattatatctgttcagacttctcatgtaattttaccctaaggaactacaaagcaagcgctataatattactcaggctgtccacttcagattcaggtgaaaagaagtaacatactgtcatctttccaataagaaaacatagctatgaaaaaaggtytataatcctggcaatcaaaatgcatctcagaagaaaaaaagaaaatcctattacaccaatgatttttttttttctctcattaataattatcactctgagataaggggttaacctgaaggtactattatctgaatgctgaaaaatctaacatggtgacatactctcccaagcacacagatgactattcagcttcagctcctggcactgcatcagtcggtattccacttgatgggctccacccactcagtcaaaattccagtg

SEQ ID NO: 61778 - DNA, 600 bp, Chicken  19866894322925_1
gctaatgcctttagagtgatgtcaagttcttctccttgatcagcaagagtccatttacagcctgccacactactaatgtaggaaggattgatctccccatgtgctttattttgcctttataacactggtatatgccacgtagctcacagcccttctgtatggccaaatactgtttcatttcttcactgtttcagatttggctgctctgaggaagggaatatcatatgcaaatgcagtctcctttcgatttgcttgcttttcaggcagtttaggaacatcatacaattaaaatctcagcayagacctttggggaactctactggcaagccagtttcacttactcctgctctttattcctctcctttaacctgtgacatgctcccacttacacgaaggcagccagctcttgaggatctcctaatgagagagcatgaaagatgcatttggaaaatccaygtgcagtacatcgagctggatcacccttctctacrtgcctgtcagttccttcaaagagcttcgatgaatgtctgaaggatttcttcccaytctacatccatgactactagttcatagcctttaccacttttcccagtgcggaag

SEQ ID NO: 61779 - DNA, 600 bp, Chicken  19866894322925_2
gtatggccaaatactgtttcatttcttcactgtttcagatttggctgctctgaggaagggaatatcatatgcaaatgcagtctcctttcgatttgcttgcttttcaggcagtttaggaacatcatacaattaaaatctcagcayagacctttggggaactctactggcaagccagtttcacttactcctgctctttattcctctcctttaacctgtgacatgctcccacttacacgaaggcagccagctcttgaggatctcctaatgagagagcatgaaagatgcatttggaaaatccaygtgcagtacatcgagctggatcacccttctctacrtgcctgtcagttccttcaaagagcttcgatgaatgtctgaaggatttcttcccaytctacatccatgactactagttcatagcctttaccacttttcccagtgcggaagtcagactttctgctctgtgcttccccacattcccctggagttggttgtaaaacttggcatctcatttgccacctcctattcctttggcactgaggctaatttaagtgataggttacaagccacagcgagcagctcagcaatttcatacctgagccc

SEQ ID NO: 61780 - DNA, 600 bp, Chicken  19866894322925_3
cagatttggctgctctgaggaagggaatatcatatgcaaatgcagtctcctttcgatttgcttgcttttcaggcagtttaggaacatcatacaattaaaatctcagcayagacctttggggaactctactggcaagccagtttcacttactcctgctctttattcctctcctttaacctgtgacatgctcccacttacacgaaggcagccagctcttgaggatctcctaatgagagagcatgaaagatgcatttggaaaatccaygtgcagtacatcgagctggatcacccttctctacrtgcctgtcagttccttcaaagagcttcgatgaatgtctgaaggatttcttcccaytctacatccatgactactagttcatagcctttaccacttttcccagtgcggaagtcagactttctgctctgtgcttccccacattcccctggagttggttgtaaaacttggcatctcatttgccacctcctattcctttggcactgaggctaatttaagtgataggttacaagccacagcgagcagctcagcaatttcatacctgagcccctttacagtgcttgtgtgaataccatctggtcctg

SEQ ID NO: 61781 - DNA, 600 bp, Chicken  19866894322925_4
atttgcttgcttttcaggcagtttaggaacatcatacaattaaaatctcagcayagacctttggggaactctactggcaagccagtttcacttactcctgctctttattcctctcctttaacctgtgacatgctcccacttacacgaaggcagccagctcttgaggatctcctaatgagagagcatgaaagatgcatttggaaaatccaygtgcagtacatcgagctggatcacccttctctacrtgcctgtcagttccttcaaagagcttcgatgaatgtctgaaggatttcttcccaytctacatccatgactactagttcatagcctttaccacttttcccagtgcggaagtcagactttctgctctgtgcttccccacattcccctggagttggttgtaaaacttggcatctcatttgccacctcctattcctttggcactgaggctaatttaagtgataggttacaagccacagcgagcagctcagcaatttcatacctgagcccctttacagtgcttgtgtgaataccatctggtcctgtcattattcacttaatcaattcatcctaaaatcccctttgctgacacttcaatgt

SEQ ID NO: 61782 - DNA, 600 bp, Chicken  19866894322927_1
gtcccagcaaaggaatgtctccatactcaagtgcagagaactaacagattttctcttgtctccttgccttcctgagcacttctccacacctaggtcaccttttggttcctccaggtctgcagcaggtttcctggtgacatctccttagcaccgaaggagcaagcagaattgaagaggatccatgaaggctttgctttcttctgtcttcttttcccatgcgagcccaaacgaccagccttaagtaatacgatgtcctgatcgagaagaatacaaaaacagtttcttcaaggtgtccttcartcagctgggacagctcaatcagccatgcacgaaacaagcaagctacatcgcctgcctaggcttcccagcagtcccccatggctgggcttggaactgaggaactgaggaagaaaggagcttttataagagtttaaggagtcctgtgcagttgtctttcagtttggggttctttttccttgtaagttcaaaatagccttggagagaaaatgtcactcctcctcttgtacaaccttttccccatgacatccctcctgcaaccagccccttccagcagatggaaggaaaacatctacccaaacc

SEQ ID NO: 61783 - DNA, 600 bp, Chicken  19866894322931_1
ttcctgcttgcaattagttgtcccttaggaaatgtattgggggtgtgcagtacaaaaggtagaacagttttgttgaacaggctttccttgctgtgatatagctctgcttctaactaaactaatatctgctgagctatgaactgtatgcctgtaggtgagacattgcttaaatggagaatatagccaaatacacagcactgtaaaagaaagaactccatgactgttagtaacaaaactactgcatgtaatcacagtggagagaagaaactaagaagggggaggaacagaattaaaagcacrtctgactgcactcaacatctattacacaaatatggtttaatcaacactcttaccactacaggaagggtatggatgcctgtccctggtcacagtgctgagaagtgatcactgaaggcttctgtggggacagcatgctgctgtgctgggtggtaaaagcaacccctgccttctgaatgcagcctcatggtatcttgattaaaccaagcataccacttgarttattacaagaaaagcctatttctaccctgtgtgtgaacctctccatatcctagagggattgatttatgagcaatttaagag

SEQ ID NO: 61784 - DNA, 566 bp, Chicken  19866894322931_2
gactgttagtaacaaaactactgcatgtaatcacagtggagagaagaaactaagaagggggaggaacagaattaaaagcacrtctgactgcactcaacatctattacacaaatatggtttaatcaacactcttaccactacaggaagggtatggatgcctgtccctggtcacagtgctgagaagtgatcactgaaggcttctgtggggacagcatgctgctgtgctgggtggtaaaagcaacccctgccttctgaatgcagcctcatggtatcttgattaaaccaagcataccacttgarttattacaagaaaagcctatttctaccctgtgtgtgaacctctccatatcctagagggattgatttatgagcaatttaagagtgtatcttgatatttattagtgttgatgtaagaatcaatggctagttttccacagagtcttgtattttggccatagtatgtgtatgtagtaatgttgtagtatagtatgtagtaatgctgtctggggaaaccaccagagagcagttggactgaccgctcttcatcctggctggtaggtcagctc

SEQ ID NO: 61785 - DNA, 599 bp, Chicken  19866894322940_1
  misc_feature (1)..(137): n is any nucleotide
nnnnnnnnnnnnnnnnnnnnnnnnnnnnnnnnnnnnnnnnnnnnnnnnnnnnnnnnnnnnnnnnnnnnnnnnnnnnnnnnnnnnnnnnnnnnnnnnnnnnnnnnnnnnnnnnnnnnnnnnnnnnnnnnnnnnnnnnntatccataagatcacacaacttcctaagcttttacttaatctactttgaaaggatgtgaaactttataatacaatgcagtcttttgagaagtgctgtgagtgggggatgagtgtgctgtacttggggcagatgaagagacctgttgtttatcggtccatcacrccagttgcatacatccttcacctgatgaagcaattccttatttttgcatcaagcactgattgtttgtgtgcgctctgtgtttaatgcagaggacgttgctcattcctgtggcatttacaattagtgctaatctcaggcggtgtagtcagacaaatatgtggtatctaaatgaaaagctgaaggagtgttgattttgttaaacctttaggcccacaagatctcgggcccagccctgtgctcatctcctcatgattcttgggagcgatttgcctgctgcaagcagtgtggtgccatggggc

SEQ ID NO: 61786 - DNA, 600 bp, Chicken  19866894322940_2
gattttgttaaacctttaggcccacaagatctcgggcccagccctgtgctcatctcctcatgattcttgggagcgatttgcctgctgcaagcagtgtggtgccatggggcagctgcgacccaacgtccccatgcttgttccttcctgcggtgagggctgagcccatgtcccaccctgccaggggcacactgtactgtcccagctctaccatgatgcatagctgggatccaaggactggaggggcccgtcaatgggcgagactgaggttcttggtcctcgcaggactcctcattttgataygctgctgagggcagagagaagcagtgctygrgctgtgcttgggatagaaatgcattcctttggcagagcaagctttggtgattcattattggagcctccgtggatctgaaacaatttttctgcacatttctcaatccctgttctgctcatcctgcagataactaggtgacaggcaaaggctcttctgagaaaagaagatgttagaagtgagcaacggcattgtagcagcagctggcagagctgctgcagataagggcttctgagtatttctattactctgttgtttgagtgcttacgggt

SEQ ID NO: 61787 - DNA, 600 bp, Chicken  19866894322940_3
tctcgggcccagccctgtgctcatctcctcatgattcttgggagcgatttgcctgctgcaagcagtgtggtgccatggggcagctgcgacccaacgtccccatgcttgttccttcctgcggtgagggctgagcccatgtcccaccctgccaggggcacactgtactgtcccagctctaccatgatgcatagctgggatccaaggactggaggggcccgtcaatgggcgagactgaggttcttggtcctcgcaggactcctcattttgataygctgctgagggcagagagaagcagtgctygrgctgtgcttgggatagaaatgcattcctttggcagagcaagctttggtgattcattattggagcctccgtggatctgaaacaatttttctgcacatttctcaatccctgttctgctcatcctgcagataactaggtgacaggcaaaggctcttctgagaaaagaagatgttagaagtgagcaacggcattgtagcagcagctggcagagctgctgcagataagggcttctgagtatttctattactctgttgtttgagtgcttacgggtcggccattaaaattagttttggagctaaa

SEQ ID NO: 61788 - DNA, 600 bp, Chicken  19866894322940_4
tcgggcccagccctgtgctcatctcctcatgattcttgggagcgatttgcctgctgcaagcagtgtggtgccatggggcagctgcgacccaacgtccccatgcttgttccttcctgcggtgagggctgagcccatgtcccaccctgccaggggcacactgtactgtcccagctctaccatgatgcatagctgggatccaaggactggaggggcccgtcaatgggcgagactgaggttcttggtcctcgcaggactcctcattttgataygctgctgagggcagagagaagcagtgctygrgctgtgcttgggatagaaatgcattcctttggcagagcaagctttggtgattcattattggagcctccgtggatctgaaacaatttttctgcacatttctcaatccctgttctgctcatcctgcagataactaggtgacaggcaaaggctcttctgagaaaagaagatgttagaagtgagcaacggcattgtagcagcagctggcagagctgctgcagataagggcttctgagtatttctattactctgttgtttgagtgcttacgggtcggccattaaaattagttttggagctaaaaa

SEQ ID NO: 61789 - DNA, 600 bp, Chicken  19866894322946_1
ttctgtaaagttaaacagagttttattttggactacagttccaaagtgtagttttccaataaatggaatgtcatgttgaccatttcattacattaaaataatttaatacactgtactgtagaaggtataaagagactcatttgccattcacttgtattaatcataagttaagaatgaccaaatgaagccaataaaaacttggtgaaaagaaaggtaattcatctgcaaggttttacttcatcagagatttctctttgacagtttggtgatacagatagtctatgatgtggttgtccacartattgttgcatagaaagcaataatataaaartaggctggatatatatgtgttcctgaaaggttcttgctaatgcagatagaaaatctctaggaacatttaccaaagatgtaagtggtaaagaatcagctggaacctcagctgacatgcagaagygtatgttcagtaaaatcaagtgatcttgatcagattttgtggttgaggatcttgcttggaatatcatttccaattttatttctttaaacagaactgatgcattaacttcttgtattcatgaaattatatgttaattctgacattac

SEQ ID NO: 61790 - DNA, 600 bp, Chicken  19866894322946_2
actacagttccaaagtgtagttttccaataaatggaatgtcatgttgaccatttcattacattaaaataatttaatacactgtactgtagaaggtataaagagactcatttgccattcacttgtattaatcataagttaagaatgaccaaatgaagccaataaaaacttggtgaaaagaaaggtaattcatctgcaaggttttacttcatcagagatttctctttgacagtttggtgatacagatagtctatgatgtggttgtccacartattgttgcatagaaagcaataatataaaartaggctggatatatatgtgttcctgaaaggttcttgctaatgcagatagaaaatctctaggaacatttaccaaagatgtaagtggtaaagaatcagctggaacctcagctgacatgcagaagygtatgttcagtaaaatcaagtgatcttgatcagattttgtggttgaggatcttgcttggaatatcatttccaattttatttctttaaacagaactgatgcattaacttcttgtattcatgaaattatatgttaattctgacattacttctataaatgggggagaagtagccaatgta

SEQ ID NO: 61791 - DNA, 600 bp, Chicken  19866894322946_3
tattaatcataagttaagaatgaccaaatgaagccaataaaaacttggtgaaaagaaaggtaattcatctgcaaggttttacttcatcagagatttctctttgacagtttggtgatacagatagtctatgatgtggttgtccacartattgttgcatagaaagcaataatataaaartaggctggatatatatgtgttcctgaaaggttcttgctaatgcagatagaaaatctctaggaacatttaccaaagatgtaagtggtaaagaatcagctggaacctcagctgacatgcagaagygtatgttcagtaaaatcaagtgatcttgatcagattttgtggttgaggatcttgcttggaatatcatttccaattttatttctttaaacagaactgatgcattaacttcttgtattcatgaaattatatgttaattctgacattacttctataaatgggggagaagtagccaatgtaagtgttctactgacatatttgtgttacctgcattatgttccttctaaaacactggtcattgtttcttgacaactaatactgcaccatcctatcttgaagtgtccaytgatgtgaaaaagtgaa

SEQ ID NO: 61792 - DNA, 600 bp, Chicken  19866894322946_4
agctgacatgcagaagygtatgttcagtaaaatcaagtgatcttgatcagattttgtggttgaggatcttgcttggaatatcatttccaattttatttctttaaacagaactgatgcattaacttcttgtattcatgaaattatatgttaattctgacattacttctataaatgggggagaagtagccaatgtaagtgttctactgacatatttgtgttacctgcattatgttccttctaaaacactggtcattgtttcttgacaactaatactgcaccatcctatcttgaagtgtccaytgatgtgaaaaagtgaaacactgctcataccctacaactcttttgatgagcttgagttgaatacctggatgcrgtatatgtcttctggatagttacctatgtgtgattctggtttgaaatggagaataaattggaattaacccctgtgtaaaaaaacctggtttgctgtcctgctccttttctcaaagaggtcttaattctatactatgtaaaaatcaaactgagtttsaaaacttgtctgctagtctttacttaaaaggagtggctggttccattgaattagtttcctaggagctcttg

SEQ ID NO: 61793 - DNA, 600 bp, Chicken  19866894322946_5
tggaatatcatttccaattttatttctttaaacagaactgatgcattaacttcttgtattcatgaaattatatgttaattctgacattacttctataaatgggggagaagtagccaatgtaagtgttctactgacatatttgtgttacctgcattatgttccttctaaaacactggtcattgtttcttgacaactaatactgcaccatcctatcttgaagtgtccaytgatgtgaaaaagtgaaacactgctcataccctacaactcttttgatgagcttgagttgaatacctggatgcrgtatatgtcttctggatagttacctatgtgtgattctggtttgaaatggagaataaattggaattaacccctgtgtaaaaaaacctggtttgctgtcctgctccttttctcaaagaggtcttaattctatactatgtaaaaatcaaactgagtttsaaaacttgtctgctagtctttacttaaaaggagtggctggttccattgaattagtttcctaggagctcttgagtgtggatttcaggatcagaatatttttctggtatgtccaggtgtaaaagatgattaatgttttgttgaata

SEQ ID NO: 61794 - DNA, 530 bp, Chicken  19866894322946_6
tgttccttctaaaacactggtcattgtttcttgacaactaatactgcaccatcctatcttgaagtgtccaytgatgtgaaaaagtgaaacactgctcataccctacaactcttttgatgagcttgagttgaatacctggatgcrgtatatgtcttctggatagttacctatgtgtgattctggtttgaaatggagaataaattggaattaacccctgtgtaaaaaaacctggtttgctgtcctgctccttttctcaaagaggtcttaattctatactatgtaaaaatcaaactgagtttsaaaacttgtctgctagtctttacttaaaaggagtggctggttccattgaattagtttcctaggagctcttgagtgtggatttcaggatcagaatatttttctggtatgtccaggtgtaaaagatgattaatgttttgttgaataatggatgatcttgctgcctgccttgaaagggaaatttttgaaaatctgtttcattctgctttatctcagcatttgcatacaacaaa

SEQ ID NO: 61795 - DNA, 599 bp, Chicken  19866894322947_1
  misc_feature (1)..(150): n is any nucleotide
nnnnnnnnnnnnnnnnnnnnnnnnnnnnnnnnnnnnnnnnnnnnnnnnnnnnnnnnnnnnnnnnnnnnnnnnnnnnnnnnnnnnnnnnnnnnnnnnnnnnnnnnnnnnnnnnnnnnnnnnnnnnnnnnnnnnnnnnnnnnnnnnnnnnnncgaagtatcatcagcacacggaagataccacatccctactttactgatggctagctctctctttggcctgtgcacatcttcatgcagatgatcttctgcacaaataagcaactcaccatagggcattactatacttaaagctcatacacracagttgcttttcctcactccgtcaaggtctgaagacaaattaggagcataccgtggtatcagagaaaggtgagattattacatttgaaacagacacaccatgaactacagcaaaactacctaaatcctactgacctcctatttttctagtcagtcaaattacacccttggccaagagcctgaaggactcactgctttccccatacgcaaaacctgtttttcacagtcataaaccagaaagtaaatgaagtactgactgcactgccaattatcaacgacagggacatactaattttttc

SEQ ID NO: 61796 - DNA, 600 bp, Chicken  19866894322947_2
gagcataccgtggtatcagagaaaggtgagattattacatttgaaacagacacaccatgaactacagcaaaactacctaaatcctactgacctcctatttttctagtcagtcaaattacacccttggccaagagcctgaaggactcactgctttccccatacgcaaaacctgtttttcacagtcataaaccagaaagtaaatgaagtactgactgcactgccaattatcaacgacagggacatactaattttttcaaatctataaaagataatgtcaatattccttagctgtagataagygaaacyaaaaaggatttaacccccacatgaagaaataaaaaaacatttcttytccttcacaaaaaactctagcaagcttaaagtaatacaactttcagtcaactcatttatttctggggacaggaatttaacttctatctaaaggtataagattttgactttagttgcagaagtactcaccagcaaaaaaaataccccacaacaaaaaagccacttaagagatgcagtagcagagcttcagatacttttacacaagtaacctgcttatgctgatcactgacatttagaaaatactgaaat

SEQ ID NO: 61797 - DNA, 600 bp, Chicken  19866894322947_3
accgtggtatcagagaaaggtgagattattacatttgaaacagacacaccatgaactacagcaaaactacctaaatcctactgacctcctatttttctagtcagtcaaattacacccttggccaagagcctgaaggactcactgctttccccatacgcaaaacctgtttttcacagtcataaaccagaaagtaaatgaagtactgactgcactgccaattatcaacgacagggacatactaattttttcaaatctataaaagataatgtcaatattccttagctgtagataagygaaacyaaaaaggatttaacccccacatgaagaaataaaaaaacatttcttytccttcacaaaaaactctagcaagcttaaagtaatacaactttcagtcaactcatttatttctggggacaggaatttaacttctatctaaaggtataagattttgactttagttgcagaagtactcaccagcaaaaaaaataccccacaacaaaaaagccacttaagagatgcagtagcagagcttcagatacttttacacaagtaacctgcttatgctgatcactgacatttagaaaatactgaaataccatt

SEQ ID NO: 61798 - DNA, 600 bp, Chicken  19866894322947_4
caccatgaactacagcaaaactacctaaatcctactgacctcctatttttctagtcagtcaaattacacccttggccaagagcctgaaggactcactgctttccccatacgcaaaacctgtttttcacagtcataaaccagaaagtaaatgaagtactgactgcactgccaattatcaacgacagggacatactaattttttcaaatctataaaagataatgtcaatattccttagctgtagataagygaaacyaaaaaggatttaacccccacatgaagaaataaaaaaacatttcttytccttcacaaaaaactctagcaagcttaaagtaatacaactttcagtcaactcatttatttctggggacaggaatttaacttctatctaaaggtataagattttgactttagttgcagaagtactcaccagcaaaaaaaataccccacaacaaaaaagccacttaagagatgcagtagcagagcttcagatacttttacacaagtaacctgcttatgctgatcactgacatttagaaaatactgaaataccattaccgttttattacttaggaaaactgcatcagtgtttccatttttac

SEQ ID NO: 61799 - DNA, 600 bp, Chicken  19866894322953_1
ttttcagaacaataaaaaccaaacagttaactattgagactgctggtttatttttcaatagaaggaattctgttacacaagaaagtgacattataacttcattggagtattcaaatcccaattttgaacatctgaagctgaatttttcaggtgatctctttcttgggatcaagataacattagaagtgttgttttcagttagcttggcctcagacttaaaataatttctgatgcttggacagtaatagatctgtgtcagatggaatacctgagaatcactgtgataatgaaccaataaaygtaactcagtagttgagtcaggtggattgttttggtaactgcaatattcattgttctgaactcttttaacaactgacctttataacagaacaggaataatacccatgtgaaacagtaaggaaacaaccagcacagattacactaatttcattaacagaaacaagtgacagattcaaattatcgctacttgrtacctgaatttaaattaaagaaaaactaaaccagcaacacatcaagaagaattccattatttacctgtctgtctacaaagacaaatgaaaatcctaaaagcacaaacag

SEQ ID NO: 61800 - DNA, 600 bp, Chicken  19866894322953_2
ttttcagttagcttggcctcagacttaaaataatttctgatgcttggacagtaatagatctgtgtcagatggaatacctgagaatcactgtgataatgaaccaataaaygtaactcagtagttgagtcaggtggattgttttggtaactgcaatattcattgttctgaactcttttaacaactgacctttataacagaacaggaataatacccatgtgaaacagtaaggaaacaaccagcacagattacactaatttcattaacagaaacaagtgacagattcaaattatcgctacttgrtacctgaatttaaattaaagaaaaactaaaccagcaacacatcaagaagaattccattatttacctgtctgtctacaaagacaaatgaaaatcctaaaagcacaaacagaaacaaagccaaagatggtgtagtgggagcagtaacacaagcatgttccactcacgcccagttcactsggctttacacccagaagtggagaaacatgacttagtcattgaatttgggcaacccttcaacatagacttctttaaagacaaaaatctcacgaccatagtcaggcctaccataagctaaggagg

SEQ ID NO: 61801 - DNA, 600 bp, Chicken  19866894322953_3
acaactgacctttataacagaacaggaataatacccatgtgaaacagtaaggaaacaaccagcacagattacactaatttcattaacagaaacaagtgacagattcaaattatcgctacttgrtacctgaatttaaattaaagaaaaactaaaccagcaacacatcaagaagaattccattatttacctgtctgtctacaaagacaaatgaaaatcctaaaagcacaaacagaaacaaagccaaagatggtgtagtgggagcagtaacacaagcatgttccactcacgcccagttcactsggctttacacccagaagtggagaaacatgacttagtcattgaatttgggcaacccttcaacatagacttctttaaagacaaaaatctcacgaccatagtcaggcctaccataagctaaggaggtaagccactgaaatttcctgctatgatcttcttccattactattcatttgagcacttgggatgcattacttaactgccagcacttgaaagtcagtacattttaaaagagcatttaattctctgagaatattctgcattgtaacatgaagatatggaactcttctggtagtgtcgcaa

SEQ ID NO: 61802 - DNA, 599 bp, Chicken  19866894322960_1
  misc_feature (1)..(20): n is any nucleotide
nnnnnnnnnnnnnnnnnnnnattacacaagtatctaattatttcaaaataagatctcattacacttcgggaagtgagagttgttcccagacctaatgaagtccacaacaaaaggaatgtcacaaaacaggatgttcagatccttttcaggtattattgcatctgaaaattctaatgcctctatgtttactaacactagatatcaaaaaggcaagtccaaagcaaaaatccaaatatcccaaaagactcagtactccccacatataaggagctacttattcacaaagctagaagagcaaaytgagatacaaatttaaaattcaaagctggcaaacttttaattcagacttagtatactgtctgttctatgattatactgaatttacaattaagttacagaaaactatgtaaagaatcttcctccaagaaaaagtaggaaaagttatctgcttacatttgcattttattgagtagactatgctttatagtatatctgcaccagatgtcctttttaaattccaattattatctttaaaaatacagtcagaagcagatatttcttgctgcaaacagattatcagaacagatacagcacactag

SEQ ID NO: 61803 - DNA, 600 bp, Chicken  19866894322961_1
gcatttctgctggagggagctacaaaataaaatttaaagcaagctgactattataaactgaagggccctccagaatattttttcttttagtttaaaatggaggtaaaaaaaacctgctgctagatatacctgatacattcaaagtagttcactaaaattagccttggcatttcacttattaaagctacatgcaaccactagactagactgcccagagccacatccaacctggccttaaatgcctccagggatggggcatccacaacctccttgggcaacctgttccagtgcatcaccacyctctgtgtgaaaaacttcctcctaatatcctaaacctcccctgtctcagtttaaaaccattcccccttgtcctatcactatccaccctagtaaacagccgttccccctcgtgtttatacactcccttgtattggagagtattggaaggccacaatgaggtctccccgaaatcttctcttttccaagctaaacaagcccagttccctcaaccattcctcataggagaggtgctccagccgtctgatcatcttagtggtccacctctggacccactccaagatcttcatgtccttgtgctgg

SEQ ID NO: 61804 - DNA, 590 bp, Chicken  19866894322962_1
caattaaatgtctttcctagtaaaatgaggaatatatggctttcttacatgaaaaaatatcccagaaaacctgctttttgaaagacagggagaatttttccatagagatgaccaaaaaatgactgacttgtaagaagaactggcttcagtagtttaaagagactaagaggatctagtccaggaaaaaagaagaaaaaacatcttgctaaggaagatcaacaagtcctatagcttgtgctttctgaaccattagaaattctactgaacgacatgctaattttgacagctgttgaaaacagstgaaccagaacaggaggttctctactggcacaaagttggatagaaatgacagagtagattctcccctgttgagaggcagcagaaagaatgcaaggaaaatcaagctaataaagagctctaaagtttgctgggcctacacctggcaaaagaagccaacacagtcatttgtttgggccatctgctcttggacagataaaaagagctcatcagaaatgagtaccagaaaattattttgcaagtgattttggctcctctaagtatgctaaaagcaaagactcttaagaaaaatt

SEQ ID NO: 61805 - DNA, 600 bp, Chicken  19866894322967_1
ggtgcaggttcatatcctgtacggatttacctatcattggctgtcctacagttggaaaactaggtgtctacatacataacaaacacacagtgtactgtcaacagtgctgaagggcgcaggactcgaaagcctgaagatatttttcaaagtccttacagtgaatctggcaagactgcttagcacagtagcgcagatttgaacatccacatggtggagctaacagcatgggacagttccactttggcaatagttgtgaaacagccctatctgcccctgtctgcccacaggcactacaggtgwcaaggcagcagggacacaaaatgtcatgaaatcatagaatggcttgggttggaaggaacatyaaggatcatccagttccaaccaacctccctgccacgggcagtgttgcctgttgtcacaaatcaatagcaccctgacgtgacattttttcagtcaaggttttcttatcagtgaaatgagttrtttcctccacctgcagaatgcataacattggctcatgcactggtttccaaagcatgcaaataccagtggcagtgaacactgtaaaatggattgcttcccctgcaaatttatcatgtt

SEQ ID NO: 61806 - DNA, 600 bp, Chicken  19866894322967_2
ggtgtctacatacataacaaacacacagtgtactgtcaacagtgctgaagggcgcaggactcgaaagcctgaagatatttttcaaagtccttacagtgaatctggcaagactgcttagcacagtagcgcagatttgaacatccacatggtggagctaacagcatgggacagttccactttggcaatagttgtgaaacagccctatctgcccctgtctgcccacaggcactacaggtgwcaaggcagcagggacacaaaatgtcatgaaatcatagaatggcttgggttggaaggaacatyaaggatcatccagttccaaccaacctccctgccacgggcagtgttgcctgttgtcacaaatcaatagcaccctgacgtgacattttttcagtcaaggttttcttatcagtgaaatgagttrtttcctccacctgcagaatgcataacattggctcatgcactggtttccaaagcatgcaaataccagtggcagtgaacactgtaaaatggattgcttcccctgcaaatttatcatgttccatgctgctatcagaccatgattcaattcttacacttggaataagtacaggaatacttcat

SEQ ID NO: 61807 - DNA, 600 bp, Chicken  19866894322967_3
agtagcgcagatttgaacatccacatggtggagctaacagcatgggacagttccactttggcaatagttgtgaaacagccctatctgcccctgtctgcccacaggcactacaggtgwcaaggcagcagggacacaaaatgtcatgaaatcatagaatggcttgggttggaaggaacatyaaggatcatccagttccaaccaacctccctgccacgggcagtgttgcctgttgtcacaaatcaatagcaccctgacgtgacattttttcagtcaaggttttcttatcagtgaaatgagttrtttcctccacctgcagaatgcataacattggctcatgcactggtttccaaagcatgcaaataccagtggcagtgaacactgtaaaatggattgcttcccctgcaaatttatcatgttccatgctgctatcagaccatgattcaattcttacacttggaataagtacaggaatacttcatatgttggctttgatgtgttttgttttttttttaaagaagatccatgcaatgctgactttcggaagcttgaaaagctggataaaattgttcccatacactgagcgagcacaaccatgtcgct

SEQ ID NO: 61808 - DNA, 600 bp, Chicken  19866894322970_1
actgtattaaaactctcatcagtgactgtagagttcctatagggctgaatccaaagtaatttttgtttactgagaagaaatattttactgtactcatggatacaggaaataactcgatttcaactacatctgctacctctcctcatttccaatttcattttgactattttgtatccttttgcaatgactgctccatcaggctcaactttgagaattgtgcactgtgtttttcagggtggcagatctccctttttctttttagctaggaagaccattaagaaactgctttaaccaatggtygcttgaaccttttcctctttttttttaactgctatttacaataagcctctccttttctctcaatattattgttgccttctggattgctgcctaacagtcagacattaaaaaagcaaaagggtatctggcattgctaccaaggagaaagcaccccctgggaatgaaaacagggctgctgcatctgctgaattctaatggaaatgaatttaatttagttagaggataggcaatggggctttttagtgccagaggccttctaaagtgtgtaagtgtttataataaatcctcaaaaactatttt

SEQ ID NO: 61809 - DNA, 600 bp, Chicken  19866894322970_2
tcagtgactgtagagttcctatagggctgaatccaaagtaatttttgtttactgagaagaaatattttactgtactcatggatacaggaaataactcgatttcaactacatctgctacctctcctcatttccaatttcattttgactattttgtatccttttgcaatgactgctccatcaggctcaactttgagaattgtgcactgtgtttttcagggtggcagatctccctttttctttttagctaggaagaccattaagaaactgctttaaccaatggtygcttgaaccttttcctcyttttttttaactgctatttacaataagcctctccttttctctcaatattattgttgccttctggattgctgcctaacagtcagacattaaaaaagcaaaagggtatctggcattgctaccaaggagaaagcaccccctgggaatgaaaacagggctgctgcatctgctgaattctaatggaaatgaatttaatttagttagaggataggcaatggggctttttagtgccagaggccttctaaagtgtgtaagtgtttataataaatcctcaaaaactattttaaatttmattcatctttg

SEQ ID NO: 61810 - DNA, 600 bp, Chicken  19866894322970_3; identical to SEQ ID NO: 61809

SEQ ID NO: 61811 - DNA, 600 bp, Chicken  19866894322970_4; identical to SEQ ID NO: 61809

SEQ ID NO: 61812 - DNA, 600 bp, Chicken  19866894322970_5
ccttttcctctttttttttaactgctatttacaataagcctctccttttctctcaatattattgttgccttctggattgctgcctaacagtcagacattaaaaaagcaaaagggtatctggcattgctaccaaggagaaagcaccccctgggaatgaaaacagggctgctgcatctgctgaattctaatggaaatgaatttaatttagttagaggataggcaatggggctttttagtgccagaggccttctaaagtgtgtaagtgtttataataaatcctcaaaaactattttaaatttmattcatctttgtagctttttgattttgtatctttgttataacctggtgtatagtggagccataatacagtcctttcaccatgcaattttttttttcctccaatgtggctcattcagcacaacctggctaacagcactatgagaaactgcctggcagaggtagaaacctgcttttgttggtagtgctaaatacactgcctggaaagctaaggcttgcaagtgtcaaacctgtaacagtatttaagatactatatccaaaacttccttaccccagagaagatgataaaatgactttctccat

SEQ ID NO: 61813 - DNA, 600 bp, Chicken  19866894322970_6
aactgcagttgcaatgactctgaaatgcattgtgatgtggcttaaaagtgttaagaaaccactatacaactaacttgagtcagaagccctcagaaacgcttatttctttggctttcagttcagttgccatatgctttttttttttcttttttttctttttttcttttttttttgcatatgggtgtgtgttccagaagaaattagctcagaccaagcactataactatgtactatgaccaatacagccaagttaaagggaaaatgtctttcttttggagattggacagacattatttcctrcatcaaaaggattatattaactgcaactaattctgagtaacgtaggcattatactttgttactaatctatgaagattcatttaggcaagactaatctgggaataccttttctaatacatctccttcatacatacagtacctatcttccatgttctagagtattctgaattcagaaagttagcaagaattttgtgtctctattcccaagggcagattctatgtatcctgggggagtgtgaaattactgttgcacttcccaagaacaatttgtgtgtgcatgaaaagaccaccactacgttt

SEQ ID NO: 61814 - DNA, 600 bp, Chicken  19866894322976_1
atgaacccatctagtattgagttattttagtggattttgtgctgctggtgccaggaggccctttctggtagatacagtcctggagcaaatcggcagtctcaagaatttgggatcaatttgctggtgttctgaagtcttgtgagctacaaacagcgtgataatttgtgttacgttcaattcattgcagagctgcacagcacatgatgaagtcaacacactgctgctttttgttttataatatgcagcagtatcccagggttgtagggaggacaagaagaagactaagtaaagacaagagcktcctctggaatcatccagttgaacaggtttattggagacaacagatgctgatttagcacctgctcgtgtaagacttaaaatacagatattacactggctggtcttctgagcccacgtggggaaggatagcaggatgccatttttttgtattcttcctttttgttgcattttctgagacactgatgggcccgttgtgcagtgatgggcagttcccagctggccgtgtcagggaagctgcttgctgtggccatgctgctgacgttgcctggcacgagtggctgccaggtgagtggatgttga

SEQ ID NO: 61815 - DNA, 600 bp, Chicken  19866894322982_1
tttcactggatttatcaatgatggtcttaagtgcaggaatcattacttcacatccttccaaaccaaatctcttctcagaggaccacttgcgagcaaggaagtcttcaaatcttcaccaaagaaaaaaaaaaaaagaaaaacaaaaaaaacaagaaatagtatttgcattacaaaaatgtaggaaatacttactgttaaaatcttttagcaaataaaattacattaccttgttttaaaacatctatgaatacatgcttataggcctccagcctacaagtcacactgtggggaaaggggtcragagaggaagacaggacaaaattaagtctccttcctcctccatctgagaagtatttaccctgactttgaaacaattcagataggcagaagagtcttcatcttgggcaaaattcaagttaaacgctgctccttcccatgtataacccttcctagaaaagaattctactctatggattgaagaagatagagaatcttattttctggagataacaattaaatgctcaaagaaaacagcagcagaaagcacgcctatttcaatagcagagctccacaaactgtctgatgtaatggctggtaaca

SEQ ID NO: 61816 - DNA, 600 bp, Chicken  19866894322982_2
ataacgctgccataattcattaagatatggcttattgctcacttaaaacgttgacatgtacatccttaaaatgaaatttttaagtcttcgaatagagaagcttaatcaaaaaacatgcctttaaatattgctaacttttgtgtttatcaagggatatgcaaactgttgcaaaacataacagctagcataaatctcatgcctgggaagagaatctaattcagaccctggaaatacagcatttctatacaaacagtcacaacgggagcaatcaatgagctgcttccagacatgctttcatayactgcacagaacaaaactcttgctgccaggtcatgcaaccatgcagcacatttcagtgtacctcaaaaggcagagggcaaaaactgggcttgaaataacattatgcccttcaaatccagtctcatcttgacacagctttccaaagagactgttagtatcccaccggcttcccatgtcaatgtacacccagcagtcacagagaaatttcccagcaccactccagcatacctcattgagcgcaccaggcgtgccaacaaagtccttttttcctcatttgtaaacttcattacacctggcgtc

SEQ ID NO: 61817 - DNA, 600 bp, Chicken  19866894322982_3
aaatatatccagtctttttaaaatgtcagctaaagtaataaagacaatgaaaaggcaactatgaagcctcatgcaagtaatctgatagctaccaaggatggaaatccaaaaacaaatgcaagcaaattttgagctccaaagcaaacacagtagacactgtgtttgtgcattagataagctgctataacagtgggtgaaatgcacaatccaatgcattctcttacacttcagcaaattaaagcatagagttcctatatgctccgtatttatttttaatttatttattttgcttactcacakttcagttctgtacttcacccttttaaaccacaccctcacccctagccctatctactgcaatggatttcattacygtgcaacagaaatctctacaattgcagcactacaaaatcctgaaaaaagcacagtcaagaacactccatgtctactaccttagtagtttacaaattcactactagttctacttactggtaattccctctacatacatttatttaaattatttattatctttgatgacttcacatggcatagctgtattatttgtcagagaacaaaactcaaagaggactgtgggaa

SEQ ID NO: 61818 - DNA, 600 bp, Chicken  19866894322982_4
aagtaatctgatagctaccaaggatggaaatccaaaaacaaatgcaagcaaattttgagctccaaagcaaacacagtagacactgtgtttgtgcattagataagctgctataacagtgggtgaaatgcacaatccaatgcattctcttacacttcagcaaattaaagcatagagttcctatatgctccgtatttatttttaatttatttattttgcttactcacakttcagttctgtacttcacccttttaaaccacaccctcacccctagccctatctactgcaatggatttcattacygtgcaacagaaatctctacaattgcagcactacaaaatcctgaaaaaagcacagtcaagaacactccatgtctactaccttagtagtttacaaattcactactagttctacttactggtaattccctctacatacatttatttaaattatttattatctttgatgacttcacatggcatagctgtattatttgtcagagaacaaaactcaaagaggactgtgggaatagaagcaacaatcatcaccatctacaaactacagctggactttcatcaatttggtacccaatcctcttatttt

SEQ ID NO: 61819 - DNA, 569 bp, Chicken  19866894322983_1
acctctatgtagacactcaagtttctctgtctttacctgtgagatgagtcttacctctcatctcacatttcatttaggtcttgttatagatcgagacaattgatccacatttcatctggagggaacttaaataactttatcttatgtagctaaaactaagttaaatgaatcacattctaaaaaattacaagggttaaaataactctgttagttttctgtcgatattttgttctgtcaagcaagcgagtgagaaaggaaggcagaaaaggaggaaggaaggaataaaaggaagaaagagaraaagagaaagaaagagagaaaaaaagataagagtaaaagtaagaaaaataaaggacagtgagtgttaagaaacagacttctgaatgtgccaaacatctacacatacacttgtgcacgtgtatgcacaaataaatatgtattgagtgtttgaagccatcttaaatatatggaagcatttagtatttagaaacagaaataaacgataccaaatcactcaggatatgtgaaagcattgaccctcataggtgtcctgattctattcaattatt

SEQ ID NO: 61820 - DNA, 600 bp, Chicken  19866894322986_1
atgcagattttttagaatactagccatgcttttggacaaatcctttcttctgttacaaaatgcctaggtgagctgattattggaaccatacttgggctgaagatgcataatactcttttcttgaagtcagtttgaagcacaatacctgcaaataatatttcttatctgataataataaatgaaatagtttcttatctgatctgcttattaccaaacactggatgatctgaggacacgatagtgtagatttcaggtcatgtaatcagaaggcacctcagcatttcctttgtggggtggagrggacatcttgcagttccctaactttctgcactttttgcaactttgtataatcactttgtatgtaggttgcttcagaagtaatgcctcctatttatttccatggaagctacaacagatacaaagagcacaatagcgctttttgatagaacaaattctcagctacagaacactrtttttcagcatagtcaccatcattagctatgcatttttgccagatatgaacaagagcctccatgccatgctcagaaaaatatgcaccagcagaggtgacccactgtcactgttgccactgctgaaatg

SEQ ID NO: 61821 - DNA, 600 bp, Chicken  19866894322986_2
taataaatgaaatagtttcttatctgatctgcttattaccaaacactggatgatctgaggacacgatagtgtagatttcaggtcatgtaatcagaaggcacctcagcatttcctttgtggggtggagrggacatcttgcagttccctaactttctgcactttttgcaactttgtataatcactttgtatgtaggttgcttcagaagtaatgcctcctatttatttccatggaagctacaacagatacaaagagcacaatagcgctttttgatagaacaaattctcagctacagaacactrtttttcagcatagtcaccatcattagctatgcatttttgccagatatgaacaagagcctccatgccatgctcagaaaaatatgcaccagcagaggtgacccactgtcactgttgccactgctgaaatgcaccaccctccaccttgctgtgctcacatccactgtttggtctccagaaacattcagcaagcatcaatgaatgtcggtaggtgcagtaggtgccattttttttctttatggaggaattcaataacataccttggcttcatacgcacttccacatcagataccattctatcag

SEQ ID NO: 61822 - DNA, 600 bp, Chicken  19866894322986_3
ttcagcatagtcaccatcattagctatgcatttttgccagatatgaacaagagcctccatgccatgctcagaaaaatatgcaccagcagaggtgacccactgtcactgttgccactgctgaaatgcaccaccctccaccttgctgtgctcacatccactgtttggtctccagaaacattcagcaagcatcaatgaatgtcggtaggtgcagtaggtgccattttttttctttatggaggaattcaataacataccttggcttcatacgcacttccacatcagataccattctatcagacygcccctctgctgccatctgtcacattgcaacaaaatgtaatggaatattagtggggaggttctgcctctactaccataccaccaagatctacctctgatactgtgggcaacatcataaaataggaggcattatctttggagcagcccttgtactacatatggtgctggagcatatctaagtgcttctataacatactatgcaagcaatacaatacttttgctcaatcttttttaatagaagaactctagggttcatagttattgtgcataaatgttacatgtaaatgaatactctttgtg

SEQ ID NO: 61823 - DNA, 599 bp, Chicken  19866894322988_1
  misc_feature (1)..(63): n is any nucleotide
nnnnnnnnnnnnnnnnnnnnnnnnnnnnnnnnnnnnnnnnnnnnnnnnnnnnnnnnnnnnnnnttaagaataattttaaactattacaacgtcttgtattaaaaatattcctcatacagctgtaaactcagaagtgaggcatagtagccaccaaaaggctgggatgcccggagctatgctgagggagggatgcaaggatgccacagcccatcttgcagcacatagtgttgtactgacgaaagaagaaagccctgagcaattcctgtggttttctaccatgaggacttcatttatagtttyggtgtgtttcacttatctctgcagtggcctgacaacattgcctgctctgcttgttgcagcaggagaggggcagctgggagcagtctgcagttatggggtagtatgcttggtgtggaatgggtaacttagagtcagaagctatttgtcctctagatamtttctgtgacagttatccttagtcaagaaattcaagaatggaaatgctatgtgcctatacacaaataagaatatataaattggcttttgaaaatgatttttttggggacagaacacttcagttgctatttaagccagacagc

SEQ ID NO: 61824 - DNA, 600 bp, Chicken  19866894322988_2
gctgggatgcccggagctatgctgagggagggatgcaaggatgccacagcccatcttgcagcacatagtgttgtactgacgaaagaagaaagccctgagcaattcctgtggttttctaccatgaggacttcatttatagtttyggtgtgtttcacttatctctgcagtggcctgacaacattgcctgctctgcttgttgcagcaggagaggggcagctgggagcagtctgcagttatggggtagtatgcttggtgtggaatgggtaacttagagtcagaagctatttgtcctctagatamtttctgtgacagttatccttagtcaagaaattcaagaatggaaatgctatgtgcctatacacaaataagaatatataaattggcttttgaaaatgatttttttggggacagaacacttcagttgctatttaagccagacagcaaaagctactgtggcattatagytcttctttccagtagttatttcttctcatactttcagtgctcattatttccctatagtaaagcaaggagaaaatgcatgcaaatccccaatgataataattttgaaaaccagtaacaaaatcttatatttgggaa

SEQ ID NO: 61825 - DNA, 600 bp, Chicken  19866894322988_3
agtggcctgacaacattgcctgctctgcttgttgcagcaggagaggggcagctgggagcagtctgcagttatggggtagtatgcttggtgtggaatgggtaacttagagtcagaagctatttgtcctctagatamtttctgtgacagttatccttagtcaagaaattcaagaatggaaatgctatgtgcctatacacaaataagaatatataaattggcttttgaaaatgatttttttggggacagaacacttcagttgctatttaagccagacagcaaaagctactgtggcattatagytcttctttccagtagttatttcttctcatactttcagtgctcattatttccctatagtaaagcaaggagaaaatgcatgcaaatccccaatgataataattttgaaaaccagtaacaaaatcttatatttgggaaaaaaatcactgtaagaacaaaatggtaattactgtaggcaatccttgattgatgggcactctgatttgtgagaactgatttgctatccacatacattacagctacagtaacttcctaatactgctttgtcatcataactgcaccttgtgccagcagttctaagca

SEQ ID NO: 61826 - DNA, 600 bp, Chicken  19866894322992_1
gatgttgatcaactgagagaacatttatatccagacaggaatgggatgaaaacagtgatggctaaaacagctcacatatctacacagctctcactggtaaaggaatgaagaactactaagtagacctgaaaggatcaggaaggggtctgattctgcttctttatacagaaacttgagataacagctccttgaaattagtgcctgcacacagcactgcttaatgcttttactgagattactggagattttgattagaacccttgtagaaaaaaatcaagaaagcaagcaaggaaaataaaytagttgccattaggaatattctgccctctgacaatatacaaaggctgctctaaaagtaatgcctcccattttatgatgttagctcatgayatcagtagtggacattgatggtatggmagcagaggttgaatcttcccaccaatattacattacattttgttgccatgtgactgacagcagcagaaaggcaatctgtcagaatggcatctgacatagaagcaaagatgtgtcattgaatcctttatgcagaaacaatggtagctgatgactttcatcaatgtttgctgaacatttatggag

SEQ ID NO: 61827 - DNA, 600 bp, Chicken  19866894322992_2
tcactggtaaaggaatgaagaactactaagtagacctgaaaggatcaggaaggggtctgattctgcttctttatacagaaacttgagataacagctccttgaaattagtgcctgcacacagcactgcttaatgcttttactgagattactggagattttgattagaacccttgtagaaaaaaatcaagaaagcaagcaaggaaaataaaytagttgccattaggaatattctgccctctgacaatatacaaaggctgctctaaaagtaatgcctcccattttatgatgttagctcatgayatcagtagtggacattgatggtatggmagcagaggttgaatcttcccaccaatattacattacattttgttgccatgtgactgacagcagcagaaaggcaatctgtcagaatggcatctgacatagaagcaaagatgtgtcattgaatcctttatgcagaaacaatggtagctgatgactttcatcaatgtttgctgaacatttatggagatcaatctgtggatgtgagcacagtgaaatggtgggtggtgtgtttcagcagtggtaacagtaatgtggaagacaagccaaattacagat

SEQ ID NO: 61828 - DNA, 600 bp, Chicken  19866894322992_3
aagtagacctgaaaggatcaggaaggggtctgattctgcttctttatacagaaacttgagataacagctccttgaaattagtgcctgcacacagcactgcttaatgcttttactgagattactggagattttgattagaacccttgtagaaaaaaatcaagaaagcaagcaaggaaaataaaytagttgccattaggaatattctgccctctgacaatatacaaaggctgctctaaaagtaatgcctcccattttatgatgttagctcatgayatcagtagtggacattgatggtatggmagcagaggttgaatcttcccaccaatattacattacattttgttgccatgtgactgacagcagcagaaaggcaatctgtcagaatggcatctgacatagaagcaaagatgtgtcattgaatcctttatgcagaaacaatggtagctgatgactttcatcaatgtttgctgaacatttatggagatcaatctgtggatgtgagcacagtgaaatggtgggtggtgtgtttcagcagtggtaacagtaatgtggaagacaagccaaattacagatggccatgcagacttttatgaatgctgt

SEQ ID NO: 61829 - DNA, 600 bp, Chicken  19866894323000_1
aacaactgattatttacttggtcataaactttgatttacaaccgggaagttggaaataaatataaattggacttcctaattggtttcttaaaaatccattccttgaatgtgaggatttgaacatatagatgaagaagtgcaatgcttgaagtcagagcaactgcttttcaatttttgcttggtagtgatatgacatgcaactgaacctgatgctggatctttatgttcagataagctatgattaacatagtgtaaattgggcaaaaacataaatttatggtatatcataatccttgagcrggtggagtaaatgccaccagaaaaaaaaatattgcagccttgggaccgctttcatttacccttatttgcttattagttgttagagagcccattctgtaagccaacattattcacatccagtgatgcatttgggcttctgacttcattttgactaaaatggaaaaataaatttgaatttgcataggaatgaagagcagaaatagctgctagagcctgttggatctggatcataaaacggtttaggttggaaagggccataaagatcagcaatctcccgccatgggaagggataccttccac

SEQ ID NO: 61830 - DNA, 599 bp, Chicken  19866894323008_1
  misc_feature (1)..(37): n is any nucleotide
nnnnnnnnnnnnnnnnnnnnnnnnnnnnnnnnnnnnnttgaagaataagtacctttggaatggtacctcagagctgaaaatctgagcctgtgtaccaatatcacatcactcccaccttttcctcagcaaagcttatcaaataccattacactatgtgatttaataccaaagagctgcccactttaacagcactgagaaccctccaaggtatcatgcttcatttaacccaatggaaagttctaggctaattcttcagcccctgactgcggcaagagatgagttaactgctgcatgtgttascaaagaagcaaaattgcatcaatccccaagacttaaaacctcaggagttttcaatatttcctctcttaagcatraggcagctgtttctcctgggaaggctcctggaaaacatctgagatgaatgcaggaggctggaatgcagggtggacaaaggaaggccaggacaagaatttcacgctcaggcagtactcccagctctccgtacaacagcttccccagcccttccgtaccctgacacaaactgggagcgcagttaatcctcctgcctaggggacatgctcttctgagtgcagctttct

SEQ ID NO: 61831 - DNA, 600 bp, Chicken  19866894323008_2
tgaaaatctgagcctgtgtaccaatatcacatcactcccaccttttcctcagcaaagcttatcaaataccattacactatgtgatttaataccaaagagctgcccactttaacagcactgagaaccctccaaggtatcatgcttcatttaacccaatggaaagttctaggctaattcttcagcccctgactgcggcaagagatgagttaactgctgcatgtgttascaaagaagcaaaattgcatcaatccccaagacttaaaacctcaggagttttcaatatttcctctcttaagcatraggcagctgtttctcctgggaaggctcctggaaaacatctgagatgaatgcaggaggctggaatgcagggtggacaaaggaaggccaggacaagaatttcacgctcaggcagtactcccagctctccgtacaacagcttccccagcccttccgtaccctgacacaaactgggagcgcagttaatcctcctgcctaggggacatgctcttctgagtgcagctttctcttgaagctcrtgggcaagcacagcagtggaaggaggccagccttggcaggagcacagctctgacacatcctcac

SEQ ID NO: 61832 - DNA, 508 bp, Chicken  19866894323008_3
aaattgcatcaatccccaagacttaaaacctcaggagttttcaatatttcctctcttaagcatraggcagctgtttctcctgggaaggctcctggaaaacatctgagatgaatgcaggaggctggaatgcagggtggacaaaggaaggccaggacaagaatttcacgctcaggcagtactcccagctctccgtacaacagcttccccagcccttccgtaccctgacacaaactgggagcgcagttaatcctcctgcctaggggacatgctcttctgagtgcagctttctcttgaagctcrtgggcaagcacagcagtggaaggaggccagccttggcaggagcacagctctgacacatcctcacatggccactgatgcacagcaactacccaaggcttcaattagaaagtaaacaggggtgacctttctatgaattgaagatacccaatcagaagtttcaggattagagtttctatgcaaggacaggtattcctatgtgtacatgcga

SEQ ID NO: 61833 - DNA, 600 bp, Chicken  19866894323010_1
taatttgtggttttactgtccaagcctgctaccttgcattttagagataggatagctaccaatgtgatttggaaaaaaaaaacgggattcccgctgtctgcactaattgtctgcagaagagcatctcttatcggcagcaagaacctggcttagcaaggtcaaacctgcagctgccaattcagcaacccatgaaagctcataacctttaacttatttactttactgaagtaaacctggagtaaagggtgagtaaaagctggataaaagtatgagtaaacatggagtgaagtgtgagcaaamcccaaaacaccgtgtgaataaacctggagagaagagtgagtaaaacatggagtaaggtgtgagtactcctgcagtagagtgtgagcaaacctggagtaaagtgggagaaaacccagatagaagtgtgagtaaattcagagtaaagtgtgagtagacccgaagtaaagtgttaggaaaacacagagtaaggtgggagtacacccttagatgagtacgagaaaaacctaggggaaaaaaaaaaaaaaaaaaaaaagagtaaactgggactaaactgtgagtaatacacaaaggtgcgagtac

SEQ ID NO: 61834 - DNA, 600 bp, Chicken  19866894323018_1
tttcagagcatcttcctcagggctactgttttttgtttgtttgttttttttgtttggttggttggttttgttttgtttttaacatggcaaagagataagaattaatcactactatgttaacttactcactttaaaaataggaaaagaaagaagaatttctcagcatccaaaagcatacacagtgaaaatctgtctcatgaaaatatatatcacaactggtcttttaccattttccacccattgaaggccctagtatcccatttcatgtttttcttaaatactttctactttccaacactkccatcataaataaatctggaagtatgttttatatgattacagttgccttgatgacaaatagctggtttagtgatactttgttatcataaagcactttaccctggcattcagcacctctttatctatatttcttactgtttttattcctagctgacctggaaatttaaaaacttcagatgtgtcagccctccaataattcaaattgataaccagaaggaaaaagtgagcttgcctttgaaaaggcatacagacttctccaaagtgaagagtttaagtagaatatttgcttgcctgtgacac

SEQ ID NO: 61835 - DNA, 600 bp, Chicken  19866894323024_1
gtagtattatacaggtgcaatatataattatgttatagaggtaaaatatatatttcattaaagaatgtgttcagtacaacattagtttccacgagttagatgggaccacattactagctgtccatggctctatgtggcctgctgtatggggcctgcaggcaccgggttggctgcttggtaaacatggtattgcttgcttgcttaagatcaactggaaggaaacttccaaggcatttccaccctagccaacattttgtaagacttaaaataggtcagaataatgattcttaaaaggtggtygcctcattttaagacaccaagggttttctaccaaattctcatggactgatgcctctgaactattacttcactttcttcttttgtttctgcccttactgagtagctctgtacagtgtagagaagtacagaagtacttgaarataatgacwgacgagttaaaatgytatcttccgatctaacatcgttattcaactatagtgaaattgcacttcatccacaagttcttaaaacaccctttcagagctggtgaaagctacagcatgatacctgaacctgtaatgacaaaaggacatttcaaca

SEQ ID NO: 61836 - DNA, 600 bp, Chicken  19866894323024_2
gctgtatggggcctgcaggcaccgggttggctgcttggtaaacatggtattgcttgcttgcttaagatcaactggaaggaaacttccaaggcatttccaccctagccaacattttgtaagacttaaaataggtcagaataatgattcttaaaaggtggtygcctcattttaagacaccaagggttttctaccaaattctcatggactgatgcctctgaactattacttcactttcttcttttgtttctgcccttactgagtagctctgtacagtgtagagaagtacagaagtacttgaarataatgacwgacgagttaaaatgytatcttccgatctaacatcgttattcaactatagtgaaattgcacttcatccacaagttcttaaaacaccctttcagagctggtgaaagctacagcatgatacctgaacctgtaatgacaaaaggacatttcaacattttatgatcttttctctcatgaaatccaagaaaaatgagaaacagaaatataggctattataatacccatttgttctcaaaataaaacagctattaaatcatacagtggatttacagggcatattgatttatcagtata

SEQ ID NO: 61837 - DNA, 600 bp, Chicken  19866894323024_3
ggcctgcaggcaccgggttggctgcttggtaaacatggtattgcttgcttgcttaagatcaactggaaggaaacttccaaggcatttccaccctagccaacattttgtaagacttaaaataggtcagaataatgattcttaaaaggtggtygcctcattttaagacaccaagggttttctaccaaattctcatggactgatgcctctgaactattacttcactttcttcttttgtttctgcccttactgagtagctctgtacagtgtagagaagtacagaagtacttgaarataatgacwgacgagttaaaatgytatcttccgatctaacatcgttattcaactatagtgaaattgcacttcatccacaagttcttaaaacaccctttcagagctggtgaaagctacagcatgatacctgaacctgtaatgacaaaaggacatttcaacattttatgatcttttctctcatgaaatccaagaaaaatgagaaacagaaatataggctattataatacccatttgttctcaaaataaaacagctattaaatcatacagtggatttacagggcatattgatttatcagtataatcaaaatt

SEQ ID NO: 61838 - DNA, 600 bp, Chicken  19866894323024_4
ggttggctgcttggtaaacatggtattgcttgcttgcttaagatcaactggaaggaaacttccaaggcatttccaccctagccaacattttgtaagacttaaaataggtcagaataatgattcttaaaaggtggtygcctcattttaagacaccaagggttttctaccaaattctcatggactgatgcctctgaactattacttcactttcttcttttgtttctgcccttactgagtagctctgtacagtgtagagaagtacagaagtacttgaarataatgacwgacgagttaaaatgytatcttccgatctaacatcgttattcaactatagtgaaattgcacttcatccacaagttcttaaaacaccctttcagagctggtgaaagctacagcatgatacctgaacctgtaatgacaaaaggacatttcaacattttatgatcttttctctcatgaaatccaagaaaaatgagaaacagaaatataggctattataatacccatttgttctcaaaataaaacagctattaaatcatacagtggatttacagggcatattgatttatcagtataatcaaaatttggaagtaaaaatca

SEQ ID NO: 61839 - DNA, 600 bp, Chicken  19866894323029_1
atgtccagggcgatatctcagcctgccacattttgttctcaccccacaggatccctcccatctcctaccgaccttcgacgaacacagccacggacagcatcaggcggtccagaccccgcggcaccatggggcagacgtaggtgaagatgtccaccaccccagagaggccgtagaagaggtacatggtggtgtgctgccagttcatcagcttcacccagtcacgtttctccccgctgtagaggtacaggtgtggcccatcggggacgaactgttctgccagcatccctgcatgggcatacragatcgtggcttatatgcaatgatggttgatgctgctggttgctgtgggrgctttctgaaggcaagagccactgccttgggtcaggactggctgccttaatggtagctcagctttgggaaggggtgtgagatttggtctctcaacacgagatgagcatcaaggagaggcatccttcacatctggaccagtttctctggagtgaggactccacaatggtcattactacaggatgggaagctgccggcatcgccaagccaacatagcccttacctattagagcaaaggtgactttaactcct

SEQ ID NO: 61840 - DNA, 588 bp, Chicken  19866894323029_2
atccctcccatctcctaccgaccttcgacgaacacagccacggacagcatcaggcggtccagaccccgcggcaccatggggcagacgtaggtgaagatgtccaccaccccagagaggccgtagaagaggtacatggtggtgtgctgccagttcatcagcttcacccagtcacgtttctccccgctgtagaggtacaggtgtggcccatcggggacgaactgttctgccagcatccctgcatgggcatacragatcgtggcttatatgcaatgatggttgatgctgctggttgctgtgggrgctttctgaaggcaagagccactgccttgggtcaggactggctgccttaatggtagctcagctttgggaaggggtgtgagatttggtctctcaacacgagatgagcatcaaggagaggcatccttcacatctggaccagtttctctggagtgaggactccacaatggtcattactacaggatgggaagctgccggcatcgccaagccaacatagcccttacctattagagcaaaggtgactttaactcctccttcaatggcatccaggcgctggaagcagtaattctt

SEQ ID NO: 61841 - DNA, 600 bp, Chicken  19866894323033_1
tcatatatgtgcttgcatcagggtaaattaatggaattaaaaacatgacatttattcaagttttctataagaaaggttaattttctaggaaagattaattagagaatggtcttctagtattgtcataggcaaatacctatttttcaatttttcaagcaagctgatataaatgcagaagttgctgcttctggtataaatggttatttcaaagcattgcttttggtgtgttttaaatcaattaataaccaaataccatcttaatttttcctcacttcgtttattaccttttctagctgttakaataggaatgtatccctaatgtctgtgtacacagtcacgcatatacatatgtgtgcattatagatttgtactcaggatttggaaaaatgcagaagtaccaatcacaaatatatatatatttttaactctccatgtaacttttctcgtcacccaagtggtgagtacaatttgtctattgcacttttttttttttttttctggggatttggaggacagtttgcttcaaatacagaagccttatttctcctgtgggtacttaacagctatttgagaacatttctgtcaagctgtattatgaca

SEQ ID NO: 61842 - DNA, 600 bp, Chicken  19866894323035_1
ctgtgtttctttgctttagagaagtaaagcacctggctgttgggggaagtgtggataaggaagatcagtgtctacatttatttcaaagctcccttattcaaagaaacaccgtgtcttattgttggcagtctcatttgaaactgtgaggatgactggcaacctgcgagtgctaactgtcttgccagatcctatagcaaaatattgcctctgtaagagttgtgtaactttatagaccgctatatttctcttggagaaaagtaaatcagagggatatcggcttctgacactccatgatgtgcygctgaaaaggagggaggtctcagctgagaaacaaggcgacacactgccagctgctttactgctgctcgctcttctggttcttgggatcatttctccttcagtggtacttccccatctcttgtttactgtagtgaaaaactgaggatgcaaaactgcttcactgtgtttttttagatgcaaaatattttggaggaggtttcaggcaagggaacttctggattcaatgttggtaacattgtaggtaggtcagaatggatttgtagtgtccttgcaaatatgtatctatgactgttacacttc

SEQ ID NO: 61843 - DNA, 600 bp, Chicken  19866894323044_1
gggaattttaccagcagaagtatgcaaacaacctccaagttcatgcagtgaagaagtttattacacccccctttttgctctttaaatctgtttttcctgttcattaaacaattttcctgatttaaaaaggaaaataagtaaacagcagtaacttataacaagccagattagatgtaagactgaacaaaagttcttgaaaacataatgattacacatgaacctattaaaagctaaggacaaagatccccaaggattttggccttaggatgcccagcactggccttctgtgatggtatccaytggttctgtctaggtgtttaaacttcctaacagaacaagatttgagaccttgcaaaagacaaaacaatctatatttctattgagggcagtggtaacagcaccaagcctgccgaaattcaaggagtgtttggacagtgtttacagacatagggtttgaattctgggtttgcctgtgtggagccagaagttggacttgatgattcccttccaacttggcatgttccatgaatctgtaggtcccacttcctgttgcccactctaactagtgagcaagccttgcctcctgagaagctcactgag

SEQ ID NO: 61844 - DNA, 600 bp, Chicken  19866894323044_2
tctaggtgtttaaacttcctaacagaacaagatttgagaccttgcaaaagacaaaacaatctatatttctattgagggcagtggtaacagcaccaagcctgccgaaattcaaggagtgtttggacagtgtttacagacatagggtttgaattctgggtttgcctgtgtggagccagaagttggacttgatgattcccttccaacttggcatgttccatgaatctgtaggtcccacttcctgttgcccactctaactagtgagcaagccttgcctcctgagaagctcactgaggtgcacaycaggcatctgcagcagactaagaggctcaagagcacaatcatagaatcgctacggttggaaaagacccacaggatcatccagtccaaccattcgcccttcatcaatggttcctgctaaaccatgtcccttaacacaacatccaaacgctctttaaacaccaccaggctcggtgactccaccacctctctgggctgcccattccagtgcctgaccaccctttcagagaagtagtatttcgtaacgtccagcctgaatcttccctggcgcagcttgaggccattccctctcgtcctatcact

SEQ ID NO: 61845 - DNA, 600 bp, Chicken  19866894323049_1
agttacagtaatcattacatctattacattttcagattagaacagctaatacttacaaacaatggaatatcttctgtacactttcctgatgctgagtttggtatgtaaaagaagcaatgtgttttagtcttacaattctgttcacttactgttttcattattgtttggacttattctttttcctaggatgcaagactaaaatgtttccttccttaaaacaccttgcaataaatgacaataagatctcacaggtaggttcgcttgtgagagcttcacattttgtcactgcgtgcatctttrtktaagggtaactcgcaatttgctattttgagattagcttgattgcctgtgtaagagcttgaggcaactactgagttcttcagtcaactcacaggtgggagtttcagagttttaaaagatccctagcaccacagctgaagagatttatggtgctgagtcctatccctstgctgcctcgtcattcctcacgtggcattctatcaatctaaaatgctgagtagcttccagtttgtttagttattcaattaaacgtactgcagttattttctttatcaaacaaacaggatagaagtagttggt

SEQ ID NO: 61846 - DNA, 600 bp, Chicken  19866894323049_2
ttacagtaatcattacatctattacattttcagattagaacagctaatacttacaaacaatggaatatcttctgtacactttcctgatgctgagtttggtatgtaaaagaagcaatgtgttttagtcttacaattctgttcacttactgttttcattattgtttggacttattctttttcctaggatgcaagactaaaatgtttccttccttaaaacaccttgcaataaatgacaataagatctcacaggtaggttcgcttgtgagagcttcacattttgtcactgcgtgcatctttrtktaagggtaactcgcaatttgctattttgagattagcttgattgcctgtgtaagagcttgaggcaactactgagttcttcagtcaactcacaggtgggagtttcagagttttaaaagatccctagcaccacagctgaagagatttatggtgctgagtcctatccctstgctgcctcgtcattcctcacgtggcattctatcaatctaaaatgctgagtagcttccagtttgtttagttattcaattaaacgtactgcagttattttctttatcaaacaaacaggatagaagtagttggttc

SEQ ID NO: 61847 - DNA, 570 bp, Chicken  19866894323049_3
acttattctttttcctaggatgcaagactaaaatgtttccttccttaaaacaccttgcaataaatgacaataagatctcacaggtaggttcgcttgtgagagcttcacattttgtcactgcgtgcatctttrtktaagggtaactcgcaatttgctattttgagattagcttgattgcctgtgtaagagcttgaggcaactactgagttcttcagtcaactcacaggtgggagtttcagagttttaaaagatccctagcaccacagctgaagagatttatggtgctgagtcctatccctstgctgcctcgtcattcctcacgtggcattctatcaatctaaaatgctgagtagcttccagtttgtttagttattcaattaaacgtactgcagttattttctttatcaaacaaacaggatagaagtagttggttctgccgtccagaagaattgtttcattcacagttattggacgggaaaggccaatgtcactgcttgctgttctggaaagcagcgcgctttatgtttcctcaacagtctcttcccctccatttcagtggtcgtcgatcaa

SEQ ID NO: 61848 - DNA, 600 bp, Chicken  19866894323051_1
gaacccaacggtactttctgcagaaacagctgatgatcctcaccactgctctgatgtggttatgggctgttacaatgggactttgttttaaatccaggtttagagcattggctgtagcgggacaggagcacaggttgcaggcacaagcgtggtggtttcctttgcaggatgccggagctgcagttgctttctactcattagaagcaacgatttgctctttttctttgcatatttattggcaaattaaagctcgcaggacacttttagatggggtgctttaacatcagcccttgctgcaaygagttagaggggcagtaaaacatacttggccccyaaaatatgtattaaagctttaggggtgttattttcatttgggtttctcagttatactcatgttttaaattggaggtctgtaagagatcccttgtcaagcattagcacaaccacgtgcatggcacaagcagatagatccataagaggagaaccaatrcagtgggagatgtaggaagtgcagggtgggcagagcrccctgaggtagcagtgtgcatcccaaggatggtttctgggtgctgctgggtggtcaggcgggtcagctyctgc

SEQ ID NO: 61849 - DNA, 600 bp, Chicken  19866894323051_2
gatcctcaccactgctctgatgtggttatgggctgttacaatgggactttgttttaaatccaggtttagagcattggctgtagcgggacaggagcacaggttgcaggcacaagcgtggtggtttcctttgcaggatgccggagctgcagttgctttctactcattagaagcaacgatttgctctttttctttgcatatttattggcaaattaaagctcgcaggacacttttagatggggtgctttaacatcagcccttgctgcaaygagttagaggggcagtaaaacatacttggccccyaaaatatgtattaaagctttaggggtgttattttcatttgggtttctcagttatactcatgttttaaattggaggtctgtaagagatcccttgtcaagcattagcacaaccacgtgcatggcacaagcagatagatccataagaggagaaccaatrcagtgggagatgtaggaagtgcagggtgggcagagcrccctgaggtagcagtgtgcatcccaaggatggtttctgggtgctgctgggtggtcaggcgggtcagctyctgctgggaggcaaatgggagctgcaaagggagagggg

SEQ ID NO: 61850 - DNA, 600 bp, Chicken  19866894323051_3
ctactcattagaagcaacgatttgctctttttctttgcatatttattggcaaattaaagctcgcaggacacttttagatggggtgctttaacatcagcccttgctgcaaygagttagaggggcagtaaaacatacttggccccyaaaatatgtattaaagctttaggggtgttattttcatttgggtttctcagttatactcatgttttaaattggaggtctgtaagagatcccttgtcaagcattagcacaaccacgtgcatggcacaagcagatagatccataagaggagaaccaatrcagtgggagatgtaggaagtgcagggtgggcagagcrccctgaggtagcagtgtgcatcccaaggatggtttctgggtgctgctgggtggtcaggcgggtcagctyctgctgggaggcaaatgggagctgcaaagggagagggggctcaggaggcagctgtgcaaygacgcacagggaggcactgagggtctcccagccccacttctgccattccttgcttctgcagcacagccgccctcacacccaacccagcctccatcatccatttgatcgaacgcttttagtgggtgacaaaacac

SEQ ID NO: 61851 - DNA, 600 bp, Chicken  19866894323051_4
catatttattggcaaattaaagctcgcaggacacttttagatggggtgctttaacatcagcccttgctgcaaygagttagaggggcagtaaaacatacttggccccyaaaatatgtattaaagctttaggggtgttattttcatttgggtttctcagttatactcatgttttaaattggaggtctgtaagagatcccttgtcaagcattagcacaaccacgtgcatggcacaagcagatagatccataagaggagaaccaatrcagtgggagatgtaggaagtgcagggtgggcagagcrccctgaggtagcagtgtgcatcccaaggatggtttctgggtgctgctgggtggtcaggcgggtcagctyctgctgggaggcaaatgggagctgcaaagggagagggggctcaggaggcagctgtgcaaygacgcacagggaggcactgagggtctcccagccccacttctgccattccttgcttctgcagcacagccgccctcacacccaacccagcctccatcatccatttgatcgaacgcttttagtgggtgacaaaacactttcctgagctccctttacaggaaaccaatctctgtt

SEQ ID NO: 61852 - DNA, 600 bp, Chicken  19866894323051_5
caaygagttagaggggcagtaaaacatacttggccccyaaaatatgtattaaagctttaggggtgttattttcatttgggtttctcagttatactcatgttttaaattggaggtctgtaagagatcccttgtcaagcattagcacaaccacgtgcatggcacaagcagatagatccataagaggagaaccaatrcagtgggagatgtaggaagtgcagggtgggcagagcrccctgaggtagcagtgtgcatcccaaggatggtttctgggtgctgctgggtggtcaggcgggtcagctyctgctgggaggcaaatgggagctgcaaagggagagggggctcaggaggcagctgtgcaaygacgcacagggaggcactgagggtctcccagccccacttctgccattccttgcttctgcagcacagccgccctcacacccaacccagcctccatcatccatttgatcgaacgcttttagtgggtgacaaaacactttcctgagctccctttacaggaaaccaatctctgttcctttttcaaaacccccctcatttacagaacctgagaaatcccgcgcctttcaagcctcctcctgtttt

SEQ ID NO: 61853 - DNA, 600 bp, Chicken  19866894323051_6
gggtgttattttcatttgggtttctcagttatactcatgttttaaattggaggtctgtaagagatcccttgtcaagcattagcacaaccacgtgcatggcacaagcagatagatccataagaggagaaccaatrcagtgggagatgtaggaagtgcagggtgggcagagcrccctgaggtagcagtgtgcatcccaaggatggtttctgggtgctgctgggtggtcaggcgggtcagctyctgctgggaggcaaatgggagctgcaaagggagagggggctcaggaggcagctgtgcaaygacgcacagggaggcactgagggtctcccagccccacttctgccattccttgcttctgcagcacagccgccctcacacccaacccagcctccatcatccatttgatcgaacgcttttagtgggtgacaaaacactttcctgagctccctttacaggaaaccaatctctgttcctttttcaaaacccccctcatttacagaacctgagaaatcccgcgcctttcaagcctcctcctgttttccttttcccaaatcgacaccaaacaacagcgtcgtgtctgtaggtttttttttggtgggg

SEQ ID NO: 61854 - DNA, 572 bp, Chicken  19866894323055_1
ttctgcacacaactgtgaagcagaactaatacatttgactgataaatacatcaaagggagcatgtctaaagcaataagcatctcctgtggtggtgatgtttatgcactacaggagacattctgctgagtacggatgtccctttgatgcagttatcattattataatgaaagcattagttgattttattgccttttaaacaccactgttgtccaccatagtgccattaaatgaagctgtgttcattaataaagtgaacagaggggctttcatttagctctggatcagtttgttggtagaayggccatcactacattatttccttgtagccactttgttttaaggttagcactgcggttcaacacatttgtgtttatatggagcttcagtataacttaagtcagaacactgatcatgaaagttcctgtaattctggaaggttcacggaactgaattcgtaagtatacgcaaaacctcattctgggctcaaatatttctctctctgaaaaaagttcccataaagtttccacttctgtttgttaaaactcaccataaatacaagtctagtaacagg

SEQ ID NO: 61855 - DNA, 600 bp, Chicken  19866894323057_1
tgcagaaagacaaagcaaggactcaagatccagaaaactatgacctgggggaagaaatctctctgatataccccaaacccctattgaacctaaggtaggtcctcattttctatcattaccttcctgtgggtcactagctggaagcaaggatgttggagtttttgtctgttatggttttttgttgttgttgttgcaaatgctatcaagagaagaatttaggtttaaaaatgtaagacctgagttctccttgtatcacagagagcacttgtatctattccagcttcaggctaatgcctccakattgctattgtgccttctagttggctcttgcagtctgtctctggctgagttgttgatttatgttttttttcttgttatttttttccccagctggtaatgaatcattgcatgctactttgttctgctttctagtgttctgagagcttgtttatttattaatcagaacaataacaaatggaaatgcatggccttttcatagtcattatttgtaaagctctttgttctaggctacctagcacctgtgtcataaattaagtctgtaacagccacatacataaaatgaataataaaacttgtgtt

SEQ ID NO: 61856 - DNA, 600 bp, Chicken  19866894323085_1
caaccttatgaccctcctctggatcagctccaacagtgtgcatccttcctatactaggggcccccagaactccaaatagggcctcacaataacagagtagagagggacgatcatctccctcatcctgctggccacccatcttgtgatgcagcttgggttacagttggcattctgggctgcaaaagcacactgctggcttatgtccagctttttgttcatcagaaacccctaagtccttctccacaacgatactctcaattagttcttttcccaatctgtatacattcctggaattgcctygacccaagttcaagaccttgtacttggccttttcaaaactcattaggttcttgtatgcccaccttttgagcctgcccaggaccctctgtatggtgtccctcccttctattgtgtcagctgcacccctcagtctagtgtcatcagcaaacttgctgagggtacactcaatctcatcatttatgtgattgataaagatgttgaagagcacttgtcccaggatggatccttgagggacaccactcatcaccagcctccaactggatataaagccattacccacaacactggctacaatcatac

SEQ ID NO: 61857 - DNA, 358 bp, Chicken  19866894323087_1
gtacgagcaaactgaataatgagagaattgagtatacttaatagattttttttattgtagttgcgtagaaaccttcacttaaatgcagactacctgctgagacgtggtatctcattcccacaggcatcctgtttccagttcaagcattattgcagacgtgaaacagataacataaacaatgctaatgaaagcataaatggaatgtgttaaatggtggtgtgcttgagtaattgctgtatgcttttgtaccaactattatcatgaaataacattcaggtttctgaaaagcacgttgcaagsaacagtgatagcaatgctatgctatttactgagttctcggtttgcaggagagcaggga

SEQ ID NO: 61858 - DNA, 599 bp, Chicken  19866894323098_1
  misc_feature (1)..(38): n is any nucleotide
nnnnnnnnnnnnnnnnnnnnnnnnnnnnnnnnnnnnnntctgaagtcagtgccagggggcagctgggtccctgtcacaatatgttccagtacacaggagtaggaactatgaatatgtgcttaactgctaaatttgtagaacagtgttgcaatggcatgtgtcagtctttttcaccagagaagtgtacttttctgctgagagctgttcaaaagttcacagtgtaagaaatgttgcaagccgcctaaaatctctgcttattttcactcagaagcgtttcatgtgaaatcaatgttcttaaargataaagaaaaaaaagaaaattatagtctgtttagatctcaagacagaagaacagattttaatcagacagaattgagtaaaataaaattaatttgctgtatttttaagtcatactgtctgaattaaaattatggcaggtcatattttggttatacaaaagaacacaagatctaagtattaaaatgactttcaatctgttgctgcaaggaagatatagatactacaggcatctaaccctggtagaaggaatacagctcttgtttttcttcattaaagattaactgttacatgaaacactt

SEQ ID NO: 61859 - DNA, 600 bp, Chicken  19866894323098_2
tatttttaagtcatactgtctgaattaaaattatggcaggtcatattttggttatacaaaagaacacaagatctaagtattaaaatgactttcaatctgttgctgcaaggaagatatagatactacaggcatctaaccctggtagaaggaatacagctcttgtttttcttcattaaagattaactgttacatgaaacacttgaaaagtttaacttaccaagtaaacagcccccctcactgagttattgttttaaatatgtgcatccagaaactatttatttccaaaattcccattcaacwtttattctcaacagcactctgagttatcccagaaaagtacgtgtgattattgatccttacatgcattattattatttctaagagtgttatttcaaaattccaaagggtctgtagagagatttttcattgtcagcatcttgttatgcaagtaggggaaggaggaaatagcagtgttgatattttcagaacaaaattcacagaataaaagctgtgcttgcaaaatactgtttgattttctagttaaaatttaacaagtatttgcaaactagaatttccaatttgttaaataagatgtttctc

SEQ ID NO: 61860 - DNA, 590 bp, Chicken  19866894323101_1
ggtcatccagtgtctgctgatgggcctcttggagggctttcttctcttttgtcagcttggcaattgtctcatccaggactgccatctcctctgtgaggtttttcacctatgaattggaagaaacatttaaacatggtctaaaacttgcgtgctgttgcagtaacagttgcattttgcaatgctttgcaatgtggtttatttcatcttttgcaatttagatgagaccctgcacattttttccatagccaacatgttctggtgtagtagacacttctactctgagagtagcttcacacattrtgacttctcacatgtgacttctcatgtctccctcataccttgttttcagtggcatgcttttccttctcaactttggccaatgttaactccagatcatctatatctttcttcagctctgagcattcatcctccagtttcctcttcttggctgtcagttcagcattaatttcctcctcatcctcagcccgttctgtcacctccttaattttggcttccagctggatttttgggtttgatgagctgggcacacctttcctcagcatcagccaagctatctgcttcctatgggg

SEQ ID NO: 61861 - DNA, 600 bp, Chicken  19866894323103_1
ttgtgcactcagggaggttgctgtagcccagggagacccgacagcaccaaggaaatgcaggtgaaaagatggagacaaagcaacatggaagtgggaggatgtgagcagtgagcaacagctgctttggaacagagttgcctccacacctactctgttgaaagcaagtaagccttgtgtcacagcaaatgtgcttaatcacatgctaaagtgccaaacgattcctctaagtatttagctcttaaaaaacataatctgagaaaaagtagaagtctgtaaatgcaggatactctacagcaaaaytgatgttaatccccaccagctgtgatgaggaccagcytttttgaacagtgcaccgtgagacttcaaagagttttgctaatatgttcgacttattgcctaacgctcctctctcagatgactgcatccgtcctgctgataactatggaaatagcagcttagaacaagagctgccttagattgatgatgacgtcaattgtatgtgggtataactcttgatccaatcattttgttctagtcacgccactgaaattttgctatttcaaacgcggttttagcagtacatggtgtgctgtggtaaag

SEQ ID NO: 61862 - DNA, 600 bp, Chicken  19866894323103_2
ccgacagcaccaaggaaatgcaggtgaaaagatggagacaaagcaacatggaagtgggaggatgtgagcagtgagcaacagctgctttggaacagagttgcctccacacctactctgttgaaagcaagtaagccttgtgtcacagcaaatgtgcttaatcacatgctaaagtgccaaacgattcctctaagtatttagctcttaaaaaacataatctgagaaaaagtagaagtctgtaaatgcaggatactctacagcaaaaytgatgttaatccccaccagctgtgatgaggaccagcytttttgaacagtgcaccgtgagacttcaaagagttttgctaatatgttcgacttattgcctaacgctcctctctcagatgactgcatccgtcctgctgataactatggaaatagcagcttagaacaagagctgccttagattgatgatgacgtcaattgtatgtgggtataactcttgatccaatcattttgttctagtcacgccactgaaattttgctatttcaaacgcggttttagcagtacatggtgtgctgtggtaaagaatttgaggcagcagcttgccacaagcagggtttttt

SEQ ID NO: 61863 - DNA, 600 bp, Chicken  19866894323108_1
aaggcagcacaggaacttcagggccccgaaagatcctcgtgcactttggctttacttcgtccctatcagccaggattctccttacagcacccacaaatattcataatgaagaaataaattaaatccaccccttcctgtgtgcctcacgacacgcaagcgctgtgcgtgctcagcacatgtgtagttttgataaagagacgttatcgagactgaaatcatttgaaacaaaacaaataacgtggctgcccagcacttcctctggaagtgtttccttggtcaaaatcttcctcaacgctcacrtgtatggagttagtatatgcctcagcaacgcctgttcacagaaagagtgtttcaggataaatgtctggctgtgtgttttacatatagggtgtgaagttcagccatgcgggagggccctgcctgcagcctgggcggggggcaggccttgctccgctccgtgtgcagcctgggtgccatcccatgggtcggggctctgtgtgggcacgaggcggtgcagccacccggggccttgatgtggggcagtggtgctgcagrgccgtcggttccctgccccatggcatgagcgctgggctggctcct

SEQ ID NO: 61864 - DNA, 600 bp, Chicken  19866894323108_2
cctctggaagtgtttccttggtcaaaatcttcctcaacgctcacrtgtatggagttagtatatgcctcagcaacgcctgttcacagaaagagtgtttcaggataaatgtctggctgtgtgttttacatatagggtgtgaagttcagccatgcgggagggccctgcctgcagcctgggcggggggcaggccttgctccgctccgtgtgcagcctgggtgccatcccatgggtcggggctctgtgtgggcacgaggcggtgcagccacccggggccttgatgtggggcagtggtgctgcagrgccgtcggttccctgccccatggcatgagcgctgggctggctcctcggccgattygagggcaggatgagtgtccatcggagagccgcgaggctgcgggggtccgtgtgaaatgcaggccgcgctcacagagccacggcccttcgatggggctgccgtgtgccgctggctgccggcagcggggctcagctgtgtgctgtctgctcagcggagacaaaactgtaaagagccgattgcttgaggagcagatcgggcgctcagacaggagtgtgcatggggcgttggaaaaacaaataggttat

SEQ ID NO: 61865 - DNA, 600 bp, Chicken  19866894323108_3
tagtatatgcctcagcaacgcctgttcacagaaagagtgtttcaggataaatgtctggctgtgtgttttacatatagggtgtgaagttcagccatgcgggagggccctgcctgcagcctgggcggggggcaggccttgctccgctccgtgtgcagcctgggtgccatcccatgggtcggggctctgtgtgggcacgaggcggtgcagccacccggggccttgatgtggggcagtggtgctgcagrgccgtcggttccctgccccatggcatgagcgctgggctggctcctcggccgattygagggcaggatgagtgtccatcggagagccgcgaggctgcgggggtccgtgtgaaatgcaggccgcgctcacagagccacggcccttcgatggggctgccgtgtgccgctggctgccggcagcggggctcagctgtgtgctgtctgctcagcggagacaaaactgtaaagagccgattgcttgaggagcagatcgggcgctcagacaggagtgtgcatggggcgttggaaaaacaaataggttattttaacaccaaagagcataaagcaaacctggaggtgatctgcaagagagcgcacg

SEQ ID NO: 61866 - DNA, 600 bp, Chicken  19866894323110_1
gctggaaagaactctccagatcaccaacttcagccaccaacatgctctgccacgtacctcttactacacaattagagcagatacataggagtaagagttgaagtaaccttgtgtgaccttgtgtgcactgtacttgctaacttgtcgtatgcgctgtactcctctgcttacagttgagatccttttgaaagatggggtgttatttccatgctccagaaagtccacaaagcaagcttccagctcaggagcaccgagctttgggaagcttcaagccttgggtttctaaaccgtatgcatcaragagacgcagcaacgactgaaaagcacagtgctgtctgtggaagaactgagacctgggaagcagcatgggctgtacctgacgtgcaggttttaacttctggtcacagtgagggctcaccacagtcacgaccttcattacaaaacccttcctgtctttacggtcaggttctattaattccctatgctgtatttcacagatgatttcagttaggaagatttcctaggaaatcattaggcgatttcggaggaaagcaacgactttccccttccctgctgccatctttcccctccctgcggcta

SEQ ID NO: 61867 - DNA, 600 bp, Chicken  19866894323120_1
gaatgaagagaaatacatggtggtggcctcttatgttaaaagcaatatgctgttgttgaagactttgagctaactaaaaatggcaacaatgtaactgacatatcaaaattacactgtccaatgattgttatttttgagaaatgaaatttttatttcacacaagttttaaaaacacatttgtatttaatatgtattagattagctaaacccaataatgaataacagtaattgtactgtctctgcactcttcttaacctcatcttctcccttttcatcgtgtctccctgtggattctcccasttcccttaaaaaaaaaaaaaaaaaaaaaaaaaaaaagagagagattgattattagctttgaatgcctttgctagtcttttgtatatcctctcttggcctgccttgctatttttatgtccttcaattttcaacatatgaacacagcagtttttttctgaggatgtctgtaaatgctagactttatagatcaagaaaagttgatgggatttcatgtgttttgtttcatacaaggttacaatacctcatttttttcataggcaggtctaagttattttactaacggtctatctataaaaaatt

SEQ ID NO: 61868 - DNA, 600 bp, Chicken  19866894323136_1
acatcacccaccccacaccggccatggcagcgctcggaggcagtctgcagcccctccagctgcacttaagagactccgatcctatttaatgaatgatcattaactggggacatttcagatgagaaaattgtttcaggaacgagcaattaaatcttaacgcttagatcacgtaactcatttctaattaaactcactgtaaattatagcaacggtatttatttttaatgagaaataaaactggaaaggaattgtggccgttcaagaaaatgaaatgagtggaagggagggagcagagtgggrggaaagggcagggagtggagggggtgtaaccagacacaaaaaggctcttaaaacccccctgaaggatgtgggcagtgatgtccattcctgctctgtgcccaaagacctcctggcagcagctttttctaggtctgacctttcccaaaggtgggcagarctcagcagcagcagcccttctccgtttggctgctgggaagtggattttcttccctctctctctccatacagctgtgacgtgacaaggaaaaatggtgcccatatggagacattaatgatcagaggttcagagcaagcacggaa

SEQ ID NO: 61869 - DNA, 600 bp, Chicken  19866894323136_2
cgcttagatcacgtaactcatttctaattaaactcactgtaaattatagcaacggtatttatttttaatgagaaataaaactggaaaggaattgtggccgttcaagaaaatgaaatgagtggaagggagggagcagagtgggrggaaagggcagggagtggagggggtgtaaccagacacaaaaaggctcttaaaacccccctgaaggatgtgggcagtgatgtccattcctgctctgtgcccaaagacctcctggcagcagctttttctaggtctgacctttcccaaaggtgggcagarctcagcagcagcagcccttctccgtttggctgctgggaagtggattttcttccctctctctctccatacagctgtgacgtgacaaggaaaaatggtgcccatatggagacattaatgatcagaggttcagagcaagcacggaagggctgattgctctccaagcaagtattaatcacatccatcgtgatgcggccggggagggcaggggcagcgagcaagaatgggcaggtagaggctggagggatgtgtgggactgtgttggtctgctgggagcygggcaggaaaacctgagggtgccca

SEQ ID NO: 61870 - DNA, 600 bp, Chicken  19866894323136_3
tgacctttcccaaaggtgggcagarctcagcagcagcagcccttctccgtttggctgctgggaagtggattttcttccctctctctctccatacagctgtgacgtgacaaggaaaaatggtgcccatatggagacattaatgatcagaggttcagagcaagcacggaagggctgattgctctccaagcaagtattaatcacatccatcgtgatgcggccggggagggcaggggcagcgagcaagaatgggcaggtagaggctggagggatgtgtgggactgtgttggtctgctgggagcygggcaggaaaacctgagggtgcccagatgggtctcacccacagtccatggcaggagctgctgcactgcatgcacggggcgtgaggacaggcagcccctgcacggggcgctcgcagcaggtggaacccaccatcagctgcagacaaaacgcattccacgcagtcacgccgggctcagcaaggctgcagggctgtgcaataagccccatgtgcacgtgtacatctgttgctagcttcagtaaataatcctttcctatccaacacaccaaagccctccaggccaattgcacagcctcattgca

SEQ ID NO: 61871 - DNA, 600 bp, Chicken  19866894323137_1
gggaatgaaagggctgtggggaaggaaggacaatctgaattttatcagaaaatgttaattctgtgagcagaaaattattgaaaaatcacagaatcatagaattgctaaggttggaaaagacccacagcatcatccagtccaaccataataaaaaaaaaaagtacaactattatttgtagaggatgcagaagaaacaatgacattatgacaaatgggactaacatttaggaatcctggttttaaatcctgaattcagttactgcctgcaaaaatgttactctcaataagtcaaccagttgsttatgcaaattcaacaggattttggtggattttgaagcaagctttcattgtgctataactcagtccctcatctatgaaacaggaactttcttttttctttttttcttgttatagttgttgttattcatctgtctaaccagactatgagctcctgagggtagatgtcttttcttactccattttgctacagaacttcaatctgctgtaacagaaattacgagtagaaatgaaatattttctctgggaacacaaaggctgactatgaacatttgtgtctaaaatgagacaaattgatttctt

SEQ ID NO: 61872 - DNA, 600 bp, Chicken  19866894323149_1
tgcagatggtcatctatgtacaatgtaattaagaacagcacgtgaaaaaatgccacaggttaaataaaatacatatataaacaaataataagtacttgaagaaaggcaaaatacatctctacttggatgacaatggacaaaagggttttatttatatatatatttttttaaagagctgtgccattctgtacaagctcaagaagcaagataagagtggttcttaattaatattattgataatgttctacagtagcaggtagaaaagattatgtatgtgtattcttcacagataatgatctrctcttcttcgatactgtattttatccatcttcataccaaggtctcctacagcatttcagctgtatatatgcttactgagatatactaagttctaaaaagagaaattaacctagcaattaaatgtcagctttgtttcctggcaaaaacttttgaaagatagcagtcaaaaaattttatgtcaaaatgtgaatgaagaagggaacataatgaaatgaaaatccctgcatctacttcactgacattaacacaagtagtcagtcagaggctggtcaaaggtaacggggtcacgaaaatgcttag

SEQ ID NO: 61873 - DNA, 599 bp, Chicken  19866894323153_1
  misc_feature (1)..(62): n is any nucleotide
nnnnnnnnnnnnnnnnnnnnnnnnnnnnnnnnnnnnnnnnnnnnnnnnnnnnnnnnnnnnnnaaaatctatggaaagaattgataatatctataaaaaataatgttcttatttttttcattttaatcttgtagctggagattttcattctatttcacatcctccattgctggatttatatttctgcatgatgtaagttaatcttgtgaatatttggtattatattttaaaataaggactgatttctagatattaatgacgcccattgaagctcatacattctgattaaagtggctgtttkggttcagaggtttcgtgtatktgatctgtgtgataggctgcaatatgctctgaagttctaattgggactttaattttttctcatgaacttacatgattaataataaaataaaataatgaataaccagcattgttaagaaaggtttacaacgtgccttattaacacatacaagtacatcacatggccatgtttttctcaaaggaagcagtacaacttctctggcagctctttttggggtcacagaaacagtgcattttatggctatttattgtggtgttactcccaacttctgactcagc

SEQ ID NO: 61874 - DNA, 599 bp, Chicken  19866894323153_2
  misc_feature (1)..(41): n is any nucleotide
nnnnnnnnnnnnnnnnnnnnnnnnnnnnnnnnnnnnnnnnnaaaatctatggaaagaattgataatatctataaaaaataatgttcttatttttttcattttaatcttgtagctggagattttcattctatttcacatcctccattgctggatttatatttctgcatgatgtaagttaatcttgtgaatatttggtattatattttaaaataaggactgatttctagatattaatgacgcccattgaagctcatacattctgattaaagtggctgtttkggttcagaggtttcgtgtatktgatctgtgtgataggctgcaatatgctctgaagttctaattgggactttaattttttctcatgaacttacatgattaataataaaataaaataatgaataaccagcattgttaagaaaggtttacaacgtgccttattaacacatacaagtacatcacatggccatgtttttctcaaaggaagcagtacaacttctctggcagctctttttggggtcacagaaacagtgcattttatggctatttattgtggtgttactcccaacttctgactcagcagcaccagagagagtgttgct

SEQ ID NO: 61875 - DNA, 600 bp, Chicken  19866894323157_1
agtgcctgggagcttatgtcctgaaacctgttgagtgtttgttctcttacatactgtcttcagagatcctgcaatctgtaatcaacttggaaatttaaaactttattatttccagtgaattgttaggttaattggaagtatagactctggtccttaacaggaagattctgatctgaattttgttctggacaagtgcctcattatcacaggattagaaaatactagagtgatgcaatgctttatttctttttacttttccttttattaaacttttttttttttttagcctttatctatcaygcattttgagctattatcagtgcttacactcacagtttatgactctcagtgtatttaaagtcagtcctctccccgtctgatttctaactgtatatcttttcctgaagatgaatcatttagcaccatcactctgattttcattctcttttactctctgtgaactgagttggtttgacaaattctgatgctgactgaaaatatctggcttagttttataatattatttatttttatagccaaaagcctagcaggtgaagaaaaaaatgacgacaatttggtaaataatgaacacagggatga

SEQ ID NO: 61876 - DNA, 600 bp, Chicken  19866894323166_1
catcccacctcaaagttctccttcgtgagaggttcttaagggacagattctatataccttgccgttaacgtctgcttgcagaagtaggttgtatgtttgcttgtgcatgtaagaacagggcttacctacagattgcctgataagactacttatggcatgatctagcttcataaagtgtgatgggagttaattctccttagtgccaatctggaatttacggcacttctatgcgtggaggtcagaaaggctcagaaacctctgtgttcatgaagccataaagccactctgccttttgctgcwgygttacccagacttgcagccacacctctgtatctyccccctggttgcatgggatcttagtttatatttgcctattaaaaccagtgggccagatgcaacatctggctcaggaaatccccaaactgctgattgtcggaagcagggagaatatttgggggtgggggcatcaccctaaaacgcataccttgttcttatattttcttcctaagtgcctacctttgtcttctgtcagaggtaggacattgaagtagatggatctttggtctgactcaggctggcagttcccatactgggggacag

SEQ ID NO: 61877 - DNA, 600 bp, Chicken  19866894323166_2
tcccacctcaaagttctccttcgtgagaggttcttaagggacagattctatataccttgccgttaacgtctgcttgcagaagtaggttgtatgtttgcttgtgcatgtaagaacagggcttacctacagattgcctgataagactacttatggcatgatctagcttcataaagtgtgatgggagttaattctccttagtgccaatctggaatttacggcacttctatgcgtggaggtcagaaaggctcagaaacctctgtgttcatgaagccataaagccactctgccttttgctgcwgygttacccagacttgcagccacacctctgtatctyccccctggttgcatgggatcttagtttatatttgcctattaaaaccagtgggccagatgcaacatctggctcaggaaatccccaaactgctgattgtcggaagcagggagaatatttgggggtgggggcatcaccctaaaacgcataccttgttcttatattttcttcctaagtgcctacctttgtcttctgtcagaggtaggacattgaagtagatggatctttggtctgactcaggctggcagttcccatactgggggacagtg

SEQ ID NO: 61878 - DNA, 600 bp, Chicken  19866894323166_3
taagggacagattctatataccttgccgttaacgtctgcttgcagaagtaggttgtatgtttgcttgtgcatgtaagaacagggcttacctacagattgcctgataagactacttatggcatgatctagcttcataaagtgtgatgggagttaattctccttagtgccaatctggaatttacggcacttctatgcgtggaggtcagaaaggctcagaaacctctgtgttcatgaagccataaagccactctgccttttgctgcwgygttacccagacttgcagccacacctctgtatctyccccctggttgcatgggatcttagtttatatttgcctattaaaaccagtgggccagatgcaacatctggctcaggaaatccccaaactgctgattgtcggaagcagggagaatatttgggggtgggggcatcaccctaaaacgcataccttgttcttatattttcttcctaagtgcctacctttgtcttctgtcagaggtaggacattgaagtagatggatctttggtctgactcaggctggcagttcccatactgggggacagtgtggcggtggctgtgaacctccatctcacagggtc

SEQ ID NO: 61879 - DNA, 600 bp, Chicken  19866894323170_1
gagggccttgttaccaaagaaactgggtggatcctcaaaccgcagagagcacggttgggaaggaggtgaagaggtgacctccttccttccctccgccccaaggcaagagcaagtgtgcctgaacaggtccttggttctctcagtttaatctgcccttgaaacatcccggttcacaacataagctattcccagctctgctaagtctttgcctttgttttcctatctgtaaaaggggaaacaaccagaacatgaggatccattgctgggttattggagaggaagtggggagaggaacctttrgataattatttgcaaacatttggtgaaaagcaagaaataagcmgggaatattgtgtacttaggggtgttcacacctgctgatgtcggtttggtatggctacaaaacaatatcagccttatgcaagatggtccaggcgtgtacacatgagcatgttcagttcttcttgtgctcctccaagcataagacgagtgtttgctttgcagagcagttcccagtgcaggaactgcgaccgaccagattacctagggacatcatgtacctccttctaactgcaggctgaaacacagtttgtgggcttt

SEQ ID NO: 61880 - DNA, 600 bp, Chicken  19866894323170_2
agagagcacggttgggaaggaggtgaagaggtgacctccttccttccctccgccccaaggcaagagcaagtgtgcctgaacaggtccttggttctctcagtttaatctgcccttgaaacatcccggttcacaacataagctattcccagctctgctaagtctttgcctttgttttcctatctgtaaaaggggaaacaaccagaacatgaggatccattgctgggttattggagaggaagtggggagaggaacctttrgataattatttgcaaacatttggtgaaaagcaagaaataagcmgggaatattgtgtacttaggggtgttcacacctgctgatgtcggtttggtatggctacaaaacaatatcagccttatgcaagatggtccaggcgtgtacacatgagcatgttcagttcttcttgtgctcctccaagcataagacgagtgtttgctttgcagagcagttcccagtgcaggaactgcgaccgaccagattacctagggacatcatgtacctccttctaactgcaggctgaaacacagtttgtgggctttttattactgggcatggaaaatgttgcatatcacagtgctggac

SEQ ID NO: 61881 - DNA, 600 bp, Chicken  19866894323178_1
ctcatctagaaggcaatactatggatttctaaccaagtggaaaggttcacagggccacctcttcagtcttctgacattagtcccaaacagtgccacaatggaaaaaacatttcatgtgggcatctaggaagccatcataaagtatgacaaggaagtgtttttaccaggcaaaatactagagtggtcccaaactttcttagcaactattttgctaataatacagaaaattcaggagttacaatggaaggaacaaaatttgtgttagactgaaaagaaaaggatcaatgttcttctggtggrtttgctattgagatttgagaagcaaaggaaactgcgaaaaytctcacaccaaactttgctgcgcagaaaaatttgagtgccctgatggagcaatcactttccattcctaaacttactaaggctgaaccataagcatagcattctcatgactccagtagctggagttaaaggatgacccctgcatagaaccatgattaacaacaataccgcaaaaacaagtccttaagtttcatagcgtgatgtcatctctcgggcagggaactattgttttcttttgctttctcttctggacaagtgcca

SEQ ID NO: 61882 - DNA, 600 bp, Chicken  19866894323178_2
aaggttcacagggccacctcttcagtcttctgacattagtcccaaacagtgccacaatggaaaaaacatttcatgtgggcatctaggaagccatcataaagtatgacaaggaagtgtttttaccaggcaaaatactagagtggtcccaaactttcttagcaactattttgctaataatacagaaaattcaggagttacaatggaaggaacaaaatttgtgttagactgaaaagaaaaggatcaatgttcttctggtggrtttgctattgagatttgagaagcaaaggaaactgcgaaaaytctcacaccaaactttgctgcgcagaaaaatttgagtgccctgatggagcaatcactttccattcctaaacttactaaggctgaaccataagcatagcattctcatgactccagtagctggagttaaaggatgacccctgcatagaaccatgattaacaacaataccgcaaaaacaagtccttaagtttcatagcgtgatgtcatctctcgggcagggaactattgttttcttttgctttctcttctggacaagtgccaacacaacgcaaatactaaataagcattactggaagcatatc

SEQ ID NO: 61883 - DNA, 600 bp, Chicken  19866894323178_3
gggaactattgttttcttttgctttctcttctggacaagtgccaacacaacgcaaatactaaataagcattactggaagcatatcccatcagcgctcatattgcgactcaagaaaagaagtgcccgctctcctgctcagcccaaaacaaaccacaacgtaagtgctgaggcgtactgttcttcagggattcttgttctgttgttatcattctctgtactcaaatagaaaatcaaatatactgtttcaggtcaaaataatggcctggagggaaaaacatggaggaaaaaaaaaaaaaaaaraagaaagaaaaactgaaaaacccaagtccctgattttccagattaatgaaaagcaataagagtgtttgcccaaatctgttcagttccactggtttctagaagacgggtttccccttcccttgaatcttttgcactgttgctaggaattagtgagctgtgaaactcacctaatgaggtcagcatcaggaaatagctctgaaaaaacaggtcccagaggaactataaaggactccctcagtgtccgagagaaatcctggatgcatcggcacattgtgctgccggggccactggaggaatgca

SEQ ID NO: 61884 - DNA, 600 bp, Chicken  19866894323180_1
gtcagatctgccttgctcacactactttagctatggtcactgcatatcattctctagcagcagataaattcatgggagacagtttgatataggaagataaatcactaaatggttgcttagctgtgtgtctctggaataccttggtgctgcagcttctacttcgtgctcagagcaagatgctgagatgtatcttagtgtcctaaataacacctttttgccatttactttgggtgactcaggaatcctgtgggcctcccttaagtccactgtagcctcatcctccctaatttaggctcactrtaactagtaaggctgctgagtacatgccttaccgcaaaattaccactgcaaaattaccactgcacaacatgcagtgctagatgcagtatgattcatggcagctaggatttgaatccactgaatcccaggacaaaaccctgactttatgcctggcctccctctgaccacaggctggccctcactagaattcacacaacactagagccttcttgcaagacatggtctcagcatttttctttctttactcaaccccagtctctaagcagcacttcagttacaatccataggcacaaagcagat

SEQ ID NO: 61885 - DNA, 599 bp, Chicken  19866894323183_1
  misc_feature (1)..(70): n is any nucleotide
nnnnnnnnnnnnnnnnnnnnnnnnnnnnnnnnnnnnnnnnnnnnnnnnnnnnnnnnnnnnnnnnnnnnnntttttcttaagggtaaccttccaccacataacttgtctgattaaggaacagagcagtcagaagtgctcctgcaagcacaagggcagggcaagagagagcatgaccatgctctttgcaacactgcacacgtccaggttggcttaaaccaagcatctcatctctctagtcatcacctgtgaagtgcaatcacagcaactgcagagcagtaccataaacgtaagtttctgaaygagaaaaatgataccattaacttctgccaccaccatttttactggtgaagtcctattgaatttcatccctactgatgattggaaactttcttcaaacttccagccttgataatgaaaggattttttaaccacttccttgtgtccgcacctccctcttccatcttctcaccttctttacctccacatgaagtgcactcgagtggtctgatgcacttctcagtattgttctacagctattccacgtcactttcctagttcctccctgcatatcagcttccattttcctgaagaactgtggg

SEQ ID NO: 61886 - DNA, 600 bp, Chicken  19866894323184_1
ccttccaactcaaatgattctatcactctataccactgcttggggaacctgttccatgcccagctaccctctggtgaagaaccttttgctaacagccaagcctgaccctcccctggcacagctctatgccactccctcatctgcagggctgcagcaggttggtatcactgcactcctgccctgcagtgcttcacttcttgcaagtgaatccccctgtcctcagagtgtgttggtgtgaaaccacccctgatagcttttctttggctgatgcacatcatgcacgtgggacaggaggaaaayggagctggcaggagcagacactgttagcytgtacctctctcactgctcacccacarccctcagcttgcccttaggactgactgcctcgtgtcttctctcctgtttttgcaggagctgcacgcagctgaagtccgcaggaacaaggaacagcgggaggagatctctggataaagggcttttctacacatctagcacctgattcctgttaacaaaccgaccgaccgacacgttttattttgtttgtctagatgcagcgtttggttctccatccccccccgtcccctggtgtttgtcccccag

SEQ ID NO: 61887 - DNA, 600 bp, Chicken  19866894323184_2
ataccactgcttggggaacctgttccatgcccagctaccctctggtgaagaaccttttgctaacagccaagcctgaccctcccctggcacagctctatgccactccctcatctgcagggctgcagcaggttggtatcactgcactcctgccctgcagtgcttcacttcttgcaagtgaatccccctgtcctcagagtgtgttggtgtgaaaccacccctgatagcttttctttggctgatgcacatcatgcacgtgggacaggaggaaaayggagctggcaggagcagacactgttagcytgtacctctctcactgctcacccacarccctcagcttgcccttaggactgactgcctcgtgtcttctctcctgtttttgcaggagctgcacgcagctgaagtccgcaggaacaaggaacagcgggaggagatctctggataaagggcttttctacacatctagcacctgattcctgttaacaaaccgaccgaccgacacgttttattttgtttgtctagatgcagcgtttggttctccatccccccccgtcccctggtgtttgtcccccagcaacacgcttctctgtctgcatccttaat

SEQ ID NO: 61888 - DNA, 600 bp, Chicken  19866894323184_3
tgcccagctaccctctggtgaagaaccttttgctaacagccaagcctgaccctcccctggcacagctctatgccactccctcatctgcagggctgcagcaggttggtatcactgcactcctgccctgcagtgcttcacttcttgcaagtgaatccccctgtcctcagagtgtgttggtgtgaaaccacccctgatagcttttctttggctgatgcacatcatgcacgtgggacaggaggaaaayggagctggcaggagcagacactgttagcytgtacctctctcactgctcacccacarccctcagcttgcccttaggactgactgcctcgtgtcttctctcctgtttttgcaggagctgcacgcagctgaagtccgcaggaacaaggaacagcgggaggagatctctggataaagggcttttctacacatctagcacctgattcctgttaacaaaccgaccgaccgacacgttttattttgtttgtctagatgcagcgtttggttctccatccccccccgtcccctggtgtttgtcccccagcaacacgcttctctgtctgcatccttaatcgttcggtgcttgtggggagtcacagg

SEQ ID NO: 61889 - DNA, 600 bp, Chicken  19866894323184_4
actggtgtaaaaattgagatattaataaatgcaaccagcagtgtcacggagatacagaattcttatccgggggcttttgctactcttggggtttgctctgagctaagtatcggaataataaggagtgatcatttctgtatgtaagcagagcaatgagcagagtgttagtggagagggtcaggccggctgcatggcactgccacgtggctcccagccatccctgcagccagggtaggcaggaagcaaacatccttatctcaggtggacctttggtagccagtgtggaaataggggagggtytcaacacagagattggtgccgtgtcatagaatgtacccaatcccatccttgtccacaactccatccccgtccccattcatgtctccctccccatctctatccccatccctatccctgtccccatccctggtggctgcaggctgagccccctgccccccatgggctctgtcacctcggctctgcagaaccccaggagggccctcagtctgcagtctgccagccctccacgaccccctcggaacgcagggatgggacacggtggtgaggccgcctgctggcagggaggacgtcgctcttccc

SEQ ID NO: 61890 - DNA, 600 bp, Chicken  19866894323188_1
tgattagacctccacaagactgaatgggatcatgagaaagaagtgcaaagtaaaagtagcaatctgcactgcagataggctctcataccttcatactaggagttgtaagtatgctcgttatggaattacatttcaggcacttgtttgatattggacttggaatcaagtgggctaagtgtactgccagcccttaaatggaaccgataccataagctcactgctcccgagcagtgtgtagcgagctctcagcaacccacaaattgagaagttactaaagcttgcagctccttgtgctatcarttttatgtagaaacttctcacttatgcttccagcaacttttcaaagtccttcatcacaaagcagggaaatcagaaggaaatgaaacaatgttccccacatacaatgactgaatgcatgcaaaaataataataataaaaataatacagcaaaaatgaatggctagagtttgttttatgtgggctacgcgacttatgtcttttcaactgagtggaagaaatgaaaatagaatcactctccagacctagattttgtggtgcacttgcagcaggctgtcttaaaacccatgaacttcagctcaa

SEQ ID NO: 61891 - DNA, 600 bp, Chicken  19866894323190_1
ctccagatgtgtaggtggacaagcccttaataaagctgctgatagcacagcctgttactggtagtatgcacaaaggaaaaatattaactcatttatggtaaacatttgtttttagatagtaacccatatcttaattgcacttattcctggagatactttgagtatcattacagttactgtagtaagatttattagttcttttcttcgaagctagtaatgaaggcataaactgctaaattgtgttgtaaatccatgactgagtgactctcaaagaacctttgctaccaggaagcccacaarggtttttcctttgtatggcttccttcttttatggaacagaaaygtcttgtaccacagacagaaaactgatttccttttcatggacgcaggtcttggatatagttgtacagaagcactgattttattcttggggtctttctctaggcattcccagccagcactgtgagatgcagtacctttgtagattacaaggcactctcttcatgtattttaggactaaggctttagaagtgcctgaaaatcttaaagggacataaataagagcttatttgcaggtatagatactggggggaggtgaga

SEQ ID NO: 61892 - DNA, 600 bp, Chicken  19866894323190_2
agcacagcctgttactggtagtatgcacaaaggaaaaatattaactcatttatggtaaacatttgtttttagatagtaacccatatcttaattgcacttattcctggagatactttgagtatcattacagttactgtagtaagatttattagttcttttcttcgaagctagtaatgaaggcataaactgctaaattgtgttgtaaatccatgactgagtgactctcaaagaacctttgctaccaggaagcccacaarggtttttcctttgtatggcttccttcttttatggaacagaaaygtcttgtaccacagacagaaaactgatttccttttcatggacgcaggtcttggatatagttgtacagaagcactgattttattcttggggtctttctctaggcattcccagccagcactgtgagatgcagtacctttgtagattacaaggcactctcttcatgtattttaggactaaggctttagaagtgcctgaaaatcttaaagggacataaataagagcttatttgcaggtatagatactggggggaggtgagaaattttacatgcagcctttaggcatggtttctataccgcttca

SEQ ID NO: 61893 - DNA, 600 bp, Chicken  19866894323196_1
aaacgtgtttttttcacctgttccatggtattttgccacaactcagctctcaagcttctcttctctttccctgcaccaatacctaatttgaattttaaaattaccacattgtttccttcctaaaattgtaactgacattcctagaaaatttgctttcccagaaaagcattgtgcgtaggctgtaaatttagcttttcacaagtgagaaaaagacattttcttcaataacctacactgccaacatgaccacaaaatgtgcgcagagtcagcatttgtccatttaaatcagacttttaagcrcatgattcagttaaccaccaaaacgcatttatgcaggtgtgggcattgtacttatttgaaaggatttattcagtgagtagtgtattattttcattgagggatttggttttcaattcatactgcgtaacacaaaacttctttgtattatagactaacgttgtgggattttgttggcttttgtttggttggttttttgtcatcatttgttggctttgttttgtttcatttccccaagtgatatgttttaaactttctcagttcctatttctgcctcttaatcctataaggtgcttggactct

SEQ ID NO: 61894 - DNA, 600 bp, Chicken  19866894323196_2
acgcatttatgcaggtgtgggcattgtacttatttgaaaggatttattcagtgagtagtgtattattttcattgagggatttggttttcaattcatactgcgtaacacaaaacttctttgtattatagactaacgttgtgggattttgttggcttttgtttggttggttttttgtcatcatttgttggctttgttttgtttcatttccccaagtgatatgttttaaactttctcagttcctatttctgcctcttaatcctataaggtgcttggactctcccgacgaggaattcatagaaycacagaatggcttgggtccttaaagcccatttagatccaacccccctccatgggctggttgccacccagtagatgaagctgcccagggtcccatccagcctgtccttgaacagctccagtgatggggcatccacagcttctctgggcacctgtgccactgccattcccatgatatcactctcattctggtgaaatttacacaagccactgtgaaagagtgtgctctgatgctacttctcctgtatggagcctccgtagtgtgggtttgatgccagactgtcatccagaaatttcagagtg

SEQ ID NO: 61895 - DNA, 600 bp, Chicken  19866894323201_1
attagatcgtttttcacagcatactttacattgtagagagagaacatttcttactttaaactgcatcatgtatcctggttgtataatgagctccctggaggacaggatgttgtgtgttttgtcctttttcttatttggccagtagagatggaacgaaggatttccacagaaccctgcagtcctgactgcattagggtaaaaactccagttttcttcgtgagaggtgccttctgttaacatgagttaaatacaattactgcattgtcttggtaaacatcaaggcttagtaatgaatccacrgaatcactagatataaacactaaatctctgctcgctgttgtgacatgcagtaagtaagctaccagcagacacagtaaaaacatcagctccagacagctagtttaaattttaaaataatagcatttcaaaaaatatgatcaaataaaatttccctgttcaaaaatctacgtgaattgaggtggactgaaaaaaaaaaagatattcttacaggtgtatctatacatatacacaaacacacctgaattcaggtgaatacatgtatttacacatcaggacataaacagtagttgtctacaacat

SEQ ID NO: 61896 - DNA, 600 bp, Chicken  19866894323201_2
aagctaccagcagacacagtaaaaacatcagctccagacagctagtttaaattttaaaataatagcatttcaaaaaatatgatcaaataaaatttccctgttcaaaaatctacgtgaattgaggtggactgaaaaaaaaaaagatattcttacaggtgtatctatacatatacacaaacacacctgaattcaggtgaatacatgtatttacacatcaggacataaacagtagttgtctacaacatgaaaaaatttgcagagctcaaaaaggagaaaaagtgcatttgcaacttcaaaggrcttttctcaaataaaagcacrgcagccaacggaatagctgtcacagcctttcttaccatcatcaaacgtatctaccagctgactggggttgatttctgctccaccaatcagaatgttatccagagcccactgygcccgatcagggcctgaaaccacaatgccrttgctgatrgtgaaaggctgccaccaccgcaagcgggttgtgttggtcagagcatgttcggggagaaggatgtagtcatgcctgactgagatgtatttttggtaatccatctcatgaagcaaagtccaagttattcc

SEQ ID NO: 61897 - DNA, 600 bp, Chicken  19866894323201_3
aaaacatcagctccagacagctagtttaaattttaaaataatagcatttcaaaaaatatgatcaaataaaatttccctgttcaaaaatctacgtgaattgaggtggactgaaaaaaaaaaagatattcttacaggtgtatctatacatatacacaaacacacctgaattcaggtgaatacatgtatttacacatcaggacataaacagtagttgtctacaacatgaaaaaatttgcagagctcaaaaaggagaaaaagtgcatttgcaacttcaaaggrcttttctcaaataaaagcacrgcagccaacggaatagctgtcacagcctttcttaccatcatcaaacgtatctaccagctgactggggttgatttctgctccaccaatcagaatgttatccagagcccactgygcccgatcagggcctgaaaccacaatgccrttgctgatrgtgaaaggctgccaccaccgcaagcgggttgtgttggtcagagcatgttcggggagaaggatgtagtcatgcctgactgagatgtatttttggtaatccatctcatgaagcaaagtccaagttattcctagaatggaaagatgcagatt

SEQ ID NO: 61898 - DNA, 600 bp, Chicken  19866894323201_4
aaaaaaaaagatattcttacaggtgtatctatacatatacacaaacacacctgaattcaggtgaatacatgtatttacacatcaggacataaacagtagttgtctacaacatgaaaaaatttgcagagctcaaaaaggagaaaaagtgcatttgcaacttcaaaggrcttttctcaaataaaagcacrgcagccaacggaatagctgtcacagcctttcttaccatcatcaaacgtatctaccagctgactggggttgatttctgctccaccaatcagaatgttatccagagcccactgygcccgatcagggcctgaaaccacaatgccrttgctgatrgtgaaaggctgccaccaccgcaagcgggttgtgttggtcagagcatgttcggggagaaggatgtagtcatgcctgactgagatgtatttttggtaatccatctcatgaagcaaagtccaagttattcctagaatggaaagatgcagatttagtaataaaaacaagtgtaagataggatcttctaaaagattaaagggagataataggaaatcaggaataacagctatggtcttctaataaacaaayattaacttcttaagg

SEQ ID NO: 61899 - DNA, 600 bp, Chicken  19866894323201_5
atacatatacacaaacacacctgaattcaggtgaatacatgtatttacacatcaggacataaacagtagttgtctacaacatgaaaaaatttgcagagctcaaaaaggagaaaaagtgcatttgcaacttcaaaggrcttttctcaaataaaagcacrgcagccaacggaatagctgtcacagcctttcttaccatcatcaaacgtatctaccagctgactggggttgatttctgctccaccaatcagaatgttatccagagcccactgygcccgatcagggcctgaaaccacaatgccrttgctgatrgtgaaaggctgccaccaccgcaagcgggttgtgttggtcagagcatgttcggggagaaggatgtagtcatgcctgactgagatgtatttttggtaatccatctcatgaagcaaagtccaagttattcctagaatggaaagatgcagatttagtaataaaaacaagtgtaagataggatcttctaaaagattaaagggagataataggaaatcaggaataacagctatggtcttctaataaacaaayattaacttcttaagggtagctggtgactgctattcattacaagaa

SEQ ID NO: 61900 - DNA, 600 bp, Chicken  19866894323201_6
cacaaacacacctgaattcaggtgaatacatgtatttacacatcaggacataaacagtagttgtctacaacatgaaaaaatttgcagagctcaaaaaggagaaaaagtgcatttgcaacttcaaaggrcttttctcaaataaaagcacrgcagccaacggaatagctgtcacagcctttcttaccatcatcaaacgtatctaccagctgactggggttgatttctgctccaccaatcagaatgttatccagagcccactgygcccgatcagggcctgaaaccacaatgccrttgctgatrgtgaaaggctgccaccaccgcaagcgggttgtgttggtcagagcatgttcggggagaaggatgtagtcatgcctgactgagatgtatttttggtaatccatctcatgaagcaaagtccaagttattcctagaatggaaagatgcagatttagtaataaaaacaagtgtaagataggatcttctaaaagattaaagggagataataggaaatcaggaataacagctatggtcttctaataaacaaayattaacttcttaagggtagctggtgactgctattcattacaagaataatcttgt

SEQ ID NO: 61901 - DNA, 546 bp, Chicken  19866894323201_7
tccagagcccactgygcccgatcagggcctgaaaccacaatgccrttgctgatrgtgaaaggctgccaccaccgcaagcgggttgtgttggtcagagcatgttcggggagaaggatgtagtcatgcctgactgagatgtatttttggtaatccatctcatgaagcaaagtccaagttattcctagaatggaaagatgcagatttagtaataaaaacaagtgtaagataggatcttctaaaagattaaagggagataataggaaatcaggaataacagctatggtcttctaataaacaaayattaacttcttaagggtagctggtgactgctattcattacaagaataatcttgtaattgtataaaacgatcaattggctggaagccaccaattaataaaatcaagcaggaggattatagaagacttctcccaagcatcagatggaaattttagatggaggaagaacatcaaaaggagaaaaataccttttcaatgaaaaacagtcttactgatttgtatctttctgatgacttctcagatatttat

SEQ ID NO: 61902 - DNA, 600 bp, Chicken  19866894323204_1
gcacatttgtctttaagaaaacctggtaatgcatttggggaagtttgggataaatcaaactgtacggtgcccacttctaaaagagagttaaaagaggttgagcgcagaggatattttataaagtacagtggagtagaatagaatatggatatcctgcaaacaaaccaaccaaccaacctttttttcatctccaaaaatcactgttatgagaaggaggatctagcaatacttcaagttttagaaaaacttggaatcaactccagtatttttatgcaaatggaaaacacttgacatatcttsatgaacttcatagtgatttttgcccactaagtaacaaacacaggggtaacaaatgtgtatatttagatgtaaaggagtgttgtcactagacatgtctatacaatgtgaattcagacagttaatgttatgaattcacagygtctgaaattatatgatcacatacagtttcctcccttcaagatcttttcgtgtcaaacatacagcgtggggtgatgttctctaaatggaaatacgtgtctgcataataaagcaagcttctttcttaagattcctgcttaatctactgtagatgtagtaagg

SEQ ID NO: 61903 - DNA, 600 bp, Chicken  19866894323204_2
agaatatggatatcctgcaaacaaaccaaccaaccaacctttttttcatctccaaaaatcactgttatgagaaggaggatctagcaatacttcaagttttagaaaaacttggaatcaactccagtatttttatgcaaatggaaaacacttgacatatcttsatgaacttcatagtgatttttgcccactaagtaacaaacacaggggtaacaaatgtgtatatttagatgtaaaggagtgttgtcactagacatgtctatacaatgtgaattcagacagttaatgttatgaattcacagygtctgaaattatatgatcacatacagtttcctcccttcaagatcttttcgtgtcaaacatacagcgtggggtgatgttctctaaatggaaatacgtgtctgcataataaagcaagcttctttcttaagattcctgcttaatctactgtagatgtagtaaggaatgtgatgaatgagataggaaagaaagacccacggtgaatgaagcagttaaattccacactggagaattatattttatctttctctgaggtccaacgttatcctgggcaactcaatataaccaaaatttttacagttt

SEQ ID NO: 61904 - DNA, 599 bp, Chicken  19866894323205_1
  misc_feature (1)..(12): n is any nucleotide
nnnnnnnnnnnntttattgtgagctgagacttcctgtgctgcagtaaatttcctttctcctttcttcctagcttagatactgcctttgcatcatcctaggaagtgttctatagttatatcttagctgcacaaatcattcctaaagcacactgtactgaacaaagcagtgtttcacaggtttgtatgatagcaaataataaaatgacagagaggactggatgtatttcatttgtgattgaattggacaagattttcgctagagatcaatgagacatggaaaaatattcaattcaatgtaasttttcactgggaaatcagtcaaatgtagtttctctgtatacatctggtggttaggatgaaaaaaaaaatgcactccatgctcatgtaacttattactggagagtaaaatgcgtggatatcaaattcaggtcagcgctgcctaactgctcatgggtgtgtcattgccaatgggaggcgacagctctcaatagctaccctacacagatactgctgcccaagtcctggaaaagtaagttttgagaactggcactgttgtgagaaagcagtacatggaaacagcatgtgatatattccactca

SEQ ID NO: 61905 - DNA, 600 bp, Chicken  19866894323207_1
caatttgcaggcaacattctgagcctgaagtatttattttgaggatgattttgcagcactcagatttaggacaaaattcttttttgaaggcacctgtttcttctgtactgaaaagtgtctcttgtggtcaaggatggagcacagtgatggactcctacgactgaactcaataataacatgacccagtgaccacaagcacctgctaaccaaatcattccttcgaaccttcagatattgccaggtaataacaagaaaaacaaacaacataacaggcaaatccaatacaatcactgcaaaacygttaagaagaggttctctgttccacagcttattaaaacaaggaaggaaaaaaagaagcccattccagcccagcaggtgctgcacaatactcagctgctggaatgcaccctttgcagagcaacagtctgaaagagacattgcctttgcaagaaaatcctgttgaaaaaggagggggtgaagtgaagaatgccacggtaatgatggccaaatgagggctcagtgagtgttcttcctaccaaagtcctaacaaataagcagtctttaacaccagcgaactcctagatgatgtaagtacagaat

SEQ ID NO: 61906 - DNA, 600 bp, Chicken  19866894323210_1
ttctttcaattttcttagctgctataaattgagaaaaagaagatatttattcctttgtaattcttgatattcttcctcacaaaggtggccctgggtctggcaaaagcagccaatgtgaacagttagccaagaaatatggatttactcatctgtccactgctaacctcctccaaaatgagttatcatcactatcagagagaagtaaatttatcaaagacatcatggaatgtggtgaacctgtgcctggagtaagatacaattttatttggggtcctaactgtttacataggcagtagtacrtagattgtctaaaagggtgaaaataagacatgattcctactaatggaaaaggaatctgcaacttgagagagaatcttcctcattgccagatatgtggcacttgtttccttctcctatgccaggactaatttacatttgagttccatacatgatatgaatgaatcataaagtacagtgagacagatgctgtgctatacattgcaaaatgtaagaataagtacaggaaacagaaactttatgtacattttgtagcttcttatttcagattcagagctggtcctcctagcagctgttctaatt

SEQ ID NO: 61907 - DNA, 600 bp, Chicken  19866894323216_1
atgtgtgaagaagttgaatgattatacttgcaaacagttaaaaagtgtaatcttttgttagatgtatcagaaaatttgtttgaatatttcctgtcttgctagaggcagagttgcaatactgtcaacctgaggagaaggtatacagctttgtaagtgtgtgggtggcttgcacaaacctctgggattctgtaggctccaaccccgcatttcagagtggccttgctctggatttagctgccacccttttttgaacagtgtttgtgaaggattttacaggtgatgcatagggatgctaattgyatttatcattttgtaaaagataactaagaaacagccagaactgccacagtgatggcatgctagcttttcatggtttgtacttataaataatactggttgtatgatgttttaccagcttataaatgctctaattacatattacggcagtttcgtgtattacaataattgcatctgtgatgttcattggtaataaaatcaagaagaggacatcaaagaactgcaggtctccaaatgcaacttaggtgatttcagacataataatctttcattgatctattaattttaggcaagtaaatgatg

SEQ ID NO: 61908 - DNA, 600 bp, Chicken  19866894323226_1
tgacagagattgtatgagtgctgcaggctatccattcatttaattacccccccgcagcaggactagagctgcgatttcatggccatcccagagccccagtttttctgacagctgcagcccgagctgccccagctgcagatcagggctctcagggtgacctctttgggctgtgcagggaatgtgccacccacccaccagcccctccaccacacacactgctggcgagaaacacagcgaagaaatttgtagcaggcaaaaatgagtgagcttaaatacaaagatagtttgggtttgggggcyggagaaggatattggctatagcaaagcacctatctggaaacatcccagaagccaggcatccgcacatcgcatcratgtcagccagaacatttcagggttgggtcttcttccatcaaagacacactaaccccggccctggagaagcagatgacccaccttgctcagctgcactcaggatatacacccagctctgtcttgaaacacaccagttctgcaagagccagtctggatctccagctctgcaatagcatcagcaagacagagacagacctgaacaccaggctggcaaatcccagagtg

SEQ ID NO: 61909 - DNA, 600 bp, Chicken  19866894323226_2
tttcatggccatcccagagccccagtttttctgacagctgcagcccgagctgccccagctgcagatcagggctctcagggtgacctctttgggctgtgcagggaatgtgccacccacccaccagcccctccaccacacacactgctggcgagaaacacagcgaagaaatttgtagcaggcaaaaatgagtgagcttaaatacaaagatagtttgggtttgggggcyggagaaggatattggctatagcaaagcacctatctggaaacatcccagaagccaggcatccgcacatcgcatcratgtcagccagaacatttcagggttgggtcttcttccatcaaagacacactaaccccggccctggagaagcagatgacccaccttgctcagctgcactcaggatatacacccagctctgtcttgaaacacaccagttctgcaagagccagtctggatctccagctctgcaatagcatcagcaagacagagacagacctgaacaccaggctggcaaatcccagagtgatctgcagttggaaagccctggaaaatatggattatacagagaagctcgcaaaggaccttacaagtagcatgaa

SEQ ID NO: 61910 - DNA, 600 bp, Chicken  19866894323233_1
agggacaaggtgagccagtgacagtgtgtcaaagggggcacaccgaggggaacgtggcagcagccttccttcttcctggggaaacagcagagggatttcttttctgccagcagcgagctgtgcaaggctgcagctcagtgacatgacagcgttttgctggaggctgcagctccccgtttcccagggatttgctcctctgcccgtcacatcacctctttcaggaagggaaatggtaattcgtaattgtgcaaattgacacccggtggaggaaaggaaaaaaaaagagcacgctgtcagaaycgctcgctcctgcacagcagagctgtactgagggtgatgcgggtggaggaatagctgctgggacaactcagcctcggggcttccattaaaaacagctgggtgaggcaatgtgggagggaagcaaacttcccttaattaatttcgatttcaaaaagtcttcaaaggccaacactgcttaccgtctcctttctgtttgtttgtttgctttggtacaaacaaaaagcgtgtttgggacttttaaaagatcaggctgggaatgaggttgtattactccaatctgcatcgtgaatataaatcaca

SEQ ID NO: 61911 - DNA, 600 bp, Chicken  19866894323248_1
ttacgctattcctgtgcaggtatttcaggaagacatcagcattcctccgggccagcgtgcaagcctagagagtcagcagtattactttctttgaagatgcacacgtagaaaaccagaaagagatgaaggaccttcctctctccctttttgtgcatatcccactctctacactttttaaaagtgctgcttattaagttctcctacaagtaagtcaagctaaccagtaaaacagtttccccaacaaacagcggttaatccttacttacaaacaaaataaacacttttcatctgaagatcctraaagcaattacctctagagatttcagcatgactcagatattacagagaagtttgttttgtgtatctgccacttgaaatgatttattgcataaacagagtgcacatgcttctgacatcacctggatatgctcaacatccaccagtgttttagacagtaagtgatggctctgctaaagtgaaaccaaaagtgctcagatatgaagacatgccctttaaaggccttgagaagtttcagtcctcactcagctcagctgccttcttcatcttaatatacaacaagtactttatatggcctgactg

SEQ ID NO: 61912 - DNA, 600 bp, Chicken  19866894323254_1
actgaagaactgcaggttgaggagggaattttctttaattgaaacatgttaggtgtctcatggctgttcagtcaatgaatccatcatgatagtactgtctccagggaaacttggaaagttattacctagaaactcaatgaagatcaattatgtcctaccacctgcacactgagcaatacatttgaagaatggcaactgcatgaaatggaaacagagtggcaaaggaggtttttttcctgccttagtatatcagtcatagtaagcatcttgttctctctgtgtcctatctgatgaattacrattggaaagtgctttcagcaccaggaaaaagtttgtcttgctacaatgcacccctttgctgtagggtgacaaagtatctttacaacagttgggtctttgtgcctgggtaccaccaagagcaagctcaaagcaaagaaggtcccccagtagagaaggctaaaccccagagwctttcttggatgggccagcaaaaagctgtcttaggtttgcttaatcagcaaatgctgctaattgccagcaatggggagatatagaaccccccttcagcacaataaagggagtttttaaaaggtgtgagag

SEQ ID NO: 61913 - DNA, 600 bp, Chicken  19866894323254_2
gagcaatacatttgaagaatggcaactgcatgaaatggaaacagagtggcaaaggaggtttttttcctgccttagtatatcagtcatagtaagcatcttgttctctctgtgtcctatctgatgaattacrattggaaagtgctttcagcaccaggaaaaagtttgtcttgctacaatgcacccctttgctgtagggtgacaaagtatctttacaacagttgggtctttgtgcctgggtaccaccaagagcaagctcaaagcaaagaaggtcccccagtagagaaggctaaaccccagagwctttcttggatgggccagcaaaaagctgtcttaggtttgcttaatcagcaaatgctgctaattgccagcaatggggagatatagaaccccccttcagcacaataaagggagtttttaaaaggtgtgagagttgcaagaactgctgcagaagtgattcctgtaatgattcctagatttaattattattaatgactatacagtgctcagagccattattatggctctttattaaatgcacagcatgcacttttttttttgtatcctggaattacgaattctaatggctgttcactactagaa

SEQ ID NO: 61914 - DNA, 600 bp, Chicken  19866894323255_1
tggaaggaaggtggccagactctagcttagaccacactggaacatctatcacaaaacacagaaagggagaaagcacaattacactgagaaagtcagaaagacgtcgggctacattaaacatttacaagactgaggaagctatgcaggctggtactactttatgtcgaaatatctgcctcagcaatgcttcaggtctctggatatactacaacacaaaccaagagtctagtgcttccatttagaagtctaccgtatgaacttagagattgaaaacgtccattcctatgaacagaatgtctraaaatgtaacagtgatagcaggatagcatcccaagtctcaaaaccacagccccaggaaggctctgctaccaattcaactctgagatttaggaccaagttcaactactctgatacagcgtcgtcagtctttacaaaggttccggagtacatagcttgacttagaaactactacactgaaatgcaccctgcaccattataaactgagaaacaaaataccgagctagatacactcatacctacagcctgaaaaattctgcactccagcaagcttacataatctctgaaactataggattactt

SEQ ID NO: 61915 - DNA, 599 bp, Chicken  19866894323256_1
  misc_feature (1)..(64): n is any nucleotide
nnnnnnnnnnnnnnnnnnnnnnnnnnnnnnnnnnnnnnnnnnnnnnnnnnnnnnnnnnnnnnnntattataatagcccagaagaggaggggagtgacgggggaaaatgatggaaaggccatggattccaatataaaaagagatcaataaggagtgttgggagcaattaacctgtatgaatgaaatagaaaaagtgttcctctgagatctgaaatgatgaggaaagtggatgagtcaaagcaatacatagaaattattcagagcaaagaatcagtttgactctttactttcatgtattaartactcacaaggagyrgctcgagaacattctacagaccaagagcttttgaataacaaaaacatctgagatgaatgaaagctgttcacaagtagggctgaagcagcgagaggagctaaatctgtcagataagctgtctactataaatacaaaatatctgctcttcccttctccattccgcattgcctgaatttcctttgaagttccattaacaatgagattcttcagtttatttcctaaactgttatttggaatggctgcacaatatcagcagcatccatgctttgccctcraggcatgaa

SEQ ID NO: 61916 - DNA, 599 bp, Chicken  19866894323256_2
  misc_feature (1)..(50): n is any nucleotide
nnnnnnnnnnnnnnnnnnnnnnnnnnnnnnnnnnnnnnnnnnnnnnnnnntattataatagcccagaagaggaggggagtgacgggggaaaatgatggaaaggccatggattccaatataaaaagagatcaataaggagtgttgggagcaattaacctgtatgaatgaaatagaaaaagtgttcctctgagatctgaaatgatgaggaaagtggatgagtcaaagcaatacatagaaattattcagagcaaagaatcagtttgactctttactttcatgtattaartactcacaaggagyrgctcgagaacattctacagaccaagagcttttgaataacaaaaacatctgagatgaatgaaagctgttcacaagtagggctgaagcagcgagaggagctaaatctgtcagataagctgtctactataaatacaaaatatctgctcttcccttctccattccgcattgcctgaatttcctttgaagttccattaacaatgagattcttcagtttatttcctaaactgttatttggaatggctgcacaatatcagcagcatccatgctttgccctcraggcatgaaggcctcctgagagg

SEQ ID NO: 61917 - DNA, 599 bp, Chicken  19866894323256_3
  misc_feature (1)..(49): n is any nucleotide
nnnnnnnnnnnnnnnnnnnnnnnnnnnnnnnnnnnnnnnnnnnnnnnnntattataatagcccagaagaggaggggagtgacgggggaaaatgatggaaaggccatggattccaatataaaaagagatcaataaggagtgttgggagcaattaacctgtatgaatgaaatagaaaaagtgttcctctgagatctgaaatgatgaggaaagtggatgagtcaaagcaatacatagaaattattcagagcaaagaatcagtttgactctttactttcatgtattaartactcacaaggagyrgctcgagaacattctacagaccaagagcttttgaataacaaaaacatctgagatgaatgaaagctgttcacaagtagggctgaagcagcgagaggagctaaatctgtcagataagctgtctactataaatacaaaatatctgctcttcccttctccattccgcattgcctgaatttcctttgaagttccattaacaatgagattcttcagtttatttcctaaactgttatttggaatggctgcacaatatcagcagcatccatgctttgccctcraggcatgaaggcctcctgagaggt

SEQ ID NO: 61918 - DNA, 600 bp, Chicken  19866894323256_4
atgtattaartactcacaaggagyrgctcgagaacattctacagaccaagagcttttgaataacaaaaacatctgagatgaatgaaagctgttcacaagtagggctgaagcagcgagaggagctaaatctgtcagataagctgtctactataaatacaaaatatctgctcttcccttctccattccgcattgcctgaatttcctttgaagttccattaacaatgagattcttcagtttatttcctaaactgttatttggaatggctgcacaatatcagcagcatccatgctttgccctcraggcatgaaggcctcctgagaggtgtgggagatgaaagttttcagggacttgaatcataaaagtattcaggcacccagatatgcaggtcactactatagggattccaaaagcaacttagcaacaattcatgattatccaaatgatgaattattttggtgatccaaatatcaaataacatttcagcaaataaggttcctgtgttccagcacgtaaatcatgttgaaaaatgtgtccaatgacacactgttgttgttttcttctctgcatcccaacttccattcacgtcttccataaatact

SEQ ID NO: 61919 - DNA, 600 bp, Chicken  19866894323284_1
ccacttaggaaatagtatctgaaaatagactaagatatctccaaaatgtacccagtctttggcagctattacctttaaatggtgggataatttacaggaacatacctgctattttaccttgaaacagctatacataatgtttagaaagcagaaagttcaggctaaaactgcagtgctcagcagaaatttactccctccactacagtaaagaaaatttcagacattatatgatctttgagcagttcactcgaacttttaactagtgggagtatcactcttctgaaggctaaatggaccacyaagttactgagttggataagatccatacaaggttgcaaggaacygtatgtagccttgccagacaccacattagccttacaactgccctggctcctgaactgaagggccgtacagcagtcatgctggaagggcattatgtcacaytgcttgaggatccaaggagacagcgttcaagctctgcataacaaactccacaatggcaggccagggcagaaactctggaatgatctctagccagttttcttaaatcctctgttttctccttattagagagtagttaccagtttgtcattttacaca

SEQ ID NO: 61920 - DNA, 600 bp, Chicken  19866894323284_2
aatgtacccagtctttggcagctattacctttaaatggtgggataatttacaggaacatacctgctattttaccttgaaacagctatacataatgtttagaaagcagaaagttcaggctaaaactgcagtgctcagcagaaatttactccctccactacagtaaagaaaatttcagacattatatgatctttgagcagttcactcgaacttttaactagtgggagtatcactcttctgaaggctaaatggaccacyaagttactgagttggataagatccatacaaggttgcaaggaacygtatgtagccttgccagacaccacattagccttacaactgccctggctcctgaactgaagggccgtacagcagtcatgctggaagggcattatgtcacaytgcttgaggatccaaggagacagcgttcaagctctgcataacaaactccacaatggcaggccagggcagaaactctggaatgatctctagccagttttcttaaatcctctgttttctccttattagagagtagttaccagtttgtcattttacacacattaaaaaaagcacctttaaaaaaaagacagaaatttaacagt

SEQ ID NO: 61921 - DNA, 600 bp, Chicken  19866894323284_3
aaagcagaaagttcaggctaaaactgcagtgctcagcagaaatttactccctccactacagtaaagaaaatttcagacattatatgatctttgagcagttcactcgaacttttaactagtgggagtatcactcttctgaaggctaaatggaccacyaagttactgagttggataagatccatacaaggttgcaaggaacygtatgtagccttgccagacaccacattagccttacaactgccctggctcctgaactgaagggccgtacagcagtcatgctggaagggcattatgtcacaytgcttgaggatccaaggagacagcgttcaagctctgcataacaaactccacaatggcaggccagggcagaaactctggaatgatctctagccagttttcttaaatcctctgttttctccttattagagagtagttaccagtttgtcattttacacacattaaaaaaagcacctttaaaaaaaagacagaaatttaacagtacagattaatcactgcaacagtattttcctgtgcactgaatagyttcttgagaacactgtccccctttcagcagcctattttatttctttcttgtctata

SEQ ID NO: 61922 - DNA, 600 bp, Chicken  19866894323284_4
ggctcctgaactgaagggccgtacagcagtcatgctggaagggcattatgtcacaytgcttgaggatccaaggagacagcgttcaagctctgcataacaaactccacaatggcaggccagggcagaaactctggaatgatctctagccagttttcttaaatcctctgttttctccttattagagagtagttaccagtttgtcattttacacacattaaaaaaagcacctttaaaaaaaagacagaaatttaacagtacagattaatcactgcaacagtattttcctgtgcactgaatagyttcttgagaacactgtccccctttcagcagcctattttatttctttcttgtctataggccttcactgttttgatggagttgatagtcacatattgcatttcagggaaggacaataaatatcaaatatctctgtctctgctgctatgcccactagacagtctatcagtgcttaccctgacactctaaaccatctggacagcttccaagggggaacaaaataaaataaaataaaataagagaaagaagagtcagtctgctgtgtaaatattttcccttcaactcccacctggaaacagattt

SEQ ID NO: 61923 - DNA, 600 bp, Chicken  19866894323303_1
gcagaactccacagctcatcaggcagcaagtggaaggatgatttgtgctctaaatgagctcctgcagcaaagatgccagcagctgacacccagcccaagctgggccacaggaacaggcttcaagggctgtgaattgttgctttcactctgcaggcactgagatacatcactctgtaggagcagcctgagtgtgtgctgttagtacaggacacgcatgcatgtctacctcctgtaaatggggtgtgtgtctggctgcagcacacacaaagcctgccttccctccccttgtctgtatcccaygctgcaggcacattcacaggctctgaggtttgcaaagtgaacccacaggggacttaacttgcagttaagcatgtggaacagtggtacagtgctctgttccctccaggaagaacagagaggcagtgctggagggagggaaataatccctgccaacttagatgggtcctggacctggaccttagtttctaagaaacacaagcacttgtctcaggccatttaggaaagcagatctccaaaccgagtgaatgagagagaagagccactcagggcttcttaaacctcatccgtaggacctgacat

SEQ ID NO: 61924 - DNA, 600 bp, Chicken  19866894323306_1
agaggacaccactttgttttcaaagactaaatgaagcgcacagtcagatttattatatgcttcaaaaagaagagatatgctctccaaataaagaatccatgctcaaacgcacagcaaaatgaatgtacgattttcctatttcacattcttcaccctgagcatgaagtatacacacaagcctttctaagcaggttaattaatggacagaaaaataaaacccatgttaataacagaaaattagggaagctcaagcccttcaaggctttaaaagcaaacagttaaaatttgctgttcaccacrgggtagctgagaagaaaaaacttaaggatggaaaaattgatacaatgtctgtttcttctttatcttaaggctaagcaagtagagcgagatcaaagtrttataaataaaaaaagaacaaaatagacaaataagtctaggtgagtctgaagtaatatttgctataagcttctggcactcaagggccttatgtagaaacaaacagcttctgggttttaaaacccaatgaatcaatctaatttatagccatctgatctttgtgttaaaacacagaaaggaaggaaaaaagtaccatggcatgaa

SEQ ID NO: 61925 - DNA, 600 bp, Chicken  19866894323306_2
catgctcaaacgcacagcaaaatgaatgtacgattttcctatttcacattcttcaccctgagcatgaagtatacacacaagcctttctaagcaggttaattaatggacagaaaaataaaacccatgttaataacagaaaattagggaagctcaagcccttcaaggctttaaaagcaaacagttaaaatttgctgttcaccacrgggtagctgagaagaaaaaacttaaggatggaaaaattgatacaatgtctgtttcttctttatcttaaggctaagcaagtagagcgagatcaaagtrttataaataaaaaaagaacaaaatagacaaataagtctaggtgagtctgaagtaatatttgctataagcttctggcactcaagggccttatgtagaaacaaacagcttctgggttttaaaacccaatgaatcaatctaatttatagccatctgatctttgtgttaaaacacagaaaggaaggaaaaaagtaccatggcatgaagaggggtagaggaaagacagagtgaggagagtactgttcaaaccgaacacattattcagttttcatttagtacagataaaagttcagcatgaagact

SEQ ID NO: 61926 - DNA, 426 bp, Chicken  19866894323307_1
atcccttggctatggttgaattagctactaagggctttcagactatagattttttgttacccactttctggcagaaacacagggcatgcttgtaaataatagtgaagttaaaggcctccaaactgcagtgcagtgccaggcagaaatatgaaactgaatcttagaccaatagagtgttaaatggcactgcggtcattcctgtgcaccattctagaaggaaaagctgacttgactggctcagacccagcaaagctaaagcaagtaaactgcttcagcttctttaaaagatgcagtcaccarcagcttagggctttttgtgccatatttgatttacatatgcttatttgcagttttataatcactaagggctcttggactttactcatattcttcacaaggcactttgccagtgccagaaagattttt

SEQ ID NO: 61927 - DNA, 600 bp, Chicken  19866894323319_1
tctcaagagaaatatctttagagggcctacataacttttcttaatttacaactcccattccaataaacaattcagtattttatttgctttgatttataccattgtgtttttttcttttcctcaccaaataactgaccaatggattaaaatggtacttctcacctaagggcagttaccaaggcaacaaatatctgcgaaagtcctagggaatggtaaactaaaagacaagaagcaatactgaaaatgcctagattgtagtacagcattaagacactcagctgaagcctgataaacaagaaygccgaaacatatctgagaacactggactatcacagctgcttcggtagcaaatctcacattatccctacttaaggcttctgctggtacgtagcggggcagccaggtcctggagcagatataagaattctgcccctacccagaggtctcttcatcagcagagatacaacgggacataaagctgccggatgcatgctgcatccacatacacatttcctataacaaagtaaaggtgtaaggatttttaaatacgtgccacagcaatatcatttccagtaaagctgccccttacgcacttgggta

SEQ ID NO: 61928 - DNA, 599 bp, Chicken  19866894323321_1
  misc_feature (1)..(186): n is any nucleotide
nnnnnnnnnnnnnnnnnnnnnnnnnnnnnnnnnnnnnnnnnnnnnnnnnnnnnnnnnnnnnnnnnnnnnnnnnnnnnnnnnnnnnnnnnnnnnnnnnnnnnnnnnnnnnnnnnnnnnnnnnnnnnnnnnnnnnnnnnnnnnnnnnnnnnnnnnnnnnnnnnnnnnnnnnnnnnnnnnnnnnnnnnngactgacctttggacagcaatgaatcttcatgactgtgctatgaccctgatttagggactataaagctgtctttctaccttttgtctctaaatcaattctgccaatgctactcygaaataaaygagcagtgcatgytcttgatcattaaaatatcatctaggatgcaccagtctgtcctggtgataggtctcagcagaaggcatggttggagggtcaggggtaaggtcttttacttttctctggagttcagtgggacacatctccctcagtccttggtctactggtctrctgttggtggtgctcaatggctatagcacaagaaaggctgtaatccacacacagttgcccccagagctggagcacctggaaatcctgtgttcccttgcaaagcaagatgacataaagtgaacaa

SEQ ID NO: 61929 - DNA, 599 bp, Chicken  19866894323321_2
  misc_feature (1)..(177): n is any nucleotide
nnnnnnnnnnnnnnnnnnnnnnnnnnnnnnnnnnnnnnnnnnnnnnnnnnnnnnnnnnnnnnnnnnnnnnnnnnnnnnnnnnnnnnnnnnnnnnnnnnnnnnnnnnnnnnnnnnnnnnnnnnnnnnnnnnnnnnnnnnnnnnnnnnnnnnnnnnnnnnnnnnnnnnnnnnnnnnnnngactgacctttggacagcaatgaatcttcatgactgtgctatgaccctgatttagggactataaagctgtctttctaccttttgtctctaaatcaattctgccaatgctactcygaaataaaygagcagtgcatgytcttgatcattaaaatatcatctaggatgcaccagtctgtcctggtgataggtctcagcagaaggcatggttggagggtcaggggtaaggtcttttacttttctctggagttcagtgggacacatctccctcagtccttggtctactggtctrctgttggtggtgctcaatggctatagcacaagaaaggctgtaatccacacacagttgcccccagagctggagcacctggaaatcctgtgttcccttgcaaagcaagatgacataaagtgaacaatctggggca

SEQ ID NO: 61930 - DNA, 599 bp, Chicken  19866894323321_3
  misc_feature (1)..(164): n is any nucleotide
nnnnnnnnnnnnnnnnnnnnnnnnnnnnnnnnnnnnnnnnnnnnnnnnnnnnnnnnnnnnnnnnnnnnnnnnnnnnnnnnnnnnnnnnnnnnnnnnnnnnnnnnnnnnnnnnnnnnnnnnnnnnnnnnnnnnnnnnnnnnnnnnnnnnnnnnnnnnnnnnnnnngactgacctttggacagcaatgaatcttcatgactgtgctatgaccctgatttagggactataaagctgtctttctaccttttgtctctaaatcaattctgccaatgctactcygaaataaaygagcagtgcatgytcttgatcattaaaatatcatctaggatgcaccagtctgtcctggtgataggtctcagcagaaggcatggttggagggtcaggggtaaggtcttttacttttctctggagttcagtgggacacatctccctcagtccttggtctactggtctrctgttggtggtgctcaatggctatagcacaagaaaggctgtaatccacacacagttgcccccagagctggagcacctggaaatcctgtgttcccttgcaaagcaagatgacataaagtgaacaatctggggcaatgctcattgttc

SEQ ID NO: 61931 - DNA, 599 bp, Chicken  19866894323321_4
  misc_feature (1)..(11): n is any nucleotide
nnnnnnnnnnngactgacctttggacagcaatgaatcttcatgactgtgctatgaccctgatttagggactataaagctgtctttctaccttttgtctctaaatcaattctgccaatgctactcygaaataaaygagcagtgcatgytcttgatcattaaaatatcatctaggatgcaccagtctgtcctggtgataggtctcagcagaaggcatggttggagggtcaggggtaaggtcttttacttttctctggagttcagtgggacacatctccctcagtccttggtctactggtctrctgttggtggtgctcaatggctatagcacaagaaaggctgtaatccacacacagttgcccccagagctggagcacctggaaatcctgtgttcccttgcaaagcaagatgacataaagtgaacaatctggggcaatgctcattgttctcctccatccactcctgaaatcaactcaaaactcagttcagaagcagaagagcaaaacagagaggagattctgagcttccagggatgctcacttgactccctgttgccttcttctctgtgtagccccactataaacacacctgactatgccta

SEQ ID NO: 61932 - DNA, 599 bp, Chicken  19866894323327_1
  misc_feature (1)..(51): n is any nucleotide
nnnnnnnnnnnnnnnnnnnnnnnnnnnnnnnnnnnnnnnnnnnnnnnnnnntgattacatctattccccacttactgtcaagttgtcatattaaaagtgctttttttcccctcctttttaagaaatgcaataaccaaacgaaaccaaagaaaaataaggtctctttagaagaagactgattttactgaaggttcccaaggcattttactctccctgaggcactgtaataagcttccatggggtatttactagctctaaacagagctaacagaagactaatgagaatattttggtgaggaracaagaggcaactccccttgataggtgttaatttaaacacattcatcagtcaagagcaagagaagcaccttttccctcagctgctggagggcaccatccrctcccccaggtgttgtacaacgagctgactatttgctctcaggctttttgttataaatgaggaagtcagaaatgtcgtgccacacattgctgtcatcrtacaggtaggtcatggaggcctgcagagaaggctgcagagtctgtcggtggtattcaaagagccagagaaccgttccccacaccagagcagcaacaagtgg

SEQ ID NO: 61933 - DNA, 600 bp, Chicken  19866894323327_2
tttttttcccctcctttttaagaaatgcaataaccaaacgaaaccaaagaaaaataaggtctctttagaagaagactgattttactgaaggttcccaaggcattttactctccctgaggcactgtaataagcttccatggggtatttactagctctaaacagagctaacagaagactaatgagaatattttggtgaggaracaagaggcaactccccttgataggtgttaatttaaacacattcatcagtcaagagcaagagaagcaccttttccctcagctgctggagggcaccatccrctcccccaggtgttgtacaacgagctgactatttgctctcaggctttttgttataaatgaggaagtcagaaatgtcgtgccacacattgctgtcatcrtacaggtaggtcatggaggcctgcagagaaggctgcagagtctgtcggtggtattcaaagagccagagaaccgttccccacaccagagcagcaacaagtgggaagggatcctgcctgggctgtgggatgtagcccttctccacggccagccgagacaagccgaacaggattcgagacagcaggtacataacgatctgcacga

SEQ ID NO: 61934 - DNA, 600 bp, Chicken  19866894323327_3
ggcattttactctccctgaggcactgtaataagcttccatggggtatttactagctctaaacagagctaacagaagactaatgagaatattttggtgaggaracaagaggcaactccccttgataggtgttaatttaaacacattcatcagtcaagagcaagagaagcaccttttccctcagctgctggagggcaccatccrctcccccaggtgttgtacaacgagctgactatttgctctcaggctttttgttataaatgaggaagtcagaaatgtcgtgccacacattgctgtcatcrtacaggtaggtcatggaggcctgcagagaaggctgcagagtctgtcggtggtattcaaagagccagagaaccgttccccacaccagagcagcaacaagtgggaagggatcctgcctgggctgtgggatgtagcccttctccacggccagccgagacaagccgaacaggattcgagacagcaggtacataacgatctgcacgaagagaaaacccagagaacatcaggaaaagagcctggctggtaaatctgatcagagcaagtgattcagctgtgataagctgtgcaggagaggcagaaac

SEQ ID NO: 61935 - DNA, 600 bp, Chicken  19866894323353_1
atttctaaaaagagaagggctataaacgggccgcgttgtgagcgctttttaaactttcattctctcattaatcagttacaagaataagtcaaatcagagccgtggtgacggcctcacagaagcccatattcgggaagagatctatttccattcacacagtacagaaaaacccctcacgcaacaactccaatacagcccccatacctcagtcagcccccgtggaaggagggctcattttgtagaacacacctcctatttctgaaccattcccgtttcaagatgaaatactctcacacacaygtgttggtggctgggagacacgttgggatctttcttgagcagaagtgctctataaatgtaaaatatgcaattgacagctcaatgaccccatcacgataagctattgagtcaaactctgctcttcccaatcatcctttttggtacagaaaacataaattttcatcagcattgaaaaggatgtgcttctgaggtacgtccattcgggaatgtgcctgatgaccttttgattttgatgataacagccttgttgtaattatatatacatttatactggagtatttaaagcgctattggagatga

SEQ ID NO: 61936 - DNA, 600 bp, Chicken  19866894323355_1
tcctttctcattctttctgtggaactgcctcactgatgcacagctccaaattttgctctgttacccatctatgcatgttaagaagagctttgcaatcatttgggaaatcagctgtaatttgctcttttatgaaaccaaaaatcactgtgctatgagtatgtattgagaagttataaacaaatgtgaaagaattgtgtagtaataatgattttagatgcttccaaggacgtgcttgtagtataaaatcattaagactctttaaacgatgtggggtgttgcagtgaataagaaatgcacttygtgcagcgtgggtcgagcagaacattacacgcagaagcatgccaccagaactgtagaaaatataactgtagtagacagatcaaggaaaaggacaatgaatcagtgttaggtacagtccctgggaaagctagaacacaagtatgttccctaagatgaagatgaagatctaaggaagtgtttctgtcaagcttctatgaaaaagaacaaccayagtagttaatttttaggcatcagaaatacaaagtwctttttgaaaaaagcaaacaacaacaaccagcaaacatattatttagctatcag

SEQ ID NO: 61937 - DNA, 600 bp, Chicken  19866894323355_2
tagatgcttccaaggacgtgcttgtagtataaaatcattaagactctttaaacgatgtggggtgttgcagtgaataagaaatgcacttygtgcagcgtgggtcgagcagaacattacacgcagaagcatgccaccagaactgtagaaaatataactgtagtagacagatcaaggaaaaggacaatgaatcagtgttaggtacagtccctgggaaagctagaacacaagtatgttccctaagatgaagatgaagatctaaggaagtgtttctgtcaagcttctatgaaaaagaacaaccayagtagttaatttttaggcatcagaaatacaaagtwctttttgaaaaaagcaaacaacaacaaccagcaaacatattatttagctatcagtaaggcatgaagaatgtggttgtccttagcttgttgtgcttttcctgctgagctggtagttggatacaagtaaaatggcagtctgtagttagcatacaggatagcatggagcactggccagttcagctgacagtgaatttgctgcagtgctcagagtgcagttcagtgatttcccctggcactcacaggtggtgtggcagagcaccagctc

SEQ ID NO: 61938 - DNA, 600 bp, Chicken  19866894323355_3
cattaagactctttaaacgatgtggggtgttgcagtgaataagaaatgcacttygtgcagcgtgggtcgagcagaacattacacgcagaagcatgccaccagaactgtagaaaatataactgtagtagacagatcaaggaaaaggacaatgaatcagtgttaggtacagtccctgggaaagctagaacacaagtatgttccctaagatgaagatgaagatctaaggaagtgtttctgtcaagcttctatgaaaaagaacaaccayagtagttaatttttaggcatcagaaatacaaagtwctttttgaaaaaagcaaacaacaacaaccagcaaacatattatttagctatcagtaaggcatgaagaatgtggttgtccttagcttgttgtgcttttcctgctgagctggtagttggatacaagtaaaatggcagtctgtagttagcatacaggatagcatggagcactggccagttcagctgacagtgaatttgctgcagtgctcagagtgcagttcagtgatttcccctggcactcacaggtggtgtggcagagcaccagctcttagtccttgctgcacctctcctcacctatcggcc

SEQ ID NO: 61939 - DNA, 599 bp, Chicken  19866894323356_1
  misc_feature (1)..(153): n is any nucleotide
nnnnnnnnnnnnnnnnnnnnnnnnnnnnnnnnnnnnnnnnnnnnnnnnnnnnnnnnnnnnnnnnnnnnnnnnnnnnnnnnnnnnnnnnnnnnnnnnnnnnnnnnnnnnnnnnnnnnnnnnnnnnnnnnnnnnnnnnnnnnnnnnnnnnnnnnntgtctgaataacaagagcaagtgagagctgagtcatttcagtgactcatgttagaaacctagtgttgttctctacattataaaatctacttacagttgtgtttctgaacacaatttgtttaagatgtgttgcattgatcagagaagygaaagagatttggcttgcatgttgtatagatcatttctgagcatattattttctttcatggcgagtagcctgtatttcatagccatctggtcatccctggggcagctagcttactcctctcacctgctaaggaaaaattaacgttggaatgaatcttcttaagaggggaaaccttgagyttcatttggctgctgcagtgctgaaatgcgttgtctggcatacaattggacaggggccgatttacatgacggagccaccagcagatgtttttccacctaggcaattcgtgttgttatagc

SEQ ID NO: 61940 - DNA, 600 bp, Chicken  19866894323356_2
gctgagtcatttcagtgactcatgttagaaacctagtgttgttctctacattataaaatctacttacagttgtgtttctgaacacaatttgtttaagatgtgttgcattgatcagagaagygaaagagatttggcttgcatgttgtatagatcatttctgagcatattattttctttcatggcgagtagcctgtatttcatagccatctggtcatccctggggcagctagcttactcctctcacctgctaaggaaaaattaacgttggaatgaatcttcttaagaggggaaaccttgagyttcatttggctgctgcagtgctgaaatgcgttgtctggcatacaattggacaggggccgatttacatgacggagccaccagcagatgtttttccacctaggcaattcgtgttgttatagcaacaaggtaattcatatattgattgtgtaagaagcaaagctactttgctttgaaccgttttgataccttgtgcagagctgttcactcagcatatattaattgcactttaatatccagcgtagtaacgtgtcagttattggagcacctgttgcccgggataagaaaggcagtcttctggtg

SEQ ID NO: 61941 - DNA, 600 bp, Chicken  19866894323356_3
tctttcagctttaaaagtccctcttgtatcaattcctgtatctaatgataccctccagagtagctgcacacatcagtaaccagtattcaccggatagttggaaagcagagatcagctcagagctgttggcaggtttgctcgtgttctgttcttactatgggtgacttgctcttggcattgaagttcctccacttgccaaaagcattcttgttggaacggaggtatctagaacattcactacctatgtcaagcttcttagccttgctttttgtttttccttttgctttctcccccaaactyggcaggctgcacactatcccaaggaagaatggttgtaaatgccctgctttaggctgtgaaacagggggactctagagggtctggagcaaacccagaggttccagctccacagctgggaagtgagagggctcgagaacactggagctgagctcacaggatttctcaggctccttgctccatggagttgggaaacataattgcgcttggtggagtttctgaggcttcttaatttatcagagatgagtttcttttgcagatgtgtttgatgtgttttgcagagaaaatccaggagggcattat

SEQ ID NO: 61942 - DNA, 599 bp, Chicken  19866894323358_1
  misc_feature (1)..(77): n is any nucleotide
nnnnnnnnnnnnnnnnnnnnnnnnnnnnnnnnnnnnnnnnnnnnnnnnnnnnnnnnnnnnnnnnnnnnnnnnnnnnntacccctgtgtgtcacatttttgtaacatggagtttccaagaaaaatattccaatttgcgtcagtaattatgtgttctttatgtattttcatatcgttttctgagtttattttgaattcaaaaattacctttgagtgccaagcctattaaaatctacccttttgtgaaatatcccccagcagttaaatgtatgttgtagattttgtagctgtacatgcttgcrttttttcacyyatttaattataagaattttcctttttacagtagtcccttcatcacttgagccataagccaccaagacctgaagaccatggatggtttatgttcctttgggatcttgcaaggtatttccttagttagagaggagtattttcttgctaatacagtgctcagagcagatgaaatgagagygagtctttcctgctgtgggatggcaaagctggactacggcttctcactgtggggagatgctggaaatcagggttttagccactaacagtgtcagggaaccccttgccctgc

SEQ ID NO: 61943 - DNA, 599 bp, Chicken  19866894323358_2
  misc_feature (1)..(67): n is any nucleotide
nnnnnnnnnnnnnnnnnnnnnnnnnnnnnnnnnnnnnnnnnnnnnnnnnnnnnnnnnnnnnnnnnnntacccctgtgtgtcacatttttgtaacatggagtttccaagaaaaatattccaatttgcgtcagtaattatgtgttctttatgtattttcatatcgttttctgagtttattttgaattcaaaaattacctttgagtgccaagcctattaaaatctacccttttgtgaaatatcccccagcagttaaatgtatgttgtagattttgtagctgtacatgcttgcrttttttcacyyatttaattataagaattttcctttttacagtagtcccttcatcacttgagccataagccaccaagacctgaagaccatggatggtttatgttcctttgggatcttgcaaggtatttccttagttagagaggagtattttcttgctaatacagtgctcagagcagatgaaatgagagygagtctttcctgctgtgggatggcaaagctggactacggcttctcactgtggggagatgctggaaatcagggttttagccactaacagtgtcagggaaccccttgccctgcagcagtgcag

SEQ ID NO: 61944 - DNA, 599 bp, Chicken  19866894323358_3
  misc_feature (1)..(66): n is any nucleotide
nnnnnnnnnnnnnnnnnnnnnnnnnnnnnnnnnnnnnnnnnnnnnnnnnnnnnnnnnnnnnnnnnntacccctgtgtgtcacatttttgtaacatggagtttccaagaaaaatattccaatttgcgtcagtaattatgtgttctttatgtattttcatatcgttttctgagtttattttgaattcaaaaattacctttgagtgccaagcctattaaaatctacccttttgtgaaatatcccccagcagttaaatgtatgttgtagattttgtagctgtacatgcttgcrttttttcacyyatttaattataagaattttcctttttacagtagtcccttcatcacttgagccataagccaccaagacctgaagaccatggatggtttatgttcctttgggatcttgcaaggtatttccttagttagagaggagtattttcttgctaatacagtgctcagagcagatgaaatgagagygagtctttcctgctgtgggatggcaaagctggactacggcttctcactgtggggagatgctggaaatcagggttttagccactaacagtgtcagggaaccccttgccctgcagcagtgcagc

SEQ ID NO: 61945 - DNA, 429 bp, Chicken  19866894323358_4
tacccctgtgtgtcacatttttgtaacatggagtttccaagaaaaatattccaatttgcgtcagtaattatgtgttctttatgtattttcatatcgttttctgagtttattttgaattcaaaaattacctttgagtgccaagcctattaaaatctacccttttgtgaaatatcccccagcagttaaatgtatgttgtagattttgtagctgtacatgcttgcrttttttcacyyatttaattataagaattttcctttttacagtagtcccttcatcacttgagccataagccaccaagygagtctttcctgctgtgggatggcaaagctggactacggcttctcactgtggggagatgctggaaatcagggttttagccactaacagtgtcagggaaccccttgccctgcagcagtgcagcctgagtt

SEQ ID NO: 61946 - DNA, 599 bp, Chicken  19866894323371_1
  misc_feature (1)..(220): n is any nucleotide
nnnnnnnnnnnnnnnnnnnnnnnnnnnnnnnnnnnnnnnnnnnnnnnnnnnnnnnnnnnnnnnnnnnnnnnnnnnnnnnnnnnnnnnnnnnnnnnnnnnnnnnnnnnnnnnnnnnnnnnnnnnnnnnnnnnnnnnnnnnnnnnnnnnnnnnnnnnnnnnnnnnnnnnnnnnnnnnnnnnnnnnnnnnnnnnnnnnnnnnnnnnnnnnnnnnnnnnnnnnnctgaaggtagacaatattttctgtctcgccaatgtttactcagcacgagaatcctgttagctaccattttattaagacaygaatatagcgtggaaatatgtgtctgcctgtakaaatgccctttccactgcccatcaatcttgcactaattagaaaaagaaaaatatttttaaaccaattaatgtcattgggaaacattccagtaattctcaaaacacactgttgcagtgatagatatatttcaattatttcaaagcatttcacaaagggctgagcaagcccaacgggagacagaggggatggatggcccatggaggggctsctggctctccrtatgggatgcgggctcaaggtgaggtgaggccagcagtccgtgctc

SEQ ID NO: 61947 - DNA, 599 bp, Chicken  19866894323371_2
  misc_feature (1)..(187): n is any nucleotide
nnnnnnnnnnnnnnnnnnnnnnnnnnnnnnnnnnnnnnnnnnnnnnnnnnnnnnnnnnnnnnnnnnnnnnnnnnnnnnnnnnnnnnnnnnnnnnnnnnnnnnnnnnnnnnnnnnnnnnnnnnnnnnnnnnnnnnnnnnnnnnnnnnnnnnnnnnnnnnnnnnnnnnnnnnnnnnnnnnnnnnnnnnnctgaaggtagacaatattttctgtctcgccaatgtttactcagcacgagaatcctgttagctaccattttattaagacaygaatatagcgtggaaatatgtgtctgcctgtakaaatgccctttccactgcccatcaatcttgcactaattagaaaaagaaaaatatttttaaaccaattaatgtcattgggaaacattccagtaattctcaaaacacactgttgcagtgatagatatatttcaattatttcaaagcatttcacaaagggctgagcaagcccaacgggagacagaggggatggatggcccatggaggggctsctggctctccrtatgggatgcgggctcaaggtgaggtgaggccagcagtccgtgctcccctcaagctcctgagtcacccgactgaagcac

SEQ ID NO: 61948 - DNA, 600 bp, Chicken  19866894323371_3
gtctcgccaatgtttactcagcacgagaatcctgttagctaccattttattaagacaygaatatagcgtggaaatatgtgtctgcctgtakaaatgccctttccactgcccatcaatcttgcactaattagaaaaagaaaaatatttttaaaccaattaatgtcattgggaaacattccagtaattctcaaaacacactgttgcagtgatagatatatttcaattatttcaaagcatttcacaaagggctgagcaagcccaacgggagacagaggggatggatggcccatggaggggctsctggctctccrtatgggatgcgggctcaaggtgaggtgaggccagcagtccgtgctcccctcaagctcctgagtcacccgactgaagcacaaccttgacaaatgtgcacagtgctgtctctcacagttggaatcaccaaagaggctaaaaacagaaccacgcactgcataatctctaacctcgggggacaacaaaaacagagaattgctgtgtcaatctcatttccttgttaggctcattatcataaatgcaggcctttggttttgaatgccacacttcaataacatttacctatcaaca

SEQ ID NO: 61949 - DNA, 600 bp, Chicken  19866894323371_4
gtttactcagcacgagaatcctgttagctaccattttattaagacaygaatatagcgtggaaatatgtgtctgcctgtakaaatgccctttccactgcccatcaatcttgcactaattagaaaaagaaaaatatttttaaaccaattaatgtcattgggaaacattccagtaattctcaaaacacactgttgcagtgatagatatatttcaattatttcaaagcatttcacaaagggctgagcaagcccaacgggagacagaggggatggatggcccatggaggggctsctggctctccrtatgggatgcgggctcaaggtgaggtgaggccagcagtccgtgctcccctcaagctcctgagtcacccgactgaagcacaaccttgacaaatgtgcacagtgctgtctctcacagttggaatcaccaaagaggctaaaaacagaaccacgcactgcataatctctaacctcgggggacaacaaaaacagagaattgctgtgtcaatctcatttccttgttaggctcattatcataaatgcaggcctttggttttgaatgccacacttcaataacatttacctatcaacagctgctgaaat

SEQ ID NO: 61950 - DNA, 600 bp, Chicken  19866894323371_5
ttattattatttcttgaggttcagctacttcccatccttcctccactcactcggagtactctgcaataatcactttacaggtctcaaacccccagtgccagtaaaatggaaactcataccagtaagcagatagggaaagacgcaaccatcatgtcaggatcaaaccccaggcacagcacagcctgagggaaccatacaatggcctgggttggaagggaccttacagcccaccagttccaaccccctgccataagcagggctgccacccactagatgaggctgcccagggccccatccaamctggcctcgaaagcctccaggacagggcatctacagcttctcggggcagcctgttccctctgagtgtgtccagaggagggctaggaaaatgatcagagggcacctctccaaggctgagggtgatgggactgttcagactggagaagagaaggctctggggacatctcattgcagccttccagtacctaaacagagcttataaacagaagggagactgactttttacacagtctgattgtgacaggacaggggaaaatggctttaaactaagagagacgagatttacattagatgttaggg

SEQ ID NO: 61951 - DNA, 600 bp, Chicken  19866894323383_1
tgctcttgcagagtgcacggtgggcgctgctcgtttttagcaggccgaggtcacgttccgtttgtggctgaggcagagcggtgtcagtcgcagtgttccctgtcctcactagatggtgcttttgatcaaagataggaacaactgcagcgctctgcacgggatttctgcgtttctctttcctgtctccattcctccctctcctctactaaggctatgggcgacacttaacgatgctggatgttgggcaaggctcatctggcagtgctgctcccagctcccaccagccagctgtggccgggytggggctcctgaagcgtggatcggtgctgccgggctgtggcagagaattgaattctttccgtgttttctattcccataaggaaaaggcttcaaagagcaggtcccctccccccctctgctggtgaagggcatttagggaagctgggaaaacaaaatccagctccgacagatgcatttatttaacaaaccacagcctttccttaccttagcagcagatgggttgatttttttgtttccttaaataaggaattgctggttttacatccattatgtattcagcagacagttacctagccaagg

SEQ ID NO: 61952 - DNA, 599 bp, Chicken  19866894323392_1
  misc_feature (1)..(66): n is any nucleotide
nnnnnnnnnnnnnnnnnnnnnnnnnnnnnnnnnnnnnnnnnnnnnnnnnnnnnnnnnnnnnnnnnntgttttccccccgttcaacaaactatgtgagttttactctctttattctgggcattcatgaaactcagctgtggatacaggaatgtgttgccgttgccttgggctcctgttggtgctccctgctgctgaaaaggtttcaaacactgctccgtgtcatctctgtaactggggcaggctgggcttcctccttgtgtcggctgcctgtccccagcagtgtgccattgtctctgctgyccccttttcatgtttttcatctgcttcagcccagcttctgcctcagagcctctctgtctgtccttagcaacctgtctcaaatggctcacacgttgcttcttacccaggctgttgctgtggtaaagaggaataatctatctcttaacatttagtagaaaattccttttaaatccagggagaccattaattttagggtgctgatgagacaagtagtaatttaaacctgcttaattcattattactattatttatggcattgtaatttacctctctgttcagtcacagcccaaggcttctat

SEQ ID NO: 61953 - DNA, 600 bp, Chicken  19866894323394_1
gccatagaatcatagaatcgctaaggttggaaaagacccacaggatcatccagtccaaccattcgcccatcaccaatggttctcactaaaccatgtccctcaacacaacatccaaatgctctttgaacaccaccagggtcggtaactctaccacctctctgggcagcccattccagtgcctgaccaccctttcagagaagtagtatttcctaatgtccagcctgaacctcccctggtgcagcttgaagccattccctctagtcctatcactggtcacatgagagaagagactgacccccrgctcactacaacctcccttcaggtagttatagagagcaataaggtctcccctgagcctcctcttctgcagactgaacaatcccagctccttcagccactcttcataaggcctgtgctccagacccctcaccagctttgttgctctcctctggacacactccagggcctcaatgtctttcttacagcgaggggcccaaaactggacacagtactcgaggtgcggcctcaccagtgctgagtacagggggataattacttccctgtttctgctggccgcactatttctgatacaagccagga

SEQ ID NO: 61954 - DNA, 600 bp, Chicken  19866894323394_2
gagcctcctcttctgcagactgaacaatcccagctccttcagccactcttcataaggcctgtgctccagacccctcaccagctttgttgctctcctctggacacactccagggcctcaatgtctttcttacagcgaggggcccaaaactggacacagtactcgaggtgcggcctcaccagtgctgagtacagggggataattacttccctgtttctgctggccgcactatttctgatacaagccaggatgccattggccttcttggccacctgggcacactgctggctcatgttcagtcyagcgtcaatcaacacccccaggtccatttcctctacacagtcttccagccactctgccccaagcctgtagtgttgcctggggttgttgcggccaaagtgcaggacccggcatttggtcttgttgaatcccatcccattggcttcagcccagctatccagcctatccagatccctctgtagggcctcactaccctcagggagatcaacacttccagccatcttggtgtaatctgcaaatttactgagggtgcaaactgtcctgtcatgtcagatgttatgtgacaaataattcacaaatct

SEQ ID NO: 61955 - DNA, 600 bp, Chicken  19866894323394_3
taaccacaattaaactcacaaggtcaatgttggctatgcttagcaattaagtgtgagtaaggagctctatttaaaacttgacattattatggttctatggtgcgcacgcaaaaatagatttagagaaaaggtttgaccattatttatgtggttttaaatgaaatataccaattcttttctggaaaataaaccaacattttagaaatggggaataagttcataaagtccagacttctacattaaataataacattttttgttgaacaaacatgaaaagtaaagtatagcttatctgtattkacggggatcagtgctgccagaagaaatgaagagtttgaaaaaactacggtagatgtgacatgtcaaaaatttgccatgcacaaagtaagtttaatatttatatttctactttgctctctttttgattttaaaggctcttcagaccctctcataagcagtctacagagacagaattgtttgcctaacaaagtcatctctagatgcaagagccctggcaaaggtccattcatcactctaagttttgcacattgtttttgttcaagttatgaatgaaagactgaggtctcaggaattttcttg

SEQ ID NO: 61956 - DNA, 600 bp, Chicken  19866894323396_1
tgggaaaacttgttaggttaacaaactgtttgcagtttgctgtgcagtctcttatatgcaatcttctgggtattagtgctgaagaaaacaggattttggcagcctggggatggagctctccttcctaatgcaggataaggggaggacatcccgagtgttgtgagcactgcacttttctgacagagggaacctcctagcagcttccaggcattcagtttcacaccagtgtgaccctatgaagtgtacaggactgactcgatagtgactccactgctgcttgggaatttgtctcttaaccarctgctcctcacttctaagaacctggaagttctcagtgtcctgctgcactcctttaggtgtattcctcgctttggctgaacctaaaggttcatctgtgggtttccaaaggtggctgtagcratggcaatgtttcaggttacatcttgcttgtaacgtagagaggtctctggagtcaacacactgttcttaaactcccacagccttggatcactctagaccagaagcttctagttgtctattgtacttttgcatgactgactgctctagtgaacgtgcattaattttccaacctctcctctt

SEQ ID NO: 61957 - DNA, 600 bp, Chicken  19866894323396_2
cttcctaatgcaggataaggggaggacatcccgagtgttgtgagcactgcacttttctgacagagggaacctcctagcagcttccaggcattcagtttcacaccagtgtgaccctatgaagtgtacaggactgactcgatagtgactccactgctgcttgggaatttgtctcttaaccarctgctcctcacttctaagaacctggaagttctcagtgtcctgctgcactcctttaggtgtattcctcgctttggctgaacctaaaggttcatctgtgggtttccaaaggtggctgtagcratggcaatgtttcaggttacatcttgcttgtaacgtagagaggtctctggagtcaacacactgttcttaaactcccacagccttggatcactctagaccagaagcttctagttgtctattgtacttttgcatgactgactgctctagtgaacgtgcattaattttccaacctctcctctttctgttgcagacataactgatctaggtgagttcctgtaactttttctcatcttgtgaatgttctctctttcctctttgtcctttcttatgtttgtgtggtgcctcactttaaattatacg

SEQ ID NO: 61958 - DNA, 600 bp, Chicken  19866894323396_3
gcttgtaacgtagagaggtctctggagtcaacacactgttcttaaactcccacagccttggatcactctagaccagaagcttctagttgtctattgtacttttgcatgactgactgctctagtgaacgtgcattaattttccaacctctcctctttctgttgcagacataactgatctaggtgagttcctgtaactttttctcatcttgtgaatgttctctctttcctctttgtcctttcttatgtttgtgtggtgcctcactttaaattatacgcagtatcaacaaagtggtgaaaagsatcyttgaaacatttcagactgggctgtgctttgggatccttcccactagttctgcatgtgcagcttaaaccagactttgtctagcagctttcacttgccaggtgattgtgatttgcatctaaaagccactcttcctcttgcttaaaatgtgctcacaggtcaaccacgtgtggagccttggagctctccagggggaggtggggcagcttctctgcagccctttctaacgccttgttgttttttagctgggcagttatcaacagacgacttgaattctctgattgcacatgcacatcgtc

SEQ ID NO: 61959 - DNA, 600 bp, Chicken  19866894323396_4
gtaacgtagagaggtctctggagtcaacacactgttcttaaactcccacagccttggatcactctagaccagaagcttctagttgtctattgtacttttgcatgactgactgctctagtgaacgtgcattaattttccaacctctcctctttctgttgcagacataactgatctaggtgagttcctgtaactttttctcatcttgtgaatgttctctctttcctctttgtcctttcttatgtttgtgtggtgcctcactttaaattatacgcagtatcaacaaagtggtgaaaagsatcyttgaaacatttcagactgggctgtgctttgggatccttcccactagttctgcatgtgcagcttaaaccagactttgtctagcagctttcacttgccaggtgattgtgatttgcatctaaaagccactcttcctcttgcttaaaatgtgctcacaggtcaaccacgtgtggagccttggagctctccagggggaggtggggcagcttctctgcagccctttctaacgccttgttgttttttagctgggcagttatcaacagacgacttgaattctctgattgcacatgcacatcgtcgcat

SEQ ID NO: 61960 - DNA, 600 bp, Chicken  19866894323404_1
agctgtgggtgggggtagagtgcgaagatggaggcagtgattgcaaatggcctaatgatctagagattattttagatgttttggaaggtcagtaatctatattcaaagtgctgtgcaacaatactatggttgattgctattgagtggctatatgcagtgtttgaatggaaaagctgaactcagtgggagataaaataaatgacctctctgagctcttgcagcagttcatttacagaatcaggactagaactccctacatctgggaacgtgttgcatttcattcaaagctgctttgtgatktcagtcctatgaagctacgaggctgttttgtaaggtgacaaaacctgytgttatagcagtggtgtaaaatcagactgtttttgcaagatacaaattattttggtatcactgtgtgctgataatgcctgaacatacagtgatgttaactgtgttatttatgcttttcttgatgctcactttaaagctgattacattggatgttttaattctttgaatttctcctcagtaaagggaagtactttgttacttttccttacccctacatgaatggccgactgcacctgggacacaccttttctt

SEQ ID NO: 61961 - DNA, 600 bp, Chicken  19866894323404_2
ggcctaatgatctagagattattttagatgttttggaaggtcagtaatctatattcaaagtgctgtgcaacaatactatggttgattgctattgagtggctatatgcagtgtttgaatggaaaagctgaactcagtgggagataaaataaatgacctctctgagctcttgcagcagttcatttacagaatcaggactagaactccctacatctgggaacgtgttgcatttcattcaaagctgctttgtgatktcagtcctatgaagctacgaggctgttttgtaaggtgacaaaacctgytgttatagcagtggtgtaaaatcagactgtttttgcaagatacaaattattttggtatcactgtgtgctgataatgcctgaacatacagtgatgttaactgtgttatttatgcttttcttgatgctcactttaaagctgattacattggatgttttaattctttgaatttctcctcagtaaagggaagtactttgttacttttccttacccctacatgaatggccgactgcacctgggacacaccttttctttatccaagtgtgaggtaaatattttcctttgctaatacctttaaatgc

SEQ ID NO: 61962 - DNA, 600 bp, Chicken  19866894323407_1
taacagcagcatttcccacagcgtgctctaaaaagcagctgcaatcccctctctattatttagaagggatcttgctttagagacgaagggcaccccagagagcctgagatggggaatgaagttatagcttgcaggcagtacaaccttgccacaggaacgccaaggttgctttctcaggagctgcccatgctcactgctgcttgtcatgccgagcgtgctgcgtaggcgggagacgggagatacccttgctggatgatgcagcgttccttgcatgctaagagggaagaggggggcagagcrgtgygctgygaggaatcccagctcccctggcaacaaaaagcctttgcagaacacatttcaatacagcttattaaaaaaaaaaaaggctttgaaacwcagttaactgaaactccacctcttccttccccttctaagcacggctagcatccccttcttggggaactacctctgctgcagggaaaccctgctctgagcatcagaaacaggaggcarttctgcagtctcatcaacacactgctgcatgctgtaagggctttccccaggtgctttgagatcagagcctggcatttaaggggatat

SEQ ID NO: 61963 - DNA, 600 bp, Chicken  19866894323407_2
agcagcatttcccacagcgtgctctaaaaagcagctgcaatcccctctctattatttagaagggatcttgctttagagacgaagggcaccccagagagcctgagatggggaatgaagttatagcttgcaggcagtacaaccttgccacaggaacgccaaggttgctttctcaggagctgcccatgctcactgctgcttgtcatgccgagcgtgctgcgtaggcgggagacgggagatacccttgctggatgatgcagcgttccttgcatgctaagagggaagaggggggcagagcrgtgygctgygaggaatcccagctcccctggcaacaaaaagcctttgcagaacacatttcaatacagcttattaaaaaaaaaaaaggctttgaaacwcagttaactgaaactccacctcttccttccccttctaagcacggctagcatccccttcttggggaactacctctgctgcagggaaaccctgctctgagcatcagaaacaggaggcarttctgcagtctcatcaacacactgctgcatgctgtaagggctttccccaggtgctttgagatcagagcctggcatttaaggggatatgcaa

SEQ ID NO: 61964 - DNA, 600 bp, Chicken  19866894323407_3
catttcccacagcgtgctctaaaaagcagctgcaatcccctctctattatttagaagggatcttgctttagagacgaagggcaccccagagagcctgagatggggaatgaagttatagcttgcaggcagtacaaccttgccacaggaacgccaaggttgctttctcaggagctgcccatgctcactgctgcttgtcatgccgagcgtgctgcgtaggcgggagacgggagatacccttgctggatgatgcagcgttccttgcatgctaagagggaagaggggggcagagcrgtgygctgygaggaatcccagctcccctggcaacaaaaagcctttgcagaacacatttcaatacagcttattaaaaaaaaaaaaggctttgaaacwcagttaactgaaactccacctcttccttccccttctaagcacggctagcatccccttcttggggaactacctctgctgcagggaaaccctgctctgagcatcagaaacaggaggcarttctgcagtctcatcaacacactgctgcatgctgtaagggctttccccaggtgctttgagatcagagcctggcatttaaggggatatgcaaccatg

SEQ ID NO: 61965 - DNA, 600 bp, Chicken  19866894323407_4
agagagcctgagatggggaatgaagttatagcttgcaggcagtacaaccttgccacaggaacgccaaggttgctttctcaggagctgcccatgctcactgctgcttgtcatgccgagcgtgctgcgtaggcgggagacgggagatacccttgctggatgatgcagcgttccttgcatgctaagagggaagaggggggcagagcrgtgygctgygaggaatcccagctcccctggcaacaaaaagcctttgcagaacacatttcaatacagcttattaaaaaaaaaaaaggctttgaaacwcagttaactgaaactccacctcttccttccccttctaagcacggctagcatccccttcttggggaactacctctgctgcagggaaaccctgctctgagcatcagaaacaggaggcarttctgcagtctcatcaacacactgctgcatgctgtaagggctttccccaggtgctttgagatcagagcctggcatttaaggggatatgcaaccatgggaacatatggagaaaagagaacrgatcagagcatttttgtcatccattaccccagttctttgagtgcactgaagcatgcaatccca

SEQ ID NO: 61966 - DNA, 595 bp, Chicken  19866894323407_5
cgtgctgcgtaggcgggagacgggagatacccttgctggatgatgcagcgttccttgcatgctaagagggaagaggggggcagagcrgtgygctgygaggaatcccagctcccctggcaacaaaaagcctttgcagaacacatttcaatacagcttattaaaaaaaaaaaaggctttgaaacwcagttaactgaaactccacctcttccttccccttctaagcacggctagcatccccttcttggggaactacctctgctgcagggaaaccctgctctgagcatcagaaacaggaggcarttctgcagtctcatcaacacactgctgcatgctgtaagggctttccccaggtgctttgagatcagagcctggcatttaaggggatatgcaaccatgggaacatatggagaaaagagaacrgatcagagcatttttgtcatccattaccccagttctttgagtgcactgaagcatgcaatcccagcaaatatattaacacaattttacacttctgcctcagttttctgttgggaaattattttacctcagcagtagttacaacacttctagcgcaaatgcagaggaaatatcaaaa

SEQ ID NO: 61967 - DNA, 475 bp, Chicken  19866894323407_6
caaaaagcctttgcagaacacatttcaatacagcttattaaaaaaaaaaaaggctttgaaacwcagttaactgaaactccacctcttccttccccttctaagcacggctagcatccccttcttggggaactacctctgctgcagggaaaccctgctctgagcatcagaaacaggaggcarttctgcagtctcatcaacacactgctgcatgctgtaagggctttccccaggtgctttgagatcagagcctggcatttaaggggatatgcaaccatgggaacatatggagaaaagagaacrgatcagagcatttttgtcatccattaccccagttctttgagtgcactgaagcatgcaatcccagcaaatatattaacacaattttacacttctgcctcagttttctgttgggaaattattttacctcagcagtagttacaacacttctagcgcaaatgcagaggaaatatcaaaa

SEQ ID NO: 61968 - DNA, 600 bp, Chicken  19866894323410_1
gctattatgctttgtctggaaatacagcagagtagcattttaactagcatcatatttgtctagtgtctctagttttttttcaagatatcaaagtaatctttgcataccttttgctgatcttcaaactcatgacctgatgtgaaaacagcgtttaaattcatgatatgtctctgtagttacattaccctttcaagtccttcttaaatgtgttttagaatagaactgtactcttttttaataatgcctgcaaaattatgatttaaaacaatgcaaattttacattagcagatgttctgaacracaacataatggaagatcaaagacctgaggtgatgctttatgtagtaaaagaaaattatgaactgaatctgattgctaaattgacttgtatgcagtataaatcatcaccctggggatctgctgggtgcaacgcaatccaagctactgctaattctgaaccacagatctggaatgaacctagagaggttgagcagtccatataactgggctagaacagaatcaactacacctgcgtggttttacacacatgatttccctacctaccaaaacagagtgttttacagttttacaaattttact

SEQ ID NO: 61969 - DNA, 600 bp, Chicken  19866894323410_2
agatctggaatgaacctagagaggttgagcagtccatataactgggctagaacagaatcaactacacctgcgtggttttacacacatgatttccctacctaccaaaacagagtgttttacagttttacaaattttactataacagtacattattggaatgagggactgctttagtgtaagttcctcttgtactacatacgctgagatcataaatgccctactgcaggagacaaagttgttcagggaagaagtacatcaacatagacactatgtgtgcccttctctggcatccagaccagwtagagtttacaasctgaattctgcagtcccttaaagggctgcccttttgctatctccttttgtacctgttatctaagtatttttctcatcctttttagaatgtgcagctactgtctgctcttcgatcttgttgcagcaaaccccagaagatcactgcctgttttgtaaatacgtacttatttttatctgtcttaaatgtagcctgcctcagtccatttgcctggcttgccttacaatgttgacttgcattcaactttcagtctccaaatccctctctaaagacccactgtcacaacaaat

SEQ ID NO: 61970 - DNA, 600 bp, Chicken  19866894323410_3
acctagagaggttgagcagtccatataactgggctagaacagaatcaactacacctgcgtggttttacacacatgatttccctacctaccaaaacagagtgttttacagttttacaaattttactataacagtacattattggaatgagggactgctttagtgtaagttcctcttgtactacatacgctgagatcataaatgccctactgcaggagacaaagttgttcagggaagaagtacatcaacatagacactatgtgtgcccttctctggcatccagaccagwtagagtttacaasctgaattctgcagtcccttaaagggctgcccttttgctatctccttttgtacctgttatctaagtatttttctcatcctttttagaatgtgcagctactgtctgctcttcgatcttgttgcagcaaaccccagaagatcactgcctgttttgtaaatacgtacttatttttatctgtcttaaatgtagcctgcctcagtccatttgcctggcttgccttacaatgttgacttgcattcaactttcagtctccaaatccctctctaaagacccactgtcacaacaaattgcaccctgttct

SEQ ID NO: 61971 - DNA, 600 bp, Chicken  19866894323410_4
gaatggactactaacaaccttgaggttgcttctgacagctagttccttaattgccctaacatgaaacctagatgatgttaaaaatgaatttagtcatatcatctctggtcctttttatcaccaaattttatgttgagaattgatccctgctcctgttggtatactctactagatgtgacctaacattttacctttataataaaaattaacatgaaaaagttgttaaatatcatggccttcttagaccaaatgacaatggcttctcttatctgatgaacagtagattaactgtttcccttkcttgctactagtgtatttttaacaccaacaaaaaaaagttactcttgatgttttgatctcatcacttaccatttcataccttagtcgtttaactttttttttcctgagcttctcttccttatctttcccttgatccttgatagttagataattcttgttttctacctcttagtttttatagttgatatctaagagaggcctgtccaaattcagatgtggaaaaatagacaggcatactgatatctcagatgttttgttttgctttgagtggaagtctgagaggaaggagatgagctttcy

SEQ ID NO: 61972 - DNA, 512 bp, Chicken  19866894323410_5
cttgctactagtgtatttttaacaccaacaaaaaaaagttactcttgatgttttgatctcatcacttaccatttcataccttagtcgtttaactttttttttcctgagcttctcttccttatctttcccttgatccttgatagttagataattcttgttttctacctcttagtttttatagttgatatctaagagaggcctgtccaaattcagatgtggaaaaatagacaggcatactgatatctcagatgttttgttttgctttgagtggaagtctgagaggaaggagatgagctttcyggttaggacaaaaaaagattmatctagcaaagaacatatggttgcacagtgaatgtttgtgcttcttctgtaaaaatctgcaattgttgccagcatgtgtatgtgaatattatgatatcacaagttaatattgtgctatttgaaataaaactaaaaaaaattcttgaagacttacagaatatgatgaaaagaaatacaaaatatttgaaaaa

SEQ ID NO: 61973 - DNA, 491 bp, Chicken  19866894323410_6
acaccaacaaaaaaaagttactcttgatgttttgatctcatcacttaccatttcataccttagtcgtttaactttttttttcctgagcttctcttccttatctttcccttgatccttgatagttagataattcttgttttctacctcttagtttttatagttgatatctaagagaggcctgtccaaattcagatgtggaaaaatagacaggcatactgatatctcagatgttttgttttgctttgagtggaagtctgagaggaaggagatgagctttcyggttaggacaaaaaaagattmatctagcaaagaacatatggttgcacagtgaatgtttgtgcttcttctgtaaaaatctgcaattgttgccagcatgtgtatgtgaatattatgatatcacaagttaatattgtgctatttgaaataaaactaaaaaaaattcttgaagacttacagaatatgatgaaaagaaatacaaaatatttgaaaaa

SEQ ID NO: 61974 - DNA, 600 bp, Chicken  19866894323413_1
tatttgaacttttgagccctgccatccttgggcagtcatgaaaagggcagataaaaacacatcagtcttcaggggtcactctccccccttcacaaactgaaggcttcagcctgcctttcaaatcccatctcaaaaagacactattaatcccatttaatgaaagattagctggtctcaattcacaaagcatattcctctagctcatttctatacacagcatctttgtttaaatgatggactccattagcaggacctgtgttttccccgtgcaatcttatgccaagtactgagtattctggyaagtcctaaatatgagttatagtgatgggccactcacaattccaggtacatgtsaaagaatagtaaaaagactgacaaatccatgcccacacacttctttcctttcattttttccccttcccatcttcagtccagcaggtcagcttttcccttttgcctcattcaattttatgaatatctcttttctacagagacatgcctacagctatcagtggtccacactacaacagaattaaagccactgatacataaaagaaaggggaaatgctggggatgtatgattacagattaaatgataca

SEQ ID NO: 61975 - DNA, 600 bp, Chicken  19866894323413_2
aaacacatcagtcttcaggggtcactctccccccttcacaaactgaaggcttcagcctgcctttcaaatcccatctcaaaaagacactattaatcccatttaatgaaagattagctggtctcaattcacaaagcatattcctctagctcatttctatacacagcatctttgtttaaatgatggactccattagcaggacctgtgttttccccgtgcaatcttatgccaagtactgagtattctggyaagtcctaaatatgagttatagtgatgggccactcacaattccaggtacatgtsaaagaatagtaaaaagactgacaaatccatgcccacacacttctttcctttcattttttccccttcccatcttcagtccagcaggtcagcttttcccttttgcctcattcaattttatgaatatctcttttctacagagacatgcctacagctatcagtggtccacactacaacagaattaaagccactgatacataaaagaaaggggaaatgctggggatgtatgattacagattaaatgatacagtttcagggtcagcactacagaaggcacttacgaagaggctgacaagtaaagat

SEQ ID NO: 61976 - DNA, 599 bp, Chicken  19866894323416_1
  misc_feature (1)..(176): n is any nucleotide
nnnnnnnnnnnnnnnnnnnnnnnnnnnnnnnnnnnnnnnnnnnnnnnnnnnnnnnnnnnnnnnnnnnnnnnnnnnnnnnnnnnnnnnnnnnnnnnnnnnnnnnnnnnnnnnnnnnnnnnnnnnnnnnnnnnnnnnnnnnnnnnnnnnnnnnnnnnnnnnnnnnnnnnnnnnnnnnntagtttatgggacattaaaacaaggatgtagagtggaaagttgcaaggtggctgtagaaggcaacaatttacagaccacaagaaaaaaaggaagaaatatagggagaaaaataaacaaaaaaammccccaaaaacccaacagagaatatctgtgaagagaggcattagacctatggaggagacaatttcttcaatcatttatctagtaacattaggtttgtggtaaacgtttggcaaaggaataatcccaagtttttatagcgtaagggcaagagataagctttttaggtagggaatttaagctaatattgaggatttttttcacttctcatggtggctggatttgagaatttgcaagaaaaaaaactgcaaaagaagagctgtactaatggaaatagttaaaagaatgatatagyrcatgct

SEQ ID NO: 61977 - DNA, 600 bp, Chicken  19866894323416_10
aaaaagcatcaagaaagtactcataaaatggtaaatgctgctaagtgatgcagcacctgtgcctctcctaagkaagatgagatgtgtaggattcaaagtgcagtgcaagttcgtcacaacagatactcaatggatacataaaacagctgtgctggatcagcaaatgttcatccaggtgagcatsccgcttgtcatgatggccaacaggggatacctaagaaagagtgataaaagcatagcaagaatataatactttcccagaacattatttgactctgatttgaatcttgggcatawccygaaacrgaatttttttcctgagtttcaaattggtttttgaactaccatgagcacaaacatccaggaaagtcacacagaaaggcactcagcactcaattctgcttgtgagggtgacagtgcctatgaatggctcaagaactttcattcagtattttatacagagatagtggaaaaaaaatcatttcttacgtagcacaattgctgcttatcattgtataaaattaacctgacctgagcaagtcatcctttagaaaatgaattgatttttgggcagttttaacttaatttttcttcaagaga

SEQ ID NO: 61978 - DNA, 597 bp, Chicken  19866894323416_11
catcaagaaagtactcataaaatggtaaatgctgctaagtgatgcagcacctgtgcctctcctaagkaagatgagatgtgtaggattcaaagtgcagtgcaagttcgtcacaacagatactcaatggatacataaaacagctgtgctggatcagcaaatgttcatccaggtgagcatsccgcttgtcatgatggccaacaggggatacctaagaaagagtgataaaagcatagcaagaatataatactttcccagaacattatttgactctgatttgaatcttgggcatawccygaaacrgaatttttttcctgagtttcaaattggtttttgaactaccatgagcacaaacatccaggaaagtcacacagaaaggcactcagcactcaattctgcttgtgagggtgacagtgcctatgaatggctcaagaactttcattcagtattttatacagagatagtggaaaaaaaatcatttcttacgtagcacaattgctgcttatcattgtataaaattaacctgacctgagcaagtcatcctttagaaaatgaattgatttttgggcagttttaacttaatttttcttcaagagagca

SEQ ID NO: 61979 - DNA, 599 bp, Chicken  19866894323416_2
  misc_feature (1)..(175): n is any nucleotide
nnnnnnnnnnnnnnnnnnnnnnnnnnnnnnnnnnnnnnnnnnnnnnnnnnnnnnnnnnnnnnnnnnnnnnnnnnnnnnnnnnnnnnnnnnnnnnnnnnnnnnnnnnnnnnnnnnnnnnnnnnnnnnnnnnnnnnnnnnnnnnnnnnnnnnnnnnnnnnnnnnnnnnnnnnnnnnntagtttatgggacattaaaacaaggatgtagagtggaaagttgcaaggtggctgtagaaggcaacaatttacagaccacaagaaaaaaaggaagaaatatagggagaaaaataaacaaaaaaammccccaaaaacccaacagagaatatctgtgaagagaggcattagacctatggaggagacaatttcttcaatcatttatctagtaacattaggtttgtggtaaacgtttggcaaaggaataatcccaagtttttatagcgtaagggcaagagataagctttttaggtagggaatttaagctaatattgaggatttttttcacttctcatggtggctggatttgagaatttgcaagaaaaaaaactgcaaaagaagagctgtactaatggaaatagttaaaagaatgatatagyrcatgctt

SEQ ID NO: 61980 - DNA, 600 bp, Chicken  19866894323416_3
aaaaaaammccccaaaaacccaacagagaatatctgtgaagagaggcattagacctatggaggagacaatttcttcaatcatttatctagtaacattaggtttgtggtaaacgtttggcaaaggaataatcccaagtttttatagcgtaagggcaagagataagctttttaggtagggaatttaagctaatattgaggatttttttcacttctcatggtggctggatttgagaatttgcaagaaaaaaaactgcaaaagaagagctgtactaatggaaatagttaaaagaatgatatagyrcatgcttaagagctcaatctaaatgaaattatcttcttacaatggggtataaagaaaatcttgccytggaaagataactattttcataaagtaagtcacatcctgagtttgtttccactgatagcttggtggttaatgagtgaaattctcacatttgaagaggaacctgagccacattccctcgattcarctgaattaaaaagcatcaagaaagtactcataaaatggtaaatgctgctaagtgatgcagcacctgtgcctctcctaagkaagatgagatgtgtaggattcaaagtgca

SEQ ID NO: 61981 - DNA, 600 bp, Chicken  19866894323416_4
aaaaaammccccaaaaacccaacagagaatatctgtgaagagaggcattagacctatggaggagacaatttcttcaatcatttatctagtaacattaggtttgtggtaaacgtttggcaaaggaataatcccaagtttttatagcgtaagggcaagagataagctttttaggtagggaatttaagctaatattgaggatttttttcacttctcatggtggctggatttgagaatttgcaagaaaaaaaactgcaaaagaagagctgtactaatggaaatagttaaaagaatgatatagyrcatgcttaagagctcaatctaaatgaaattatcttcttacaatggggtataaagaaaatcttgccytggaaagataactattttcataaagtaagtcacatcctgagtttgtttccactgatagcttggtggttaatgagtgaaattctcacatttgaagaggaacctgagccacattccctcgattcarctgaattaaaaagcatcaagaaagtactcataaaatggtaaatgctgctaagtgatgcagcacctgtgcctctcctaagkaagatgagatgtgtaggattcaaagtgcag

SEQ ID NO: 61982 - DNA, 600 bp, Chicken  19866894323416_5
aatttcttcaatcatttatctagtaacattaggtttgtggtaaacgtttggcaaaggaataatcccaagtttttatagcgtaagggcaagagataagctttttaggtagggaatttaagctaatattgaggatttttttcacttctcatggtggctggatttgagaatttgcaagaaaaaaaactgcaaaagaagagctgtactaatggaaatagttaaaagaatgatatagyrcatgcttaagagctcaatctaaatgaaattatcttcttacaatggggtataaagaaaatcttgccytggaaagataactattttcataaagtaagtcacatcctgagtttgtttccactgatagcttggtggttaatgagtgaaattctcacatttgaagaggaacctgagccacattccctcgattcarctgaattaaaaagcatcaagaaagtactcataaaatggtaaatgctgctaagtgatgcagcacctgtgcctctcctaagkaagatgagatgtgtaggattcaaagtgcagtgcaagttcgtcacaacagatactcaatggatacataaaacagctgtgctggatcagcaaatgttc

SEQ ID NO: 61983 - DNA, 600 bp, Chicken  19866894323416_6
attgaggatttttttcacttctcatggtggctggatttgagaatttgcaagaaaaaaaactgcaaaagaagagctgtactaatggaaatagttaaaagaatgatatagyrcatgcttaagagctcaatctaaatgaaattatcttcttacaatggggtataaagaaaatcttgccytggaaagataactattttcataaagtaagtcacatcctgagtttgtttccactgatagcttggtggttaatgagtgaaattctcacatttgaagaggaacctgagccacattccctcgattcarctgaattaaaaagcatcaagaaagtactcataaaatggtaaatgctgctaagtgatgcagcacctgtgcctctcctaagkaagatgagatgtgtaggattcaaagtgcagtgcaagttcgtcacaacagatactcaatggatacataaaacagctgtgctggatcagcaaatgttcatccaggtgagcatsccgcttgtcatgatggccaacaggggatacctaagaaagagtgataaaagcatagcaagaatataatactttcccagaacattatttgactctgatttgaatcttgggc

SEQ ID NO: 61984 - DNA, 600 bp, Chicken  19866894323416_7
aatggaaatagttaaaagaatgatatagyrcatgcttaagagctcaatctaaatgaaattatcttcttacaatggggtataaagaaaatcttgccytggaaagataactattttcataaagtaagtcacatcctgagtttgtttccactgatagcttggtggttaatgagtgaaattctcacatttgaagaggaacctgagccacattccctcgattcarctgaattaaaaagcatcaagaaagtactcataaaatggtaaatgctgctaagtgatgcagcacctgtgcctctcctaagkaagatgagatgtgtaggattcaaagtgcagtgcaagttcgtcacaacagatactcaatggatacataaaacagctgtgctggatcagcaaatgttcatccaggtgagcatsccgcttgtcatgatggccaacaggggatacctaagaaagagtgataaaagcatagcaagaatataatactttcccagaacattatttgactctgatttgaatcttgggcatawccygaaacrgaatttttttcctgagtttcaaattggtttttgaactaccatgagcacaaacatccaggaaagtcac

SEQ ID NO: 61985 - DNA, 600 bp, Chicken  19866894323416_8
tttcataaagtaagtcacatcctgagtttgtttccactgatagcttggtggttaatgagtgaaattctcacatttgaagaggaacctgagccacattccctcgattcarctgaattaaaaagcatcaagaaagtactcataaaatggtaaatgctgctaagtgatgcagcacctgtgcctctcctaagkaagatgagatgtgtaggattcaaagtgcagtgcaagttcgtcacaacagatactcaatggatacataaaacagctgtgctggatcagcaaatgttcatccaggtgagcatsccgcttgtcatgatggccaacaggggatacctaagaaagagtgataaaagcatagcaagaatataatactttcccagaacattatttgactctgatttgaatcttgggcatawccygaaacrgaatttttttcctgagtttcaaattggtttttgaactaccatgagcacaaacatccaggaaagtcacacagaaaggcactcagcactcaattctgcttgtgagggtgacagtgcctatgaatggctcaagaactttcattcagtattttatacagagatagtggaaaaaaaatcattt

SEQ ID NO: 61986 - DNA, 600 bp, Chicken  19866894323416_9
attaaaaagcatcaagaaagtactcataaaatggtaaatgctgctaagtgatgcagcacctgtgcctctcctaagkaagatgagatgtgtaggattcaaagtgcagtgcaagttcgtcacaacagatactcaatggatacataaaacagctgtgctggatcagcaaatgttcatccaggtgagcatsccgcttgtcatgatggccaacaggggatacctaagaaagagtgataaaagcatagcaagaatataatactttcccagaacattatttgactctgatttgaatcttgggcatawccygaaacrgaatttttttcctgagtttcaaattggtttttgaactaccatgagcacaaacatccaggaaagtcacacagaaaggcactcagcactcaattctgcttgtgagggtgacagtgcctatgaatggctcaagaactttcattcagtattttatacagagatagtggaaaaaaaatcatttcttacgtagcacaattgctgcttatcattgtataaaattaacctgacctgagcaagtcatcctttagaaaatgaattgatttttgggcagttttaacttaatttttcttcaag

SEQ ID NO: 61987 - DNA, 600 bp, Chicken  19866894323422_1
agagcagtagctgatcttcagcactgctgggtcacagcatacgtattcaaagctttggaaggttcatctttaacatcagagaagagttcaggaaatagtgttagcattaccaagcaaataggagtactattttctctcctgtgtgtgttcttcaatgaaatgccatgcttcatagtgcctgctgcaacaagttggccattcttaaatcttccttgctgaagattgcggtgccccattaaaaggaggactaccgtagcttctttaaaaagctgtcataagacactggttttaccaaactcrtgtaattgttgtttttttaaattattttgtcttcacttcactgaaaatgtctcctaaggcagaagctaagcccttggcattttaccttgtttgattgttcttttatctttcagcagtgctcttcccatagatgtgcaatttgtccttttttgggaggtttttgtggtattaaaaaatcctgaatgaaagactgatgggcagaaatcactctcaattataaattatttaatttaagagcggagaaccgagagagcaacagatgtcaaacctttaggtgggcaggagtgaagaaagagaggc

SEQ ID NO: 61988 - DNA, 600 bp, Chicken  19866894323431_1
cagacatattctgactgttaagtatctcagggtttattaaatgtttttttttttccttgtcattttaaccttgtagcagacagtatgtctgtaagttagttttagtgacatgagttgtggtctttctcactcctagtttgaaaatttcctttaaaatggtaacataagaatgtgtgaaaatggtggatattctcttcttttccaagcttcaagaaggtagcagaaaatagttgtagtggagttccttttttactccaaaccttaactagaaaagctcggtttatatgcagttggctataytgrtgggttaaagaaggtggagaaaagggaaattttgtgggggtaaaacatgctctgctcatagcccaagtagctggcaattcaaagctcttggaagagtcagatttcagattaagaaagggagatggatggtctttggaggtggggagagcagacagctgtaacaatcccactgggattacacagccattttctcctttgacattgaaaattcccctttaaatttggaattctgcacttctataagatactcaagtgtctagacagttctttatctttggtcttctgctgggcttcatg

SEQ ID NO: 61989 - DNA, 600 bp, Chicken  19866894323431_2
acatattctgactgttaagtatctcagggtttattaaatgtttttttttttccttgtcattttaaccttgtagcagacagtatgtctgtaagttagttttagtgacatgagttgtggtctttctcactcctagtttgaaaatttcctttaaaatggtaacataagaatgtgtgaaaatggtggatattctcttcttttccaagcttcaagaaggtagcagaaaatagttgtagtggagttccttttttactccaaaccttaactagaaaagctcggtttatatgcagttggctataytgrtgggttaaagaaggtggagaaaagggaaattttgtgggggtaaaacatgctctgctcatagcccaagtagctggcaattcaaagctcttggaagagtcagatttcagattaagaaagggagatggatggtctttggaggtggggagagcagacagctgtaacaatcccactgggattacacagccattttctcctttgacattgaaaattcccctttaaatttggaattctgcacttctataagatactcaagtgtctagacagttctttatctttggtcttctgctgggcttcatgcta

SEQ ID NO: 61990 - DNA, 600 bp, Chicken  19866894323440_1
cgaatgtgttttcagttgtaatttcttacctcgtgatttccaactgtatgactgaatggtttggcttatcgtgtgacctcagcactctgtggtttttccagcagcccatctgtcacttaggaatttggaaagtacttctgcaaatacactctgtcgttaataagatgtgcactgtattaggatagaagataaatgtgggattactataattaggtgaacttatacacggtagcatgcttgtttatacatattagttaaggagcagctttgatctctatgaggaatggactgcaattgagygtgggcagccagcagctcctgggtgaggttcacctgactcaatgtgaaagtcttaccatgtacataggttgctccaaaagtaatgcctcctatttatctctatggaaactacagctggcacaaggaacatcataatgccatctgatggatcacattctcagccacaagatgctatttttcagcgtgatcaccaccattagctatgcattttccccagcatgaacaagagctgcatgcagcgcttcttctggtctgcagcagtggaggtgatgcgctatttcacaactgccatgatggcat

SEQ ID NO: 61991 - DNA, 599 bp, Chicken  19866894323441_1
  misc_feature (1)..(103): n is any nucleotide
nnnnnnnnnnnnnnnnnnnnnnnnnnnnnnnnnnnnnnnnnnnnnnnnnnnnnnnnnnnnnnnnnnnnnnnnnnnnnnnnnnnnnnnnnnnnnnnnnnnnnnnctgatgtgttaggtactgtgctgcttgttcctcaccagactgtgtgcagctacacttcagtgtattgagatagttagaattgaatgtgggaaggagaatgtaaactacttgcaaaactatacagttttgcttcttttcacaagttgagataatctgtatagcaactatagttggtgtttatatttgttgctgagccrrtgttgctacttacagtgctctttaggatagagagtacatccaaaaccgatctccagaaatcctgtattttttaaagtggcaactataagaaatccatgtggagtaattgccaggtgccattaccagatttttaataatgcagatgcagtccatccaaaggtcagtagacttgtttttgcctctaaagccctgcttttactgtcaatgactagcatagatatttgttttcctaatgggctctgtctcttcttggctgaagctctgtgatttgtaccacccactaccaaaccaccaagaa

SEQ ID NO: 61992 - DNA, 599 bp, Chicken  19866894323441_2
  misc_feature (1)..(102): n is any nucleotide
nnnnnnnnnnnnnnnnnnnnnnnnnnnnnnnnnnnnnnnnnnnnnnnnnnnnnnnnnnnnnnnnnnnnnnnnnnnnnnnnnnnnnnnnnnnnnnnnnnnnnnctgatgtgttaggtactgtgctgcttgttcctcaccagactgtgtgcagctacacttcagtgtattgagatagttagaattgaatgtgggaaggagaatgtaaactacttgcaaaactatacagttttgcttcttttcacaagttgagataatctgtatagcaactatagttggtgtttatatttgttgctgagccrrtgttgctacttacagtgctctttaggatagagagtacatccaaaaccgatctccagaaatcctgtattttttaaagtggcaactataagaaatccatgtggagtaattgccaggtgccattaccagatttttaataatgcagatgcagtccatccaaaggtcagtagacttgtttttgcctctaaagccctgcttttactgtcaatgactagcatagatatttgttttcctaatgggctctgtctcttcttggctgaagctctgtgatttgtaccacccactaccaaaccaccaagaag

SEQ ID NO: 61993 - DNA, 600 bp, Chicken  19866894323442_1
ccagagctgctggcctgaaaggacaggaaggtgagtggggaacagatgctgcacagacaacaaataacagatctcactgtgttacatctctgagaggtacaaacctgtcacactccattaagtgacttatcagaggaagtcaaaatcctgaattccacaaagacttgaccttcagcttgaaatagaggttcccacacaaaagcaaggtcccagcagaaccagccagctggatctcagagcagctcggagggctccgtgccccagcaccttcactggctcacctgcacatctcccagggcmcagcaccaaagcctggctccacagagccttcctccacagcacagctcccgtgtgctgctgtagtgccattaaaaggaaattaagccttagcaaagcacacctatgggagtcacaaccatctgctcctgggctgcctcaccactagctgagcagagacccccgcgtggcaaaaaccctcaggaaaagaaaggttttacaaaaatgtaaaatgctgattttaaatggggcaagccctgtgcctccagtgttaatgcacctcrcaagcaatgcaggaaggtaagcgtctctgagatagctttc

SEQ ID NO: 61994 - DNA, 600 bp, Chicken  19866894323442_2
ccagcaccttcactggctcacctgcacatctcccagggcmcagcaccaaagcctggctccacagagccttcctccacagcacagctcccgtgtgctgctgtagtgccattaaaaggaaattaagccttagcaaagcacacctatgggagtcacaaccatctgctcctgggctgcctcaccactagctgagcagagacccccgcgtggcaaaaaccctcaggaaaagaaaggttttacaaaaatgtaaaatgctgattttaaatggggcaagccctgtgcctccagtgttaatgcacctcrcaagcaatgcaggaaggtaagcgtctctgagatagctttcttacaggaaactcacaaactcgtcttgttggttttttttgacctgccagtggtagaactggggaaagtttctatcagatgcaaaaaacatctgctatagggagggtgactggaattcatttggactagcagaaatcacaagtgtcaaattataagctgtgatgaaagaaaggcaacattaccttgggcagttttgaaataaagaaaagcggtcagaagccatggctgacaaaaaaaaagctgtaatttcatgcaaattta

SEQ ID NO: 61995 - DNA, 600 bp, Chicken  19866894323443_1
ttccccttcactttcctgcggcgtcacagcctccacaccggcccaaaatgcatgcagggagagcgcagggggagcaaatctggttccgggggggttccaggcagtgcaagggctgtgcttgctcagcctgggcttcgtgtttcaaatgctcctttgggtttttcctgcccttggtaccagctgtgctgggctgcggcgggggggagaagggggagtcagcagctctttaaagggtttgacaaattaggggagcagctaattacctggcaagctgtgaacagttgtcctggagctatttgytcccctctggtgtagctgggctgtgtttagactttgcatgcagctaatactccacttccgattagtgttggctctcccgctcaggcgtgatttaggtaaagatctctgacgtgctttccctttcctagagcacccgcttttagaaattaaagaggttaagcgtatattactcggtttaaaatgtatatatagtgaatgggcttggagctgggaaggctttgggtttaatgggctgtttgccccttgaactcgtacagtcatggctcccatcccacaatggtcccggcactgagcatggga

SEQ ID NO: 61996 - DNA, 600 bp, Chicken  19866894323449_1
ttcatctgcgagtcatcttctccttcctctgtcccccgccttcctctccaccctttttgtctcgagccgcacttactttccagtttcactcaaacttctcagttatcgatgctaaaaatacaccctggcaggaagtcagcgtgtgctaaaccacccccccgacacacccccgcagccccaggatgaaggaagagcccccagatggccctttattggggcgatgtgggcagagaggctccaggaacccccgggacagcccctttctgcactgtgccttcccttggctgtcccagtggggcrcccagggyagcccagcacccatttccagcaaaaccccagctgtgtgctgctctccctcctcttcttgcaatgggggaggcccagcacagggttggggctgccaggagttgggggggtgggctgcacagcgcctggagggggggggggaaacaccaacatataggaacagaaataatatatatatatataaaataaatgaaagcacccagtgtgccctggggagcagcgcgggcagaacagagcagcctctccctcttcactcgtgggctggaaagtaaataaataaatgcattaataaat

SEQ ID NO: 61997 - DNA, 600 bp, Chicken  19866894323449_2
cgagtcatcttctccttcctctgtcccccgccttcctctccaccctttttgtctcgagccgcacttactttccagtttcactcaaacttctcagttatcgatgctaaaaatacaccctggcaggaagtcagcgtgtgctaaaccacccccccgacacacccccgcagccccaggatgaaggaagagcccccagatggccctttattggggcgatgtgggcagagaggctccaggaacccccgggacagcccctttctgcactgtgccttcccttggctgtcccagtggggcrcccagggyagcccagcacccatttccagcaaaaccccagctgtgtgctgctctccctcctcttcttgcaatgggggaggcccagcacagggttggggctgccaggagttgggggggtgggctgcacagcgcctggagggggggggggaaacaccaacatataggaacagaaataatatatatatatataaaataaatgaaagcacccagtgtgccctggggagcagcgcgggcagaacagagcagcctctccctcttcactcgtgggctggaaagtaaataaataaatgcattaataaataaaagggc

SEQ ID NO: 61998 - DNA, 599 bp, Chicken  19866894323456_1
  misc_feature (1)..(213): n is any nucleotide
nnnnnnnnnnnnnnnnnnnnnnnnnnnnnnnnnnnnnnnnnnnnnnnnnnnnnnnnnnnnnnnnnnnnnnnnnnnnnnnnnnnnnnnnnnnnnnnnnnnnnnnnnnnnnnnnnnnnnnnnnnnnnnnnnnnnnnnnnnnnnnnnnnnnnnnnnnnnnnnnnnnnnnnnnnnnnnnnnnnnnnnnnnnnnnnnnnnnnnnnnnnnnnnnnnnnntgcaggtgagaacacagcagctttcatgaactacagtaacgttcccctttacttacacacataaaagtatgactgctatattgaagkagtttctgaacagttattctaatggttttcatcacagcattgaggaaattgtttgaaacctgcaagaggtgcaagaattacgtgtacgtatgaagcctaagcacctatttcagatcaagatgaatagaaaactgatgttaatcayttaacgcttttgagttgaagcgtacggttctgttggaggctagcagctgcagcagagagaaacaggatgaaagagagccaggtattgccttctggccacataacactcctgtgagcacctggtaaccacccccttccctgcagattgtcctcct

SEQ ID NO: 61999 - DNA, 599 bp, Chicken  19866894323456_2
  misc_feature (1)..(68): n is any nucleotide
nnnnnnnnnnnnnnnnnnnnnnnnnnnnnnnnnnnnnnnnnnnnnnnnnnnnnnnnnnnnnnnnnnnntgcaggtgagaacacagcagctttcatgaactacagtaacgttcccctttacttacacacataaaagtatgactgctatattgaagkagtttctgaacagttattctaatggttttcatcacagcattgaggaaattgtttgaaacctgcaagaggtgcaagaattacgtgtacgtatgaagcctaagcacctatttcagatcaagatgaatagaaaactgatgttaatcayttaacgcttttgagttgaagcgtacggttctgttggaggctagcagctgcagcagagagaaacaggatgaaagagagccaggtattgccttctggccacataacactcctgtgagcacctggtaaccacccccttccctgcagattgtcctccttcagcatcagtgtaggcacaggtggtagaagcacaggcagctgcatcacataaaatgcatttcatgctcattttgagccagaactctgagaaagaaggcaatgtggaacagataataattcatamgataataattcatttgctga

SEQ ID NO: 62000 - DNA, 600 bp, Chicken  19866894323456_3
tagaaaactgatgttaatcayttaacgcttttgagttgaagcgtacggttctgttggaggctagcagctgcagcagagagaaacaggatgaaagagagccaggtattgccttctggccacataacactcctgtgagcacctggtaaccacccccttccctgcagattgtcctccttcagcatcagtgtaggcacaggtggtagaagcacaggcagctgcatcacataaaatgcatttcatgctcattttgagccagaactctgagaaagaaggcaatgtggaacagataataattcatamgataataattcatttgctgaactttgtctcttcttctggtgatcagtgtttgcaaacagtttcttaatgtgtttgttaattacttgcatttatatgcttacctccatttgtgtgctcccaccaaaaccaaaagaaagattctcattgttttaataacgaagtggttcgggccatgttcgtgaggcttgtacatacattcaagaagaaaaactgtcgaaagaaactgaaaagtaaaacgttaaagtgaagcgatcggtggaatgttagtgtagtctgggttcctgtgcccacctggtagac

SEQ ID NO: 62001 - DNA, 600 bp, Chicken  19866894323459_1
cacagtccagcagctgatggagacagaggagacttcttgcaaaagcactatatcttttgagggtgcaggctgacttgaagtactgaacaaagtgatgtgtaccccttacctgctggtctaccacctggaagatggtttgctggagcccagggcctgctcttttcatgtactcattgtgtcttcacagcctgagcaaacgaaacgttcacatttgtcctaccctcattctgctgatagcattttgagacagatgaggaaaagcttacccttggcaattccttggagattcacccgcccccygcatggttctgaagaaccatttgtcccactcctccctcttcaactctaagctagcttagccaggtgctggtgggatagagctcccttttgcaacaacagcttccatgtgggctaagtctgtagtaaagggcctatacaagacattttgtattggtaaaactgtaaaaaatacaagcaagcccacttcatgaagaattcactgagcagatgggttttcagcatgaattgatcacaccattcccctccccttatatttttacttcatagcaagatatttcttgtttttctttgtaagcttaa

SEQ ID NO: 62002 - DNA, 600 bp, Chicken  19866894323460_1
gcagaaataaaacacaaaaagggagaagaaagaaaaaaagtgaagaagttacttaactctcagcttaaactcaatgcctttttacaagactagacctggcatttatttctgaataactttcaggaacaatatttgcaagcttgataaaatgtttacaattcctctggcagaggatttgcatttttacagacctttgccacagattaaaattactgaaacacgcggtccaaacacaccaccaaaaagcaaacaaacggaaacgaaacagaatattgcattacaaggtaaaacaatgccctrtgtgttactgcagtaagcacaagccagtcacaccacaccagatacgttttaccaaactgctttaattactcttttctttccttcttggagggcctgtaattggccacagctggcagcacttaacgtcacactgctcccagcagctggagccctggctgcactttggacacaactttaattagctgttatattgtgggtgtaattactgcttaaagttgatttctgtcctttgcttttatttttttattttcccccaagaattactgacagaagtattctttgtttctcactgtgaaaagg

SEQ ID NO: 62003 - DNA, 600 bp, Chicken  19866894323475_1
ggccactgcagctcctttcacttcatttttgttcttgaggcttacaggttttgccatttatcaagtctcaagctttcagggacagtgggaacagaatcattttccactggagagagaacgcagttcaatagatgtaaaagcatactagcaagtcatttcttatgttactgaaattttgtcgaaaagaaaaagaaagttcagtaagcttcagaattggaagttttctccttttattttcctgaaagtgactgccttctgaaatacttctttatgatggaatatgttgcatgatctcgatcrcacagagtatttttgtcttggtggtataaataccttgttcagcctgagtgtttttccacagagaatttaaactctttttttccccatgagcaaaagcaggacaaactttgcagctctactccatagaggagtttcatttttcctctaatgacgtttctggtatttaagttcactagctgaatttcagcatgaactcatacaggtgtctcattctgggccccttgtttttggtgccaagatttttattgctttcagaggaagcaccctgagttttgccatagttcagtgatcccaggagcg

SEQ ID NO: 62004 - DNA, 599 bp, Chicken  19866894323480_1
  misc_feature (1)..(91): n is any nucleotide
nnnnnnnnnnnnnnnnnnnnnnnnnnnnnnnnnnnnnnnnnnnnnnnnnnnnnnnnnnnnnnnnnnnnnnnnnnnnnnnnnnnnnnnnnnnagaaagcagaagcacccccaaaacacaaagtttgacacaaacatttttcttagctataatttcctcactttacctcaaagggctgagaccgcagtgggaaactaatgatattcagtaaacagtggaacattggatcacgatagcgataaaccaaactcaattaatacatatcatagcataattgaaaaacaagcctctgaataatgaawgcccatgtacatctggtctcatttgttgtgtttacaaagtcttgcataccaggtaatgaaattaataaaattctctgtcaacatttctatgcacaaaaaagcatttatatgagcagatggcatcttttactgcgatccttaccatgaaaccatttcacttctggaaggatgagcatgcaagacactgctagacactgccaagcacaatgatgtactgaattataaactaagctgcactcactaattcacaacctacagtgccatagaatttaccccagagcattttggagcccattacc

SEQ ID NO: 62005 - DNA, 600 bp, Chicken  19866894323480_2
awgcccatgtacatctggtctcatttgttgtgtttacaaagtcttgcataccaggtaatgaaattaataaaattctctgtcaacatttctatgcacaaaaaagcatttatatgagcagatggcatcttttactgcgatccttaccatgaaaccatttcacttctggaaggatgagcatgcaagacactgctagacactgccaagcacaatgatgtactgaattataaactaagctgcactcactaattcacaacctacagtgccatagaatttaccccagagcattttggagcccattawcccccataagagcaccttcttccaatccactccctctttatacccttttccaccctgaaaactatatctgtttcctaccaatagctttcaactcacatcactgtgatgctttctcacaggaagcagaacatgagagaagttcactttcatcaacattgaagagtcatcctggaagccaatctgacatcttgaatgagtccagygtgaaaagggggagagcaatctttgagaagatgtcatcaggaaatggacagaacaaccttgaaggttagctttaccacttttgatctgatttcctct

SEQ ID NO: 62006 - DNA, 600 bp, Chicken  19866894323480_3
gcacaatgatgtactgaattataaactaagctgcactcactaattcacaacctacagtgccatagaatttaccccagagcattttggagcccattaccccccataagagcaccttcttccaatccactccctctttatacccttttccaccctgaaaactatatctgtttcctaccaatagctttcaactcacatcactgtgatgctttctcacaggaagcagaacatgagagaagttcactttcatcaacattgaagagtcatcctggaagccaatctgacatcttgaatgagtccagygtgaaaagggggagagcaatctttgagaagatgtcatcaggaaatggacagaacaaccttgaaggttagctttaccacttttgatctgatttcctctttcagtagtctacagtagtggtctccaaacatttctgacagcacacccgtacccctaccagtaacacacttctgagcatgccctcccagtatatgtatatattttttaaattatatacatgtactattccatgagtaccaatatattatgtacacaaaaacaggtattaaaaaagatgaaagatgaaataaacaatttaaaat

SEQ ID NO: 62007 - DNA, 600 bp, Chicken  19866894323481_1
gagaaaaatagaatcgtttgtaaaatattcccttttatgtcgtaccgtgcccactaaataattaattacaaacacacatcaggtgctgttaaaagaaaaaaaaaagaatagggtgggaaaaaaaaaaaatcaatgataagctccaaaacgaagttaataagagaagtacaagaaagactgctgttcaaaaacgcacaggttaaatactgaagaaagcactgccagcagcaatcgcctgcaggcatcccaggcgtgattagtgacttagtgccgcagaaaccgctatgttggaggaactcygcgaccggagcatcctgacaccaggagctaattgcaaaccgtgtaatcgcctgctccagatggccgtgcagcacaaagccccatggcctgcgcccagctttcctgaggggtggcactgcgctggtcaggaggttcctcattcatcgctcccctttgtcagcatcacctcaaattcctcctaatggtctggggattctatcgggaaataaaaatttccattagaatgcctcggaggaaccactattcccctcgttaaagatgtgaattacagataaatacctcgcctattaacgtgatttt

SEQ ID NO: 62008 - DNA, 599 bp, Chicken  19866894323483_1
  misc_feature (1)..(185): n is any nucleotide
nnnnnnnnnnnnnnnnnnnnnnnnnnnnnnnnnnnnnnnnnnnnnnnnnnnnnnnnnnnnnnnnnnnnnnnnnnnnnnnnnnnnnnnnnnnnnnnnnnnnnnnnnnnnnnnnnnnnnnnnnnnnnnnnnnnnnnnnnnnnnnnnnnnnnnnnnnnnnnnnnnnnnnnnnnnnnnnnnnnnnnnnnatgcctaacctttctgagagaaactgagctgcagttcagttcttaattaatgtgttcagattagaagattgaataaacatggcacaattaccagaaatgaatcagccattttaarcttttaaggtagttacctactaaacaagactgtactgagagatgacaggtaaatataatctttgacccaatcttccatgcaatgcagaggttggaattgtagtcaacttatttcattctctatgaattaaaaaaccaactcagccattttgacttcctttcgtccaagttatgcttttctgcaatgaatgtaactcaactattctataaacatttacattaaattattggttaaatattcaatttcctttgttagtatttattctttccagactacatgagagatgcattttaagaaga

SEQ ID NO: 62009 - DNA, 599 bp, Chicken  19866894323485_1
  misc_feature (1)..(97): n is any nucleotide
nnnnnnnnnnnnnnnnnnnnnnnnnnnnnnnnnnnnnnnnnnnnnnnnnnnnnnnnnnnnnnnnnnnnnnnnnnnnnnnnnnnnnnnnnnnnnnnnncatctctccctttgcttacgtgaaagcttggccatagggtacaggctttggtttctttggtagggtttgtctccagaagagaggaggaagcagactgaacatcatcctctgtgagtaggcagtctttcactggcttagaagtcacgcgtgaaactgttccctcatggatgggaatagaggaggatggcttttgcccttcccasgtagcatagaatagtgctaggaaatgggaagagggaaaggaaaattcacaaatacaagcataaaaatcaaacagtgctaaaggagccacaaaatctcaaggttaattgtcaaagccccaggtctcccagaattgcccgactgactcctatcaacatgaataagaaggtgatgccctgagaaactgccccctgcaaaggctttcctcacccctgccactgctttttgtgcccttgcaaacagcactaaggtatcatcagccagcctggaacttattgtttatccaaaataaggcaagaca

SEQ ID NO: 62010 - DNA, 600 bp, Chicken  19866894323490_1
cctgacttagccacagtcttgacattgttatctatcttgctgatcctatagaaaaaaaaaagtgcaatagaaaaggcaaaggcttcagaggaatcaggtaccaaatcgttgttccttgttcagttatcctgattgccctcttaggtttttggagcatgtttgttttgtttttctgctttgcctcctaaatcaacagaatgggaacagacactgttttcattttgtgacatcttgtgtttttcatgtttcagaaaccagcaaacaacttacaactgaaagagtgctgacacacagtaattkctcaatagagacacttttgatgtggggagaatttgctttttaaggcaatgggagaaagacagcacaaataccacttgtgctcagtgggatttctagtggttgactacctactggacactgctgacaccatcaaagtcactgagaccctctagtcacttccccaaagaaatacaggcaattcatacctacttttcacaatcatcttctggggtggggtttaacttaagaagagttgcccaaggaaataatggtcagcttgggggaaatgccaggcttcttacgcacatcaaacaaccttag

SEQ ID NO: 62011 - DNA, 600 bp, Chicken  19866894323491_1
tctaacacaaacagtctgtttgtgttagaaatttctgacatcttttgaaagaaacaagaaaacacaaagctgtagatttgcaagttgatatgattgcaatttgtgaaccatatcaacagaattgttgaaactatattagattaatagaattattgaacttttaatagcataatgtcaaaggaggtgtacaggagagtggcacgtagaaaaatagaaatgaatgctaataaggggccatatatttaattacatgcagcagatgaatgtgttttttatctgaatgatgcatgttatttatakaaaaaagttaatgggagcagctttggttttgacttggaaaatttgtgtgattttcattttaaaggcaattttttcagggaagtgctcattagcaaaaatagtacatgtataggcttgtaactttcaaggtataccaagtcacgttatcaagttcatgaaaactttcctactaatcaggtgtaatgaatctgctagatacagatggtgatgttttttctttaagagacaaaataacacaaaagcaacaacaaacagtgaaaaattaattcctggccctgcaagcctgaatgtaactcctgc

SEQ ID NO: 62012 - DNA, 600 bp, Chicken  19866894323491_2
ttaaaggcaattttttcagggaagtgctcattagcaaaaatagtacatgtataggcttgtaactttcaaggtataccaagtcacgttatcaagttcatgaaaactttcctactaatcaggtgtaatgaatctgctagatacagatggtgatgttttttctttaagagacaaaataacacaaaagcaacaacaaacagtgaaaaattaattcctggccctgcaagcctgaatgtaactcctgctaagttggcataaaactgggacagttctgagagaagtctccatttgctatatgttccrgtatcgtgttacctctgcttgttagataattcatttaatctgaatttaatgtgatcagtagaataacagamcaaggaacctcctctgatcactttcacatagccattgttaaccgatagctgcttagttaccttctgacagtttgtgtggttgtaagaaaacctcaggaaatatgtgcagtgatgctatgtcaggacacttatggccatgcagatatgtgcatacaaacatgggtatgactgttgttttctagaaagttaggaagtcacaaacaggaatacatgcctcatcagtaagact

SEQ ID NO: 62013 - DNA, 600 bp, Chicken  19866894323491_3
tataccaagtcacgttatcaagttcatgaaaactttcctactaatcaggtgtaatgaatctgctagatacagatggtgatgttttttctttaagagacaaaataacacaaaagcaacaacaaacagtgaaaaattaattcctggccctgcaagcctgaatgtaactcctgctaagttggcataaaactgggacagttctgagagaagtctccatttgctatatgttccrgtatcgtgttacctctgcttgttagataattcatttaatctgaatttaatgtgatcagtagaataacagamcaaggaacctcctctgatcactttcacatagccattgttaaccgatagctgcttagttaccttctgacagtttgtgtggttgtaagaaaacctcaggaaatatgtgcagtgatgctatgtcaggacacttatggccatgcagatatgtgcatacaaacatgggtatgactgttgttttctagaaagttaggaagtcacaaacaggaatacatgcctcatcagtaagactttctcagataattgtcactcctatggaaagcatcctctacagcaagccattagctgtgaggaaggaagttt

SEQ ID NO: 62014 - DNA, 600 bp, Chicken  19866894323496_1
tgcctgccctgctcaggagctacctacgaggtgatgaggtgtttctccaggggaccagctgcatcatacatagccaggcggtccctgcagtctggcagagtccactctaagcgtagcttgatcatgtagcccttgaggctgtggaggtgccaaagacaactggaggccaggtagtcagggccctccagtcttaggatgtcatcctcctggacatagctgtatctgtagcaacctgaatgcagaggaaagatagacagttttaaacctcagggtgatgtaactggagggaagagtgtcttmagggtggttgtaaaggaacttaaggtatgggattttcacatgggatatgtgtgtgggctctgtttcagggttaggctgaattatcccggtgatctcagtttacttttgcacatctcagtgacaccaatcccctcctactggtgtcccagcttccctctgtaagaactgtccccgctcccttggataagcccatactgcctcaggttcwaaatatcacaacacagtcatcttccactagcttccttttcttttgcatctctttcttctctcttccccatattcttcccagctttacaaccc

SEQ ID NO: 62015 - DNA, 561 bp, Chicken  19866894323496_2
ggacatagctgtatctgtagcaacctgaatgcagaggaaagatagacagttttaaacctcagggtgatgtaactggagggaagagtgtcttmagggtggttgtaaaggaacttaaggtatgggattttcacatgggatatgtgtgtgggctctgtttcagggttaggctgaattatcccggtgatctcagtttacttttgcacatctcagtgacaccaatcccctcctactggtgtcccagcttccctctgtaagaactgtccccgctcccttggataagcccatactgcctcaggttcwaaatatcacaacacagtcatcttccactagcttccttttcttttgcatctctttcttctctcttccccatattcttcccagctttacaacccccatgtttgctttctaggcttcagttgcctaccagacctgcatttttgagtaaaagtcagcttataggtgagtttctaatagtagagctaatgcaaattgccagccacaacacttaaagcactgcccacagttattgaaaacactttcaatcatcattaggacaataaa

SEQ ID NO: 62016 - DNA, 600 bp, Chicken  19866894323498_1
acaattaattagcagggagataaatatttttgtctatgaagcctgtgaacaaaatatccattatgtgactttgaatgtatttttccaacacatttattcagtagtattttgaggacatactactgagataaagatagctcaatctcaagccagttttgagcagctgacctactaaattcactaaacatatatctctttatttgcctctctgaagtcatcccttaacaaagtacacatgaatatgtctattgtaaagactgttttcagttttcatttctatgcatgcatccagtcacagtyttaaaatgacatgcttaagcctacaggtcctgaaaataccatcttttatccttcattcttggaaaacctcatatagtttgaatttatctttgaaacgtgaccaaaagaatttcacactagattatccttcattgaagtcataatgtaagattcattgttgatacagttcaaaggttattgctgtctagttttgaatttgtgctaaaaaaggcatagaagtgacagcctcctctttgcagaaaggataaaagtgccagcctacagacttcaacaaatcttttctttgcattctctgccctt

SEQ ID NO: 62017 - DNA, 600 bp, Chicken  19866894323505_1
gattaatgtaagaaaatctcttactttttcctttgtcacctgccttacaaggtctgttcctctaggcacaggaactgcttcaggctcttctgaagaccacagcgtatcttctgcctggttagactttgccatatgtggtcgatcatccttttcctctttttcctctttgttaaacaagggtggtgcttgtgcaggctttttctcctgcaaaattatgagaacgtcactaacaccgaattgcttggtatgtaagaacaacagactgctgagggacagcagactctcagtttgctatccagragtctacatggacaccagcaatatgcttgagtttgcttccttttcttgcatgggacawtctggtttgtgacttctgatttctagtattacaggctcttaagactgaataaagagtgccaggaagctgtcccaaacttaaagcagatgctgtaggaatcctgttaaattactgctgtggctcccaagactgccaacagccaagactagcttgcttgcttctttttacactcccaaagtctgcgcttaacctaattggaaaaaggtaaggccatcaaatacgtttgtggcaactcttttctt

SEQ ID NO: 62018 - DNA, 600 bp, Chicken  19866894323505_2
cctctaggcacaggaactgcttcaggctcttctgaagaccacagcgtatcttctgcctggttagactttgccatatgtggtcgatcatccttttcctctttttcctctttgttaaacaagggtggtgcttgtgcaggctttttctcctgcaaaattatgagaacgtcactaacaccgaattgcttggtatgtaagaacaacagactgctgagggacagcagactctcagtttgctatccagragtctacatggacaccagcaatatgcttgagtttgcttccttttcttgcatgggacawtctggtttgtgacttctgatttctagtattacaggctcttaagactgaataaagagtgccaggaagctgtcccaaacttaaagcagatgctgtaggaatcctgttaaattactgctgtggctcccaagactgccaacagccaagactagcttgcttgcttctttttacactcccaaagtctgcgcttaacctaattggaaaaaggtaaggccatcaaatacgtttgtggcaactcttttcttggtaaccagaaaggcaagactggggagtagggtcacacatgcagcaagccctactgat

SEQ ID NO: 62019 - DNA, 599 bp, Chicken  19866894323509_1
  misc_feature (1)..(102): n is any nucleotide
nnnnnnnnnnnnnnnnnnnnnnnnnnnnnnnnnnnnnnnnnnnnnnnnnnnnnnnnnnnnnnnnnnnnnnnnnnnnnnnnnnnnnnnnnnnnnnnnnnnnnntgacggtgtgtgtggcagactttgggctgtccaagaagatctacagcggcgattactaccgtcagggccgaatagcaaaaatgccagtgaagtggattgcgatagagtccctggctgaccgtgtctacaccaccaagagtgatgtggtaggtacacgtggctgggcagccagaaagcaggtgccaagagctagaaagwgatccctgagtcgagtcctccgcagctgtggcactttgtagtggttgttcttgtaccttgcaagtgcaaaagccacagacagactgtcagtaacaggccatgctgacctttcgttgcctgcccagcatcctggaataagtttattgagtgggctgcttgcctgtcgcatggcatttcttatcatttccaattctggggaaggcaggactgaagatacaactattagcattgtgcgaaagcccagtggatgctaggaagtgacctttccccatgaaaagactcattcattcctcctggaa

SEQ ID NO: 62020 - DNA, 600 bp, Chicken  19866894323509_2
tacaactattagcattgtgcgaaagcccagtggatgctaggaagtgacctttccccatgaaaagactcattcattcctcctggaaatgtccttgcagcacgctttccctttgttatcacagtgggcatttggcgttaccatgtgggagatagcgaccagagggatgactccgtacccaggggtgcagaaccacgagatttatgagtatctattccacgggcagcggctcaaaaagcctgagaactgcttagatgaactgtgagtattacaccactatgtccaggctgcaaaaaacctccygtgtccccactccaacactgaactcaaataaaaatgccaaagacagaaccttctttccttgtagggctgacaggcagggagctcacaggatcacacacacgggttggctctgagaacacagctggccagaacaatggtgtgggtcaaattttaagtgagcatgtctcataaaaaaaaaaaaaaaagctcaaaacctttaacgttttgttaatctcttgagttttaatacgagcctgatcccaragcagagtacgacccagggatggaaaaacatcttcttaactccaggcaaagcgtcgc

SEQ ID NO: 62021 - DNA, 393 bp, Chicken  19866894323509_3
ctgcttagatgaactgtgagtattacaccactatgtccaggctgcaaaaaacctccygtgtccccactccaacactgaactcaaataaaaatgccaaagacagaaccttctttccttgtagggctgacaggcagggagctcacaggatcacacacacgggttggctctgagaacacagctggccagaacaatggtgtgggtcaaattttaagtgagcatgtctcataaaaaaaaaaaaaaaagctcaaaacctttaacgttttgttaatctcttgagttttaatacgagcctgatcccaragcagagtacgacccagggatggaaaaacatcttcttaactccaggcaaagcgtcgcacagaaatctccaaaaatatctccaaagaaagcaat

SEQ ID NO: 62022 - DNA, 600 bp, Chicken  19866894323517_1
atcaacactcacatttctctaagcagcaaggtacagtattactgtcgatgtagaataatccctaccaactctatgtaggattcacattcaagaagatagagttgtattgctgagtacctccagatcttttaagttacagaaatattttctgtgagattgctactctcacagaaactagatggttttattccatcaccatcaatgacaaagaaccaaccaactcttctttgccctcagtccagtgcataggaagatactttggacagttttgtttttttcctaatgtaacccttcatctcrtgccttattcaaatttgctctaacgagagaacttactgctgtttttgaagtcacaactcactgcaactcttgaagtatactagcagaattacrtaactatcattcactttttatgtgcctttccatagttaatatatttcaagttgcattttaacatatatcagagctgtgtaacttcctgttggatacactgttcacaaaggaacaatacaagaactattgtattgatccagcactatttggtggttcagtacagcaaataataagacaagtcaccacaagccactgctaagcatcccg

SEQ ID NO: 62023 - DNA, 600 bp, Chicken  19866894323517_2
agatagagttgtattgctgagtacctccagatcttttaagttacagaaatattttctgtgagattgctactctcacagaaactagatggttttattccatcaccatcaatgacaaagaaccaaccaactcttctttgccctcagtccagtgcataggaagatactttggacagttttgtttttttcctaatgtaacccttcatctcrtgccttattcaaatttgctctaacgagagaacttactgctgtttttgaagtcacaactcactgcaactcttgaagtatactagcagaattacrtaactatcattcactttttatgtgcctttccatagttaatatatttcaagttgcattttaacatatatcagagctgtgtaacttcctgttggatacactgttcacaaaggaacaatacaagaactattgtattgatccagcactatttggtggttcagtacagcaaataataagacaagtcaccacaagccactgctaagcatcccgcaacagaaatgtctaaaatagtttagagtttttcctgtaatacaacttaacactgtacagttcaccaatcatcacagttcttagcagctggca

SEQ ID NO: 62024 - DNA, 599 bp, Chicken  19866894323522_1
  misc_feature (1)..(173): n is any nucleotide
nnnnnnnnnnnnnnnnnnnnnnnnnnnnnnnnnnnnnnnnnnnnnnnnnnnnnnnnnnnnnnnnnnnnnnnnnnnnnnnnnnnnnnnnnnnnnnnnnnnnnnnnnnnnnnnnnnnnnnnnnnnnnnnnnnnnnnnnnnnnnnnnnnnnnnnnnnnnnnnnnnnnnnnnnnnnnctgctgttcttgatggtttttaagcatttcctggtcactcagtatttggtaaaggtcatgagtgtgtaccctgctgccatgcctgccaccttgtttttcctggtgggtcttgacctatgcttgctgygcatgcccatcygcacagggctgcagtgcattccagcatgttttagttctggctttaagcaattcttccttgcattttggctggggaaacctttcttcagcttcttcagaaaccttttgtagctatccccattgactgcatgcactggcacctggccggaatagggcagagccaggagagtggggtgcggacagcccggccagcaacccactgctgagcccagcagatgttcctgcagccttgctgctccccggggccgatgccagcctggtccttttccagcagctcgtcacttgaca

SEQ ID NO: 62025 - DNA, 599 bp, Chicken  19866894323522_2
  misc_feature (1)..(161): n is any nucleotide
nnnnnnnnnnnnnnnnnnnnnnnnnnnnnnnnnnnnnnnnnnnnnnnnnnnnnnnnnnnnnnnnnnnnnnnnnnnnnnnnnnnnnnnnnnnnnnnnnnnnnnnnnnnnnnnnnnnnnnnnnnnnnnnnnnnnnnnnnnnnnnnnnnnnnnnnnnnnnnnnnctgctgttcttgatggtttttaagcatttcctggtcactcagtatttggtaaaggtcatgagtgtgtaccctgctgccatgcctgccaccttgtttttcctggtgggtcttgacctatgcttgctgygcatgcccatcygcacagggctgcagtgcattccagcatgttttagttctggctttaagcaattcttccttgcattttggctggggaaacctttcttcagcttcttcagaaaccttttgtagctatccccattgactgcatgcactggcacctggccggaatagggcagagccaggagagtggggtgcggacagcccggccagcaacccactgctgagcccagcagatgttcctgcagccttgctgctccccggggccgatgccagcctggtccttttccagcagctcgtcacttgacaccgggaacagta

SEQ ID NO: 62026 - DNA, 600 bp, Chicken  19866894323533_1
ttacttgaaagtcatatcagtcatactgttatgcagttcagcattaggacaccatgcctcaaggtactgagtgctttccaaatactaacagaaacccaggtctgaaaaactgccacagaggaggtctgtgtggagtgttagaggaaaccaatatgaggtacctggacccgatgtacttaagcacagctgcttatgctaacttctcagacctcatccaaaaatggtaaaatgatctggagttaaacatctattacacaggatttgtcacaagcaaagcctctgtcacaagcacaacctttssagcacatcaattgtaaaggtttccagagctgtgatctataagcacttaattctcagacacacatgaaagctctgttagcttacttggagtayatagtttctataattaaaaaaatgatcattgaataaaaaggaaggtactgttagtgttacagtgcttaggaaagcactcctcttttctcctattaagattttgcagcaactttgatgaatgaaatgggcaggcatgtttctgcacgggcaggacagagagaactactgctgtgaataaactgccagcatgattctaaagtgagttca

SEQ ID NO: 62027 - DNA, 600 bp, Chicken  19866894323533_2
tacttgaaagtcatatcagtcatactgttatgcagttcagcattaggacaccatgcctcaaggtactgagtgctttccaaatactaacagaaacccaggtctgaaaaactgccacagaggaggtctgtgtggagtgttagaggaaaccaatatgaggtacctggacccgatgtacttaagcacagctgcttatgctaacttctcagacctcatccaaaaatggtaaaatgatctggagttaaacatctattacacaggatttgtcacaagcaaagcctctgtcacaagcacaacctttssagcacatcaattgtaaaggtttccagagctgtgatctataagcacttaattctcagacacacatgaaagctctgttagcttacttggagtayatagtttctataattaaaaaaatgatcattgaataaaaaggaaggtactgttagtgttacagtgcttaggaaagcactcctcttttctcctattaagattttgcagcaactttgatgaatgaaatgggcaggcatgtttctgcacgggcaggacagagagaactactgctgtgaataaactgccagcatgattctaaagtgagttcaa

SEQ ID NO: 62028 - DNA, 600 bp, Chicken  19866894323533_3
acccaggtctgaaaaactgccacagaggaggtctgtgtggagtgttagaggaaaccaatatgaggtacctggacccgatgtacttaagcacagctgcttatgctaacttctcagacctcatccaaaaatggtaaaatgatctggagttaaacatctattacacaggatttgtcacaagcaaagcctctgtcacaagcacaacctttssagcacatcaattgtaaaggtttccagagctgtgatctataagcacttaattctcagacacacatgaaagctctgttagcttacttggagtayatagtttctataattaaaaaaatgatcattgaataaaaaggaaggtactgttagtgttacagtgcttaggaaagcactcctcttttctcctattaagattttgcagcaactttgatgaatgaaatgggcaggcatgtttctgcacgggcaggacagagagaactactgctgtgaataaactgccagcatgattctaaagtgagttcaattacaaacttttcagaatagaatctcttcacaaactccatcagtcagaaagcatattcagcctgcactataaaaaccaatatcctttttcat

SEQ ID NO: 62029 - DNA, 600 bp, Chicken  19866894323540_1
aggaagaaaagttgattctcaggctgtttcccaccgcacacacatttgacctgacttcagatgggagataatattcctcttccatgagtttgaaggcctgtaatcctgtttggaaatggctggcagtcactgcagcagcatagagtgcctattccagtgaatacctgagatagggttaagcagtcatcacccaggcagatgaagttaggtcttaagccctcaagtctcagatgctgaacagcttgaggtaacgaatgctgacctcacatggtgtgaaaatcccaaatgtccatttttttyccctttattgtctgagcacatgaaaggtttgaaagcccccgtgtccttcacagagaggggttatctcattaacggggtattaaaggaagtttttaaaaaagtctaatctcttcagcacgctggcctgtttccagtcactcagcctcctctttcctggtacagccatcagtcagacctcatcctgtctgtgacaacctgatgcctgtctgctctgccactgcatgccctttagctagctgccttcagcaggaggattgctaaaccttggcataaatgcagagctgcctcttttctattgct

SEQ ID NO: 62030 - DNA, 600 bp, Chicken  19866894323543_1
tgatgtttctaagactcttttgtctccttcgcttctttctcagagctatcatgcaattctcagtgtttgagcaccagacttcaaatgagagatctattcaaaacatgcacagacaaaataaatggtttccttagtaatgggaactatgtgaaagcctctgaaacagctcctcctccagtaagtcattatgtacatgatcctttttacactcaacttactactgtaaaggtaacttttgaaacagaccacaaaatatacttaatgtgcacccactgtttttggcagtcaaatcacagaggmgaatgaaaacattttctgtactcctaattaaacattttgtttttctaatcagtatagatgttgcatttttcagtaacctttcaatcaattttctagatctgcaaattgtaagaaatgaaattgtgtaagtaaactgctacgaacttcactttggcacgcrattcattttgataatttagtgcacttgatttaaactatcattagtaaccatatttcgaacatacattgcccatatctgtgctgttcctcatcaccaccaaaattacttaataacaattatctatgaccacagcttgagaa

SEQ ID NO: 62031 - DNA, 600 bp, Chicken  19866894323543_2
aaacagctcctcctccagtaagtcattatgtacatgatcctttttacactcaacttactactgtaaaggtaacttttgaaacagaccacaaaatatacttaatgtgcacccactgtttttggcagtcaaatcacagaggmgaatgaaaacattttctgtactcctaattaaacattttgtttttctaatcagtatagatgttgcatttttcagtaacctttcaatcaattttctagatctgcaaattgtaagaaatgaaattgtgtaagtaaactgctacgaacttcactttggcacgcrattcattttgataatttagtgcacttgatttaaactatcattagtaaccatatttcgaacatacattgcccatatctgtgctgttcctcatcaccaccaaaattacttaataacaattatctatgaccacagcttgagaatgctacttatggcatgggaaaactactatgatacttgtcatagtctcagagcaaagacaactgagagcaaaatgatattctagttctaatatttagcttaataagcctgtacagatttttaaatcagcagtatgatttatgtaaatgaaaagcaaataat

SEQ ID NO: 62032 - DNA, 600 bp, Chicken  19866894323557_1
taaaatcactgctgtatgaagactttttgcatctgtacaactttgtaagagtaaagcaataaaatagccattctacacaaacctagccactgcttagagtgacctagaatctgatcagttggccatttgaaagaaagcagtgcaagtgtgagcttagaaataaaagtgctatggtagctgcataatagtcaaagaagatcagaacaggtctttggtatgctcaggttcagctttatacagagtaggcaggttgatgatttgtgttaggacttccttgcttacagtgtttcattctgtatygtactactctgggggacagggttgtgtttggcattttagctaacagcttccagaaggctttttaagaagagatttttaatataatataatattctttaatacaattagacggctgctttcccctcctttttatagcttattttagtgactatgtattttgcatgtttcagaacaagtgtagaactgaatctctgaagaaactagagcagcagaagctgatagaggcagagaagaaacgaattgcacacatgcggcagcagcagcttgaatcagaacagtttcagttctttgaagatcagc

SEQ ID NO: 62033 - DNA, 600 bp, Chicken  19866894323557_2
gtattttgcatgtttcagaacaagtgtagaactgaatctctgaagaaactagagcagcagaagctgatagaggcagagaagaaacgaattgcacacatgcggcagcagcagcttgaatcagaacagtttcagttctttgaagatcagcttaagaagcaagaactggctcgagatcagaagattaaagagagcatggttatgtctgagcagatagatggaagtatgctatcctgcatttctgtacctgagaacagttcctcacctaccacactgctagagaaaaaagagaagagtggcatrtgtgtctctactggagattcacctccagtaaaccgggccttaaagccagcagctgctttaagtgctgttcagagtaagtgtgtatgttctatactccttatctgcttctttactgtagcagaccatgtattgcgcatgcatgtgatgatggttggacttagatgtcttttccaacctaatgattctacggtttgcrcactttgagagcacctgtagtggaataagcatgaataggtgaatgtacacacaacagttctacagtttcctcattttaagagagatgttgtacagttctacaat

SEQ ID NO: 62034 - DNA, 600 bp, Chicken  19866894323557_3
ttatgtctgagcagatagatggaagtatgctatcctgcatttctgtacctgagaacagttcctcacctaccacactgctagagaaaaaagagaagagtggcatrtgtgtctctactggagattcacctccagtaaaccgggccttaaagccagcagctgctttaagtgctgttcagagtaagtgtgtatgttctatactccttatctgcttctttactgtagcagaccatgtattgcgcatgcatgtgatgatggttggacttagatgtcttttccaacctaatgattctacggtttgcrcactttgagagcacctgtagtggaataagcatgaataggtgaatgtacacacaacagttctacagtttcctcattttaagagagatgttgtacagttctacaatctccatctgagcaccagtagatgcatctggagatggagcctcagtgttcctatagcrtaaaggctgtctgattcttgagaacagaagcagaacctgcaraggcttcaktaaaakttttctgagaagccctggcctgaaaaatgagatcaactccctgtcaccacaagaggcaggctacagcatatcttatgagttg

SEQ ID NO: 62035 - DNA, 600 bp, Chicken  19866894323557_4
ttaagtgctgttcagagtaagtgtgtatgttctatactccttatctgcttctttactgtagcagaccatgtattgcgcatgcatgtgatgatggttggacttagatgtcttttccaacctaatgattctacggtttgcrcactttgagagcacctgtagtggaataagcatgaataggtgaatgtacacacaacagttctacagtttcctcattttaagagagatgttgtacagttctacaatctccatctgagcaccagtagatgcatctggagatggagcctcagtgttcctatagcrtaaaggctgtctgattcttgagaacagaagcagaacctgcaraggcttcaktaaaakttttctgagaagccctggcctgaaaaatgagatcaactccctgtcaccacaagaggcaggctacagcatatcttatgagttggtgacctcaattcagcatgakgtgcttgcagcgtaggtgtaatctcatttcagatatctatgatgtggcgagtttaatttcttaatctttaataatttcctctgtttatattgccttataataaggcatgtcactgtgtaggctgcatatgcatttttatc

SEQ ID NO: 62036 - DNA, 600 bp, Chicken  19866894323557_5
atctgcttctttactgtagcagaccatgtattgcgcatgcatgtgatgatggttggacttagatgtcttttccaacctaatgattctacggtttgcrcactttgagagcacctgtagtggaataagcatgaataggtgaatgtacacacaacagttctacagtttcctcattttaagagagatgttgtacagttctacaatctccatctgagcaccagtagatgcatctggagatggagcctcagtgttcctatagcrtaaaggctgtctgattcttgagaacagaagcagaacctgcaraggcttcaktaaaakttttctgagaagccctggcctgaaaaatgagatcaactccctgtcaccacaagaggcaggctacagcatatcttatgagttggtgacctcaattcagcatgakgtgcttgcagcgtaggtgtaatctcatttcagatatctatgatgtggcgagtttaatttcttaatctttaataatttcctctgtttatattgccttataataaggcatgtcactgtgtaggctgcatatgcatttttatctctctctctcttytgtttgctagctcaattggctgaagcgct

SEQ ID NO: 62037 - DNA, 600 bp, Chicken  19866894323557_6
tttactgtagcagaccatgtattgcgcatgcatgtgatgatggttggacttagatgtcttttccaacctaatgattctacggtttgcrcactttgagagcacctgtagtggaataagcatgaataggtgaatgtacacacaacagttctacagtttcctcattttaagagagatgttgtacagttctacaatctccatctgagcaccagtagatgcatctggagatggagcctcagtgttcctatagcrtaaaggctgtctgattcttgagaacagaagcagaacctgcaraggcttcaktaaaakttttctgagaagccctggcctgaaaaatgagatcaactccctgtcaccacaagaggcaggctacagcatatcttatgagttggtgacctcaattcagcatgakgtgcttgcagcgtaggtgtaatctcatttcagatatctatgatgtggcgagtttaatttcttaatctttaataatttcctctgtttatattgccttataataaggcatgtcactgtgtaggctgcatatgcatttttatctctctctctcttytgtttgctagctcaattggctgaagcgctcagaggtgt

SEQ ID NO: 62038 - DNA, 600 bp, Chicken  19866894323557_7
gtagcagaccatgtattgcgcatgcatgtgatgatggttggacttagatgtcttttccaacctaatgattctacggtttgcrcactttgagagcacctgtagtggaataagcatgaataggtgaatgtacacacaacagttctacagtttcctcattttaagagagatgttgtacagttctacaatctccatctgagcaccagtagatgcatctggagatggagcctcagtgttcctatagcrtaaaggctgtctgattcttgagaacagaagcagaacctgcaraggcttcaktaaaakttttctgagaagccctggcctgaaaaatgagatcaactccctgtcaccacaagaggcaggctacagcatatcttatgagttggtgacctcaattcagcatgakgtgcttgcagcgtaggtgtaatctcatttcagatatctatgatgtggcgagtttaatttcttaatctttaataatttcctctgtttatattgccttataataaggcatgtcactgtgtaggctgcatatgcatttttatctctctctctcttytgtttgctagctcaattggctgaagcgctcagaggtgtaatttt

SEQ ID NO: 62039 - DNA, 600 bp, Chicken  19866894323557_8
ggaataagcatgaataggtgaatgtacacacaacagttctacagtttcctcattttaagagagatgttgtacagttctacaatctccatctgagcaccagtagatgcatctggagatggagcctcagtgttcctatagcrtaaaggctgtctgattcttgagaacagaagcagaacctgcaraggcttcaktaaaakttttctgagaagccctggcctgaaaaatgagatcaactccctgtcaccacaagaggcaggctacagcatatcttatgagttggtgacctcaattcagcatgakgtgcttgcagcgtaggtgtaatctcatttcagatatctatgatgtggcgagtttaatttcttaatctttaataatttcctctgtttatattgccttataataaggcatgtcactgtgtaggctgcatatgcatttttatctctctctctcttytgtttgctagctcaattggctgaagcgctcagaggtgtaattttacccagggatctctgtcacaaatttctgctgctagcagaggcaaatacattaagaggaatagagacatgtggaattctctgtggaaaactggtacagtttaac

SEQ ID NO: 62040 - DNA, 600 bp, Chicken  19866894323557_9
attcttgagaacagaagcagaacctgcaraggcttcaktaaaakttttctgagaagccctggcctgaaaaatgagatcaactccctgtcaccacaagaggcaggctacagcatatcttatgagttggtgacctcaattcagcatgakgtgcttgcagcgtaggtgtaatctcatttcagatatctatgatgtggcgagtttaatttcttaatctttaataatttcctctgtttatattgccttataataaggcatgtcactgtgtaggctgcatatgcatttttatctctctctctcttytgtttgctagctcaattggctgaagcgctcagaggtgtaattttacccagggatctctgtcacaaatttctgctgctagcagaggcaaatacattaagaggaatagagacatgtggaattctctgtggaaaactggtacagtttaactttcgcatttgtatggggaagacactcctccttcagctctcaattaccatctcaatgtttgttttacagacacacaacgaatttactattacccacgtaatagtgccaaagcaatcttcaggaccagactactgtgacatggagaacgtggaa

SEQ ID NO: 62041 - DNA, 600 bp, Chicken  19866894323584_1
gggttgaaactggatgatcattgtggtccttttcaacccaggcttttctgtgattcactctatgatccattggttaaacatcagtttgcacagtggacagcagccctaaactgcagatcctctgtgagaagtgtagggaatgagtctcagctctgccactgaattgaaatgcgttggctattgcttcctcccctttccacatgaatggggagtgattaggagagaggcaacatggactctgatctccatgggagagcaagaaataccagcctatactcaggagcagctgttgcagggagscctgggcacacaaaggcagtaagagaagaggtactccatgctactgtgctcctcccctgacatcactgagctgcagatactcagtgtctggggctgtaaatcccctgctttaacttggctccraatttacgagttaaaaaaaattgctgtcttcaagttgttgcagaagaaaggtaaaacataaaatgctcagctcaaggctgtaatagcaaagacataatttgacaatataaatgagctttagctgagttatggattaagggaacataactgcaaataacaggtgccacattataggct

SEQ ID NO: 62042 - DNA, 600 bp, Chicken  19866894323584_2
gtgagaagtgtagggaatgagtctcagctctgccactgaattgaaatgcgttggctattgcttcctcccctttccacatgaatggggagtgattaggagagaggcaacatggactctgatctccatgggagagcaagaaataccagcctatactcaggagcagctgttgcagggagscctgggcacacaaaggcagtaagagaagaggtactccatgctactgtgctcctcccctgacatcactgagctgcagatactcagtgtctggggctgtaaatcccctgctttaacttggctccraatttacgagttaaaaaaaattgctgtcttcaagttgttgcagaagaaaggtaaaacataaaatgctcagctcaaggctgtaatagcaaagacataatttgacaatataaatgagctttagctgagttatggattaagggaacataactgcaaataacaggtgccacattataggctacatctcttccactgcaaagtccaggatcattttctgaccctcaaagtggcacaacacagcctctgtgctcatttccaaatgctttctgctccctcaggctacctgggaggaagggtctatga

SEQ ID NO: 62043 - DNA, 600 bp, Chicken  19866894323587_1
tgaacgaaaaccatgccggaaaactcatggaccttacagcccatattcttctcctttggctctcagtgccatctaatatatgcttgctaccttcaaggatggtactgtatgcaaattttctactttgcatatagtgtgatccatctgttccttctgctttgttttgatttatttcaattccgactttaaccaccatgttatgacatttgcccgttctctgaattggatgcactgatggccattgttgaatactgttcttatgttaaacaaaactatcaagctcctactttcagctctcarttttttttttttctggaagagattataattttttagcgttatttgaaggtgatatgattatttgaaagaatatctttatgttctgtatttcacgttcactgttagttttgaatgctcagaccattgcatactattaaatcatgaataaacacttgataggtaagtatagagcatccaactgattgagctgtagcaggtacttctctctgaagtgatttaaaaattaactcttggaaattggctatgatagaaatcatagacaaccagttctctttctctatgaataaaaataggacctga

SEQ ID NO: 62044 - DNA, 600 bp, Chicken  19866894323608_1
atatgagcgcgcacatggaaacagctggcaacaactcatttgtaagcgtaaaacagtggaggaaggaggaatgtggggagagcttcactcagtactccaacagcaaagcgacaggccaggacagccttatgatcatctatgcatacaagtggtacgcccaatgcaaacctcatcctgcaaacattgtgcttttgtatcactggtgacaatgacatcactgaaatcaggctcaacttggttatcacctcgccatctcaaaaagataactgaagcgctacttcaatatgttgtatgcaaacrtatgcaggaaaatattcccaggcaaataagtacctccccgttataatctgccaagtcaaatgatagcattaagagcaattaaaccattgaggaaaagaaagcataaaattggtgaatgtctgtctctagatctgtttaaaattaaaacaaatacttttctgaatgatgtgttttagtcacactataaggttcattacaagcacaactatgaagagtataagcacttcactacttatgagagcagatgaggtgcactgagcccttatctaactgcaaattcacaagttggttgctcaaggt

SEQ ID NO: 62045 - DNA, 600 bp, Chicken  19866894323611_1
agggccccagacctggatgcaatactccagatggggcctcatgagagcagagtagagagggacaatcacctccgctggctacgcctcttctgatggagcccaggatatcatcagccttctgaagtccaagcacacgctgctggctcacattcagtttttcatcaaccaggatccttatgtccttctcagcagggccactctcaaggagcttatatacgcatatctgagattaccctgagccaagtgcaccttgcactctgctttgttgaacctcaataggttctcacaggcccatctctsgagtttatcaaagtctctctggatgacatcccttttttctgacttatcaaccgcactgctcagcttggtgtcatcagcaaacttgctgagggtgcttttgatcctatgatcaaaatgacctttcattgatccctttgtccaccaatgccatcactcatgtcattcataccttcattattagtagcgttttctgtcattggagcagctgtactagttcctgctgccatatccagaagaggctgaatgatttctattttaaagacaccgtttttctgccaaaggttcaggacacggactatt

SEQ ID NO: 62046 - DNA, 600 bp, Chicken  19866894323611_2
cttttttctgacttatcaaccgcactgctcagcttggtgtcatcagcaaacttgctgagggtgcttttgatcctatgatcaaaatgacctttcattgatccctttgtccaccaatgccatcactcatgtcattcataccttcattattagtagcgttttctgtcattggagcagctgtactagttcctgctgccatatccagaagaggctgaatgatttctattttaaagacaccgtttttctgccaaaggttcaggacacggactattttactctgttgaaacaaaagcagatatcaayactaaacatagctttcctaatacacaaaccccrattttattctatttttttaagcattgagaagaatggatctaacaacacagcagtgcaamagaattggggagacctttgaaataacccactgctgtcacacaggtcagcaagatattgtacatgcaaaagatagaatctgtcaacttattatccccttcagtaaaaagttccttgcgccatttttctaaagctactctggccaggcagaaaatccaggttcaataaacagtaaaggaaatcgcatcagccccactatttcttcacaga

SEQ ID NO: 62047 - DNA, 598 bp, Chicken  19866894323611_3
ttggtgtcatcagcaaacttgctgagggtgcttttgatcctatgatcaaaatgacctttcattgatccctttgtccaccaatgccatcactcatgtcattcataccttcattattagtagcgttttctgtcattggagcagctgtactagttcctgctgccatatccagaagaggctgaatgatttctattttaaagacaccgtttttctgccaaaggttcaggacacggactattttactctgttgaaacaaaagcagatatcaayactaaacatagctttcctaatacacaaaccccrattttattctatttttttaagcattgagaagaatggatctaacaacacagcagtgcaamagaattggggagacctttgaaataacccactgctgtcacacaggtcagcaagatattgtacatgcaaaagatagaatctgtcaacttattatccccttcagtaaaaagttccttgcgccatttttctaaagctactctggccaggcagaaaatccaggttcaataaacagtaaaggaaatcgcatcagccccactatttcttcacagacagtcataaaggggggaaaaaaaaccaacaa

SEQ ID NO: 62048 - DNA, 539 bp, Chicken  19866894323611_4
cattgatccctttgtccaccaatgccatcactcatgtcattcataccttcattattagtagcgttttctgtcattggagcagctgtactagttcctgctgccatatccagaagaggctgaatgatttctattttaaagacaccgtttttctgccaaaggttcaggacacggactattttactctgttgaaacaaaagcagatatcaayactaaacatagctttcctaatacacaaaccccrattttattctatttttttaagcattgagaagaatggatctaacaacacagcagtgcaamagaattggggagacctttgaaataacccactgctgtcacacaggtcagcaagatattgtacatgcaaaagatagaatctgtcaacttattatccccttcagtaaaaagttccttgcgccatttttctaaagctactctggccaggcagaaaatccaggttcaataaacagtaaaggaaatcgcatcagccccactatttcttcacagacagtcataaaggggggaaaaaaaaccaacaa

SEQ ID NO: 62049 - DNA, 600 bp, Chicken  19866894323616_1
gttattgatgtgaggataaggctttagttagtaaatacgatttattggtgttttttggtatgtttattgccagcaggtaatgctttggaatattaaagtattgaaactttcaagtgagtctcttccgaaggattatttttaaaacctttgtttctaacctaatcagtctgatgcatggttctccaaaagaaatacagtctgcaatgtcagagtgataacacttgaccatctttttgacagcatttcctgacgtgtgttgtaaatcagttccatggttctcattctgcatagagtgaggawctgcttcgtgatggtggaagcccagggccattcaaccaggtgcatactgatgttttcagaggactgttaaatgaaggcgtgtattagttaactgttcaggctatcagacagcttacagactatccacttaaaaaagaagagtttttaagatgtggcactcaagacgttgttacattttyaaaaaataataacagtatagtgtttttttcctacaactagtttctggctgcataccttaatgcaacttcttgttgttcattacagatttttaagcttgccctgttcttaggatgtgaaatg

SEQ ID NO: 62050 - DNA, 600 bp, Chicken  19866894323616_2
tctccaaaagaaatacagtctgcaatgtcagagtgataacacttgaccatctttttgacagcatttcctgacgtgtgttgtaaatcagttccatggttctcattctgcatagagtgaggawctgcttcgtgatggtggaagcccagggccattcaaccaggtgcatactgatgttttcagaggactgttaaatgaaggcgtgtattagttaactgttcaggctatcagacagcttacagactatccacttaaaaaagaagagtttttaagatgtggcactcaagacgttgttacattttyaaaaaataataacagtatagtgtttttttcctacaactagtttctggctgcataccttaatgcaacttcttgttgttcattacagatttttaagcttgccctgttcttaggatgtgaaatgtgatggagtctgtaatacatatacaagcaacctgtgaagcagagtgcttgcctaggtactaagtgtttaggtcagccacctgtgaagacacatagccagtataaatacgaagaggaggagcaggtttggcatttrcagtaaggcagctgggttttctaaatgaagttcagtttattctc

SEQ ID NO: 62051 - DNA, 600 bp, Chicken  19866894323616_3
gaagagtttttaagatgtggcactcaagacgttgttacattttyaaaaaataataacagtatagtgtttttttcctacaactagtttctggctgcataccttaatgcaacttcttgttgttcattacagatttttaagcttgccctgttcttaggatgtgaaatgtgatggagtctgtaatacatatacaagcaacctgtgaagcagagtgcttgcctaggtactaagtgtttaggtcagccacctgtgaagacacatagccagtataaatacgaagaggaggagcaggtttggcatttrcagtaaggcagctgggttttctaaatgaagttcagtttattctcttctgaacttctagctctgtactcttacccttacgcagctgatatggtaagctgaagcaaagctgacaaaaagttctgcaaggcagtcctgcagctacagaaagaggtgaaagcccagttcgaaatagatctttggatttcaattataaaaattatattaataatctagtgttctgctcacaaattttacatgagggttttttctagctattcaaaaggcattgatggcatttttggtgcctttggttgcttctgc

SEQ ID NO: 62052 - DNA, 600 bp, Chicken  19866894323643_1
gtgcttttctgataccagtgagggtagtttttatgtgttctgtttcacatcttaagaagactgtgctgtatgtgcaaaatgatattgtaaccaagtccatgaaaattcatgttttgtgtgcaactacgataaaaaaaaagcaaaccattaggagtcctggctcctactgcagtgtaattgatcataaaacacctagcctgttagatttattttattttgtttttaaactagggtacatgtttttatgttaaatagattggattattctagtgatttcacagatagcatttaactagaaawgcaaacagattcttgcttaaagaaaggaaaatataaagcaaggaataaaaccaagctacgtttccattttcgaatgtaaggactggcaaggagaaagataccatttaagaagaaattaatttcagacttgggaagttgtgattccgacaggcttrgtactagatgtcaactgtgatatccctcacagttctctaaacaaggtcatcttgtgtatattttctttattcagtcatttattatgttgacagttctcgtatttttccttctctactttttgttctctttgatggcaagcccaga

SEQ ID NO: 62053 - DNA, 600 bp, Chicken  19866894323643_2
cctggctcctactgcagtgtaattgatcataaaacacctagcctgttagatttattttattttgtttttaaactagggtacatgtttttatgttaaatagattggattattctagtgatttcacagatagcatttaactagaaawgcaaacagattcttgcttaaagaaaggaaaatataaagcaaggaataaaaccaagctacgtttccattttcgaatgtaaggactggcaaggagaaagataccatttaagaagaaattaatttcagacttgggaagttgtgattccgacaggcttrgtactagatgtcaactgtgatatccctcacagttctctaaacaaggtcatcttgtgtatattttctttattcagtcatttattatgttgacagttctcgtatttttccttctctactttttgttctctttgatggcaagcccagaaaagagtttatatggcctgcaaatattactgtgagaggacagcattcactggcatggaagagaggttacacagatcactacttcagtgtttgaagggattagagataaattgaccatgatgggagaaggtgctgcatctctgtgggaatgaagga

SEQ ID NO: 62054 - DNA, 599 bp, Chicken  19866894323647_1
  misc_feature (1)..(19): n is any nucleotide
nnnnnnnnnnnnnnnnnnnatcactgggtgtgatacagctatttctcaccctccccggggctgacaggaagaaagcagtgtagctgaggtggagacattcccattttagctgctggttgctgtgccacagcagctctttgcaatgcggagtgctgatggagcagttagcattgccaagcctgtcagtgagggagcttcacgaagcctaaagcagagagtaatagcctggagcttggtcctatctggccatgtatcttcgctgctggtccctctgaggatccaggcagtcagacatctccmctgccttgggctgttggctgctgttcaacccttggggcactccattgggtgaggtggagctcaccccttgcagcgagagacccagtcctacaaacccygtcarcctttgtccgtctctgccaatatccgctcccctccttctttccctgagcctgaccttgctgagtgcactcccgactccatcagtatttatagatgcttccttggaagcagccaacgctgactggggaggtttccagtcatgagctacaactattcaggccctactggaaaagttagagacacgttactggaaaaaa

SEQ ID NO: 62055 - DNA, 600 bp, Chicken  19866894323647_2
tcccattttagctgctggttgctgtgccacagcagctctttgcaatgcggagtgctgatggagcagttagcattgccaagcctgtcagtgagggagcttcacgaagcctaaagcagagagtaatagcctggagcttggtcctatctggccatgtatcttcgctgctggtccctctgaggatccaggcagtcagacatctccmctgccttgggctgttggctgctgttcaacccttggggcactccattgggtgaggtggagctcaccccttgcagcgagagacccagtcctacaaacccygtcarcctttgtccgtctctgccaatatccgctcccctccttctttccctgagcctgaccttgctgagtgcactcccgactccatcagtatttatagatgcttccttggaagcagccaacgctgactggggaggtttccagtcatgagctacaactattcaggccctactggaaaagttagagacacgttactggaaaaaaaaaaaaaaataggagccaaatttatccttcagcttaggaaaggagaaagggtgtgtgtaaagccttcaggcagttcagctctgctcgtgccattcaagg

SEQ ID NO: 62056 - DNA, 600 bp, Chicken  19866894323647_3
ttttagctgctggttgctgtgccacagcagctctttgcaatgcggagtgctgatggagcagttagcattgccaagcctgtcagtgagggagcttcacgaagcctaaagcagagagtaatagcctggagcttggtcctatctggccatgtatcttcgctgctggtccctctgaggatccaggcagtcagacatctccmctgccttgggctgttggctgctgttcaacccttggggcactccattgggtgaggtggagctcaccccttgcagcgagagacccagtcctacaaacccygtcarcctttgtccgtctctgccaatatccgctcccctccttctttccctgagcctgaccttgctgagtgcactcccgactccatcagtatttatagatgcttccttggaagcagccaacgctgactggggaggtttccagtcatgagctacaactattcaggccctactggaaaagttagagacacgttactggaaaaaaaaaaaaaaataggagccaaatttatccttcagcttaggaaaggagaaagggtgtgtgtaaagccttcaggcagttcagctctgctcgtgccattcaaggaaagg

SEQ ID NO: 62057 - DNA, 600 bp, Chicken  19866894323649_1
tcaccataaccactggaaagttcaaaagctccattctgtccttctgcctgtgggggtggatttggcactcaggctgtgcacagaacggtgctggctttgccagaaagcgagggctggtgttacacacgcctcattgcacagctccgtctgcggctgctaaaacaaagctgtcagccttcagggctgctggggaccagcttcagttgcggtccctccggccccacattaagttccttcatcccccactgggatcggtgaataagaaaggtgagcagccgattacaaaatgccacaggggasggccaagtcgcacaacgtgaacctaaaataccaaacgactttactgaatggatccagacacagtttgaagcctgtcctttggcagtagaacacactgagctcttttaggcatgtgaggcacagcggagttcaaacttccaaagggtttttttttttttttttgcatcgttacaaaatcatcgctccacgatcttcaacatcacttaaggagagcaaaaagtagcaacagcttcgaagctcttcaccggttttccctccagtgttttcccatccagccacacctgctgctccttcagtggt

SEQ ID NO: 62058 - DNA, 599 bp, Chicken  19866894323653_1
  misc_feature (1)..(182): n is any nucleotide
nnnnnnnnnnnnnnnnnnnnnnnnnnnnnnnnnnnnnnnnnnnnnnnnnnnnnnnnnnnnnnnnnnnnnnnnnnnnnnnnnnnnnnnnnnnnnnnnnnnnnnnnnnnnnnnnnnnnnnnnnnnnnnnnnnnnnnnnnnnnnnnnnnnnnnnnnnnnnnnnnnnnnnnnnnnnnnnnnnnnnnctgcactgaaatggtttgtgcttgttgctacctactttgttagaaaattgtgttgaattggtagaaaatctgttcacgcaagtgacctttgacttgaagaactgtcttattgagaagrtttcaaattatttttgagatgctcatagttctgaatctgttggttttaaactatgagtgcataactcttcagtcagactgtgccagcataggcctttatagtcaaactgggctaatctgatggtgaggagaggatctcacaccacagaatgaataccttaacagattaaatcccacttcaacttcagactccgttctgtagcattttccatgtaagtgagcagagtgcagtattcctctgagtttcatatgcattaaaaatamttactgttgagaagcattactaagtcctaacgtaag

SEQ ID NO: 62059 - DNA, 600 bp, Chicken  19866894323653_2
gtgacctttgacttgaagaactgtcttattgagaagrtttcaaattatttttgagatgctcatagttctgaatctgttggttttaaactatgagtgcataactcttcagtcagactgtgccagcataggcctttatagtcaaactgggctaatctgatggtgaggagaggatctcacaccacagaatgaataccttaacagattaaatcccacttcaacttcagactccgttctgtagcattttccatgtaagtgagcagagtgcagtattcctctgagtttcatatgcattaaaaatamttactgttgagaagcattactaagtcctaacgtaagcacaagcagatacatcgtttcatgtatctgaatctcatttgtatggggatatatctaaaactgaaaggtaatcaatctcaggatacagaacacaggtagaaagactgtagtgtaaaactctatctctaaacatatcttttgtcatgtctctctaacttttttggctattttcatgtagcttcaagaggatcattgtctcatgttggtctgtgactaactttgtaatattgaagtccagtactgaatactggaatgtcagtgaat

SEQ ID NO: 62060 - DNA, 600 bp, Chicken  19866894323653_3
gttaaaatattaatttttttctacttttcaaaattttggtgaaatttcaatgctaaaagaaaatgaactaattccatagttctgtcccttaagctctatttctatgcccatttgcagacaaaaagggatgctttttgtgtcccccgctccatctggaagaaaactctctaagtaatgacgctacttcttattttttttccctcctttgaaatttccattaaagaacttttaatatttcaacctaattcaatcaatctaagctatccgagcagaatcaggtttgtactgaaaatgggttaygttcatatctattcatttgatactatatttattgcagtcagaaaagctttgttaattctttgactgtactgggctcccaggggaatggaggtactggagtttaactgtctgagatactttgcaaaatgcatttaacaaatattttatcactgtgtcagtagtctcattgccagttatttgtactttgattggccagaagctccatctgcctgtcttaagaacgctactaaaatargagaagtagtcagaatgytgtatacaaacaaccagaatttgacartaggggaatttagtgctgta

SEQ ID NO: 62061 - DNA, 537 bp, Chicken  19866894323653_4
ttcaacctaattcaatcaatctaagctatccgagcagaatcaggtttgtactgaaaatgggttaygttcatatctattcatttgatactatatttattgcagtcagaaaagctttgttaattctttgactgtactgggctcccaggggaatggaggtactggagtttaactgtctgagatactttgcaaaatgcatttaacaaatattttatcactgtgtcagtagtctcattgccagttatttgtactttgattggccagaagctccatctgcctgtcttaagaacgctactaaaatargagaagtagtcagaatgytgtatacaaacaaccagaatttgacartaggggaatttagtgctgtaactggaagaattatcaggcatagaaattatgacatctaattttcagggtattgtaacagagacaaagtaacacaaataaagagttcctgcaggggggaggaaggtataaatcacattatctttttttcttctctaaaattctcatcctaagcttatatcagtcataggtttt

SEQ ID NO: 62062 - DNA, 519 bp, Chicken  19866894323653_5
atctaagctatccgagcagaatcaggtttgtactgaaaatgggttaygttcatatctattcatttgatactatatttattgcagtcagaaaagctttgttaattctttgactgtactgggctcccaggggaatggaggtactggagtttaactgtctgagatactttgcaaaatgcatttaacaaatattttatcactgtgtcagtagtctcattgccagttatttgtactttgattggccagaagctccatctgcctgtcttaagaacgctactaaaatargagaagtagtcagaatgytgtatacaaacaaccagaatttgacartaggggaatttagtgctgtaactggaagaattatcaggcatagaaattatgacatctaattttcagggtattgtaacagagacaaagtaacacaaataaagagttcctgcaggggggaggaaggtataaatcacattatctttttttcttctctaaaattctcatcctaagcttatatcagtcataggtttt

SEQ ID NO: 62063 - DNA, 492 bp, Chicken  19866894323653_6
ttgtactgaaaatgggttaygttcatatctattcatttgatactatatttattgcagtcagaaaagctttgttaattctttgactgtactgggctcccaggggaatggaggtactggagtttaactgtctgagatactttgcaaaatgcatttaacaaatattttatcactgtgtcagtagtctcattgccagttatttgtactttgattggccagaagctccatctgcctgtcttaagaacgctactaaaatargagaagtagtcagaatgytgtatacaaacaaccagaatttgacartaggggaatttagtgctgtaactggaagaattatcaggcatagaaattatgacatctaattttcagggtattgtaacagagacaaagtaacacaaataaagagttcctgcaggggggaggaaggtataaatcacattatctttttttcttctctaaaattctcatcctaagcttatatcagtcataggtttt

SEQ ID NO: 62064 - DNA, 600 bp, Chicken  19866894323676_1
gtgaaataatcctgccaaaagaagcagtcaaccttcctccaaaaaagcaataacccgggagtaaagcatattgaaaatgttagcttgagtggagataggctctttgcttcatcatagctgaagttttctggaaccattccagttgtgccatcagtatctatgattgtgtgctacggtcatcaaggaccatagcacaaaggacacctttattccactactactaaattctagagagcttcaactgcatagttttacaggaaaacatcttagaaaggaatatagttgagatttttaattttyctttttatttcacaaaaggaaactgacagccataatcacrgatcatctacttctgtgtttgcctcatattgcattagggagatttggccaagctttgaggtgaaataatcggtctcacagagatgttgccaaatagtctcagcagaagtgactggagaggaacactgtgcctattcaccaatgcaaagaatcagtgattttactatagcrctatccatatatatccatctaatgcagtgcactgcaggcatgctggcccagggcccagagacccatctagcagcatttgggtgacactgc

SEQ ID NO: 62065 - DNA, 600 bp, Chicken  19866894323676_2
aaaaaagcaataacccgggagtaaagcatattgaaaatgttagcttgagtggagataggctctttgcttcatcatagctgaagttttctggaaccattccagttgtgccatcagtatctatgattgtgtgctacggtcatcaaggaccatagcacaaaggacacctttattccactactactaaattctagagagcttcaactgcatagttttacaggaaaacatcttagaaaggaatatagttgagatttttaattttyctttttatttcacaaaaggaaactgacagccataatcacrgatcatctacttctgtgtttgcctcatattgcattagggagatttggccaagctttgaggtgaaataatcggtctcacagagatgttgccaaatagtctcagcagaagtgactggagaggaacactgtgcctattcaccaatgcaaagaatcagtgattttactatagcrctatccatatatatccatctaatgcagtgcactgcaggcatgctggcccagggcccagagacccatctagcagcatttgggtgacactgcatccaagcaatggcttattagcttgggcatgatactttaa

SEQ ID NO: 62066 - DNA, 498 bp, Chicken  19866894323676_3
tccactactactaaattctagagagcttcaactgcatagttttacaggaaaacatcttagaaaggaatatagttgagatttttaattttyctttttatttcacaaaaggaaactgacagccataatcacrgatcatctacttctgtgtttgcctcatattgcattagggagatttggccaagctttgaggtgaaataatcggtctcacagagatgttgccaaatagtctcagcagaagtgactggagaggaacactgtgcctattcaccaatgcaaagaatcagtgattttactatagcrctatccatatatatccatctaatgcagtgcactgcaggcatgctggcccagggcccagagacccatctagcagcatttgggtgacactgcatccaagcaatggcttattagcttgggcatgatactttaaagggtccagatggttctggttttagcttggacagcaattggtcagctatctttgcagcatgcttttga

SEQ ID NO: 62067 - DNA, 599 bp, Chicken  19866894323679_1
  misc_feature (1)..(69): n is any nucleotide
nnnnnnnnnnnnnnnnnnnnnnnnnnnnnnnnnnnnnnnnnnnnnnnnnnnnnnnnnnnnnnnnnnnnnttctgctgtcatttaaagaggatgttcatagttaaattttattgaaagagttttttgtagacagtacatggaatttgtggtctgttagcagtgtagttaattgactcctggaagtgtttgatgaagtgtcacttccatatctgaatatagggtaaggttttggacatgggctgtatttaaaactagcacctgttatctgtctgagagctggcccagcttgaagagaaacaygtagacagacagtggtgcctgcaagctgagcgttccaaggcttctgtaacaagctattgtgatatgtctgtggttgcattgctgtasttacaattgccttttcttcgttcttggtcaaaggtgctccagtctgcttttagattcctggctgacgctgttaatgtttttgggtttgatttggaaatattgatttatgccagttgggttgtggcctgcatcaggcttgctgagagcttttatttattgcatgtacgtgggatccaaatcaaacctgtgggcatttccctagagtttgatac

SEQ ID NO: 62068 - DNA, 600 bp, Chicken  19866894323679_2
aggatgttcatagttaaattttattgaaagagttttttgtagacagtacatggaatttgtggtctgttagcagtgtagttaattgactcctggaagtgtttgatgaagtgtcacttccatatctgaatatagggtaaggttttggacatgggctgtatttaaaactagcacctgttatctgtctgagagctggcccagcttgaagagaaacaygtagacagacagtggtgcctgcaagctgagcgttccaaggcttctgtaacaagctattgtgatatgtctgtggttgcattgctgtasttacaattgccttttcttcgttcttggtcaaaggtgctccagtctgcttttagattcctggctgacgctgttaatgtttttgggtttgatttggaaatattgatttatgccagttgggttgtggcctgcatcaggcttgctgagagcttttatttattgcatgtacgtgggatccaaatcaaacctgtgggcatttccctagagtttgataccactcgtgactcttccatgcattgcttttgctctttgcaggtcctccaagccaagcaatgtgggctttaggagataaaattgcatcgt

SEQ ID NO: 62069 - DNA, 600 bp, Chicken  19866894323680_1
gagcaaatcctgggaaatcttgtttctcagttagtcttgcatcttttgttgttgctgtcatcattaatagtaatctatgacatgcctaataaacctgctctccacagaaattctaacattcaccaccaccatttgtggaaatcccttaacagcaatcagtagctgttgttcagtcatatgcttttaccagaagagaatagcttctgtatagcagaactactctagtgcctgcaaatattttgacagacacttagaaagagccagagaagcattttcttttctacttacatcctttacacwttctaagaaattcaaatttcttggctaatcaaaagactgatttgaatactgtttttttcttttaagtcatggcacgtttttattgattcactcctagccagaattcaaaattataaaagcatgatcatctttcttgataagtagttctgtgttactattgatgatgcacacttggtgtcagaaagaagacttgactgtaaatgccatacttagtattcatgccttggtcaaccagcaactgagcaatgcttaagtcagcgcacaaactgtaatgtttgctggaagatttagacaaactgg

SEQ ID NO: 62070 - DNA, 600 bp, Chicken  19866894323680_2
ttttcaaagtgtggatgacaaaaaaagtcaggtcatgcatgtattccccagtcacttaattgcttctcaagataaaaatctctcaagagaaagcaattagagaaaaaactcgtactactcggtataaactagtcataaatattttagatttaagacagacatattaaagccccataagattctgaaacagccttccagagtcatctgaacagaagtcaacatttttatgaaaaaactaacatgatatcacttcctgcagcaatgactcagctgcagtgtcttttgtactgatgtatgtcmtgaagtcacaccatggaaagcaactgttgaacttttcctgtgtacgttacaaccaagaaacccagtgctacatataaaatttctttccggactgcattcaggcttgaaatgaaaaaaaacatcattttaaattaccttacctcacatttgaaacacttatgattttagtgtttcctgaattcacttatatggcaactcctaagcagcagatactcaacttatcctggaaaaaaacataaaacttactatttaaaaaaaaagtcactcttagaatcctcactctacacttcacttgcaggt

SEQ ID NO: 62071 - DNA, 600 bp, Chicken  19866894323684_1
ccgctcactgcaattgcataattccactagcaacagaactgtgttcaaaaaaatctgttttaaggtttgtttattccgaagaagggatcaatgccgaggaacagatggagagaaaaggtttaaggaataagataataaaaaaggcgtgtgatagccaaaagcaacaccagcaattatttaacaaaaactgagtatttaaaggacgatgagaagaaaaactcagaaaaagtaaggtgcacaaaaaaagtacggttttagtttgcaatgcagatgtttaagatttacaatcagtatggttcrctttttcatgctataaaacgcatgtaaaattatgcccaagatgtgtgtaaatgtttaaatattaaaacaaaacagatattctggatgtttgatgtttggttttggagagagaaaaagcctattttacaaggatccaagcactaaagtgaaattaacataaaacaaataaaccagtgcaataaaataaaaagctcaaaaccaaaagttaaccgaggtcattaatgtcagttaaatggcaaagatccacgttacccaatgtttaaatatcaattaaatgggataagactgccttgcaattac

SEQ ID NO: 62072 - DNA, 600 bp, Chicken  19866894323686_1
aacttaagtgctgtccctggtttcatggatatttcagtggtgaaaagttttgaaggtagacggtgatgtactgcagacatttgtgagaagctccttcctcacatgttggtagaaaaagaacgtgaggactgcagctttgaaaacttctaaagaaggactaatggagaggatgctagagtcaacaactcaacagctgataagaagataaagttgataaagagcataaagcttttttagtggttgatttgaaccttagtatttcctctcataaaacatttttcttagaagatataaatgtayaaattttagaaaggaaattttgagcagtgctttgtcaggtctgacattgggctgaagaaaataaatgaatgrtgttattgatcagcgattaactaggattttgagctgaaagtctcaagcgtgattgaaatagcatataagtgccccttcctttgctttctcaatatctatttgtgtgtactacctgcttttcctattccttcccagcatgttttggcgggcctgctcctgtgagcacacaggcaggtcctcctgggcaggcaggaggacaccttgcacaccagggcaatatccaaacag

SEQ ID NO: 62073 - DNA, 600 bp, Chicken  19866894323686_2
gcagacatttgtgagaagctccttcctcacatgttggtagaaaaagaacgtgaggactgcagctttgaaaacttctaaagaaggactaatggagaggatgctagagtcaacaactcaacagctgataagaagataaagttgataaagagcataaagcttttttagtggttgatttgaaccttagtatttcctctcataaaacatttttcttagaagatataaatgtayaaattttagaaaggaaattttgagcagtgctttgtcaggtctgacattgggctgaagaaaataaatgaatgrtgttattgatcagcgattaactaggattttgagctgaaagtctcaagcgtgattgaaatagcatataagtgccccttcctttgctttctcaatatctatttgtgtgtactacctgcttttcctattccttcccagcatgttttggcgggcctgctcctgtgagcacacaggcaggtcctcctgggcaggcaggaggacaccttgcacaccagggcaatatccaaacagtttttcctcactggatgtgagggaatggcctcaagttgcaccagggaagtttagatcagatgttgggaagaa

SEQ ID NO: 62074 - DNA, 528 bp, Chicken  19866894323686_3
gcatataagtgccccttcctttgctttctcaatatctatttgtgtgtactacctgcttttcctattccttcccagcatgttttggcgggcctgctcctgtgagcacacaggcaggtcctcctgggcaggcaggaggacaccttgcacaccagggcaatatccaaacagtttttcctcactggatgtgagggaatggcctcaagttgcaccagggaagtttagatcagatgttgggaagaatttcttcatggaaggagtggttaggcaacattttgcctaaccaatacatattttatatayacatataaatatatgcatytgtacagtaacacagattggagacattatcatttcaaacagccgttctctgttcctgaatagtctatgttagaaatttggactaggtaaaggaaacacttcaaaatatcttaatctgttttggctattgaaaatacatacctactctgtttctactgataatggaactactcaggacagaaagctataaatgagtaagctttcaaagga

SEQ ID NO: 62075 - DNA, 509 bp, Chicken  19866894323686_4
tttgctttctcaatatctatttgtgtgtactacctgcttttcctattccttcccagcatgttttggcgggcctgctcctgtgagcacacaggcaggtcctcctgggcaggcaggaggacaccttgcacaccagggcaatatccaaacagtttttcctcactggatgtgagggaatggcctcaagttgcaccagggaagtttagatcagatgttgggaagaatttcttcatggaaggagtggttaggcaacattttgcctaaccaatacatattttatatayacatataaatatatgcatytgtacagtaacacagattggagacattatcatttcaaacagccgttctctgttcctgaatagtctatgttagaaatttggactaggtaaaggaaacacttcaaaatatcttaatctgttttggctattgaaaatacatacctactctgtttctactgataatggaactactcaggacagaaagctataaatgagtaagctttcaaagga

SEQ ID NO: 62076 - DNA, 600 bp, Chicken  19866894323688_1
gatttctcagctacgggggtgacttattcacctttctatggatactgctaaaatatccctgactcacaatcacattcacccggtttgtagaagcaatattttcacttatagagattgccagctctcactgaaagggaagtgttacagcagtgactggctgagcccagggtaacagagcttttttctattcactagaagttgatgcctttggtttggggcagagaataacttgaaacattatataattatatgttaggaaacaaacactgcatgaggctagaaatggaagagggagaaggraaggtgtgttcaggtactgtcttagtgaatacagtgagcttcttaagttcactcaaagattcttaagttcatctaaagatgaagcaaaatgtattcttgggaactggggttgtctttggtatatcttctctgaatagaagtcacaaaagccaacactaaaacaagtgctgttgtctgaggtgccattttctgtttttcacagtcagcgtgagggtagaattatcattttgatctctccaacaataccaccttagaagtgctggagcgtcatggaagaccctcacttctcattttatcttc

SEQ ID NO: 62077 - DNA, 599 bp, Chicken  19866894323709_1
  misc_feature (1)..(39): n is any nucleotide
nnnnnnnnnnnnnnnnnnnnnnnnnnnnnnnnnnnnnnnggtcacatgctttctggtacatatttgtttaaataacccccttaaacattcagtgttagtgacctacctttactaaaagcaacaattaaggaacaaaggagagaaattcatagcaatcagttttagaaactcaatattatcttctgttattcagaagtgtaaaagcatggtatatttctgaaggaaagaagggataaactgtggtagctctgtaaaatgctgacagaacagttttgtatggtgcctgtggtctttaaaagycctagcagtgtcaaaatattttcagctattaagaaatcagtaagtttggtaaatcagcaaacatggaagatctstgggtaaaatagtattttgtggtaacagtttgtaggagatatgtcagtatttctctgtagagcaactggatctttctgggaaagggaaaggaaggtttggaaagttgtraagatgatttctctcygtcctcaccataatgatgcyacagagctcatctgctctggctttggatatcctcctgtaaggaaccttgcagcacaatatgatgctgagaccctattctc

SEQ ID NO: 62078 - DNA, 600 bp, Chicken  19866894323709_2
acccccttaaacattcagtgttagtgacctacctttactaaaagcaacaattaaggaacaaaggagagaaattcatagcaatcagttttagaaactcaatattatcttctgttattcagaagtgtaaaagcatggtatatttctgaaggaaagaagggataaactgtggtagctctgtaaaatgctgacagaacagttttgtatggtgcctgtggtctttaaaagycctagcagtgtcaaaatattttcagctattaagaaatcagtaagtttggtaaatcagcaaacatggaagatctstgggtaaaatagtattttgtggtaacagtttgtaggagatatgtcagtatttctctgtagagcaactggatctttctgggaaagggaaaggaaggtttggaaagttgtraagatgatttctctcygtcctcaccataatgatgcyacagagctcatctgctctggctttggatatcctcctgtaaggaaccttgcagcacaatatgatgctgagaccctattctcctacttaattacagcagaagacaggtgytcttcactagtcccatcaccccagacttcccttgaattctgctgaga

SEQ ID NO: 62079 - DNA, 600 bp, Chicken  19866894323709_3
tgttattcagaagtgtaaaagcatggtatatttctgaaggaaagaagggataaactgtggtagctctgtaaaatgctgacagaacagttttgtatggtgcctgtggtctttaaaagycctagcagtgtcaaaatattttcagctattaagaaatcagtaagtttggtaaatcagcaaacatggaagatctstgggtaaaatagtattttgtggtaacagtttgtaggagatatgtcagtatttctctgtagagcaactggatctttctgggaaagggaaaggaaggtttggaaagttgtraagatgatttctctcygtcctcaccataatgatgcyacagagctcatctgctctggctttggatatcctcctgtaaggaaccttgcagcacaatatgatgctgagaccctattctcctacttaattacagcagaagacaggtgytcttcactagtcccatcaccccagacttcccttgaattctgctgagaaaaggtagttgaaggtattcaaggctaattgggctttatcttttccatattgtcaaaacaataaaataattatgtggctcacagtgcacaagttcaagaagatgcctga

SEQ ID NO: 62080 - DNA, 600 bp, Chicken  19866894323709_4
aaaagcatggtatatttctgaaggaaagaagggataaactgtggtagctctgtaaaatgctgacagaacagttttgtatggtgcctgtggtctttaaaagycctagcagtgtcaaaatattttcagctattaagaaatcagtaagtttggtaaatcagcaaacatggaagatctstgggtaaaatagtattttgtggtaacagtttgtaggagatatgtcagtatttctctgtagagcaactggatctttctgggaaagggaaaggaaggtttggaaagttgtraagatgatttctctcygtcctcaccataatgatgcyacagagctcatctgctctggctttggatatcctcctgtaaggaaccttgcagcacaatatgatgctgagaccctattctcctacttaattacagcagaagacaggtgytcttcactagtcccatcaccccagacttcccttgaattctgctgagaaaaggtagttgaaggtattcaaggctaattgggctttatcttttccatattgtcaaaacaataaaataattatgtggctcacagtgcacaagttcaagaagatgcctgaaatatgttgactgaga

SEQ ID NO: 62081 - DNA, 600 bp, Chicken  19866894323709_5
aaggaaagaagggataaactgtggtagctctgtaaaatgctgacagaacagttttgtatggtgcctgtggtctttaaaagycctagcagtgtcaaaatattttcagctattaagaaatcagtaagtttggtaaatcagcaaacatggaagatctstgggtaaaatagtattttgtggtaacagtttgtaggagatatgtcagtatttctctgtagagcaactggatctttctgggaaagggaaaggaaggtttggaaagttgtraagatgatttctctcygtcctcaccataatgatgcyacagagctcatctgctctggctttggatatcctcctgtaaggaaccttgcagcacaatatgatgctgagaccctattctcctacttaattacagcagaagacaggtgytcttcactagtcccatcaccccagacttcccttgaattctgctgagaaaaggtagttgaaggtattcaaggctaattgggctttatcttttccatattgtcaaaacaataaaataattatgtggctcacagtgcacaagttcaagaagatgcctgaaatatgttgactgagacataaggtctagaagtacag

SEQ ID NO: 62082 - DNA, 513 bp, Chicken  19866894323709_6
attaagaaatcagtaagtttggtaaatcagcaaacatggaagatctstgggtaaaatagtattttgtggtaacagtttgtaggagatatgtcagtatttctctgtagagcaactggatctttctgggaaagggaaaggaaggtttggaaagttgtraagatgatttctctcygtcctcaccataatgatgcyacagagctcatctgctctggctttggatatcctcctgtaaggaaccttgcagcacaatatgatgctgagaccctattctcctacttaattacagcagaagacaggtgytcttcactagtcccatcaccccagacttcccttgaattctgctgagaaaaggtagttgaaggtattcaaggctaattgggctttatcttttccatattgtcaaaacaataaaataattatgtggctcacagtgcacaagttcaagaagatgcctgaaatatgttgactgagacataaggtctagaagtacagaaatagaccaaagtaatacag

SEQ ID NO: 62083 - DNA, 599 bp, Chicken  19866894323712_1
  misc_feature (1)..(177): n is any nucleotide
nnnnnnnnnnnnnnnnnnnnnnnnnnnnnnnnnnnnnnnnnnnnnnnnnnnnnnnnnnnnnnnnnnnnnnnnnnnnnnnnnnnnnnnnnnnnnnnnnnnnnnnnnnnnnnnnnnnnnnnnnnnnnnnnnnnnnnnnnnnnnnnnnnnnnnnnnnnnnnnnnnnnnnnnnnnnnnnnntcttcttttctctcgagaaacaaaacgcttcattgctgaaagcaggtttaaaagctgtctgcatgctagcctataattttatgtatgtctgaaactagcctaatctagcagtgctgcaggaasaaatggttgtgctggcattgcgtgggatgctccattgtgtgctgctccaaactaaacccaaatctcttctttgttgcctttatcccttcrccctgttgagtccttccttgagaggagcmaagcaggaacacaggtgatataacaagttatgggatatgtgttgcgatggcagaagcggtctgtggggcagaaatggagtcgttgctctttggagggacacrctgtaatctcagcaagcactcggggagctcaacactgtttttaaaacctgtagtggtgtttatagcacagattgatag

SEQ ID NO: 62084 - DNA, 599 bp, Chicken  19866894323712_2
  misc_feature (1)..(87): n is any nucleotide
nnnnnnnnnnnnnnnnnnnnnnnnnnnnnnnnnnnnnnnnnnnnnnnnnnnnnnnnnnnnnnnnnnnnnnnnnnnnnnnnnnnnnnntcttcttttctctcgagaaacaaaacgcttcattgctgaaagcaggtttaaaagctgtctgcatgctagcctataattttatgtatgtctgaaactagcctaatctagcagtgctgcaggaasaaatggttgtgctggcattgcgtgggatgctccattgtgtgctgctccaaactaaacccaaatctcttctttgttgcctttatcccttcrccctgttgagtccttccttgagaggagcmaagcaggaacacaggtgatataacaagttatgggatatgtgttgcgatggcagaagcggtctgtggggcagaaatggagtcgttgctctttggagggacacrctgtaatctcagcaagcactcggggagctcaacactgtttttaaaacctgtagtggtgtttatagcacagattgatagccaggcatcaccaggttgatgattttgtaaaccacttcagtgacacttctctggccaggctgtgaactgactttgaggcagcattaggtg

SEQ ID NO: 62085 - DNA, 599 bp, Chicken  19866894323712_3
  misc_feature (1)..(58): n is any nucleotide
nnnnnnnnnnnnnnnnnnnnnnnnnnnnnnnnnnnnnnnnnnnnnnnnnnnnnnnnnntcttcttttctctcgagaaacaaaacgcttcattgctgaaagcaggtttaaaagctgtctgcatgctagcctataattttatgtatgtctgaaactagcctaatctagcagtgctgcaggaasaaatggttgtgctggcattgcgtgggatgctccattgtgtgctgctccaaactaaacccaaatctcttctttgttgcctttatcccttcrccctgttgagtccttccttgagaggagcmaagcaggaacacaggtgatataacaagttatgggatatgtgttgcgatggcagaagcggtctgtggggcagaaatggagtcgttgctctttggagggacacrctgtaatctcagcaagcactcggggagctcaacactgtttttaaaacctgtagtggtgtttatagcacagattgatagccaggcatcaccaggttgatgattttgtaaaccacttcagtgacacttctctggccaggctgtgaactgactttgaggcagcattaggtgctgtgatgtgagcgtgggtggctcttaga

SEQ ID NO: 62086 - DNA, 600 bp, Chicken  19866894323712_4
ggtttaaaagctgtctgcatgctagcctataattttatgtatgtctgaaactagcctaatctagcagtgctgcaggaasaaatggttgtgctggcattgcgtgggatgctccattgtgtgctgctccaaactaaacccaaatctcttctttgttgcctttatcccttcrccctgttgagtccttccttgagaggagcmaagcaggaacacaggtgatataacaagttatgggatatgtgttgcgatggcagaagcggtctgtggggcagaaatggagtcgttgctctttggagggacacrctgtaatctcagcaagcactcggggagctcaacactgtttttaaaacctgtagtggtgtttatagcacagattgatagccaggcatcaccaggttgatgattttgtaaaccacttcagtgacacttctctggccaggctgtgaactgactttgaggcagcattaggtgctgtgatgtgagcgtgggtggctcttagagctgctcatgtcacaaatcgcctctgtcttagcagtgcatttttgtattcctgatctgagttttgtgctagaacttactaatgtgagaaggcaataacatgtg

SEQ ID NO: 62087 - DNA, 600 bp, Chicken  19866894323715_1
cttgagcggagctgtgggcgtaaaagcaagcttgtatcaatgccacattaatgctgaattctgaaattatagcttgcgtgttctgatacatgggagtactcagggtattatgccacaatgccttgggccaaaattagacacgagcatgaagcctggcacatttcagtacctctgctgaggtgatgccaacgtgttccctaggagcacacagggtaggattgtgtttctcagcagcagagctcagacagatcagccagtacagtaagtggatcagcttgtatgtaaagttacagaaaaaawtgggacagagatattcggtgacttgaaggcttgaaaggaccataagtttgtacattwtatttgatatcatttagcctaaatgcaaattacttcttagaaactttatccttcctaatttcagattatgaggcaaatcacagacagagctggcatgcaaggtagggatctactggtaatcatccttaagtctatacatgccaaaatctttttctcccataatgtatttattttaattttcagcttaaaatatcagggttcttacaagaataattaaattttttaaaaatcataacaaaaaac

SEQ ID NO: 62088 - DNA, 600 bp, Chicken  19866894323715_2
attctgaaattatagcttgcgtgttctgatacatgggagtactcagggtattatgccacaatgccttgggccaaaattagacacgagcatgaagcctggcacatttcagtacctctgctgaggtgatgccaacgtgttccctaggagcacacagggtaggattgtgtttctcagcagcagagctcagacagatcagccagtacagtaagtggatcagcttgtatgtaaagttacagaaaaaawtgggacagagatattcggtgacttgaaggcttgaaaggaccataagtttgtacattwtatttgatatcatttagcctaaatgcaaattacttcttagaaactttatccttcctaatttcagattatgaggcaaatcacagacagagctggcatgcaaggtagggatctactggtaatcatccttaagtctatacatgccaaaatctttttctcccataatgtatttattttaattttcagcttaaaatatcagggttcttacaagaataattaaattttttaaaaatcataacaaaaaacacaacttctagtgtctccattcaaagtagggtactatcgtttgaaactttttagttg

SEQ ID NO: 62089 - DNA, 599 bp, Chicken  19866894323730_1
  misc_feature (1)..(148): n is any nucleotide
nnnnnnnnnnnnnnnnnnnnnnnnnnnnnnnnnnnnnnnnnnnnnnnnnnnnnnnnnnnnnnnnnnnnnnnnnnnnnnnnnnnnnnnnnnnnnnnnnnnnnnnnnnnnnnnnnnnnnnnnnnnnnnnnnnnnnnnnnnnnnnnnnnnnattctttatgctgtatttgtagggaagaaaaaaaaaagtgctcagagtggagggccgtactcttttattcttttcatttctacagaaatgagctaagggaatgatttcaaatctggatagagccggaggtttagcgtaccacaaacgtagcrctggttttgagctgaaaaaaagcaggatttttgactcaggctgactgaagagcttcaagaatacccattttaattacatttctgcagtttggggaaaagttctttcttcatttgtagcagagctggaaaatgagcctgtactgatctcaactataatccacattcactacaccagcaaagagtaatgggaccgcatcagccattgggctggagttttccatggagtcatcagagatgaactctgaaagcaaaacagactggcagccactttcccatggggtagctgaagacttactttg

SEQ ID NO: 62090 - DNA, 600 bp, Chicken  19866894323732_1
catcaacgcttatctagctgtgagaaatggggcactaagcagagaaacaaagcacacgctggcatccacgtgggactttacagtgcactgtttgcttgcgtggagacgctgatgccagtaatgcagccttttacagctctcaggccccagggcagcaaaccagagctgatgtgctgaggtatgtgagcgcaggcatgcaatgactcggccctcctgctgccaggcctatgcctcatctgttgtggccatcccaacttgagcaggttaacatgcatgaactccctcaacctaagtaagggygtgctgccgggtttgttgttcttctttgcacagtttgcattgcccgtggctgtacagatgtggagatgccctgttagcacagggcagcagcaagcccccagcaggcagcatgaaagggctgcacgcagacccagggaaccatcctctgcagtcagtgttggggccagtgctgcttaatatctttattaatgatctgaacaaggggattgagcgcaccctcggtagatgctctggaagagcatagctggcaggagcaaagaggtaaccatccacctgtactcagcaccggtgaggcaacgc

SEQ ID NO: 62091 - DNA, 600 bp, Chicken  19866894323734_1
tagctatattactttgtgaagaaacaactcaattgctatcttgcaattgtcagacacatcatagctttaagagtgcacagcagtatgtcacaacattaaagtatttctgataacacgtatgcagccactgaagaacaacatttaccaacaacagcacaagtactttgtcaatcattgcacacagagacatccacaaatcttaatggttccatgtcaacaacgttccttcagaaaggacatataaagatttgctgtcaccataaaaacgctattgcatgaattacaagttatgtgcttgcytactagtcattccctgttgtcaagtgatttgaagagtctgtcctttaagtctgacatttgaaatatgaatattggagggaataatcctagagagggtacacaaatgacatggatgtaacatgctccattcacagtggtttatgatgtggaaccatacatgcctatggtagtggtaacatactgtcagcgaaatgcaatatatcagcaacttcagtgcctctgatgtctgatattttgggcttttaaattgtaagaagcaaattcaaaaccccactggaaaagtgaaaattgccagccaca

SEQ ID NO: 62092 - DNA, 600 bp, Chicken  19866894323745_1
agctcttatatttccacctattatatttcatcctcacccagatgaaagctgctccttgaaagggtttaagtaagaaagaaaaagaaagggatccttctggcagccttgccatctggggaaggcctcactgaagaccttcagcttctgaaaacaaaggggcaagatgcactaagcttgtgaggccttaaacctccgcagtgagcatgctgaatagcagatttggataccacctccactgagcatcctatttttagttggtttattcttttgccaagtctctgctatcacatccaagagaamgtgatgaggccaataacacaaagttgacaaagccagggggggctttaagtctctgcatctcactcttcttgccttaaaacctaggcagtaggaaaggagttctgtttcagtgtattctgtagctcccccattgccaaaatctttttgaagatcaactcgcgtagcacgcttcatttctgaaggaaatatgcaacacacatgcactttataaagccatgggaaaagtggagtagagaaaggatgtgaaaaaatcagatggattccaaaactaactccaacaataggagaatctagattctg

SEQ ID NO: 62093 - DNA, 600 bp, Chicken  19866894323750_1
tgctgtgcccagctttgacacctcatgggatttttctgttatggatgttctatgccttgcttgggtagcttctgtgaagttatttacactgcttttggcttatatttcatcattgtaacaagagtgagcaagctgcattgaataaaatgcatttttctcaatgtgtttgtttctttaagtggacagagaggaaagaggagcttcccaatcttggagcacacaagctaacgaagaaccaagccttggctgaggctcaggcttttcattattgaccttagctgtattaaggagtcacatagyccagtgctggtgggatcctggtgggtcctggtcctgcagtgctgtccatgacttgccatgagcagaaagcctatgtctccagtgctttcaggctttacatctgcatctggctgtcctggctctgctccaagctctaactccatccggtctgagcaaagtgagcactgctgctggctgagctgcacyrctatttgtcctggttgtccagtcccacaggctccrtggtgcctggtgaagggacaggaggcaatgaatagaagtcaaaacacatctgagcacggtgaagtcttactgggsgga

SEQ ID NO: 62094 - DNA, 600 bp, Chicken  19866894323750_10
atgcagtgctgtggctgccttactcagtgctacactactgcatagctgctctttacacacatgggtacactttgctatacttcatgattgattagtgcatgacattcaaagcacagttatagttccatggctcaggttaccttagggaaagggcaggtttcttgtagtgcgggtgtgtttttacagctgccaaggcagygctgtgaagatgctgtatttgcattttccatgaatgctgaacagggagggaaagccaggcaaagtgctgcggggtcccaccatgttccaagccccatcccrgttgccatatccccacagcgccctcacctgtggccgcacctgtagccgtggggtttcctgttcactgctttcactttcctgtcgcagagctgctgtgctgtggattttcctgtcaagctgaaagtgcaatcctccccactgcttaaaagccagggagatggggcagagcagcaggagcgacttgagaatcacctccatctcacctgattctatttcttcttatacttatttaatttcgcgtcaagaatggtatgctacggggtcacaattattttggtggggaccctggggtccctcctg

SEQ ID NO: 62095 - DNA, 600 bp, Chicken  19866894323750_2
agaggaaagaggagcttcccaatcttggagcacacaagctaacgaagaaccaagccttggctgaggctcaggcttttcattattgaccttagctgtattaaggagtcacatagyccagtgctggtgggatcctggtgggtcctggtcctgcagtgctgtccatgacttgccatgagcagaaagcctatgtctccagtgctttcaggctttacatctgcatctggctgtcctggctctgctccaagctctaactccatccggtctgagcaaagtgagcactgctgctggctgagctgcacyrctatttgtcctggttgtccagtcccacaggctccrtggtgcctggtgaagggacaggaggcaatgaatagaagtcaaaacacatctgagcacggtgaagtcttactgggsggacagtcatgagctggcacaggctgctcagtttgtggggtctctacccttggtgacagacaaaacaagacacggtcctggagtgcctgcttagggcagtgaagcactggaacagactggccagggaggtggtggatgccccattcctggagacattcaaggacartgcactgagcacctgatcagctg

SEQ ID NO: 62096 - DNA, 600 bp, Chicken  19866894323750_3
gaggaaagaggagcttcccaatcttggagcacacaagctaacgaagaaccaagccttggctgaggctcaggcttttcattattgaccttagctgtattaaggagtcacatagyccagtgctggtgggatcctggtgggtcctggtcctgcagtgctgtccatgacttgccatgagcagaaagcctatgtctccagtgctttcaggctttacatctgcatctggctgtcctggctctgctccaagctctaactccatccggtctgagcaaagtgagcactgctgctggctgagctgcacyrctatttgtcctggttgtccagtcccacaggctccrtggtgcctggtgaagggacaggaggcaatgaatagaagtcaaaacacatctgagcacggtgaagtcttactgggsggacagtcatgagctggcacaggctgctcagtttgtggggtctctacccttggtgacagacaaaacaagacacggtcctggagtgcctgcttagggcagtgaagcactggaacagactggccagggaggtggtggatgccccattcctggagacattcaaggacartgcactgagcacctgatcagctgt

SEQ ID NO: 62097 - DNA, 600 bp, Chicken  19866894323750_4
agctaacgaagaaccaagccttggctgaggctcaggcttttcattattgaccttagctgtattaaggagtcacatagyccagtgctggtgggatcctggtgggtcctggtcctgcagtgctgtccatgacttgccatgagcagaaagcctatgtctccagtgctttcaggctttacatctgcatctggctgtcctggctctgctccaagctctaactccatccggtctgagcaaagtgagcactgctgctggctgagctgcacyrctatttgtcctggttgtccagtcccacaggctccrtggtgcctggtgaagggacaggaggcaatgaatagaagtcaaaacacatctgagcacggtgaagtcttactgggsggacagtcatgagctggcacaggctgctcagtttgtggggtctctacccttggtgacagacaaaacaagacacggtcctggagtgcctgcttagggcagtgaagcactggaacagactggccagggaggtggtggatgccccattcctggagacattcaaggacartgcactgagcacctgatcagctgtaggtatccctgttcattgcaagggagttggaccag

SEQ ID NO: 62098 - DNA, 600 bp, Chicken  19866894323750_5
agyccagtgctggtgggatcctggtgggtcctggtcctgcagtgctgtccatgacttgccatgagcagaaagcctatgtctccagtgctttcaggctttacatctgcatctggctgtcctggctctgctccaagctctaactccatccggtctgagcaaagtgagcactgctgctggctgagctgcacyrctatttgtcctggttgtccagtcccacaggctccrtggtgcctggtgaagggacaggaggcaatgaatagaagtcaaaacacatctgagcacggtgaagtcttactgggsggacagtcatgagctggcacaggctgctcagtttgtggggtctctacccttggtgacagacaaaacaagacacggtcctggagtgcctgcttagggcagtgaagcactggaacagactggccagggaggtggtggatgccccattcctggagacattcaaggacartgcactgagcacctgatcagctgtaggtatccctgttcattgcaagggagttggaccagatgagctttaaaggtcccttccaactcaaaygtttccatgataacctgctccagctgtccctgctttttatacac

SEQ ID NO: 62099 - DNA, 600 bp, Chicken  19866894323750_6
actgctgctggctgagctgcacyrctatttgtcctggttgtccagtcccacaggctccrtggtgcctggtgaagggacaggaggcaatgaatagaagtcaaaacacatctgagcacggtgaagtcttactgggsggacagtcatgagctggcacaggctgctcagtttgtggggtctctacccttggtgacagacaaaacaagacacggtcctggagtgcctgcttagggcagtgaagcactggaacagactggccagggaggtggtggatgccccattcctggagacattcaaggacartgcactgagcacctgatcagctgtaggtatccctgttcattgcaagggagttggaccagatgagctttaaaggtcccttccaactcaaaygtttccatgataacctgctccagctgtccctgctttttatacacgcagggttatatttttctatatttaatgactgattaatgcrcaaaacaaaatgcagatgtagtttcacagctcaggttaccttgaggaaacagcagattttggatgcagtgctgtggctgccttactcagtgctacactactgcatagctgctctttacacacatg

SEQ ID NO: 62100 - DNA, 600 bp, Chicken  19866894323750_7
atagaagtcaaaacacatctgagcacggtgaagtcttactgggsggacagtcatgagctggcacaggctgctcagtttgtggggtctctacccttggtgacagacaaaacaagacacggtcctggagtgcctgcttagggcagtgaagcactggaacagactggccagggaggtggtggatgccccattcctggagacattcaaggacartgcactgagcacctgatcagctgtaggtatccctgttcattgcaagggagttggaccagatgagctttaaaggtcccttccaactcaaaygtttccatgataacctgctccagctgtccctgctttttatacacgcagggttatatttttctatatttaatgactgattaatgcrcaaaacaaaatgcagatgtagtttcacagctcaggttaccttgaggaaacagcagattttggatgcagtgctgtggctgccttactcagtgctacactactgcatagctgctctttacacacatgggtacactttgctatacttcatgattgattagtgcatgacattcaaagcacagttatagttccatggctcaggttaccttagggaaaggg

SEQ ID NO: 62101 - DNA, 600 bp, Chicken  19866894323750_8
ctctacccttggtgacagacaaaacaagacacggtcctggagtgcctgcttagggcagtgaagcactggaacagactggccagggaggtggtggatgccccattcctggagacattcaaggacartgcactgagcacctgatcagctgtaggtatccctgttcattgcaagggagttggaccagatgagctttaaaggtcccttccaactcaaaygtttccatgataacctgctccagctgtccctgctttttatacacgcagggttatatttttctatatttaatgactgattaatgcrcaaaacaaaatgcagatgtagtttcacagctcaggttaccttgaggaaacagcagattttggatgcagtgctgtggctgccttactcagtgctacactactgcatagctgctctttacacacatgggtacactttgctatacttcatgattgattagtgcatgacattcaaagcacagttatagttccatggctcaggttaccttagggaaagggcaggtttcttgtagtgcgggtgtgtttttacagctgccaaggcagygctgtgaagatgctgtatttgcattttccatgaatgctg

SEQ ID NO: 62102 - DNA, 600 bp, Chicken  19866894323750_9
agggttatatttttctatatttaatgactgattaatgcrcaaaacaaaatgcagatgtagtttcacagctcaggttaccttgaggaaacagcagattttggatgcagtgctgtggctgccttactcagtgctacactactgcatagctgctctttacacacatgggtacactttgctatacttcatgattgattagtgcatgacattcaaagcacagttatagttccatggctcaggttaccttagggaaagggcaggtttcttgtagtgcgggtgtgtttttacagctgccaaggcagygctgtgaagatgctgtatttgcattttccatgaatgctgaacagggagggaaagccaggcaaagtgctgcggggtcccaccatgttccaagccccatcccrgttgccatatccccacagcgccctcacctgtggccgcacctgtagccgtggggtttcctgttcactgctttcactttcctgtcgcagagctgctgtgctgtggattttcctgtcaagctgaaagtgcaatcctccccactgcttaaaagccagggagatggggcagagcagcaggagcgacttgagaatcacctccatc

SEQ ID NO: 62103 - DNA, 600 bp, Chicken  19866894323751_1
gcgaggcgaggtgagtcggggcgaggctaggcggggtggggcaaggcggggccaggcagggcgacgcagggcaaggcgaggcgtggcaggtgaggcggggctgggcgcggcgaggggaagcgaggcggggtgaggcaaggcctggcatggccagaggggaacaggcgaggcgaggcggggcgaagcgaggcgggacgaggtgagatgtgggggggcgaggcggggtgaggcgacgcgtggcaggcgaggaggggcagggtggggcgagaaggagcgaggttgggcgaggtggggccaggyggggccaggyggggccaggcggggtaaggcgaggcgtggcaggcgaggcggggcgaggcaaggcggggtggggcaaggcgyggcggggcgaggctaggctagacggggtgaggtgaggtgaggcagggcaagacggggcgaggttggatgaggcggggcggggtgaggctaggcatggcgaagtgaggcggggcgaggcggggctaggtgaggcgtggcaggtgaggcgtcttggggcggggtgagggcaagcgaagcagggcgaggcgaggcggggcggagcgggtctaggcatggcgg

SEQ ID NO: 62104 - DNA, 600 bp, Chicken  19866894323751_2
gtgagtcggggcgaggctaggcggggtggggcaaggcggggccaggcagggcgacgcagggcaaggcgaggcgtggcaggtgaggcggggctgggcgcggcgaggggaagcgaggcggggtgaggcaaggcctggcatggccagaggggaacaggcgaggcgaggcggggcgaagcgaggcgggacgaggtgagatgtgggggggcgaggcggggtgaggcgacgcgtggcaggcgaggaggggcagggtggggcgagaaggagcgaggttgggcgaggtggggccaggyggggccaggyggggccaggcggggtaaggcgaggcgtggcaggcgaggcggggcgaggcaaggcggggtggggcaaggcgyggcggggcgaggctaggctagacggggtgaggtgaggtgaggcagggcaagacggggcgaggttggatgaggcggggcggggtgaggctaggcatggcgaagtgaggcggggcgaggcggggctaggtgaggcgtggcaggtgaggcgtcttggggcggggtgagggcaagcgaagcagggcgaggcgaggcggggcggagcgggtctaggcatggcggggcaagtggg

SEQ ID NO: 62105 - DNA, 544 bp, Chicken  19866894323751_3
cgtggcaggtgaggcggggctgggcgcggcgaggggaagcgaggcggggtgaggcaaggcctggcatggccagaggggaacaggcgaggcgaggcggggcgaagcgaggcgggacgaggtgagatgtgggggggcgaggcggggtgaggcgacgcgtggcaggcgaggaggggcagggtggggcgagaaggagcgaggttgggcgaggtggggccaggyggggccaggyggggccaggcggggtaaggcgaggcgtggcaggcgaggcggggcgaggcaaggcggggtggggcaaggcgyggcggggcgaggctaggctagacggggtgaggtgaggtgaggcagggcaagacggggcgaggttggatgaggcggggcggggtgaggctaggcatggcgaagtgaggcggggcgaggcggggctaggtgaggcgtggcaggtgaggcgtcttggggcggggtgagggcaagcgaagcagggcgaggcgaggcggggcggagcgggtctaggcatggcggggcaagtgggggcgaggtggggcaa

SEQ ID NO: 62106 - DNA, 600 bp, Chicken  19866894323752_1
aaaaccctcaaatcaattgaaaatcattatcttcttttcaaaatcatattattttttagaggtaagccaatgtgagtcaactgatgcttgcagctgtttgcagtttcctactttgcctgcatagtaaattttctttagcactgggaagtgatttatgaaagatttataaacatgcttatttcatagataaaaccattgatctctttcaaaaccttgattagatacactatccaaaaactaagtcatgaaatatgtcatatatgaattttcaggagtctcactgaactggagggatatgaygtgtgtttgatgyrtcattagaccttcataagcaccaacacattgctctttctacaaagatcattctgaaagtagtgcctcgatacaaagatcacaataatgcaacttgatagagcacttcctcagctacaatatgctctttttcaacattgtcaccactatgaattttcacctgcaatgaacaagaccctgcatgtggtgcttataagaatctgcaccaccagagatgaccaaacattttacactgctatgacagcactgttgctaggaaaacgttgcccacacagtccatctttcatt

SEQ ID NO: 62107 - DNA, 600 bp, Chicken  19866894323752_2
caattgaaaatcattatcttcttttcaaaatcatattattttttagaggtaagccaatgtgagtcaactgatgcttgcagctgtttgcagtttcctactttgcctgcatagtaaattttctttagcactgggaagtgatttatgaaagatttataaacatgcttatttcatagataaaaccattgatctctttcaaaaccttgattagatacactatccaaaaactaagtcatgaaatatgtcatatatgaattttcaggagtctcactgaactggagggatatgaygtgtgtttgatgyrtcattagaccttcataagcaccaacacattgctctttctacaaagatcattctgaaagtagtgcctcgatacaaagatcacaataatgcaacttgatagagcacttcctcagctacaatatgctctttttcaacattgtcaccactatgaattttcacctgcaatgaacaagaccctgcatgtggtgcttataagaatctgcaccaccagagatgaccaaacattttacactgctatgacagcactgttgctaggaaaacgttgcccacacagtccatctttcattcactgacagatgg

SEQ ID NO: 62108 - DNA, 600 bp, Chicken  19866894323752_3
aattgaaaatcattatcttcttttcaaaatcatattattttttagaggtaagccaatgtgagtcaactgatgcttgcagctgtttgcagtttcctactttgcctgcatagtaaattttctttagcactgggaagtgatttatgaaagatttataaacatgcttatttcatagataaaaccattgatctctttcaaaaccttgattagatacactatccaaaaactaagtcatgaaatatgtcatatatgaattttcaggagtctcactgaactggagggatatgaygtgtgtttgatgyrtcattagaccttcataagcaccaacacattgctctttctacaaagatcattctgaaagtagtgcctcgatacaaagatcacaataatgcaacttgatagagcacttcctcagctacaatatgctctttttcaacattgtcaccactatgaattttcacctgcaatgaacaagaccctgcatgtggtgcttataagaatctgcaccaccagagatgaccaaacattttacactgctatgacagcactgttgctaggaaaacgttgcccacacagtccatctttcattcactgacagatgga

SEQ ID NO: 62109 - DNA, 600 bp, Chicken  19866894323756_1
cgatgtgtttcagcatctccaggaagtttctctgttcccaattgctcctggtggttctgaacatacaggcattggtgcaggagcctttcccatgataactggttgttttggtctttgtagggacgtgggtcacttttggaggtcaaatctcagacgaggtaagtgacctttgctttcagtataatgcatgaagcaaggctagggagagtgcttatagataaaagcatggccagctaacgggagtggggcgtggtgacagcaaatggcagagcgttggcatgcaaagcaaggcaaggctcrcgcttctgctacaaaatatcttaacgaatctgacattttccaagatcagctttaatgaaagcatctcccccttgaaacaaccttccctctgctgcgtggagcggtatttccgtgctgtgccattggcagcagtgcagctcctggagcagaatttggaaaactctatttttgcagactgcgtgtaatgagcggcagtcatagctaacagcagcgtggtgtctcacagtggtggttttatttccatttatttggctatttttccctaataagatgaaacagaaggaaaggtgcttggggttt

SEQ ID NO: 62110 - DNA, 600 bp, Chicken  19866894323757_1
tccacgcagggccatcacgtcatcattaaacagaaataaaatacaacaaaaaatgcagaaaaaagataaagccaaggaaaactgactactctttcacatgaagcctcacagtgggctctggagatttgcttgttgcccttcagatcttttatacacttaccgatttgggcaaagtctcatgtggatcacatagctcacaggcacacctatgggcacgaggctttggaagacaaggtgaagaaccaaagtactatcaagatggacctgacctcttccaaccccccaagggatgtgtccatwagggtattagacttacaaatcctcccaggttaaatatcagaagtgacaaagtggaaggatgaaaagtcacacaacaaagagcaactcagactcagtatggagaaactcaacatggagaaactatcctcctgggaaaagaagcaaaggggctggaagaatttacctttggtggggtttgcctctagggaaaggatgagagtgttgggaagaaatgaatcaacctggtcttctcaggagaggcaatgtttgggcacaactagacagagcaaatatcaggtccagagcaagaaggagaatgaa

SEQ ID NO: 62111 - DNA, 600 bp, Chicken  19866894323759_1
ctcgaatctgctgttcctgcttgtctgcaggcagagtgacagagtatgggaaattaatttccgaggtgggaaattgctaataatttatttacagccaggccaggcgtggaggagggagtgcagtgcggagatgtttgggttttcttcttaaaatgtcagtgcttagctcttcctgcgttagctgggacaacaccttgcagcccttgggcgtgttgggaagcctgctgcaccagcggggctccttccccatgcaggtctcactgccagcacagtgggacccatgggacacgtggggctggstgtgcctgcagcacaggggcagagctggggagagggtgggtcacgatggcaaaggatgccgtgttcagcatgtgccattgacatctctgtttgtttgttgacaggatacacacccactgggatttaaacatctccttccgagagacctcttgcaggtaccattttggggcaccctctttgtatggtaggctaagtgtttatggtatgttactggcatatggatgctgttagatgtaaatgaatgtttctgattgtcggtcctatggggtttttcttccttctttytctttctccccttcc

SEQ ID NO: 62112 - DNA, 600 bp, Chicken  19866894323759_2
acacgtggggctggstgtgcctgcagcacaggggcagagctggggagagggtgggtcacgatggcaaaggatgccgtgttcagcatgtgccattgacatctctgtttgtttgttgacaggatacacacccactgggatttaaacatctccttccgagagacctcttgcaggtaccattttggggcaccctctttgtatggtaggctaagtgtttatggtatgttactggcatatggatgctgttagatgtaaatgaatgtttctgattgtcggtcctatggggtttttcttccttctttytctttctccccttcccaaatatccttccatctattcttttgttttgggaaaagttctcctggggggaaaactgcctcttttgaaagagagaattgattggccttggttgaccaacagttgaccatgagycagcagcgagccctgctggccaagaaggccgttggtgtcctggttgaccagmagttgaccagtggttgaccaacagttgtccagcagttgaccatgagcctgcagtgagccctggcggtcaagaaggctgatggtgtcctggttgaccaacagttgaccaatggttgacag

SEQ ID NO: 62113 - DNA, 600 bp, Chicken  19866894323759_3
cactgggatttaaacatctccttccgagagacctcttgcaggtaccattttggggcaccctctttgtatggtaggctaagtgtttatggtatgttactggcatatggatgctgttagatgtaaatgaatgtttctgattgtcggtcctatggggtttttcttccttctttytctttctccccttcccaaatatccttccatctattcttttgttttgggaaaagttctcctggggggaaaactgcctcttttgaaagagagaattgattggccttggttgaccaacagttgaccatgagycagcagcgagccctgctggccaagaaggccgttggtgtcctggttgaccagmagttgaccagtggttgaccaacagttgtccagcagttgaccatgagcctgcagtgagccctggcggtcaagaaggctgatggtgtcctggttgaccaacagttgaccaatggttgacagtgaaccatcagtgagccctggtggccaataaggtcaatgatgtcctggctgaccaatggttgaccagcagttaaccaacagttgaccgtgaaccagcaaggagccttgctggacaagcaggccagtggt

SEQ ID NO: 62114 - DNA, 600 bp, Chicken  19866894323759_4
gggcaccctctttgtatggtaggctaagtgtttatggtatgttactggcatatggatgctgttagatgtaaatgaatgtttctgattgtcggtcctatggggtttttcttccttctttytctttctccccttcccaaatatccttccatctattcttttgttttgggaaaagttctcctggggggaaaactgcctcttttgaaagagagaattgattggccttggttgaccaacagttgaccatgagycagcagcgagccctgctggccaagaaggccgttggtgtcctggttgaccagmagttgaccagtggttgaccaacagttgtccagcagttgaccatgagcctgcagtgagccctggcggtcaagaaggctgatggtgtcctggttgaccaacagttgaccaatggttgacagtgaaccatcagtgagccctggtggccaataaggtcaatgatgtcctggctgaccaatggttgaccagcagttaaccaacagttgaccgtgaaccagcaaggagccttgctggacaagcaggccagtggtaccctggggtgcactgcacagagcatggccagctctgtccatcagaaacagc

SEQ ID NO: 62115 - DNA, 600 bp, Chicken  19866894323762_1
ctaaatgattttaccactgatcaagcaaaaggcagtaggaacacatactttgctactgatatctctgaagcagtgtttctgcaaagctgcctttggccccacatgagaggtgatacagctctcgcgcttctctctccatgatccctcttctgtctctcgcaggatagcttctgcaacctaacaaagaatatgttatacatacataatttttagttcaagtcacagctagaagaatccagcaattctttaagccacgaagtttcctgtttttaatgaaaatgaagtaatctaagtaaatcyacagtgatagccactaccctgctacacttcaacagcaggcaacttcagattttccttcctaaagaaatgtcaacacaggctgttagtctctcactatgaaaacaccaggactagcatggctcaggattgatatttaaaacctacatatttaaacacaaagaatgaaattccacaccttgttctgctagggactgagactcagcagcatcagctatgacaatccttgcccatagcatcctaatatctttatcggcaccccacaacaaactatattaccatacaacaaaaaccttcacaggt

SEQ ID NO: 62116 - DNA, 599 bp, Chicken  19866894323764_1
  misc_feature (1)..(66): n is any nucleotide
nnnnnnnnnnnnnnnnnnnnnnnnnnnnnnnnnnnnnnnnnnnnnnnnnnnnnnnnnnnnnnnnnntgtggggttagcagttggtgaagatgcattattacactcccactgacttcagtggcctatactggtttaactcaatgcaggaaaggtttttaaagaataataataaagccaaaatggatatgtaagatgatatgccctgacacagctgggtgctggtgttgggttggatcacaagaggaagggactaataagtccctcttctcaaacatggttcttgtgcaattgcctgagctrtgtagatcttccttgtgctctgtgtgtatgtgactytgtagtattaatgcatggctttctggatctgtgcttagaaaatccttgtttcttccaatgttttctagcagtcaagctaacagctaattttaagaaatagggcatcaactgctgcatctctgaatcctgcagcccatcttttgaggagacacrtttctggagacagtaataaaccacagcaataactacatgaggaaaaatgatagcagcatcttcatgcataggggagtgctctttcacgtggtgagatcagcaccaacccc

SEQ ID NO: 62117 - DNA, 599 bp, Chicken  19866894323764_2
  misc_feature (1)..(30): n is any nucleotide
nnnnnnnnnnnnnnnnnnnnnnnnnnnnnntgtggggttagcagttggtgaagatgcattattacactcccactgacttcagtggcctatactggtttaactcaatgcaggaaaggtttttaaagaataataataaagccaaaatggatatgtaagatgatatgccctgacacagctgggtgctggtgttgggttggatcacaagaggaagggactaataagtccctcttctcaaacatggttcttgtgcaattgcctgagctrtgtagatcttccttgtgctctgtgtgtatgtgactytgtagtattaatgcatggctttctggatctgtgcttagaaaatccttgtttcttccaatgttttctagcagtcaagctaacagctaattttaagaaatagggcatcaactgctgcatctctgaatcctgcagcccatcttttgaggagacacrtttctggagacagtaataaaccacagcaataactacatgaggaaaaatgatagcagcatcttcatgcataggggagtgctctttcacgtggtgagatcagcaccaaccccactgctcagtgggagatcacacagcagtcatgaagc

SEQ ID NO: 62118 - DNA, 600 bp, Chicken  19866894323764_3
aagatgatatgccctgacacagctgggtgctggtgttgggttggatcacaagaggaagggactaataagtccctcttctcaaacatggttcttgtgcaattgcctgagctrtgtagatcttccttgtgctctgtgtgtatgtgactytgtagtattaatgcatggctttctggatctgtgcttagaaaatccttgtttcttccaatgttttctagcagtcaagctaacagctaattttaagaaatagggcatcaactgctgcatctctgaatcctgcagcccatcttttgaggagacacrtttctggagacagtaataaaccacagcaataactacatgaggaaaaatgatagcagcatcttcatgcataggggagtgctctttcacgtggtgagatcagcaccaaccccactgctcagtgggagatcacacagcagtcatgaagcactgaatgagtgaaaacaaattggccttctgccatgtttgtgaatgtagggatgctttggttttcccagtcagcaccactgcaaaaggacttgtgcctgtgggtcagagtgactgctgccatggtgtaacttcatctcccttggaggctgctgc

SEQ ID NO: 62119 - DNA, 599 bp, Chicken  19866894323765_1
  misc_feature (1)..(64): n is any nucleotide
nnnnnnnnnnnnnnnnnnnnnnnnnnnnnnnnnnnnnnnnnnnnnnnnnnnnnnnnnnnnnnnntttcaagtaatatatcaactgaaaaacgatgttctgaacataaattaattttttttttgcagtcttgaaacctattttcaaattcctttatcaaaagtgacagtacagctggcatattctttgctgctcagagcaccgtgtttagccatcacgtgagacagcactgcaccagaacttacccctcctcataccctagtttcagtcaacacagcattaatagcatgctgatagtttgrctgttgctgagcaacatgtgcatgcccagagcaactccttagggaagagccaccactgttatagygctgagcagggagtggtccacaggttggacatgcacgattggatgcctaatgtaactggggatgtcctgtgctacctgagggttgcccaaaggatggcagacacaatcaaaactctgtgtgaacatggccaggggagtggcatggcaccctggagcacctctggagacaccaggtgcttacatggatggtcaaggtctgcttgtctccctggtgcattgtgccaaggcttccct

SEQ ID NO: 62120 - DNA, 600 bp, Chicken  19866894323765_2
ttcaagtaatatatcaactgaaaaacgatgttctgaacataaattaattttttttttgcagtcttgaaacctattttcaaattcctttatcaaaagtgacagtacagctggcatattctttgctgctcagagcaccgtgtttagccatcacgtgagacagcactgcaccagaacttacccctcctcataccctagtttcagtcaacacagcattaatagcatgctgatagtttgrctgttgctgagcaacatgtgcatgcccagagcaactccttagggaagagccaccactgttatagygctgagcagggagtggtccacaggttggacatgcacgattggatgcctaatgtaactggggatgtcctgtgctacctgagggttgcccaaaggatggcagacacaatcaaaactctgtgtgaacatggccaggggagtggcatggcaccctggagcacctctggagacaccaggtgcttacatggatggtcaaggtctgcttgtctccctggtgcattgtgccaaggcttccctcctatagactgtgcgggtaagatgtgtttgagggaatcaagtagtcaagagtgtgattctgtttcc

SEQ ID NO: 62121 - DNA, 600 bp, Chicken  19866894323765_3
tgcacgattggatgcctaatgtaactggggatgtcctgtgctacctgagggttgcccaaaggatggcagacacaatcaaaactctgtgtgaacatggccaggggagtggcatggcaccctggagcacctctggagacaccaggtgcttacatggatggtcaaggtctgcttgtctccctggtgcattgtgccaaggcttccctcctatagactgtgcgggtaagatgtgtttgagggaatcaagtagtcaagagtgtgattctgtttccctagtgcttattactttaaaagaagaaatcrgaccacctaatgttcattttaaattagtgggtttaatttcaagttaggtgtgaaaggttttttttttttttttcctttttctttttatattaggcaaacagaatttgcctcaaaaggtaagaataaaaaatgtcgcagtcagctaaaattacagagaatgagtgaaataataggctgctgatgacaggagctgaaggcacagggagatgagcagactcctgagaggcagaactaatcaggtcaccatctgctctgaaagtggaagattaaggtggctcatgttgttatgcttattttttt

SEQ ID NO: 62122 - DNA, 599 bp, Chicken  19866894323769_1
  misc_feature (1)..(101): n is any nucleotide
nnnnnnnnnnnnnnnnnnnnnnnnnnnnnnnnnnnnnnnnnnnnnnnnnnnnnnnnnnnnnnnnnnnnnnnnnnnnnnnnnnnnnnnnnnnnnnnnnnnnnatgattgcctctgctgactttgaattgatttttggaaggacagcttgtacattcctacactgaattctccagcactacttaacagatggatgtcttggcttactgtattgtctccttatgttcacatgaagctgtctagttttctttgaacctacagcactgatcataatgtacaaaagacaccagagtgatgtaattkactggatttaaagtcaccctctatgggtttcttttgggcaaattctaaacatatacgtaacatgtataaaatactaaatagctattcgtatatacaactcatccgctatagctagcaagctgttaggcattaagtattcaccaggcttgtaggacatctgaagaatctgtattaaccaggcaagcattgatcaggcagggaaaaatgagttttgatgttactaagcagctctgcttggtccctattttattcctcaccagctttgttagctttccctgatagycttttttgttcctccc

SEQ ID NO: 62123 - DNA, 600 bp, Chicken  19866894323769_2
ccagagtgatgtaattkactggatttaaagtcaccctctatgggtttcttttgggcaaattctaaacatatacgtaacatgtataaaatactaaatagctattcgtatatacaactcatccgctatagctagcaagctgttaggcattaagtattcaccaggcttgtaggacatctgaagaatctgtattaaccaggcaagcattgatcaggcagggaaaaatgagttttgatgttactaagcagctctgcttggtccctattttattcctcaccagctttgttagctttccctgatagycttttttgttcctcccagttgttttatctgcttcagattccctacatatcaagcttatctctgttttcaggctttatttttttatctttcttaccttgtgtggaactagcatgtactatctttatttttcttaaattttgcattttttttatttggaagtttgaataaaaatttacagcagcattatattcaaactagagtttgaatccaaatagatgagccactgagatgatgattacaagattctatttcatgccagtggtatatctgtgaaattgaacacctctcttatgaggacag

SEQ ID NO: 62124 - DNA, 600 bp, Chicken  19866894323770_1
aataaggaaagctgagaaactgctcccaggtatgctgagctttttggccgagggtgaaatcagccataaaagctgcctgaaatctgaggaggaattattccttagaactagatttataaagtactttgtgtacttgtatcgtctacgctcattaaaacatgttaggatactaggagcgcctgggtgttaatttaacaggagtttttactaaatatcagaataatggatttaaatggaatatcattttctgtttgctcacaaggaggtttcagttaaccaagcatcccaaggaaggaggcrttggaggaaaggggccgttggtgagttgttactgcaggagtcgatcttctccttcrtcagtgatgctttttcagtattttatggcaaactcaagagtagcattggctaggaaaagccatctaagaaaacgcataatgttactgtttagctgatcgacagtcakaatcccaaaccattcttgttcgaggaatgtttgtgattctaagcaacactgtcagcatgrgtcagtggacttctgcagatctctgtgtgtgagagcagaggcagttctgtgcccagaatgcagagctgtgcatgkca

SEQ ID NO: 62125 - DNA, 600 bp, Chicken  19866894323770_2
aaatcagccataaaagctgcctgaaatctgaggaggaattattccttagaactagatttataaagtactttgtgtacttgtatcgtctacgctcattaaaacatgttaggatactaggagcgcctgggtgttaatttaacaggagtttttactaaatatcagaataatggatttaaatggaatatcattttctgtttgctcacaaggaggtttcagttaaccaagcatcccaaggaaggaggcrttggaggaaaggggccgttggtgagttgttactgcaggagtcgatcttctccttcrtcagtgatgctttttcagtattttatggcaaactcaagagtagcattggctaggaaaagccatctaagaaaacgcataatgttactgtttagctgatcgacagtcakaatcccaaaccattcttgttcgaggaatgtttgtgattctaagcaacactgtcagcatgrgtcagtggacttctgcagatctctgtgtgtgagagcagaggcagttctgtgcccagaatgcagagctgtgcatgkcagcaccgttttgagctcagttattcagccaggtcaggttttctcatagtatgtgcta

SEQ ID NO: 62126 - DNA, 600 bp, Chicken  19866894323770_3
aggatactaggagcgcctgggtgttaatttaacaggagtttttactaaatatcagaataatggatttaaatggaatatcattttctgtttgctcacaaggaggtttcagttaaccaagcatcccaaggaaggaggcrttggaggaaaggggccgttggtgagttgttactgcaggagtcgatcttctccttcrtcagtgatgctttttcagtattttatggcaaactcaagagtagcattggctaggaaaagccatctaagaaaacgcataatgttactgtttagctgatcgacagtcakaatcccaaaccattcttgttcgaggaatgtttgtgattctaagcaacactgtcagcatgrgtcagtggacttctgcagatctctgtgtgtgagagcagaggcagttctgtgcccagaatgcagagctgtgcatgkcagcaccgttttgagctcagttattcagccaggtcaggttttctcatagtatgtgctagttttcgtgctctcatgcagatgtatgtaaaatctctggcaatgtcatgttacatctgctctgatcctttctatcccttttctctaatttcccagtgctactgtttg

SEQ ID NO: 62127 - DNA, 600 bp, Chicken  19866894323770_4
tggatttaaatggaatatcattttctgtttgctcacaaggaggtttcagttaaccaagcatcccaaggaaggaggcrttggaggaaaggggccgttggtgagttgttactgcaggagtcgatcttctccttcrtcagtgatgctttttcagtattttatggcaaactcaagagtagcattggctaggaaaagccatctaagaaaacgcataatgttactgtttagctgatcgacagtcakaatcccaaaccattcttgttcgaggaatgtttgtgattctaagcaacactgtcagcatgrgtcagtggacttctgcagatctctgtgtgtgagagcagaggcagttctgtgcccagaatgcagagctgtgcatgkcagcaccgttttgagctcagttattcagccaggtcaggttttctcatagtatgtgctagttttcgtgctctcatgcagatgtatgtaaaatctctggcaatgtcatgttacatctgctctgatcctttctatcccttttctctaatttcccagtgctactgtttgttttgttaaatttggtggctcagaggaaggaactgttcatggaagacaacacaatagatt

SEQ ID NO: 62128 - DNA, 600 bp, Chicken  19866894323770_5
crttggaggaaaggggccgttggtgagttgttactgcaggagtcgatcttctccttcrtcagtgatgctttttcagtattttatggcaaactcaagagtagcattggctaggaaaagccatctaagaaaacgcataatgttactgtttagctgatcgacagtcakaatcccaaaccattcttgttcgaggaatgtttgtgattctaagcaacactgtcagcatgrgtcagtggacttctgcagatctctgtgtgtgagagcagaggcagttctgtgcccagaatgcagagctgtgcatgkcagcaccgttttgagctcagttattcagccaggtcaggttttctcatagtatgtgctagttttcgtgctctcatgcagatgtatgtaaaatctctggcaatgtcatgttacatctgctctgatcctttctatcccttttctctaatttcccagtgctactgtttgttttgttaaatttggtggctcagaggaaggaactgttcatggaagacaacacaatagatttcagtcctattatttaatgttcctcagttgccaacgtcatttccatcagaagaatcttttgaacatcatcaagta

SEQ ID NO: 62129 - DNA, 600 bp, Chicken  19866894323774_1
ttacagactgccaagcacatcatagtgttctgagagcttttgctaagtggctgaatagcaaatctaatcaacttaaacaatgtgtttttgtcagcagcttttgaaatctactccattataaatagcaaataacgtatggataagtacgcattcatattggtgtaacagctaaatgtgtggaatttagtactgatttatggaaaattgtccttatttctcccttgagaagctctgacttttggagtaaatcagcaatgctgcccaacagcaaacattgaatggaagaactgataaaaacayacagtttggggaagagattgcttatgacagtgggacctttccgaagaatcatsaacagcttactagcagtaccaagctaggtaggaggcacagaatacattacctmtggaataaactttcatattttaaactgcrtctcctgccckttgtaggtcacacasaaagcaaagcacaggcttttacactacaaagatgcagtagctcagtatgcaatattagctcagattcctgtccgaagtcttttcttgcttccttctttattgccctttagcacaatgcaaacaatacaactaaagagaa

SEQ ID NO: 62130 - DNA, 600 bp, Chicken  19866894323774_10
tcaaaatcctataatggagaatgggagtaaaaatgataktttatggtagtaagtagttatttttacggcaaaagcaagtgacaaaggatgtgtgtgtggaattactactgtcctgagtctcaaaaatccacgttccacatctacattttagttcaagcattggcctgaatgaatacaaaagttgaaagaaaggtctcttacaaaatgacaagcaaatatagaggtctggatctgcgtttagcttgtggatgccggctaagacctagaggactaagtgcagtgtgcttccaaagacaaagstgacatttaatctgagcaccaaactgaaaatccactycttcctctgtgaagccacccaagcttcctctttatctcagcccacaaaacccattatgtgaaagacattttccttcagctgctggggtatccagtctgatggctgggaatccaaatgcctttacatatatatatttttaaacaacattcatacttttttatttcagaaaaagtgtcttctgtattatggagataggagcaatctggaattactgagcattcttatttataagggaaggagaataaagtacagataccaacttt

SEQ ID NO: 62131 - DNA, 600 bp, Chicken  19866894323774_11
aktttatggtagtaagtagttatttttacggcaaaagcaagtgacaaaggatgtgtgtgtggaattactactgtcctgagtctcaaaaatccacgttccacatctacattttagttcaagcattggcctgaatgaatacaaaagttgaaagaaaggtctcttacaaaatgacaagcaaatatagaggtctggatctgcgtttagcttgtggatgccggctaagacctagaggactaagtgcagtgtgcttccaaagacaaagstgacatttaatctgagcaccaaactgaaaatccactycttcctctgtgaagccacccaagcttcctctttatctcagcccacaaaacccattatgtgaaagacattttccttcagctgctggggtatccagtctgatggctgggaatccaaatgcctttacatatatatatttttaaacaacattcatacttttttatttcagaaaaagtgtcttctgtattatggagataggagcaatctggaattactgagcattcttatttataagggaaggagaataaagtacagataccaactttaatatactgcatgtaaaacttaggctgagtcccatca

SEQ ID NO: 62132 - DNA, 600 bp, Chicken  19866894323774_2
aatagcaaatctaatcaacttaaacaatgtgtttttgtcagcagcttttgaaatctactccattataaatagcaaataacgtatggataagtacgcattcatattggtgtaacagctaaatgtgtggaatttagtactgatttatggaaaattgtccttatttctcccttgagaagctctgacttttggagtaaatcagcaatgctgcccaacagcaaacattgaatggaagaactgataaaaacayacagtttggggaagagattgcttatgacagtgggacctttccgaagaatcatsaacagcttactagcagtaccaagctaggtaggaggcacagaatacattacctmtggaataaactttcatattttaaactgcrtctcctgccckttgtaggtcacacasaaagcaaagcacaggcttttacactacaaagatgcagtagctcagtatgcaatattagctcagattcctgtccgaagtcttttcttgcttccttctttattgccctttagcacaatgcaaacaatacaactaaagagaagtccagttatcctggctcttgcatcaacagcattaaactgctttttgttggga

SEQ ID NO: 62133 - DNA, 600 bp, Chicken  19866894323774_3
tctactccattataaatagcaaataacgtatggataagtacgcattcatattggtgtaacagctaaatgtgtggaatttagtactgatttatggaaaattgtccttatttctcccttgagaagctctgacttttggagtaaatcagcaatgctgcccaacagcaaacattgaatggaagaactgataaaaacayacagtttggggaagagattgcttatgacagtgggacctttccgaagaatcatsaacagcttactagcagtaccaagctaggtaggaggcacagaatacattacctmtggaataaactttcatattttaaactgcrtctcctgccckttgtaggtcacacasaaagcaaagcacaggcttttacactacaaagatgcagtagctcagtatgcaatattagctcagattcctgtccgaagtcttttcttgcttccttctttattgccctttagcacaatgcaaacaatacaactaaagagaagtccagttatcctggctcttgcatcaacagcattaaactgctttttgttgggaactctgcactactgagggatagggaacttcctagtcactgctatggagaggaa

SEQ ID NO: 62134 - DNA, 600 bp, Chicken  19866894323774_4
atggataagtacgcattcatattggtgtaacagctaaatgtgtggaatttagtactgatttatggaaaattgtccttatttctcccttgagaagctctgacttttggagtaaatcagcaatgctgcccaacagcaaacattgaatggaagaactgataaaaacayacagtttggggaagagattgcttatgacagtgggacctttccgaagaatcatsaacagcttactagcagtaccaagctaggtaggaggcacagaatacattacctmtggaataaactttcatattttaaactgcrtctcctgccckttgtaggtcacacasaaagcaaagcacaggcttttacactacaaagatgcagtagctcagtatgcaatattagctcagattcctgtccgaagtcttttcttgcttccttctttattgccctttagcacaatgcaaacaatacaactaaagagaagtccagttatcctggctcttgcatcaacagcattaaactgctttttgttgggaactctgcactactgagggatagggaacttcctagtcactgctatggagaggaaagatggaatctgctgcttgacttctttgt

SEQ ID NO: 62135 - DNA, 600 bp, Chicken  19866894323774_5
cgcattcatattggtgtaacagctaaatgtgtggaatttagtactgatttatggaaaattgtccttatttctcccttgagaagctctgacttttggagtaaatcagcaatgctgcccaacagcaaacattgaatggaagaactgataaaaacayacagtttggggaagagattgcttatgacagtgggacctttccgaagaatcatsaacagcttactagcagtaccaagctaggtaggaggcacagaatacattacctmtggaataaactttcatattttaaactgcrtctcctgccckttgtaggtcacacasaaagcaaagcacaggcttttacactacaaagatgcagtagctcagtatgcaatattagctcagattcctgtccgaagtcttttcttgcttccttctttattgccctttagcacaatgcaaacaatacaactaaagagaagtccagttatcctggctcttgcatcaacagcattaaactgctttttgttgggaactctgcactactgagggatagggaacttcctagtcactgctatggagaggaaagatggaatctgctgcttgacttctttgtgaggaaggaca

SEQ ID NO: 62136 - DNA, 600 bp, Chicken  19866894323774_6
gtaacagctaaatgtgtggaatttagtactgatttatggaaaattgtccttatttctcccttgagaagctctgacttttggagtaaatcagcaatgctgcccaacagcaaacattgaatggaagaactgataaaaacayacagtttggggaagagattgcttatgacagtgggacctttccgaagaatcatsaacagcttactagcagtaccaagctaggtaggaggcacagaatacattacctmtggaataaactttcatattttaaactgcrtctcctgccckttgtaggtcacacasaaagcaaagcacaggcttttacactacaaagatgcagtagctcagtatgcaatattagctcagattcctgtccgaagtcttttcttgcttccttctttattgccctttagcacaatgcaaacaatacaactaaagagaagtccagttatcctggctcttgcatcaacagcattaaactgctttttgttgggaactctgcactactgagggatagggaacttcctagtcactgctatggagaggaaagatggaatctgctgcttgacttctttgtgaggaaggacatacagtgagygtgtc

SEQ ID NO: 62137 - DNA, 600 bp, Chicken  19866894323774_7
cacasaaagcaaagcacaggcttttacactacaaagatgcagtagctcagtatgcaatattagctcagattcctgtccgaagtcttttcttgcttccttctttattgccctttagcacaatgcaaacaatacaactaaagagaagtccagttatcctggctcttgcatcaacagcattaaactgctttttgttgggaactctgcactactgagggatagggaacttcctagtcactgctatggagaggaaagatggaatctgctgcttgacttctttgtgaggaaggacatacagtgagygtgtctgagtaagagtgctatgagttcctacatgtggcagcaatagcaattagtgcttctgtgcactccactgcttttgtgagtaagagaggacagcaacaaagcccaagagtgacttaactctctctactcagctgcaggctgaggtagatctttrtaggctacctagcagaagaaaatactctcagtaattaagaacatataagaactattttctagaaataaataaatgttggtaactaagattcccttcatataattcagtgaattttcttctcaaaatcctataatggagaatgg

SEQ ID NO: 62138 - DNA, 600 bp, Chicken  19866894323774_8
ggctcttgcatcaacagcattaaactgctttttgttgggaactctgcactactgagggatagggaacttcctagtcactgctatggagaggaaagatggaatctgctgcttgacttctttgtgaggaaggacatacagtgagygtgtctgagtaagagtgctatgagttcctacatgtggcagcaatagcaattagtgcttctgtgcactccactgcttttgtgagtaagagaggacagcaacaaagcccaagagtgacttaactctctctactcagctgcaggctgaggtagatctttrtaggctacctagcagaagaaaatactctcagtaattaagaacatataagaactattttctagaaataaataaatgttggtaactaagattcccttcatataattcagtgaattttcttctcaaaatcctataatggagaatgggagtaaaaatgataktttatggtagtaagtagttatttttacggcaaaagcaagtgacaaaggatgtgtgtgtggaattactactgtcctgagtctcaaaaatccacgttccacatctacattttagttcaagcattggcctgaatgaatacaaaag

SEQ ID NO: 62139 - DNA, 600 bp, Chicken  19866894323774_9
tgctatgagttcctacatgtggcagcaatagcaattagtgcttctgtgcactccactgcttttgtgagtaagagaggacagcaacaaagcccaagagtgacttaactctctctactcagctgcaggctgaggtagatctttrtaggctacctagcagaagaaaatactctcagtaattaagaacatataagaactattttctagaaataaataaatgttggtaactaagattcccttcatataattcagtgaattttcttctcaaaatcctataatggagaatgggagtaaaaatgataktttatggtagtaagtagttatttttacggcaaaagcaagtgacaaaggatgtgtgtgtggaattactactgtcctgagtctcaaaaatccacgttccacatctacattttagttcaagcattggcctgaatgaatacaaaagttgaaagaaaggtctcttacaaaatgacaagcaaatatagaggtctggatctgcgtttagcttgtggatgccggctaagacctagaggactaagtgcagtgtgcttccaaagacaaagstgacatttaatctgagcaccaaactgaaaatccactyct

SEQ ID NO: 62140 - DNA, 599 bp, Chicken  19866894323775_1
  misc_feature (1)..(108): n is any nucleotide
nnnnnnnnnnnnnnnnnnnnnnnnnnnnnnnnnnnnnnnnnnnnnnnnnnnnnnnnnnnnnnnnnnnnnnnnnnnnnnnnnnnnnnnnnnnnnnnnnnnnnnnnnnnnacttacaatgcaatggaaagcatagcaatgacagcagagcagtaaagtcccaggcaagtgaagatttgcacagatgcaacgaccacgagcacagaaacaaaagaaagaagctgcttaccttcagatggcctcaagtaggcagggatctccagcaagatactctcaccttcactgctgacccttaaatgaggwctgggaagagatggatcctggccccatcccttctggtcactcaggtgcattagatacacctgagcaactcccctgggttggccctgccttcccaccaggtgctcaatcactgcttcaagccatgacttagcatttctgttacagaactggtgacagcaagagacttgaactagctggatacctcctcagagaagaatttgggacactatccaggtgacagtggtcattaagtaatgatttgaagagggaagggaactcccagtctgaatgtaaaatcccaccatgccagatctaggaat

SEQ ID NO: 62141 - DNA, 600 bp, Chicken  19866894323775_2
aggtgctcaatcactgcttcaagccatgacttagcatttctgttacagaactggtgacagcaagagacttgaactagctggatacctcctcagagaagaatttgggacactatccaggtgacagtggtcattaagtaatgatttgaagagggaagggaactcccagtctgaatgtaaaatcccaccatgccagatctaggaatgaatacgctacagaatgtttgcagtgtgttaaagaaatagtagggccacaaacagaccatcccagtaagaaagaagggaagctggtgagagaaagcygtggctgaatctaaaccatcttgatgacttgtatctcttacaaaaagatgtacaagagctgcgagcactttagaagacagaattgaacaaatcctgacaagttgaaacagagttctgaagtaaatagaatgtagttctgtaaggtgagaagcttacacagtgctgggaataattgaataaaaaaatgtgagctggagacaaactggttaagcagatacttcattaaaagaagacttctttcatagcagttcacaaaagaaaatgagtcaatagagatttggtgtaagaaaatgtgattac

SEQ ID NO: 62142 - DNA, 600 bp, Chicken  19866894323779_1
taaaaatggaaaatggatagcgagtcttaaatttcaaaaattcaaagcgatacagtctgaatcctgtgtcagaataaaccatcttctgacacagaatgctttgtccagagcaattaagttacttgaattacttgctgagtgtactatttgcaattgtaggatagcctgatgctaatgtattaaagcatagcatgcacctaagcttttgttgaacagacattatgctgttactcatttaatttcaacaccagcattacacatggggtcctctctttttcagaggttcagcacaatgactakatacaatcagtgcacaggattaagaacagatgcctggatccagtattagatatggaggttggtggccctgcctgtggcaagggggttggagttttacraaccttaaggtcccttccaacacaagccattctgtgatcctatgattctatgcttctataatttgagttagtcattttgtctcaagcgctggtctggcacatttcctctcaaccaaaagttaatgattacatctgtcagatgacattcatcactatgtgaatactacgagggccctgttctcctcattgattaaaatggaac

SEQ ID NO: 62143 - DNA, 600 bp, Chicken  19866894323779_2
ctttgtccagagcaattaagttacttgaattacttgctgagtgtactatttgcaattgtaggatagcctgatgctaatgtattaaagcatagcatgcacctaagcttttgttgaacagacattatgctgttactcatttaatttcaacaccagcattacacatggggtcctctctttttcagaggttcagcacaatgactakatacaatcagtgcacaggattaagaacagatgcctggatccagtattagatatggaggttggtggccctgcctgtggcaagggggttggagttttacraaccttaaggtcccttccaacacaagccattctgtgatcctatgattctatgcttctataatttgagttagtcattttgtctcaagcgctggtctggcacatttcctctcaaccaaaagttaatgattacatctgtcagatgacattcatcactatgtgaatactacgagggccctgttctcctcattgattaaaatggaacctcagatgactagctcaagtgcacacctccaaagttaggtgagaaraatttccccctcatagctctcagggctctgagtttccatcaggtggggatgg

SEQ ID NO: 62144 - DNA, 600 bp, Chicken  19866894323779_3
tagatatggaggttggtggccctgcctgtggcaagggggttggagttttacraaccttaaggtcccttccaacacaagccattctgtgatcctatgattctatgcttctataatttgagttagtcattttgtctcaagcgctggtctggcacatttcctctcaaccaaaagttaatgattacatctgtcagatgacattcatcactatgtgaatactacgagggccctgttctcctcattgattaaaatggaacctcagatgactagctcaagtgcacacctccaaagttaggtgagaaraatttccccctcatagctctcagggctctgagtttccatcaggtggggatggcttgagtttccatgttagactgatgactgccctatttggttgcacaaacatctaagctgtttgtcagtcaacttgggaagcactgtggttggcacatgatggacaatagggtaggacccttgttgaccaagagatgctaacccagttttcctgcccagcagacaaaggccctcactaaagctatcttctgaagacttaacttgtacacaggtagtgataacagtacagatggatttgttctagatgca

SEQ ID NO: 62145 - DNA, 600 bp, Chicken  19866894323779_4
atttgttctagatgcatgactaccaggtttgttagaaaagcctgcacatggatatcacttgtaaataacaagcttggaactatttccttatgtccacattttaatcaatttttagggggcttgcatatcatgcagtctttatttcatgaactttcagtcagtagttttagtcatgaaacaccatgcaatgttggcgagattttcaaaaacagctttctagatttacttgaatttgttaaatttaatcagtaactgcacactatgttatgcaggttaactaaatgaagtaattttcacccraagaaagtattccctgcaataaagaaagttacttgaatttcacatgtatacttgtggcttgcacagaatcaagctcacatttgaaaaacaccatgtttgtttgttctcgtttttaaatgaacaaaragataaacagccataatagtagcactttcctttgtgctgaataaaatggaggagtagggttagaaacataacaagaggaaatcaaatgtttccaaaatggagtaaatgtaaatttgatcagaacaactattatagaagtgtcatattgcaccagcaaaacaaaaaacgcaaacc

SEQ ID NO: 62146 - DNA, 600 bp, Chicken  19866894323779_5
atcatgcagtctttatttcatgaactttcagtcagtagttttagtcatgaaacaccatgcaatgttggcgagattttcaaaaacagctttctagatttacttgaatttgttaaatttaatcagtaactgcacactatgttatgcaggttaactaaatgaagtaattttcacccraagaaagtattccctgcaataaagaaagttacttgaatttcacatgtatacttgtggcttgcacagaatcaagctcacatttgaaaaacaccatgtttgtttgttctcgtttttaaatgaacaaaragataaacagccataatagtagcactttcctttgtgctgaataaaatggaggagtagggttagaaacataacaagaggaaatcaaatgtttccaaaatggagtaaatgtaaatttgatcagaacaactattatagaagtgtcatattgcaccagcaaaacaaaaaacgcaaaccatataaacccccaaaaaatcctggatttacaatgtttttaataatattctcacttaaatcccttcttcttttctttctggttacccaaattcttattcatataaaaaatagatctgattaataaat

SEQ ID NO: 62147 - DNA, 600 bp, Chicken  19866894323794_1
agacgcagattttccacgtgatggatgccaacgtctcttcctttgttttaatgcttgcaggccatactgttgtttggtcacaagcctgttgtgacctactgttcacgtagaactatattgcgtacactctctgttataggccaatctgatttttcttaacccatcattgaattttaatgaagaaacagcattagatatagagaaggaggaggtttctgcagcataggtcactgagaaatgtaaaaagccttctcttcagtgtcaaaattctaaatctgttatcatttctgttatgaacayatttctgttgtctgggtgtgttctgaagcttcctaatacaaaggggggcatgcactgagtttgatagtggtgtgctagtatgcgtaacccatagagtgagcaragttaagcagtcagaaatgaggtagctcgtgaatgttcagacctgcccctcatcaatrttcttcatttktcraagtatggcagagattcttttgaccttgctggcaggtaactgtaaccaactataaaagcatctccctagttctttgwatgggtttcagcaagtcrtttaatcatcgtgtctctgagtctcagctg

SEQ ID NO: 62148 - DNA, 600 bp, Chicken  19866894323794_2
cacgtagaactatattgcgtacactctctgttataggccaatctgatttttcttaacccatcattgaattttaatgaagaaacagcattagatatagagaaggaggaggtttctgcagcataggtcactgagaaatgtaaaaagccttctcttcagtgtcaaaattctaaatctgttatcatttctgttatgaacayatttctgttgtctgggtgtgttctgaagcttcctaatacaaaggggggcatgcactgagtttgatagtggtgtgctagtatgcgtaacccatagagtgagcaragttaagcagtcagaaatgaggtagctcgtgaatgttcagacctgcccctcatcaatrttcttcatttktcraagtatggcagagattcttttgaccttgctggcaggtaactgtaaccaactataaaagcatctccctagttctttgwatgggtttcagcaagtcrtttaatcatcgtgtctctgagtctcagctgacaggaggaggggcagtattgagaactgttgtacttttttttttttacagaaatagtgcagtggtttaaagattaaaaaaaagaaaaagaaaaaaagtgctaa

SEQ ID NO: 62149 - DNA, 600 bp, Chicken  19866894323794_3
catcattgaattttaatgaagaaacagcattagatatagagaaggaggaggtttctgcagcataggtcactgagaaatgtaaaaagccttctcttcagtgtcaaaattctaaatctgttatcatttctgttatgaacayatttctgttgtctgggtgtgttctgaagcttcctaatacaaaggggggcatgcactgagtttgatagtggtgtgctagtatgcgtaacccatagagtgagcaragttaagcagtcagaaatgaggtagctcgtgaatgttcagacctgcccctcatcaatrttcttcatttktcraagtatggcagagattcttttgaccttgctggcaggtaactgtaaccaactataaaagcatctccctagttctttgwatgggtttcagcaagtcrtttaatcatcgtgtctctgagtctcagctgacaggaggaggggcagtattgagaactgttgtacttttttttttttacagaaatagtgcagtggtttaaagattaaaaaaaagaaaaagaaaaaaagtgctaactgctgctagaatgtgtggataaaaacctatgtcctctactgttttgtgtcatgaaga

SEQ ID NO: 62150 - DNA, 600 bp, Chicken  19866894323794_4
tttaatgaagaaacagcattagatatagagaaggaggaggtttctgcagcataggtcactgagaaatgtaaaaagccttctcttcagtgtcaaaattctaaatctgttatcatttctgttatgaacayatttctgttgtctgggtgtgttctgaagcttcctaatacaaaggggggcatgcactgagtttgatagtggtgtgctagtatgcgtaacccatagagtgagcaragttaagcagtcagaaatgaggtagctcgtgaatgttcagacctgcccctcatcaatrttcttcatttktcraagtatggcagagattcttttgaccttgctggcaggtaactgtaaccaactataaaagcatctccctagttctttgwatgggtttcagcaagtcrtttaatcatcgtgtctctgagtctcagctgacaggaggaggggcagtattgagaactgttgtacttttttttttttacagaaatagtgcagtggtttaaagattaaaaaaaagaaaaagaaaaaaagtgctaactgctgctagaatgtgtggataaaaacctatgtcctctactgttttgtgtcatgaagagtacaattaaa

SEQ ID NO: 62151 - DNA, 600 bp, Chicken  19866894323794_5
aatgaagaaacagcattagatatagagaaggaggaggtttctgcagcataggtcactgagaaatgtaaaaagccttctcttcagtgtcaaaattctaaatctgttatcatttctgttatgaacayatttctgttgtctgggtgtgttctgaagcttcctaatacaaaggggggcatgcactgagtttgatagtggtgtgctagtatgcgtaacccatagagtgagcaragttaagcagtcagaaatgaggtagctcgtgaatgttcagacctgcccctcatcaatrttcttcatttktcraagtatggcagagattcttttgaccttgctggcaggtaactgtaaccaactataaaagcatctccctagttctttgwatgggtttcagcaagtcrtttaatcatcgtgtctctgagtctcagctgacaggaggaggggcagtattgagaactgttgtacttttttttttttacagaaatagtgcagtggtttaaagattaaaaaaaagaaaaagaaaaaaagtgctaactgctgctagaatgtgtggataaaaacctatgtcctctactgttttgtgtcatgaagagtacaattaaaaaa

SEQ ID NO: 62152 - DNA, 600 bp, Chicken  19866894323794_6
tcttcagtgtcaaaattctaaatctgttatcatttctgttatgaacayatttctgttgtctgggtgtgttctgaagcttcctaatacaaaggggggcatgcactgagtttgatagtggtgtgctagtatgcgtaacccatagagtgagcaragttaagcagtcagaaatgaggtagctcgtgaatgttcagacctgcccctcatcaatrttcttcatttktcraagtatggcagagattcttttgaccttgctggcaggtaactgtaaccaactataaaagcatctccctagttctttgwatgggtttcagcaagtcrtttaatcatcgtgtctctgagtctcagctgacaggaggaggggcagtattgagaactgttgtacttttttttttttacagaaatagtgcagtggtttaaagattaaaaaaaagaaaaagaaaaaaagtgctaactgctgctagaatgtgtggataaaaacctatgtcctctactgttttgtgtcatgaagagtacaattaaaaaaaacagccctgcaattactgggactgatgcatcattgatatcatcagtgcttatctccttggtttgtttctcccttga

SEQ ID NO: 62153 - DNA, 600 bp, Chicken  19866894323794_7
taaatctgttatcatttctgttatgaacayatttctgttgtctgggtgtgttctgaagcttcctaatacaaaggggggcatgcactgagtttgatagtggtgtgctagtatgcgtaacccatagagtgagcaragttaagcagtcagaaatgaggtagctcgtgaatgttcagacctgcccctcatcaatrttcttcatttktcraagtatggcagagattcttttgaccttgctggcaggtaactgtaaccaactataaaagcatctccctagttctttgwatgggtttcagcaagtcrtttaatcatcgtgtctctgagtctcagctgacaggaggaggggcagtattgagaactgttgtacttttttttttttacagaaatagtgcagtggtttaaagattaaaaaaaagaaaaagaaaaaaagtgctaactgctgctagaatgtgtggataaaaacctatgtcctctactgttttgtgtcatgaagagtacaattaaaaaaaacagccctgcaattactgggactgatgcatcattgatatcatcagtgcttatctccttggtttgtttctcccttgaagttagatgcttacagaa

SEQ ID NO: 62154 - DNA, 599 bp, Chicken  19866894323795_1
  misc_feature (1)..(36): n is any nucleotide
nnnnnnnnnnnnnnnnnnnnnnnnnnnnnnnnnnnntttttctacacctcttcctagtgtgctgtcttgcaagactttagtgcagagtgggaatgaatataatgtttgatgccattatggcagcctaacattgttatgccagtaatggataggattttgttgttcttgtcgggatgttacatcttcctaaaggtgtacaaatggaagagaacagggctgaagagcaagtgatcagaaatatccatagaaattgttggaagggttatcaaaggaactgaggctatgttttgctgtaccctrtggataccaaatattgaagaaacatgaaaaataaggttggtatagattccttactggttgaagatgtgtagatgtactagaaatgagtactttttatgcagaagggtaagttaatgctttgtatgtatgagcaaacatagattgcttatgttaattgaaaaataattttgaaaagttaacttgcatcttttgaaggaatggtaaataacctgcagaaattttcttaaactacttattttactcttgtgcacattagtaggcagcagaatgacagaacgaggaagtrgagtcttgaaggc

SEQ ID NO: 62155 - DNA, 600 bp, Chicken  19866894323795_2
tttgctgtaccctrtggataccaaatattgaagaaacatgaaaaataaggttggtatagattccttactggttgaagatgtgtagatgtactagaaatgagtactttttatgcagaagggtaagttaatgctttgtatgtatgagcaaacatagattgcttatgttaattgaaaaataattttgaaaagttaacttgcatcttttgaaggaatggtaaataacctgcagaaattttcttaaactacttattttactcttgtgcacattagtaggcagcagaatgacagaacgaggaagtrgagtcttgaaggctgttactgttttgtcattgagtttaaaataaagcggactccctagttattatcactcaataacgtggatggaataatagagcataagggtacaacctttctatctaaggtcaaataattggtgattgtctacagttgatgaaagtttaatatcctatttcattaaaaattctcagaacattgaacataagtcaacattccatggagaagaaagtattatgcagcttgtatgtgtgcatatctgcatatcggagcacaaaatattgacatgataattgcagtcaagcc

SEQ ID NO: 62156 - DNA, 600 bp, Chicken  19866894323797_1
caccaaaaggtaccttcttaatttgaaaagtgttaggtcagcagatttatacaaaatgcttttaattaaggaagtaaattactgacaaagtaacaagtcaccaccttgttttcctacatattctaaactaagaagttttactgattatgtaatcagaagtagatatttatgagtattgtgaatatataatttaaaatcatatgaggaaagaaaagagcacaatagcatttcattctgtgtaggacattcttgtccttttacacacttcatttagtattcaagaaaaaacttaaaaacttytaaatccatgacttctccaacttcgggctacttacttgactgccstacagagcaaattggcatgagatagcattggcaactgcagaacagaacagaatttaaagggtgtaggaatatacatcttagctatgtttttaacaagtttaatccaatttggtgcaccaacacactgttatttattttttgagttctctatttagccattgcagaaactccaatgtaggcactaaaagtggtgatctctgacagataagcaggaaaaatataagatttaagaaaataattttaattttacaaatg

SEQ ID NO: 62157 - DNA, 600 bp, Chicken  19866894323797_2
tttatacaaaatgcttttaattaaggaagtaaattactgacaaagtaacaagtcaccaccttgttttcctacatattctaaactaagaagttttactgattatgtaatcagaagtagatatttatgagtattgtgaatatataatttaaaatcatatgaggaaagaaaagagcacaatagcatttcattctgtgtaggacattcttgtccttttacacacttcatttagtattcaagaaaaaacttaaaaacttytaaatccatgacttctccaacttcgggctacttacttgactgccstacagagcaaattggcatgagatagcattggcaactgcagaacagaacagaatttaaagggtgtaggaatatacatcttagctatgtttttaacaagtttaatccaatttggtgcaccaacacactgttatttattttttgagttctctatttagccattgcagaaactccaatgtaggcactaaaagtggtgatctctgacagataagcaggaaaaatataagatttaagaaaataattttaattttacaaatgtacaggaggtgttacatctgtctgcaattttatctgtctttagct

SEQ ID NO: 62158 - DNA, 600 bp, Chicken  19866894323800_1
ttttcctacactgccactgctggtgttacccaggcttaagaaggaaaaaacaacaaactaaagagaggaagaaagaagggcctctacaccttgcagtaatgcagtgtcacagttctcaccgacgccacggcaaagacaagctctacagaaacagtccttggtttccaagagctgtctgcaacacagctcccagcaactatgccaggagtgaggctttccctgtgaaaaggcttcctgagacggaagagaggaggtggagctaatccccttcaccatctgtgagctttcctggccaagaaygcaccaactcttccttcctgcgctgctctttattgagatggtaggtggtcaccgctacaaccatttacttcggcacatttactgtttgctgtttgttatggagaggctttccaccaaaggtttggtcttacatcaggctacctgcacymgtgcagttattcttcatggagatgttacttctgagggcagagctatggcaaaggaragccctgtactgtcagacagatgacaggctttgaccttttcttgtccgctgaggcaaaaaccaggctcctgctcactgccacatcctgaaaccag

SEQ ID NO: 62159 - DNA, 600 bp, Chicken  19866894323800_2
aaacagtccttggtttccaagagctgtctgcaacacagctcccagcaactatgccaggagtgaggctttccctgtgaaaaggcttcctgagacggaagagaggaggtggagctaatccccttcaccatctgtgagctttcctggccaagaaygcaccaactcttccttcctgcgctgctctttattgagatggtaggtggtcaccgctacaaccatttacttcggcacatttactgtttgctgtttgttatggagaggctttccaccaaaggtttggtcttacatcaggctacctgcacymgtgcagttattcttcatggagatgttacttctgagggcagagctatggcaaaggaragccctgtactgtcagacagatgacaggctttgaccttttcttgtccgctgaggcaaaaaccaggctcctgctcactgccacatcctgaaaccaggccaaagcagacagaaaagcaccacccaaaacgtgaggtraagaagctttttgggaaagaacaactttttaaacagcatcaggaaatttggttccttaaggagtagctggaattgctcaggagtggaaaatctcctaacaaatggttg

SEQ ID NO: 62160 - DNA, 600 bp, Chicken  19866894323800_3
aacagtccttggtttccaagagctgtctgcaacacagctcccagcaactatgccaggagtgaggctttccctgtgaaaaggcttcctgagacggaagagaggaggtggagctaatccccttcaccatctgtgagctttcctggccaagaaygcaccaactcttccttcctgcgctgctctttattgagatggtaggtggtcaccgctacaaccatttacttcggcacatttactgtttgctgtttgttatggagaggctttccaccaaaggtttggtcttacatcaggctacctgcacymgtgcagttattcttcatggagatgttacttctgagggcagagctatggcaaaggaragccctgtactgtcagacagatgacaggctttgaccttttcttgtccgctgaggcaaaaaccaggctcctgctcactgccacatcctgaaaccaggccaaagcagacagaaaagcaccacccaaaacgtgaggtraagaagctttttgggaaagaacaactttttaaacagcatcaggaaatttggttccttaaggagtagctggaattgctcaggagtggaaaatctcctaacaaatggttgc

SEQ ID NO: 62161 - DNA, 600 bp, Chicken  19866894323800_4
gagtgaggctttccctgtgaaaaggcttcctgagacggaagagaggaggtggagctaatccccttcaccatctgtgagctttcctggccaagaaygcaccaactcttccttcctgcgctgctctttattgagatggtaggtggtcaccgctacaaccatttacttcggcacatttactgtttgctgtttgttatggagaggctttccaccaaaggtttggtcttacatcaggctacctgcacymgtgcagttattcttcatggagatgttacttctgagggcagagctatggcaaaggaragccctgtactgtcagacagatgacaggctttgaccttttcttgtccgctgaggcaaaaaccaggctcctgctcactgccacatcctgaaaccaggccaaagcagacagaaaagcaccacccaaaacgtgaggtraagaagctttttgggaaagaacaactttttaaacagcatcaggaaatttggttccttaaggagtagctggaattgctcaggagtggaaaatctcctaacaaatggttgcaataagaccagaaggaacccacaagtgaggtgtggacagaaaacccttcaagtacc

SEQ ID NO: 62162 - DNA, 600 bp, Chicken  19866894323800_5
gtaggtggtcaccgctacaaccatttacttcggcacatttactgtttgctgtttgttatggagaggctttccaccaaaggtttggtcttacatcaggctacctgcacymgtgcagttattcttcatggagatgttacttctgagggcagagctatggcaaaggaragccctgtactgtcagacagatgacaggctttgaccttttcttgtccgctgaggcaaaaaccaggctcctgctcactgccacatcctgaaaccaggccaaagcagacagaaaagcaccacccaaaacgtgaggtraagaagctttttgggaaagaacaactttttaaacagcatcaggaaatttggttccttaaggagtagctggaattgctcaggagtggaaaatctcctaacaaatggttgcaataagaccagaaggaacccacaagtgaggtgtggacagaaaacccttcaagtaccgtctactcgtgacaagaggsaraaagcccaacaaaggctgaacctgagccaccagctgcatccagtgagcagctgcatccctcccacagcacctgctctgggagcacggggacctcttttcctctttctttgaca

SEQ ID NO: 62163 - DNA, 600 bp, Chicken  19866894323800_6
atgacaggctttgaccttttcttgtccgctgaggcaaaaaccaggctcctgctcactgccacatcctgaaaccaggccaaagcagacagaaaagcaccacccaaaacgtgaggtraagaagctttttgggaaagaacaactttttaaacagcatcaggaaatttggttccttaaggagtagctggaattgctcaggagtggaaaatctcctaacaaatggttgcaataagaccagaaggaacccacaagtgaggtgtggacagaaaacccttcaagtaccgtctactcgtgacaagaggsaraaagcccaacaaaggctgaacctgagccaccagctgcatccagtgagcagctgcatccctcccacagcacctgctctgggagcacggggacctcttttcctctttctttgacagcttcccctactcacagctcaagatgaggagctcttgaacgatgatgtctccctgccaagaaggagcactaaatttcccttcacaccataatcgcagttatggagccaagacaagataatggcacctttatggtgctaagtcaggcacacctggcagcaccaggcagggtcagagccttgtttcc

SEQ ID NO: 62164 - DNA, 600 bp, Chicken  19866894323800_7
gacaggctttgaccttttcttgtccgctgaggcaaaaaccaggctcctgctcactgccacatcctgaaaccaggccaaagcagacagaaaagcaccacccaaaacgtgaggtraagaagctttttgggaaagaacaactttttaaacagcatcaggaaatttggttccttaaggagtagctggaattgctcaggagtggaaaatctcctaacaaatggttgcaataagaccagaaggaacccacaagtgaggtgtggacagaaaacccttcaagtaccgtctactcgtgacaagaggsaraaagcccaacaaaggctgaacctgagccaccagctgcatccagtgagcagctgcatccctcccacagcacctgctctgggagcacggggacctcttttcctctttctttgacagcttcccctactcacagctcaagatgaggagctcttgaacgatgatgtctccctgccaagaaggagcactaaatttcccttcacaccataatcgcagttatggagccaagacaagataatggcacctttatggtgctaagtcaggcacacctggcagcaccaggcagggtcagagccttgtttccat

SEQ ID NO: 62165 - DNA, 565 bp, Chicken  19866894323811_1
gtaagaaaacccctgccactgctatcttccaaatagtgagttttggggtgaaataaacttcactttatgagacattcctgaggctgccccttgcctcctgccttgagttcttccattctgggctgctagaagaacagtgcagcagactgaacctgctgagaactgtgccctgatgtgcggtggccatcccacttgatgggagtacatgcagtgggtgatgctgccagtatgtctgctgagggacagggcagatcaggcacttctgtgctaaatttaatagcaaaatgagggatgaaatakgttgcccatttagagtagtggacagtcgtaggttttggcacaggctggtgaaagagagcaggatgctagtacaggaaactggatctttgatttgtttaattttttccttcttaaaggcaatgagcaaatactggcagctcaggagaaatgagaagtcactttttagcagcaatattatttctagtttctgaatggcagtaataaatgcattcacctgtgtataagaaaagatccttgcaagagatggggcacaaagggagaatca

SEQ ID NO: 62166 - DNA, 600 bp, Chicken  19866894323819_1
aaacctgtctgaagcaggccttttgcacaacacggaatcttaatgaagacaaatgatcttttgtttaggtagcagagaccataggttgtgcaatttagtgtctgcctcttctccccaaaaatactgaatcctgcctcagctggtcagaaggacctggtaaagctggtaatggcaaaattcaccaatgactgaacaaaaggctttaacagccacaggattgttccaccatgatctctctggaccacaagggtgctcacactcttgatttccaatccctgcagacattgacatagacgagargaatctgatcctcaacaaatatacccagaggagagaggcaccacggggcacaaacagcagcagaaaattcctgaaccagaaaggaaaatgagaacaagaagacctggatcttctgcagaaacaaactcaattttttgtgtgcaaggtaccacgctagagagcatgacccaaaagagtccatcttggaatacagatacactggaagggccagataagatatctgcacagttttctctcatgtgttggcacaagcactgtttaagagctccgtggacaggctattctgtgtatttgtgaaag

SEQ ID NO: 62167 - DNA, 600 bp, Chicken  19866894323819_2
tacccagaggagagaggcaccacggggcacaaacagcagcagaaaattcctgaaccagaaaggaaaatgagaacaagaagacctggatcttctgcagaaacaaactcaattttttgtgtgcaaggtaccacgctagagagcatgacccaaaagagtccatcttggaatacagatacactggaagggccagataagatatctgcacagttttctctcatgtgttggcacaagcactgtttaagagctccgtggacaggctattctgtgtatttgtgaaaggctgtgtccttaaaatgaaarcttattaaaggctaatacttggcatctcctcatatgcctgaagtttagtagtctcagcatctaagcagtacaaaggaggcttcattaagctgagcacacaacgttcacactttttacagcttcactatcatttgcctgactatagaactgtgcagaaaggcagcatcacagagtgctgcaaaggtttccactgtgaacagccaaactggactagaaaaacaaacacatggaaatgccacatcttgtctctgtctccccctttccgagtctaaataaagacagcaactttgcagygctcaa

SEQ ID NO: 62168 - DNA, 600 bp, Chicken  19866894323819_3
tgaaarcttattaaaggctaatacttggcatctcctcatatgcctgaagtttagtagtctcagcatctaagcagtacaaaggaggcttcattaagctgagcacacaacgttcacactttttacagcttcactatcatttgcctgactatagaactgtgcagaaaggcagcatcacagagtgctgcaaaggtttccactgtgaacagccaaactggactagaaaaacaaacacatggaaatgccacatcttgtctctgtctccccctttccgagtctaaataaagacagcaactttgcagygctcaaagtattatctgggaggaaagataggagatgtggaagggaataaggaagtgaaagaaggaagaaaatgaagatcagcatatgagtttccccagtaaggagtttaaaacagcactgagctctgcaggagggaaggggaaaaacatagaatttccatacagacccaaaaagctgcagtgcttgtccagagagagctcctgactgacacagcacaagggcagggagcagctccaacagcactgaccacagtgggggaccatgggtgctggcagccccgtgccacttgccttcttcctc

SEQ ID NO: 62169 - DNA, 600 bp, Chicken  19866894323823_1
gtgccagccacccgggtgaccccgagccctccctgtctcacaccttgctgctaaccacgctgctccccgtgcgaagccagcccgctgcagaggatgactaatgcatgtcactctcaagatgctatcttcaggcagatgagtacagcctgatccaggtcttaattgtgtgggattttagccgagatggtgctaatttattttctctgctgcttcagcacttctcatggctctcatgcatgcacttgaagtcaccttggaagatattcccctggtgcaaggggttaaagcttttctttctgrggaagcagcttgcaatctcaatgattttcttcccctctagccagttctatgtgtggggctggaaggagmttcacattctcttccaagcccacattagctccttggggagcaggaggagatcgtgagtgctccatccctggagatgcccaaggctgtgaatgggcagactgagctggtggggcactgagcccatggcagaggttgggtgggatgtaaggtcccttgcagcccaaccttcctatgaccctacatttgggttaggaatgagttgaccctcgagatcccttccaaaccaaccat

SEQ ID NO: 62170 - DNA, 600 bp, Chicken  19866894323823_2
tgcgaagccagcccgctgcagaggatgactaatgcatgtcactctcaagatgctatcttcaggcagatgagtacagcctgatccaggtcttaattgtgtgggattttagccgagatggtgctaatttattttctctgctgcttcagcacttctcatggctctcatgcatgcacttgaagtcaccttggaagatattcccctggtgcaaggggttaaagcttttctttctgrggaagcagcttgcaatctcaatgattttcttcccctctagccagttctatgtgtggggctggaaggagmttcacattctcttccaagcccacattagctccttggggagcaggaggagatcgtgagtgctccatccctggagatgcccaaggctgtgaatgggcagactgagctggtggggcactgagcccatggcagaggttgggtgggatgtaaggtcccttgcagcccaaccttcctatgaccctacatttgggttaggaatgagttgaccctcgagatcccttccaaaccaaccattctgtgctccactgatttcagcacagttgttgtagggatgtgggggctcagagtgtgtggcactgtccc

SEQ ID NO: 62171 - DNA, 600 bp, Chicken  19866894323826_1
ttaaactacacttctctccacaaacaattccatttggctaggcacgcctcactgactgtccatactttgctgccagttcacttggtgtgccagctcatctacatggattgctccttgaatgatggcaactcagacagaactttgcaggatcagagaagaaggggttaatgggattaatgacatttcagaggccacagtttctagattggacagacagaaaggtcacttttactgagctgaagtcaccctgaagcaccccatgaacacagtcccacattctcagtcatgtttataacctgycgcatggtgccccatggtggctgttttccctctgttacatttcccaaagccagcaactactcaactgatcttgacaacagcttgaaaaaaatcttaattcacgattatttgctaaaagttgacttgctagtagttatattaggtaccttttgatctacatggttttaatgcctgctctacttatcaacaattagaaggtgtgattcttggctcattattttatgctttttcagtttgcatttcttcagtttggctttggttagttgctggaaattttgcatttcactttctcatatgaaa

SEQ ID NO: 62172 - DNA, 600 bp, Chicken  19866894323826_2
cttttttgccaaaagcagcagtagaaagatgcttaagtaaagatattaccaaactatttttgtacttcatgtaatcatttatattctggagttttctaaaatgttttaaagtctgggcattgcctccaccttatctcccttagcaaacaatatttatcaacctgttttcataagaggacatggatgttgatcctggcttggacttatcaagtgatagcatggaaaagttggacccccaagtacccacagttcctgctgatctcttgagatcagggtgagataaggagacagtctgtctcrttcatttccaagatggctttcactgctgcaagatatctaggtgtctatgtgttgatgatatgtaaatgtttaaaataaaaataaaaaaaaaaacatgctagaactacagtggctgcaagtttgcacaggtggttcaggctgaaaagctgatgaatttcaactttttgcaatgcaatttattgaaaattggttatgaaaaaaagaacatggatggagcattcttgcaaaaaatatcttcaaaaagataactgaaatgattttataagaaatcagtacatgtggttccttgcctgtttatct

SEQ ID NO: 62173 - DNA, 600 bp, Chicken  19866894323830_1
atatggtgtaattcttctttatgacattgttgagtgatttctcacactcttaaactgtagcaataacttctactgaacttccccttatccagttttggctcaaatatcttccatttgttttattctcacttaatttgacatctacatcctgaatctaagactaactacctgttaactatcaacaatgccactcttaaagtaaaatgttgtatgagctcagcagtactaattcagcaatggaagctgaatatattgtaggtttgaaaaaaaaaaacagcaccttcatttgtgaagtccttygtcttctcctgctacgttggctcaatttgcagcgtattttgkgcatacatgttactgtgtgtgcacagtcacagtacagatgaaattatgggttgaattgtggctgtgctgttagaatcagttttgcatgatttttttaaatgtttcattatgcaaagagaattttaatttcagctgtgcaacagatctgtctgtcttgtgcataccataaaatatacatagtgaagcaaaatgagttcaggcttcgtggctttgagaaytttttctgagcaagtgtaacactccagattcttagtgcag

SEQ ID NO: 62174 - DNA, 600 bp, Chicken  19866894323830_2
cacactcttaaactgtagcaataacttctactgaacttccccttatccagttttggctcaaatatcttccatttgttttattctcacttaatttgacatctacatcctgaatctaagactaactacctgttaactatcaacaatgccactcttaaagtaaaatgttgtatgagctcagcagtactaattcagcaatggaagctgaatatattgtaggtttgaaaaaaaaaaacagcaccttcatttgtgaagtccttygtcttctcctgctacgttggctcaatttgcagcgtattttgkgcatacatgttactgtgtgtgcacagtcacagtacagatgaaattatgggttgaattgtggctgtgctgttagaatcagttttgcatgatttttttaaatgtttcattatgcaaagagaattttaatttcagctgtgcaacagatctgtctgtcttgtgcataccataaaatatacatagtgaagcaaaatgagttcaggcttcgtggctttgagaaytttttctgagcaagtgtaacactccagattcttagtgcagcagtacatgcttgacaaaatattgttaggagcttactcaggg

SEQ ID NO: 62175 - DNA, 600 bp, Chicken  19866894323830_3
ttgaaaaaaaaaaacagcaccttcatttgtgaagtccttygtcttctcctgctacgttggctcaatttgcagcgtattttgkgcatacatgttactgtgtgtgcacagtcacagtacagatgaaattatgggttgaattgtggctgtgctgttagaatcagttttgcatgatttttttaaatgtttcattatgcaaagagaattttaatttcagctgtgcaacagatctgtctgtcttgtgcataccataaaatatacatagtgaagcaaaatgagttcaggcttcgtggctttgagaaytttttctgagcaagtgtaacactccagattcttagtgcagcagtacatgcttgacaaaatattgttaggagcttactcaggggaggatatttctttataaattaaattaactcaacaaatcacattgactctggtgcatttcgtggcaaatcaccaaacccctacaacagtttaaataaaagggaaaaatattttgtcagagtggcagaactgtgatgccctgaggagttaggaaaggcatataaatgttgcataaagttgtgttttgtagtactgttacagtagcttcttcattatcac

SEQ ID NO: 62176 - DNA, 600 bp, Chicken  19866894323838_1
ggcaaaatctggaagcgcgcgcggttaggatcaatagccggtctggattctaccccttcattgctgtacaacccacaacacacactgaaacatgaaacccccgacacattccccacataactctactattgaaaacacggggccagcccgctgccccccggcccggtggaaaactcccagctgagcgggacggagctccctgcgcttccccgccgggtcccgcacatccggacggagcgccgcccctgcgggacgcacggcaaacccggctgcgggcatcagcccgggcccaggtcgtgmggtgttgtctggagccgagaagtggggcagagtcagggtgtgtcctcaaccagctgcgcggttcctgacccgagctcttatccagcatccctccagccaggacgtgggggttcctgaggtcactaatggatggttcttctccgtgactgagaggacaacacgggagcaacgcaagaggcaagcactcatccctttttcccccaagcaagaaggaaagctctgcacctaccacacctgggaccacaaatctcatttacatctacccctcgtttgcttaacacaagtttctcagcaatttaa

SEQ ID NO: 62177 - DNA, 600 bp, Chicken  19866894323843_1
aataatactaaaataaaataaggagatttttattattaaagtttggagaaggctttcatttctcctgcactctggaagctgctgaacattttggtcgaactttcaagcagttttgggaaagtagatgagcctggaaggtttctgtcattaaaattacggtttctgaaacagtaatatcttcatactggatacttacaccaagatgcttatacagtcttatcacaagaattcacttgcatgcatttagtggatacaagcagatttttcatcttcatttagagctgcgttctggcatgttayagtttactctccgctaacagggttacactgaataatatgcctggggcaatgctcctgacagctcaccaaaaggtcctgtgaggcacaggctgaaactcagccaagttaattaattctccgtgagggtaatatgctyttactagttcaggctacagatggtagattgggaaatatattttggctacattaagacaggtggtgcaactttctgatttagattccattaagttcattttctcttagatgcatgtttcccaagccaatgcagttgtaatttacagctttccatattgtcttgcc

SEQ ID NO: 62178 - DNA, 600 bp, Chicken  19866894323843_2
ggtttctgtcattaaaattacggtttctgaaacagtaatatcttcatactggatacttacaccaagatgcttatacagtcttatcacaagaattcacttgcatgcatttagtggatacaagcagatttttcatcttcatttagagctgcgttctggcatgttayagtttactctccgctaacagggttacactgaataatatgcctggggcaatgctcctgacagctcaccaaaaggtcctgtgaggcacaggctgaaactcagccaagttaattaattctccgtgagggtaatatgctyttactagttcaggctacagatggtagattgggaaatatattttggctacattaagacaggtggtgcaactttctgatttagattccattaagttcattttctcttagatgcatgtttcccaagccaatgcagttgtaatttacagctttccatattgtcttgccacttttgcacagtggttggtgaaagctattggcatgggtgacactattcatgtgtagagagaatgatacaagcagacagctcaaggcagctgaatctgtgcctgcctggtttaaccacaccctgggggtgggttct

SEQ ID NO: 62179 - DNA, 600 bp, Chicken  19866894323844_1
cagaaatatcttcaacaccacaaatttgaatcatatatgacagatgaaacagagtcacacagggttatattgtgctcaactaggtttcatttttggcgataaaaatacgtgtgccaccagatagtctggagaatttgtttttcagctgaaacattaactaagcatcagcaaaagctacaagctcaggaggcacacagatctactctatcagtctgtttttgttgggcttctttttttaaatttgtttttaatatccttattactccctccccaccttaaaacattcatcacctctagtayaaaacaaaactgagcacatggaaagtctaacaaatattaaagctgcactgttcagagcttagaaatcaggaaatgtcagctttttggtagcacgagtactctcatctctgtcctttactcatacacatttaccactgagattctggctatgtgttcaaacaacgtctgctcaaagagaggagtcaacctgctctgtggaagacagcaaaccacaaagtgttggaggccaggaggatatcagaagtaaacatgacatatgcttgtcctgttctcacactcctccctaagcactgcttttgg

SEQ ID NO: 62180 - DNA, 599 bp, Chicken  19866894323847_1
  misc_feature (1)..(64): n is any nucleotide
nnnnnnnnnnnnnnnnnnnnnnnnnnnnnnnnnnnnnnnnnnnnnnnnnnnnnnnnnnnnnnnncttgtttatatgtggaggctttccagctatttgcacttaactgtttccatcgtgtatgaaagctggcaggaataggataatctctagactttgacatacacaagcacattagtctgggataacatgattaggggtgcttgaaggcttgaacacaggcaggaagacagcagtacacaggagtacagggccttagctcatcttccaaactacctgtgcaacgggaggtactggtgttsgaarggctggcaaaggtgtttcaaatcaycatggcacaagatgccgtggctggcartggattgtatcagctctctgccaggagggctttccccatgctggggggaatttctggctgcccctttttgggagttttctggctggttttcagtgagggattacaaagcagctggaaacctttatgtcttaaactgccgattctggaaaccctattcttatttattagcatctgactgatctctatctatgatctttgtactatactgtcatgtgggarcctggcgtttgggatgtgagcttg

SEQ ID NO: 62181 - DNA, 599 bp, Chicken  19866894323847_2
  misc_feature (1)..(60): n is any nucleotide
nnnnnnnnnnnnnnnnnnnnnnnnnnnnnnnnnnnnnnnnnnnnnnnnnnnnnnnnnnnncttgtttatatgtggaggctttccagctatttgcacttaactgtttccatcgtgtatgaaagctggcaggaataggataatctctagactttgacatacacaagcacattagtctgggataacatgattaggggtgcttgaaggcttgaacacaggcaggaagacagcagtacacaggagtacagggccttagctcatcttccaaactacctgtgcaacgggaggtactggtgttsgaarggctggcaaaggtgtttcaaatcaycatggcacaagatgccgtggctggcartggattgtatcagctctctgccaggagggctttccccatgctggggggaatttctggctgcccctttttgggagttttctggctggttttcagtgagggattacaaagcagctggaaacctttatgtcttaaactgccgattctggaaaccctattcttatttattagcatctgactgatctctatctatgatctttgtactatactgtcatgtgggarcctggcgtttgggatgtgagcttgtccc

SEQ ID NO: 62182 - DNA, 599 bp, Chicken  19866894323847_3
  misc_feature (1)..(35): n is any nucleotide
nnnnnnnnnnnnnnnnnnnnnnnnnnnnnnnnnnncttgtttatatgtggaggctttccagctatttgcacttaactgtttccatcgtgtatgaaagctggcaggaataggataatctctagactttgacatacacaagcacattagtctgggataacatgattaggggtgcttgaaggcttgaacacaggcaggaagacagcagtacacaggagtacagggccttagctcatcttccaaactacctgtgcaacgggaggtactggtgttsgaarggctggcaaaggtgtttcaaatcaycatggcacaagatgccgtggctggcartggattgtatcagctctctgccaggagggctttccccatgctggggggaatttctggctgcccctttttgggagttttctggctggttttcagtgagggattacaaagcagctggaaacctttatgtcttaaactgccgattctggaaaccctattcttatttattagcatctgactgatctctatctatgatctttgtactatactgtcatgtgggarcctggcgtttgggatgtgagcttgtcccttattgcccggaaggaaacagctcc

SEQ ID NO: 62183 - DNA, 599 bp, Chicken  19866894323847_4
  misc_feature (1)..(8): n is any nucleotide
nnnnnnnncttgtttatatgtggaggctttccagctatttgcacttaactgtttccatcgtgtatgaaagctggcaggaataggataatctctagactttgacatacacaagcacattagtctgggataacatgattaggggtgcttgaaggcttgaacacaggcaggaagacagcagtacacaggagtacagggccttagctcatcttccaaactacctgtgcaacgggaggtactggtgttsgaarggctggcaaaggtgtttcaaatcaycatggcacaagatgccgtggctggcartggattgtatcagctctctgccaggagggctttccccatgctggggggaatttctggctgcccctttttgggagttttctggctggttttcagtgagggattacaaagcagctggaaacctttatgtcttaaactgccgattctggaaaccctattcttatttattagcatctgactgatctctatctatgatctttgtactatactgtcatgtgggarcctggcgtttgggatgtgagcttgtcccttattgcccggaaggaaacagctcctaccagcacaatgcagggaagttgcat

SEQ ID NO: 62184 - DNA, 556 bp, Chicken  19866894323847_5
tgtgcaacgggaggtactggtgttsgaarggctggcaaaggtgtttcaaatcaycatggcacaagatgccgtggctggcartggattgtatcagctctctgccaggagggctttccccatgctggggggaatttctggctgcccctttttgggagttttctggctggttttcagtgagggattacaaagcagctggaaacctttatgtcttaaactgccgattctggaaaccctattcttatttattagcatctgactgatctctatctatgatctttgtactatactgtcatgtgggarcctggcgtttgggatgtgagcttgtcccttattgcccggaaggaaacagctcctaccagcacaatgcagggaagttgcattggcatgctctgaagggaacctcgtaaacttcttcagtagagcaaaaacttggctcatggtggagtaaacgaaggtggtgcaggagggaagtaaggagagaaaatgaggatatcttcatctctggcacagacagtcccacccaagctaaagggattaaacacaacctacaactgca

SEQ ID NO: 62185 - DNA, 600 bp, Chicken  19866894323848_1
ttgcactgttgtaatcttcattagctgtgcatacatgggacgttagttcacatcaattgagctaccagtttccaagcagcagtgctgtacacttgtcctccatcagtgaataaacgtattaacgctagatggagcccttacagctcttgtgaagggctatggccttggcttccaagcagagaacgacaggttaatgtgtaggcaggccatataaaagccttagcctctcctccttccaaatttcaggcctacagcatgattgcaagtgcctctccatgccctcagcatcctactgcactmtctattttggtgacacacaaaaagaggagagcacgagcagacagtctgagctttgtgttttttcagtgcctgcagataggagcttgacagctcttatgaaactccacagtgaagccagaagaactattatgaaccaagtgatactttccagagtgatgagaaagtgtaaactattgctttaatcctggcatcagctcagaagcttgtcatgctgcccagccaggactggatgaggaatgcctcctcttagcacactgcagcatttctgccatgacaaagttaggcaactcatgtgtagaa

SEQ ID NO: 62186 - DNA, 600 bp, Chicken  19866894323848_2
ggactggatgaggaatgcctcctcttagcacactgcagcatttctgccatgacaaagttaggcaactcatgtgtagaatggaagctgccagtatttgtacctggtgaggtacagaaagcttgtttgcactgacaacaaagtctatttgtttgtgctgccaaatcaacaaagttgtggctgctcctttggctcctgcactcttttatgaataaagactaaataagtgcaagagaaatagtgccctcttctccccaccctgcagaagaaaccaggacagaattccagactcacctgagtgcrctgtacccctggcacacgctgacacagcacagcaccctctcctggttagcctggttctctcccaggtacttgcacacgatgtttccacccaggctgaagcctaccacaaccaactgggtctgagggtaggtcttcttgatgtgattcaccatggctccaaattcccaggtgcaacctgaaaacaaggacagtgtcaagaggcatcttccaatggtcccagacttctacttcaagctccagttgtatgctttaagttcagctccttactctcgatttttcaataacctcagggtttaaggt

SEQ ID NO: 62187 - DNA, 600 bp, Chicken  19866894323853_1
tgcccttcaacctgcacagctgggggggaaatccactgtgccacagccctgggggtactcagagccgtgcccggtgggtggctttctgctcgctgtgccacagccctgcggatctgcctttagccccgcaggatggggggctgccctgctctgtgtctgggggggcactgagcccagaagtgacacctcacgcacttcctgatgggcctcttccatgtgcaggagaaggacacgtctctctatcgcccggcactggaggagctgcgcaggcagatccgttcctccaccacctccatgacytccgtccccaagcccctcaagttcctccgaccgcactatggcaagctgaaggagatctacgagaacatggcccccggggagaacaaggtgagcgctgccgtcctgcgtgggctgggacttgccaggtccctgcctttgccccctgtgggctcagggagggtgctgttttttggggtgcactcactcaatcccctgtgagcctgaagctctggctctctgtccccagcgctttgcagcagacatcatttctgtcctggctatgaccatgagtggggagcgtgagtgtctgaagtaccgcct

SEQ ID NO: 62188 - DNA, 599 bp, Chicken  19866894323856_1
  misc_feature (1)..(70): n is any nucleotide
nnnnnnnnnnnnnnnnnnnnnnnnnnnnnnnnnnnnnnnnnnnnnnnnnnnnnnnnnnnnnnnnnnnnnnaataatatatacatcagtgaagggtttttgttgttgttgttgtttaaaaggatgaaaacatgtaaatattatgaataaattattaatagttgatatagaaagcagattttagaaaaaaaaatatcatgcaatggttagtcatttttttattttttatttccaaaggcttaagaattatattcacaagaaatgacattgggtatactagctacatttaatgtgtaacgatrtacgacgtgacataaacaccagtaatctatcatcaaattaatctactttatttttcttttcaaattttaatatttttactaactttctcctttttttttctttttttttttttttctctgtgagagtaccaattacactgctgtgctttgataaccacagtgcttcctctttgcatgtaatagtgtatatctgctcaaatggatggaaaggatttatgtatatacaaaaaactcttgcctgtaacagaaaatatctcagtattggaccatgttatcaaccattactgactatgctgaag

SEQ ID NO: 62189 - DNA, 600 bp, Chicken  19866894323867_1
tgcagccactccgcaaagactcaagggatgttgaggcagggatgtttcaggtgccccactcagctttgctgaggggctgatgtcagccctggtgcctcggtgggcagctgaagacagggagcaccgcctgcagatggtgagagctgcatgacctcggggactgtgcttgtgtgctacctccactaagaaaagcagccggcgtgctgttacaccttgcctcagaagcagagccacggcacgctgctacatccaagcctcagtgagcagcgtgccatggcagagctggctgctctgtgcccrtgagcccagagaagccctgtgcctkcctggtgcagatttcagaggccatcaccggctgccacgcacagctcagtgcctcacctgccwgtccctaactctcatttcaatttctctccttaggaggcaaagagcaactcaggaggcagcacagtgcagcgctccaaggtaccgcaattctcctgcaccccactgctgtgtgaggaggtgggaaggacagtgatgggcgcaggatctccaaacccctttcctcaccttctctccctttggtttccccttgcccagtccttcagcctgaaggcc

SEQ ID NO: 62190 - DNA, 600 bp, Chicken  19866894323867_2
ggatgttgaggcagggatgtttcaggtgccccactcagctttgctgaggggctgatgtcagccctggtgcctcggtgggcagctgaagacagggagcaccgcctgcagatggtgagagctgcatgacctcggggactgtgcttgtgtgctacctccactaagaaaagcagccggcgtgctgttacaccttgcctcagaagcagagccacggcacgctgctacatccaagcctcagtgagcagcgtgccatggcagagctggctgctctgtgcccrtgagcccagagaagccctgtgcctkcctggtgcagatttcagaggccatcaccggctgccacgcacagctcagtgcctcacctgccwgtccctaactctcatttcaatttctctccttaggaggcaaagagcaactcaggaggcagcacagtgcagcgctccaaggtaccgcaattctcctgcaccccactgctgtgtgaggaggtgggaaggacagtgatgggcgcaggatctccaaacccctttcctcaccttctctccctttggtttccccttgcccagtccttcagcctgaaggcccaagtgaaggagatgtgcaccgcct

SEQ ID NO: 62191 - DNA, 600 bp, Chicken  19866894323867_3
cctggtgcctcggtgggcagctgaagacagggagcaccgcctgcagatggtgagagctgcatgacctcggggactgtgcttgtgtgctacctccactaagaaaagcagccggcgtgctgttacaccttgcctcagaagcagagccacggcacgctgctacatccaagcctcagtgagcagcgtgccatggcagagctggctgctctgtgcccrtgagcccagagaagccctgtgcctkcctggtgcagatttcagaggccatcaccggctgccacgcacagctcagtgcctcacctgccwgtccctaactctcatttcaatttctctccttaggaggcaaagagcaactcaggaggcagcacagtgcagcgctccaaggtaccgcaattctcctgcaccccactgctgtgtgaggaggtgggaaggacagtgatgggcgcaggatctccaaacccctttcctcaccttctctccctttggtttccccttgcccagtccttcagcctgaaggcccaagtgaaggagatgtgcaccgcctgccagaaaaccgtctatcccatggagcggctggtggcggataaattcgtcttccacaactct

SEQ ID NO: 62192 - DNA, 600 bp, Chicken  19866894323869_1
gagtggtcaggctagcctgatcatatgatcttcataagtccctttcagctgaactgttcccactctattagtcttgcttcattacaaactattgttatatatccaaatttttcatttctaatggatttgctttgaaatcagtagaggagtctgaaagagtagtattatcagggactattgacagaggcataatgaaagaaggacaatcttcaaataaaaaatagtatgaatttctctgtcagctttgtagtgttacaatgtcagaaacacaaatttgccccctgacaggatattgcgtakgttgctgtttcaacagacattgctgttctaacactgaacaatgattatgcatggtrgatatgttgcttaasaatgtaatgtcagtatccttatttcttcccattctaaaatgttcagtattctcacaagaatgggcaaaaggatgaaaatactctgcacatgggtgcagtacttgattgtctctctttgagaaacagtgttgtgcagtgttgcaggacagccctcttgaaatagctgcctatctgatgacaacagcctcatgaatgtctgcagaggttgatgtcaaagacttcccacatg

SEQ ID NO: 62193 - DNA, 600 bp, Chicken  19866894323869_2
ttcccactctattagtcttgcttcattacaaactattgttatatatccaaatttttcatttctaatggatttgctttgaaatcagtagaggagtctgaaagagtagtattatcagggactattgacagaggcataatgaaagaaggacaatcttcaaataaaaaatagtatgaatttctctgtcagctttgtagtgttacaatgtcagaaacacaaatttgccccctgacaggatattgcgtakgttgctgtttcaacagacattgctgttctaacactgaacaatgattatgcatggtrgatatgttgcttaasaatgtaatgtcagtatccttatttcttcccattctaaaatgttcagtattctcacaagaatgggcaaaaggatgaaaatactctgcacatgggtgcagtacttgattgtctctctttgagaaacagtgttgtgcagtgttgcaggacagccctcttgaaatagctgcctatctgatgacaacagcctcatgaatgtctgcagaggttgatgtcaaagacttcccacatgcttgttcatcacagctcttttccaagatctcatagcagtgtagaatcaagctgtag

SEQ ID NO: 62194 - DNA, 600 bp, Chicken  19866894323869_3
tcttgcttcattacaaactattgttatatatccaaatttttcatttctaatggatttgctttgaaatcagtagaggagtctgaaagagtagtattatcagggactattgacagaggcataatgaaagaaggacaatcttcaaataaaaaatagtatgaatttctctgtcagctttgtagtgttacaatgtcagaaacacaaatttgccccctgacaggatattgcgtakgttgctgtttcaacagacattgctgttctaacactgaacaatgattatgcatggtrgatatgttgcttaasaatgtaatgtcagtatccttatttcttcccattctaaaatgttcagtattctcacaagaatgggcaaaaggatgaaaatactctgcacatgggtgcagtacttgattgtctctctttgagaaacagtgttgtgcagtgttgcaggacagccctcttgaaatagctgcctatctgatgacaacagcctcatgaatgtctgcagaggttgatgtcaaagacttcccacatgcttgttcatcacagctcttttccaagatctcatagcagtgtagaatcaagctgtagctgacatgggctgca

SEQ ID NO: 62195 - DNA, 600 bp, Chicken  19866894323874_1
tgattaatgcaacatgagtagtattaacatatttctccagttgcttcactggaaatgtcaaagaagattttaagttctgttctcgtttttataaacatcaatctatgcacggtcatcctagttataatggacaatacagtaagtttcttagtcttcctgacatggctgaaacacatatttcagctgaaatgagtttatgaaaaccatcatccctcatcataacacagaaaaggatacatgtctgctatctggtgaagaacctgggcactatttccaagtattgcatggagtttcagaaarcaatccaaagcttcatctattctgtttaacttcttatatgttaaacctaaaaataagaaaggttacaatggaagcgcaatgagaaaaagatggattcagctcattaattaagagaagaaccaagaaaaataaaatagggacatggaagccaacagcagtatagctrccttgacaccaatcatctctattacttgaatcatccttacaattctttaattctttcctgctattatgatattaggtgataaaggcaaggagcatgaagataatcaaagagcaagaacattactcatctcactt

SEQ ID NO: 62196 - DNA, 600 bp, Chicken  19866894323874_2
tgaaacacatatttcagctgaaatgagtttatgaaaaccatcatccctcatcataacacagaaaaggatacatgtctgctatctggtgaagaacctgggcactatttccaagtattgcatggagtttcagaaarcaatccaaagcttcatctattctgtttaacttcttatatgttaaacctaaaaataagaaaggttacaatggaagcgcaatgagaaaaagatggattcagctcattaattaagagaagaaccaagaaaaataaaatagggacatggaagccaacagcagtatagctrccttgacaccaatcatctctattacttgaatcatccttacaattctttaattctttcctgctattatgatattaggtgataaaggcaaggagcatgaagataatcaaagagcaagaacattactcatctcactttctgaacaagatgaataaggaaaaaggatcacttacaggagcagaatgatggtaatggtttaatactgctaaaattagtagatttcggtagataggaacatttacatcaatttttatatacaaagtgacttaccaacaccaactagtaattgcagacaagttaaca

SEQ ID NO: 62197 - DNA, 600 bp, Chicken  19866894323875_1
ttatgaatgattttataattacagcaagtactccagaatgaatgtaagtacctttctaccctgaaatatgtcagatctgggattatcattcacaatgggtactgctaattgctcttgtagcacagtaatcaacgatctacaaatttcaggtcacaatagcgtagtaggattcttggcatcagtagcagaatggagaattatatctatcagcacccattaattatttaatgtattatgtttacaatattcagttctgcataaggaaagctgaaaccattttgcaggagatgttagacatgygtagtccataaaatatwatwatattagaaagaacatttgttaacagaaatgtaaatacacttttcttaaattttcctcaaatatttaaagagaaaataatgagaatgtgaatgaataaaagtctcagctgaatattcttcactgttcctctgatttgtccaccatttcttcctggcttcaacagaagttaatgagaacaagtgagcaggtacaacgagctgtcagtacagcagyctacgctgctgctgaaatgtactggaagacagatcacacaaagcacaraagttttcacctcaggct

SEQ ID NO: 62198 - DNA, 600 bp, Chicken  19866894323875_2
attacagcaagtactccagaatgaatgtaagtacctttctaccctgaaatatgtcagatctgggattatcattcacaatgggtactgctaattgctcttgtagcacagtaatcaacgatctacaaatttcaggtcacaatagcgtagtaggattcttggcatcagtagcagaatggagaattatatctatcagcacccattaattatttaatgtattatgtttacaatattcagttctgcataaggaaagctgaaaccattttgcaggagatgttagacatgygtagtccataaaatatwatwatattagaaagaacatttgttaacagaaatgtaaatacacttttcttaaattttcctcaaatatttaaagagaaaataatgagaatgtgaatgaataaaagtctcagctgaatattcttcactgttcctctgatttgtccaccatttcttcctggcttcaacagaagttaatgagaacaagtgagcaggtacaacgagctgtcagtacagcagyctacgctgctgctgaaatgtactggaagacagatcacacaaagcacaraagttttcacctcaggctgttcaaataaaagcagg

SEQ ID NO: 62199 - DNA, 600 bp, Chicken  19866894323875_3
acagcaagtactccagaatgaatgtaagtacctttctaccctgaaatatgtcagatctgggattatcattcacaatgggtactgctaattgctcttgtagcacagtaatcaacgatctacaaatttcaggtcacaatagcgtagtaggattcttggcatcagtagcagaatggagaattatatctatcagcacccattaattatttaatgtattatgtttacaatattcagttctgcataaggaaagctgaaaccattttgcaggagatgttagacatgygtagtccataaaatatwatwatattagaaagaacatttgttaacagaaatgtaaatacacttttcttaaattttcctcaaatatttaaagagaaaataatgagaatgtgaatgaataaaagtctcagctgaatattcttcactgttcctctgatttgtccaccatttcttcctggcttcaacagaagttaatgagaacaagtgagcaggtacaacgagctgtcagtacagcagyctacgctgctgctgaaatgtactggaagacagatcacacaaagcacaraagttttcacctcaggctgttcaaataaaagcaggtgg

SEQ ID NO: 62200 - DNA, 600 bp, Chicken  19866894323875_4
atgtttacaatattcagttctgcataaggaaagctgaaaccattttgcaggagatgttagacatgygtagtccataaaatatwatwatattagaaagaacatttgttaacagaaatgtaaatacacttttcttaaattttcctcaaatatttaaagagaaaataatgagaatgtgaatgaataaaagtctcagctgaatattcttcactgttcctctgatttgtccaccatttcttcctggcttcaacagaagttaatgagaacaagtgagcaggtacaacgagctgtcagtacagcagyctacgctgctgctgaaatgtactggaagacagatcacacaaagcacaraagttttcacctcaggctgttcaaataaaagcaggtggggggcactaattaggaaaagttatcttcactattcagatatgtcttgaaggctgtgtctgtcaggtttctgtgtaaatgcaggctttaaatgcaggctgggctgtggaaatgatggagactgcttttaaggacatacagcagctttcctactgcttgcaacaatccaattctgcatgcagctagctgatgtacattattaccttttgaactttg

SEQ ID NO: 62201 - DNA, 600 bp, Chicken  19866894323875_5
aggagatgttagacatgygtagtccataaaatatwatwatattagaaagaacatttgttaacagaaatgtaaatacacttttcttaaattttcctcaaatatttaaagagaaaataatgagaatgtgaatgaataaaagtctcagctgaatattcttcactgttcctctgatttgtccaccatttcttcctggcttcaacagaagttaatgagaacaagtgagcaggtacaacgagctgtcagtacagcagyctacgctgctgctgaaatgtactggaagacagatcacacaaagcacaraagttttcacctcaggctgttcaaataaaagcaggtggggggcactaattaggaaaagttatcttcactattcagatatgtcttgaaggctgtgtctgtcaggtttctgtgtaaatgcaggctttaaatgcaggctgggctgtggaaatgatggagactgcttttaaggacatacagcagctttcctactgcttgcaacaatccaattctgcatgcagctagctgatgtacattattaccttttgaactttgcctttcttcctgcttttcctgtgactgtttcggcacctggtatcttct

SEQ ID NO: 62202 - DNA, 373 bp, Chicken  19866894323878_1
tcatagctactgggttggactgcagctatttagtctttggcaaccatatttgacactctcagccaggcacttgcatggtaatcatgtgagtgagtctgatagtcacatgaaaactgcagtgtcacataatcaaaaaaaaaaaaaaaaagaatcacagaactgctattgctttatctgtatcctttatttcatctgtcttatgacttacttgaaaatcctgagtgtcttagcagttatcgtcctttaaaaatgaacctgtcagagaaattttcttctccttcacaaatacaagaattcctmcatctatctgttattaatacatgtaagatccaaaatccttcatttcttggatgggcatgttgtgacagctatc

SEQ ID NO: 62203 - DNA, 600 bp, Chicken  19866894323879_1
atcagatgcttacccgtctcctgaaactggtaacaccttcgttttactatctctaattagaataacaaacatgtaatactttgccactgcctgagccaattcctcgactttaggttacagtaaacctacctaacaaagtgctcagcttctctgtgtgatgtgtgtttttaacaacctaaaaacaagattgtcccttaccctatgccaagtgtagaactactccacatgatgatgctttcccacctgagcctagcaccatggacatgtacagtgacagatgggtggggtgcaggagagaaygggttttggttgcgtgtgtaacaggaccacaaaataaaactgaggccgtgggaatatggcctggtcatccctttctgggcatcacaagctgccccagttccacactgttccatgagaagctcatgctctctcaagtcagatttaaagatttgtggctgaacaggataagctctatcattctcatttgtttaatctctgcagggctgaagctcctgggctaaaactcttacaaaggtcttccaagctcaggggtacgagccattcagctactgcgtgggagggaacctttactagctttga

SEQ ID NO: 62204 - DNA, 600 bp, Chicken  19866894323881_1
tttcatcacaaaccctctgaggtcagagttgggtcaccatgtcaagcagcatagaaagaatagcttggtttccatgctcattaagtactcctgtctgctgacattgcaagcaagaatgctaattagcacttgccactgtacattgcactgacactgtgagaagtctaaaaattcatctgtctaaaaagctgcagactcttgtgacctaagtgatttttgaagcaatgatttagaagtaaacaattctgtttcctctcttcaaaatgtctcttcttccattttaagctgttctaatcttgyaaaaaaaaaaaaagttttttaaaaacccaatcaattattactacaataatgtactacatgttgctcaaagcatcagttgacagctgtaacattttgcactgaagctatcatattggtttcaagcagctagaaggaactaccacattaatggattccagagccagggggagcatcttgcttagcaaatctgatggcytgtgcaaaacagatcgtacatagagaagatcatggggaaatacatcccatttgattgttgttccactgcttaattactaacagtgtaagaaatgtgtgactctt

SEQ ID NO: 62205 - DNA, 600 bp, Chicken  19866894323881_2; identical to SEQ ID NO: 62204

SEQ ID NO: 62206 - DNA, 600 bp, Chicken  19866894323881_3; identical to SEQ ID NO: 62204

SEQ ID NO: 62207 - DNA, 600 bp, Chicken  19866894323881_4
tcttgtgacctaagtgatttttgaagcaatgatttagaagtaaacaattctgtttcctctcttcaaaatgtctcttcttccattttaagctgttctaatcttgaaaaaaaaaaaaaagttttttaaaaacccaatcaattattactacaataatgtactacatgttgctcaaagcatcagttgacagctgtaacattttgcactgaagctatcatattggtttcaagcagctagaaggaactaccacattaatggattccagagccagggggagcatcttgcttagcaaatctgatggcytgtgcaaaacagatcgtacatagagaagatcatggggaaatacatcccatttgattgttgttccactgcttaattactaacagtgtaagaaatgtgtgactcttcttgcttacatacatacagcatcaatttccattttaaggagttcgcggaataccatcctgccacctcagtattgaactcagcagcttttgtccactttttccagagacatctagtctgtatccaaagaaattaagaaatggagaatacaccagaattcttggtattttattccaatggttaaccaccagcaaaatt

SEQ ID NO: 62208 - DNA, 600 bp, Chicken  19866894323884_1
attataacatccaaaaacccaactgaacccctgagagcatgtaagtatttcatctaaatcttatgatctgttcaatagagcacaaatgactctgattttgacttcctggtttatgctattaaaaaaataaaattcaatacgaatagaaaaaaaagaaagaaacctacatttaattaggagcatgatcctcctgcataagactgatgaggctttgcccttcagtaaataaaggacataattcaagccattgagcataagccacaaaacttcactgtgaaagccagtgaccaactgtgagtygtgagcccacagttcacctacttgataactcagaaatggcaaacataagagaatctgctactttagaagaaatgaaaggagatcagattaattaccatgatggggtatttctgagatgcctctggcatcccaacactagttatcctcacatgcactattttgtcaagccactgaacatccatctttcagagaaattatgtaattcagaagctccagttatgttaagttcccttcatatcaggttagaaataaccctctaacacagaagggatctctttccctaggctggacacgcactta

SEQ ID NO: 62209 - DNA, 600 bp, Chicken  19866894323897_1
ctctctcccgagctatttctttctcaaatacaaagtatgatcatcaccaaaaacacatttccaaataggagaaaacccagaaactggggcacattcaggcagagctgaggagtccatgagagtccatgagaggatgctgagcgaaaggaaagcaaacaggaggcaggaagcatggctctgcgctgtcctttcaaaggatgagagcttacaaagctccaagcagctgacatggcagatcgaatcccttttgtatccgtccatttgtcacctgccctgcagatcacctgatggcagccacgygggcccggccccatcactccttgtccatcagtcctgctcttggagcacaatgaggtgggaccccgctcccactcacaatyctcccactcacatcaaggacacaggggctgagacacatttttcaaggcactgaagccaatcttcaccttcttccgaaggaacccaggcaaagcagctgagatgtggtattattgacactccagatgctcggagacaccgttctgtaactgcctttatcccagttgcattcatcttaatttggataatctgttttttggtctcagagcaccacggctcctt

SEQ ID NO: 62210 - DNA, 600 bp, Chicken  19866894323897_2
aaactggggcacattcaggcagagctgaggagtccatgagagtccatgagaggatgctgagcgaaaggaaagcaaacaggaggcaggaagcatggctctgcgctgtcctttcaaaggatgagagcttacaaagctccaagcagctgacatggcagatcgaatcccttttgtatccgtccatttgtcacctgccctgcagatcacctgatggcagccacgygggcccggccccatcactccttgtccatcagtcctgctcttggagcacaatgaggtgggaccccgctcccactcacaatyctcccactcacatcaaggacacaggggctgagacacatttttcaaggcactgaagccaatcttcaccttcttccgaaggaacccaggcaaagcagctgagatgtggtattattgacactccagatgctcggagacaccgttctgtaactgcctttatcccagttgcattcatcttaatttggataatctgttttttggtctcagagcaccacggctcctttccttccttacaagcactcagacgggatgcagagcacacacagcacagagatcagcccgtaaatgttggaaataccaaaa

SEQ ID NO: 62211 - DNA, 600 bp, Chicken  19866894323903_1
ctgacactcatctgtaccaggtggacaaaccctcccaccccacacacacaaacacccaactccagcaacaccgctggatttgtggtctttgtggaagatggcagcagggagaacaatgcaccttcccaccccacactcctaaggagacaatacccaaaacctacagccccctcctcaaccacttgtacccacagatgttgcactcctgctgcgagctgcatcttactcggaggggtggccataagtcacccccacaatatgtggcttgggaggcattttttctctttatgtccctacagytccagtgaggagactatctggctgctgccactcagtgggattcttattcctaccccatttcctaccagaacattcactgcagatggtctcaattactccctccttcttcattttagttcctgtcttcctccccaaaacgtgtatttctcagaygttttgggatcgcgttatcagaagtttcctaagcagtaactcggagaacaaagcccaattctccccagctgacttccctgctctgtgaaaactgggaccaattaaaggctccacagcatctcctcacctctaaatgaaacctaactg

SEQ ID NO: 62212 - DNA, 600 bp, Chicken  19866894323903_2
ccaaaacctacagccccctcctcaaccacttgtacccacagatgttgcactcctgctgcgagctgcatcttactcggaggggtggccataagtcacccccacaatatgtggcttgggaggcattttttctctttatgtccctacagytccagtgaggagactatctggctgctgccactcagtgggattcttattcctaccccatttcctaccagaacattcactgcagatggtctcaattactccctccttcttcattttagttcctgtcttcctccccaaaacgtgtatttctcagaygttttgggatcgcgttatcagaagtttcctaagcagtaactcggagaacaaagcccaattctccccagctgacttccctgctctgtgaaaactgggaccaattaaaggctccacagcatctcctcacctctaaatgaaacctaactgtgctcacaccctttacacgcactagtgtttcttccacttgaaatgcataaccacgggtctaagggcacaagtaacaaccccagatgattaacaccaccraggaaatgaaaagccctttctgctataggcaagagaagcaccatgaaaggcaca

SEQ ID NO: 62213 - DNA, 565 bp, Chicken  19866894323903_3
ctccttcttcattttagttcctgtcttcctccccaaaacgtgtatttctcagaygttttgggatcgcgttatcagaagtttcctaagcagtaactcggagaacaaagcccaattctccccagctgacttccctgctctgtgaaaactgggaccaattaaaggctccacagcatctcctcacctctaaatgaaacctaactgtgctcacaccctttacacgcactagtgtttcttccacttgaaatgcataaccacgggtctaagggcacaagtaacaaccccagatgattaacaccaccraggaaatgaaaagccctttctgctataggcaagagaagcaccatgaaaggcacagtcacacggcagacattttgggggcaagaaataccacccggggctgccagctccttcccaccgcccctttattccccagatataaaggggtcgggcacagagctttaacttcgtaaggtgaacgaggggggtaaaaaacgacgaagtggaaatgtaaaatgttctgtaacgatttccagcacgtaatgaaagcatgtgctcttccttttag

SEQ ID NO: 62214 - DNA, 586 bp, Chicken  19866894323923_1
cctccagcctcccaccacttaatcagcagtgtggagtccaggcactctgctgcaggatcatgtctgatgcagagcacgtgggaatgaaggatgatatcagtgcacagggtgacccgcagcctccacatcagtggagtgcaagagggatgcttagaagatacaaggtttgaagctaggaaaagacaaatctaggatggacctctgggaaattttctggtgggatggatctttctgggaaatgtctcctctgtcccattgcttcctgacagagggaggtcctgctgaacccatgctctgttsgttatttgaactgaaagttttaggcaggaactaacatgctggcagggacatccattgagttagccccgtggtagtcccagaggatttttcacccattcaagagacctgagggtttggaagtagcttctctgatgctatagaaagtatatgccctacctaagggcacaaagtagggctggagtaaccttaggagaaacccaactcctctgtgcatcaaaggaaaagcagaaagtatgtgttcttctaaaacatgtttaaaatcttggaggttccttcttgggcatgt

SEQ ID NO: 62215 - DNA, 599 bp, Chicken  19866894323928_1
  misc_feature (1)..(53): n is any nucleotide
nnnnnnnnnnnnnnnnnnnnnnnnnnnnnnnnnnnnnnnnnnnnnnnnnnnnngaggaaaatgtaggctgacttactgtaagatattttaaaatcagtgacatgggttggtttaggttttttttattattttaagaaatgaacttcttctggtgtctgtgtaatatgacattaacccatgttacttcttgctattgttttcgcatatcactgtaaaacattctgtgaatgggatcctttttgtgcctgccaccagttgactaaaaatagcctagagcaatattcagcattttaaaactcraatattggaaagtctcagctgatattagaaacttagagaaaatcttgttgaaaataatactttttacaggaggagtagagggtactggtgatgaaagactatcttgctttttatccttattccatttgggtttggtacagtatrttttaaatgatgaatcacatgatcataaaactgctacattatacttcaaacaacattgcttctgacaaacattattgattttcttatctttttgagaatcagagaagagtattatgcagcttaactgctgtagaatgcttgtttgagaagtgagc

SEQ ID NO: 62216 - DNA, 600 bp, Chicken  19866894323928_2
tcttctggtgtctgtgtaatatgacattaacccatgttacttcttgctattgttttcgcatatcactgtaaaacattctgtgaatgggatcctttttgtgcctgccaccagttgactaaaaatagcctagagcaatattcagcattttaaaactcraatattggaaagtctcagctgatattagaaacttagagaaaatcttgttgaaaataatactttttacaggaggagtagagggtactggtgatgaaagactatcttgctttttatccttattccatttgggtttggtacagtatrttttaaatgatgaatcacatgatcataaaactgctacattatacttcaaacaacattgcttctgacaaacattattgattttcttatctttttgagaatcagagaagagtattatgcagcttaactgctgtagaatgcttgtttgagaagtgagctgttctcctgctggggttgacgtattcttgtttgcaatgagatttgcaagtgacacagctcattagtgaagaaggtgtcatgcagaggagattaccaaattgagctcatcttaatgaaagtctgaaataggatgcttgtcatggt

SEQ ID NO: 62217 - DNA, 600 bp, Chicken  19866894323931_1
ggaagagaatcaactggaaaatgaaaagtcctgatgaaaagattaggaattcatcactgaacttcagggcagagttcacatgcaagtttctcataattgcttctgcagttctaacactacattttactttcatacataaaaaagtagggttatagttctcttcagggcagaaataatacacttcatatattggttcttgtgcagtgagttaattagagctgaaggctttatgtagagttttgtggggtgtttggtttttctttgttttgtgtttggatttgttgtttgtttttttctttyttttaagacttcagaactgcactgctaatggctcctaaagtgaaggctggagtttgagaagaccaacagacatgtatatgaaagtaaaatgaataaatgattctgtagcagcaaaagctagtatctggtttcatagggatttctctgagagtggattctgtcatccaactgggccgagttttagttgaattttctgttgttattagtattttattcttctgagtgtaactgtaggataaaataaccttctgtttcactctgttgcaaagtattttgtaaaacttgagctgttttaagcat

SEQ ID NO: 62218 - DNA, 599 bp, Chicken  19866894323947_1
  misc_feature (1)..(93): n is any nucleotide
nnnnnnnnnnnnnnnnnnnnnnnnnnnnnnnnnnnnnnnnnnnnnnnnnnnnnnnnnnnnnnnnnnnnnnnnnnnnnnnnnnnnnnnnnnnnncttgaaaaggctggacgctgcagacagctttacaaggtgcctccagtaatctcatcccactgcttccctctttcccattttatttaccaggataacattttacgtttgctatttcctttcactacagagaaaaatgcttcttttcagggacttgaaaacatagactcctttttgctcatcccttccttttccattccagcagaatgygttcctgcagtagcccgaggggcctcagtcctttctaaagcatgtttaaggcattcatctaccttgtcaaagtacctcagtatgaagtacagcccaggaaccaccaaaccacatcaaggtccattttatctccttcagagcagagtcagcacctgctcccaacaaacagcatcaccttgcaaagtcagaggattactcgaccaagaaatctttgaccttttacaactagattttcaatccgtatattgatccaaagggctgcaaagcagaggcagacactttagaarctgacattaaaa

SEQ ID NO: 62219 - DNA, 600 bp, Chicken  19866894323947_2
tccagcagaatgygttcctgcagtagcccgaggggcctcagtcctttctaaagcatgtttaaggcattcatctaccttgtcaaagtacctcagtatgaagtacagcccaggaaccaccaaaccacatcaaggtccattttatctccttcagagcagagtcagcacctgctcccaacaaacagcatcaccttgcaaagtcagaggattactcgaccaagaaatctttgaccttttacaactagattttcaatccgtatattgatccaaagggctgcaaagcagaggcagacactttagaarctgacattaaaaatgggggaattttacaaagttagctagttggtagtttgatcttaaagatcctgtaggacaaggaggagggaaggtatctagggaaaagacggtacactcatgtgatggccactcctgtgcagcaggaagcgatgacttctccctattcctggttaccaggaaaggacccagatgagctatacagacagcttggtcatgagcttggtgaagacagccatgacatgccagagaggttggtgcatctccttttgggaaaggcttgagcagctgctcttattaagagcggta

SEQ ID NO: 62220 - DNA, 600 bp, Chicken  19866894323953_1
tgctgctctttagattcacatccagtttattctacactgacttgccgttgcgcatagccagtccctgcaggagaagctgcccatgcttcacatggttggaatgggagtgaatggggcgtgagatccatgggttgtgcaccacggattgaatgagcccagaggacaccaagaggatgtgctaatgcatctcaggatgctctgtatgcaggtgcgttgaacactcgtatccctgcaggaagccttcaggatgttagaaggatcaggaacaactctgcagtctttgcttaggaacataattcrtatgcactaatggctaggtctgaaagtttctcttaagaagatcagtttgaccttgtctttcactcagctgtaagggctggctgctgggctctgagaagtcagtgtactgtctgattctagaagtcctgaaggtgggaaagctggtatcaaacatccctgctcttgtcagctccttctcagctcgacacctttcccttcctctgccttgggatcagaggtgagtccccaacacaggacataaagccaagtctgccactggggactgggagctgggctagggggaatgctcccctctgcttc

SEQ ID NO: 62221 - DNA, 600 bp, Chicken  19866894323965_1
gagaccacgctgtattagtgaagaacccactgttgatcttgcagcaggtaatgaaaataaggtcaagttactaaccaagaataccacagtagacatgttataaacgaccaaaatgagttggcaagaaacacatcaaactctgaaagaaacaattctgtaagtactttagtagcaagaagatgatgaaaaaatgctagtccaccatgcaacacggtgcgaaaactagagggatgcacggacatagctaatgctcattacaccttttttgcattcatctttataccaggtgcttagaagaayaaataccatgaatagaacggtaacatctcagccttgaataagcaaggagctgaatacttaattgtattcaaattggactgacgtgatggaccagactcctaaatgccttgttgtgaatctacatcagaaatgttaaaagacagatttcggaatccatggaacactgaagagggtctatgacaattgtagaaaaatataatttagctttacttatacagcacacaggtatcacctgaatgcaaaaagagcaataagcatagctattgacttacagaccaagccagcttcaggacatctctg

SEQ ID NO: 62222 - DNA, 600 bp, Chicken  19866894323966_1
gttgtgatcaactgttctatgttcatgttgagggcaatgatgaatggtgtcttccagggttccatcttgagactagtgctccttgacatctttatcagtgacctagacagtgagattgagaggactctcagctgattgatgctgtagatacaacagaagagatgccatccaaagggatctggacaagcctgaaaagtgggcctgggtttacctaaagaggtccaacaagaccaagtccaagatgttacacttgggtcagggcaatcccagatacgcatacagactgggagaaaaacttaktgagaaccacccttgcagagaaggactcatgggttctagtggatgaaaaagttgacatgagacaacactgtgcacttgcagcctggaagaccaacagtatctttgcctgaatcaacagcagcagggtggcagcagggcagagaggtgactgtccccttctgcagaggatacagctggaaggggctggcagcaaatgctccaggtggccatgaaattgctcactgctctgcctgtactgccccgggtctgccaggggttgtagcttgctgcccagggtcttgtcttctctctgacatactg

SEQ ID NO: 62223 - DNA, 600 bp, Chicken  19866894323969_1
gtgtaactagctaaatacagggaagctacgtgcaagaagtaatgactgaagggtagcaggtcatctgcacagacccccagtctccagggaatgttctttttgcagagatggtttcgccacacaggctttttgcagctcttctttgtcttgggaagtgtgaacatgctgatgtgttgcgcgcaatccagctttttactcttactaaaggctcttaaaaacactctgcagaaaataaggtggcacggtgttagtgacctttgttctgaagacaggatttcccagttttgaggtaattgcccwgttctggaagctcctgagaggcttgttgtgtgctgcagtggcatttctgcgcatgcactgttgctaattcacttgggatttgaggcaatgcctggaatggtctgaaattatttctttcggtctatagcttctttccaataaatacccacaacttattctaggttgagcagccttaggtcctccttctgggtcctcttgtaggtttcagcttttctgttgactgcagtaggaaatcttttaccttctgctgcagcttgtgaacccccttcctggttactgacttcgccagtgacaagctgg

SEQ ID NO: 62224 - DNA, 600 bp, Chicken  19866894323973_1
ttatatccttgtaactgcttcatcaacagaaactttctttaaagaagttgctttgtagtgtacttttatcagaagtaaatttctaatttggaaaaataccgtataaaacctgtattaagtgctccatgactctttctcatttacttaatttctgcaggaaaaaaaaatgttgtttctgcaggaaaatttctgcaggaaaaaaaaaaaaagtctgcaacagatttttcatttcagaatttaggaagatacttgcaagttttcttctatttcaaagactcttgttcataactgtcagcttawatttgagaatcatatggaaaagtaacccygtatttagtttctgactttaacattacttatctaaatacaattttctctttttgcatattaatctattccttgctaaagctgtagcttagagcaacagctttgaaatttttgaacctaccttttttttttttttttttttgtatattaatacataaagttgaacttaagttggatattctactaactgtgacaaactgctaaccataaaatatggaaaattttgaggatgctgagttgattgtcaagtgatgatgtatacacagaagttgc

SEQ ID NO: 62225 - DNA, 600 bp, Chicken  19866894323973_2
aaactttctttaaagaagttgctttgtagtgtacttttatcagaagtaaatttctaatttggaaaaataccgtataaaacctgtattaagtgctccatgactctttctcatttacttaatttctgcaggaaaaaaaaatgttgtttctgcaggaaaatttctgcaggaaaaaaaaaaaaagtctgcaacagatttttcatttcagaatttaggaagatacttgcaagttttcttctatttcaaagactcttgttcataactgtcagcttawatttgagaatcatatggaaaagtaacccygtatttagtttctgactttaacattacttatctaaatacaattttctctttttgcatattaatctattccttgctaaagctgtagcttagagcaacagctttgaaatttttgaacctaccttttttttttttttttttttgtatattaatacataaagttgaacttaagttggatattctactaactgtgacaaactgctaaccataaaatatggaaaattttgaggatgctgagttgattgtcaagtgatgatgtatacacagaagttgctctaaaagtaatgcctcctatttatttcc

SEQ ID NO: 62226 - DNA, 599 bp, Chicken  19866894323979_1
  misc_feature (1)..(77): n is any nucleotide
nnnnnnnnnnnnnnnnnnnnnnnnnnnnnnnnnnnnnnnnnnnnnnnnnnnnnnnnnnnnnnnnnnnnnnnnnnnnnaacttgatgtacaaattaggtattaatcaacctttccaatatgacgacttgccatcctggtaggcataaatggttctgtgagcagtgtgagcatagaggagcaagatcttacttttaagtgtaatgcctgaaaaaaggcaataaatacaagaggcagaagcagcatgaccaaaactgtagaagtataaatcacactgtggaatgaagcgcagtgattcacctrctacgctgggtgctgctgccctgcagacaatctgacagcacagcagaaagaaatgtaacgcactagaaataaatactcatcctcaactgacacaatgctatacattttgggttattatatttcttcttgaaattcagcagaaacyctgggcatacaaatcatccaagtatcaatacaaggtaaatgtgtgtgattaaggaaggagaaaggaacatcaacacagttgcaacccataaaagttaactattattttgtctcctttgcactagcagatggatccactttgacagttcactttg

SEQ ID NO: 62227 - DNA, 600 bp, Chicken  19866894323979_2
aatggttctgtgagcagtgtgagcatagaggagcaagatcttacttttaagtgtaatgcctgaaaaaaggcaataaatacaagaggcagaagcagcatgaccaaaactgtagaagtataaatcacactgtggaatgaagcgcagtgattcacctrctacgctgggtgctgctgccctgcagacaatctgacagcacagcagaaagaaatgtaacgcactagaaataaatactcatcctcaactgacacaatgctatacattttgggttattatatttcttcttgaaattcagcagaaacyctgggcatacaaatcatccaagtatcaatacaaggtaaatgtgtgtgattaaggaaggagaaaggaacatcaacacagttgcaacccataaaagttaactattattttgtctcctttgcactagcagatggatccactttgacagttcactttgtctttcattcatccttaggccttttgcttgtcattcactcacctttaggccttccctgtacattattggtcactttaaatattgctgattccattttgtgctacactgacatcagcatgagcagtaataaggttgaccaaagacaa

SEQ ID NO: 62228 - DNA, 599 bp, Chicken  19866894323996_1
  misc_feature (1)..(99): n is any nucleotide
nnnnnnnnnnnnnnnnnnnnnnnnnnnnnnnnnnnnnnnnnnnnnnnnnnnnnnnnnnnnnnnnnnnnnnnnnnnnnnnnnnnnnnnnnnnnnnnnnnngcttgctgccctcatggccgtcaatcaaactctcccagtgtcagggaaagtcacaaagaaacccaggaatggcccagtacacataggaacgtcccggccattgcctcccacaccacatatttggcagcacagtcctctatgaaccatactgcagcgctgttatccagatgttttgctctgccttgcaaattagtgcctgcygagtctcttgtggtttatcttacgttctgtcccagagggaaggccacrtattggaaaatgtggcaatgcttctctccgtaccaccagatgcagccaccacatccacgtcacttcaggggatgayggaggtctggaagctgcctcatcacagctgaggtttcatgtgaggtttgccagggtccagctgcacgccgccctgctgaatcactgccatccccctcctcccctctccatagctcagtgtctcttcccactctgtgggaataatccataataatcctttgtaatccgtgggagcc

SEQ ID NO: 62229 - DNA, 599 bp, Chicken  19866894323996_2
  misc_feature (1)..(51): n is any nucleotide
nnnnnnnnnnnnnnnnnnnnnnnnnnnnnnnnnnnnnnnnnnnnnnnnnnngcttgctgccctcatggccgtcaatcaaactctcccagtgtcagggaaagtcacaaagaaacccaggaatggcccagtacacataggaacgtcccggccattgcctcccacaccacatatttggcagcacagtcctctatgaaccatactgcagcgctgttatccagatgttttgctctgccttgcaaattagtgcctgcygagtctcttgtggtttatcttacgttctgtcccagagggaaggccacrtattggaaaatgtggcaatgcttctctccgtaccaccagatgcagccaccacatccacgtcacttcaggggatgayggaggtctggaagctgcctcatcacagctgaggtttcatgtgaggtttgccagggtccagctgcacgccgccctgctgaatcactgccatccccctcctcccctctccatagctcagtgtctcttcccactctgtgggaataatccataataatcctttgtaatccgtgggagcctggtacagatgcgggcttaaagctgcgaacacatggagcccaggggtc

SEQ ID NO: 62230 - DNA, 600 bp, Chicken  19866894323996_3
caaactctcccagtgtcagggaaagtcacaaagaaacccaggaatggcccagtacacataggaacgtcccggccattgcctcccacaccacatatttggcagcacagtcctctatgaaccatactgcagcgctgttatccagatgttttgctctgccttgcaaattagtgcctgcygagtctcttgtggtttatcttacgttctgtcccagagggaaggccacrtattggaaaatgtggcaatgcttctctccgtaccaccagatgcagccaccacatccacgtcacttcaggggatgayggaggtctggaagctgcctcatcacagctgaggtttcatgtgaggtttgccagggtccagctgcacgccgccctgctgaatcactgccatccccctcctcccctctccatagctcagtgtctcttcccactctgtgggaataatccataataatcctttgtaatccgtgggagcctggtacagatgcgggcttaaagctgcgaacacatggagcccaggggtcagacgtgtttgtcaggggaggcaggaggggacgtctggtactcgtactgaagccttgcacaaatgtggacacgtagg

SEQ ID NO: 62231 - DNA, 599 bp, Chicken  19866894324001_1
  misc_feature (1)..(35): n is any nucleotide
nnnnnnnnnnnnnnnnnnnnnnnnnnnnnnnnnnnctcttggtgtgcattcttcagtgtcgcttcccggttattaaatacaatttcttgctgtttttcccaagcgtctatttaaacgcattgcaggcctaatttagcttaatgcaggcagcaggctgtttgtcctacgcctgctctgtcacctgtcctttccctcacctcgctccctctgctctgtgcctgcacttcagcagtggggcagagccccccggaatgaacctctgtacagatggtggtgttaaaggacccaagggcttgaggrtatgaacaggctaatgctggagtcactgcgggttgttttttattatgattatttttatattttgccttgaaaaagtgatactttttagtctggacayaygtagactgtgtacgaygtgtaaaggatgagaaacttctgcctgcttgcatgactgaaaaaagatttaaagcctcaaggcacaaaggagcctttcaaatatgtgaacaccctcccccaaaatgcaagaggcagaaagcatgaagagctcagagctggattcctcgcgttggtctacttagtttataaaacaaagaataact

SEQ ID NO: 62232 - DNA, 600 bp, Chicken  19866894324001_2
cccaagcgtctatttaaacgcattgcaggcctaatttagcttaatgcaggcagcaggctgtttgtcctacgcctgctctgtcacctgtcctttccctcacctcgctccctctgctctgtgcctgcacttcagcagtggggcagagccccccggaatgaacctctgtacagatggtggtgttaaaggacccaagggcttgaggrtatgaacaggctaatgctggagtcactgcgggttgttttttattatgattatttttatattttgccttgaaaaagtgatactttttagtctggacayaygtagactgtgtacgaygtgtaaaggatgagaaacttctgcctgcttgcatgactgaaaaaagatttaaagcctcaaggcacaaaggagcctttcaaatatgtgaacaccctcccccaaaatgcaagaggcagaaagcatgaagagctcagagctggattcctcgcgttggtctacttagtttataaaacaaagaataacttggagttggtttcagtgcactgagcttactgcggtgtgaaagggatcctgctggagttagtggtgacttcccactgactccagtgcgtgtaagttttc

SEQ ID NO: 62233 - DNA, 600 bp, Chicken  19866894324001_3
caagcgtctatttaaacgcattgcaggcctaatttagcttaatgcaggcagcaggctgtttgtcctacgcctgctctgtcacctgtcctttccctcacctcgctccctctgctctgtgcctgcacttcagcagtggggcagagccccccggaatgaacctctgtacagatggtggtgttaaaggacccaagggcttgaggrtatgaacaggctaatgctggagtcactgcgggttgttttttattatgattatttttatattttgccttgaaaaagtgatactttttagtctggacayaygtagactgtgtacgaygtgtaaaggatgagaaacttctgcctgcttgcatgactgaaaaaagatttaaagcctcaaggcacaaaggagcctttcaaatatgtgaacaccctcccccaaaatgcaagaggcagaaagcatgaagagctcagagctggattcctcgcgttggtctacttagtttataaaacaaagaataacttggagttggtttcagtgcactgagcttactgcggtgtgaaagggatcctgctggagttagtggtgacttcccactgactccagtgcgtgtaagttttccc

SEQ ID NO: 62234 - DNA, 600 bp, Chicken  19866894324001_4
cgcattgcaggcctaatttagcttaatgcaggcagcaggctgtttgtcctacgcctgctctgtcacctgtcctttccctcacctcgctccctctgctctgtgcctgcacttcagcagtggggcagagccccccggaatgaacctctgtacagatggtggtgttaaaggacccaagggcttgaggrtatgaacaggctaatgctggagtcactgcgggttgttttttattatgattatttttatattttgccttgaaaaagtgatactttttagtctggacayaygtagactgtgtacgaygtgtaaaggatgagaaacttctgcctgcttgcatgactgaaaaaagatttaaagcctcaaggcacaaaggagcctttcaaatatgtgaacaccctcccccaaaatgcaagaggcagaaagcatgaagagctcagagctggattcctcgcgttggtctacttagtttataaaacaaagaataacttggagttggtttcagtgcactgagcttactgcggtgtgaaagggatcctgctggagttagtggtgacttcccactgactccagtgcgtgtaagttttccccctctgtttcttaaat

SEQ ID NO: 62235 - DNA, 600 bp, Chicken  19866894324001_5
aaacttctgcctgcttgcatgactgaaaaaagatttaaagcctcaaggcacaaaggagcctttcaaatatgtgaacaccctcccccaaaatgcaagaggcagaaagcatgaagagctcagagctggattcctcgcgttggtctacttagtttataaaacaaagaataacttggagttggtttcagtgcactgagcttactgcggtgtgaaagggatcctgctggagttagtggtgacttcccactgactccagtgcgtgtaagttttccccctctgtttcttaaataactaaagtagatrtcagaggggaaaatgctgctcctcatttgcaagtaggactatttggtgcatgcttacagctctgtgcagtagttgcacgtctgaaacgagtttggcaatgccaggaaaacaatctagtctaaaatctgcagtttcattgcttccacactcagcgtgcctcatcctttgtgctgccctgactcgcagggaaagtcacctcctttcgccagagccacgggcttgtgtttctgaatgttgcttattctgaaatggggttgtgcaaaaggccaagcccataagaaggttatagagcggctataa

SEQ ID NO: 62236 - DNA, 600 bp, Chicken  19866894324002_1
gaatttgggtgtgtgaaaaattcaaacttttacttttttaccattaggactttctgacttcaaacatttgggagactactaaaaacatacccagtcagctctgatgattacatctcatgtctggctacacattcactggatcagttgataaattcttatcacaattgtcaactcactgtatacttcaaacagcaaatgtttactctgtactttatctctgaagacaagaatgacatacagtgtcttttacatctgcttgatgattacgtctccagaaaatttcttaccttcataacattytgaaacttggaaatttgtattcatctgctaagtttcaaatgaaattttatgaggtttgaaaaagtacagccactttttcttcatctcagatcactggagttcagtgaaccgagaaaaaaaaaagtaacttaactgagatccctgcaatttccatcatgtagayagcatccagtcatcagatatcagttcgagtcctgcaggcagatgctagagcatgccttcctctcctccctccttcaggaacatgtagttgcaccacactgcggcagagtctattctgcttactttggcattaactca

SEQ ID NO: 62237 - DNA, 600 bp, Chicken  19866894324002_2
attgtcaactcactgtatacttcaaacagcaaatgtttactctgtactttatctctgaagacaagaatgacatacagtgtcttttacatctgcttgatgattacgtctccagaaaatttcttaccttcataacattytgaaacttggaaatttgtattcatctgctaagtttcaaatgaaattttatgaggtttgaaaaagtacagccactttttcttcatctcagatcactggagttcagtgaaccgagaaaaaaaaaagtaacttaactgagatccctgcaatttccatcatgtagayagcatccagtcatcagatatcagttcgagtcctgcaggcagatgctagagcatgccttcctctcctccctccttcaggaacatgtagttgcaccacactgcggcagagtctattctgcttactttggcattaactcagggaagccctgatatagcggttcacctgtaaatagctgatgcttttcatgcatccctgtcactctgcacagggactctgcactctacctacatcaagcacagcacctttatcttctacaggacaacctgtctttgtgacaaagaaacatttatatatatatat

SEQ ID NO: 62238 - DNA, 600 bp, Chicken  19866894324005_1
agaaatggcagtttctgtagacacggaaatgttatccctaaaactgtcaaatgagtaataggaggctaatactgtgtacacagtgcagcatcttgcttttgagcagaaaaataaccttcagcactgtgctgtatttaccaatatacaatagcgtatttactaacggagcctggcggaaacgtctgtattttcctttaacaaagggcactgatgagcaatgaagacagacttcaccaagcaggctgttcttcagccacgccatcaaccagctgtaagaaaggattcatcaaaggtgctccygacactcttctcaagtactgtgcttttaataaccccatttccactgcttcgtcaaagaaataacyggcctcaaaacggggcacgttagctctgacatctttttagtcaaacattattctgcgtgcagtcctcagacatttcctagggcttctctgttgctgtaacattcgctttgccagaaattaattctgttttcattgctataggctgaactccggatgaaactacagaagagtacgcaagatttaatcgaggcaagcaagactgggtttgcagtgacataaagcaaacaaacatttg

SEQ ID NO: 62239 - DNA, 600 bp, Chicken  19866894324005_2
ctaatactgtgtacacagtgcagcatcttgcttttgagcagaaaaataaccttcagcactgtgctgtatttaccaatatacaatagcgtatttactaacggagcctggcggaaacgtctgtattttcctttaacaaagggcactgatgagcaatgaagacagacttcaccaagcaggctgttcttcagccacgccatcaaccagctgtaagaaaggattcatcaaaggtgctccygacactcttctcaagtactgtgcttttaataaccccatttccactgcttcgtcaaagaaataacyggcctcaaaacggggcacgttagctctgacatctttttagtcaaacattattctgcgtgcagtcctcagacatttcctagggcttctctgttgctgtaacattcgctttgccagaaattaattctgttttcattgctataggctgaactccggatgaaactacagaagagtacgcaagatttaatcgaggcaagcaagactgggtttgcagtgacataaagcaaacaaacatttgcagtagaagatgtcaatggggggtgtacaagccctgaagtacgtgtgtttgaacatttctctggt

SEQ ID NO: 62240 - DNA, 520 bp, Chicken  19866894324006_1
agacattgcccctgccccatagggcacagtcctattgctccccatcctgcagagctgtgtctgagctctacagcctcactctgctgccacggggtgcccagggctgcgtgtgccccatatccatgctccgttaccatcagtctggtggagcccaacatggctcattttgcagagaaatggcattggctctcagccttggtgcatgtcgaggtgttttgtgactgctgctgattggaaatgaggagcgagtgtgtccccttggtgctcattgcagagcggaggaggggaaatgggtgttcyccttgggcttctctgggggggaggacagcaggatggaggggagccaggggaggaagtgattcatacctttcattctccctccagttctcatgatcaccttttatttgagctgcataaaggccccagctgtgatgagcacagcccaagtgagcgatgagcatcctcaccgtggggaaactgaggcacgcgctgggggatgtgtgcctgcagctttccatgc

SEQ ID NO: 62241 - DNA, 509 bp, Chicken  19866894324010_1
tttcagctgaaacaattcatttcccataattagatcttattgtaaaaccagagacaagatttggttttgatatcatcttatgtaactgcataattgcattggtcatatgggctttgttggcacatcagaagtgagacttttagtcacattggaaaacacattagttgctcaacttgaatttgtcacacatacatctgaaatttcagattctggcagtctgatatcagctgtggtctcaaattttaatgagatctggatttagtgaaaacatccacaaaggcaattcaaactgcaattgcrttcagctttttgaaaatcactgagttttgagaatctgagatctgtttgttttaaatgctgtagatgatgtcttgattaaggaaggcgcagaaccaaaacttaggactaaacatggggaaagatgagaatgaatataaaatgcaaaactaagttatgtaaagtttagccaggatacttgagtgaaatgtttcacagaactttatttatag

SEQ ID NO: 62242 - DNA, 600 bp, Chicken  19866894324014_1
gagaaaataatgttgagaccagctgggctattcacatgactaccaagcctttcctttgttaccacttatcaaacagatatcttcatttatgatttaagttcaaactaccctttctaaacgaggaaagagatgtatttacctgaaaaacccagagccacaaggtccttgaaacaattcttcttattcagaagaggcggccaaagagaactgagtgaggtctgaatatcaaatcaagcataacacaaacaaaggaaaaggaaaagaaaaaagaaaaacacagtgctggcctggagtactccrggttgtgttacatacaaggccagcatgagagaaaacacacagggcgtcaaaattcagagtaaatcctaatgactcacccgatatgctctcctggcttcctcagctcagagacacgcagggattttaggctccaaagaagcctttgaacacgccccaggggcaatgggatataaaagtagtccagaaagacagctgggaaacatggcaagaaagtgaagcgggccatctcggaagggctcatttccatcagataaacatgggatatcaaagcaggcatgggagggcctcaatgggccaccc

SEQ ID NO: 62243 - DNA, 600 bp, Chicken  19866894324019_1
aggagtgtgagggccagcgacagggaaacctcggactgggcaagccttgtgcaaagcggagaacttttttccctgtgccaatggtgtgccagccctgctgctgtggctgctggccaaagcagcagatactgctatcaaacaaacaaacctgaggggatcggttatgatggagcagagttcacctgcagaaaagatcaggttcaacagttaagagtaacatgagatgagggcagggcaagcagcaaagtgtggagaggaagccactgctggtcatgggggagggaagcaagtggcacattygttccactgtcctcrggcmgtgatgacgtgtgccaccatgatgggcactgaaggcaacaccaagacaggagacagcaccaagatactaactttcagcagctcccagtgaagtytgtaagactatgaatgraaagcataaacattcctgcaaaaacagctgcccaacttaactgtttcaggggccaggatttctctgtacaacagagatgctgtagataggcatggcatgaaggtaatccttggtatttagcacacatctccacactgcagatatcgatgtgttctcaccctctgaactat

SEQ ID NO: 62244 - DNA, 600 bp, Chicken  19866894324019_2
agcgacagggaaacctcggactgggcaagccttgtgcaaagcggagaacttttttccctgtgccaatggtgtgccagccctgctgctgtggctgctggccaaagcagcagatactgctatcaaacaaacaaacctgaggggatcggttatgatggagcagagttcacctgcagaaaagatcaggttcaacagttaagagtaacatgagatgagggcagggcaagcagcaaagtgtggagaggaagccactgctggtcatgggggagggaagcaagtggcacattygttccactgtcctcrggcmgtgatgacgtgtgccaccatgatgggcactgaaggcaacaccaagacaggagacagcaccaagatactaactttcagcagctcccagtgaagtytgtaagactatgaatgraaagcataaacattcctgcaaaaacagctgcccaacttaactgtttcaggggccaggatttctctgtacaacagagatgctgtagataggcatggcatgaaggtaatccttggtatttagcacacatctccacactgcagatatcgatgtgttctcaccctctgaactatgcagcacttattttt

SEQ ID NO: 62245 - DNA, 600 bp, Chicken  19866894324019_3
acagggaaacctcggactgggcaagccttgtgcaaagcggagaacttttttccctgtgccaatggtgtgccagccctgctgctgtggctgctggccaaagcagcagatactgctatcaaacaaacaaacctgaggggatcggttatgatggagcagagttcacctgcagaaaagatcaggttcaacagttaagagtaacatgagatgagggcagggcaagcagcaaagtgtggagaggaagccactgctggtcatgggggagggaagcaagtggcacattygttccactgtcctcrggcmgtgatgacgtgtgccaccatgatgggcactgaaggcaacaccaagacaggagacagcaccaagatactaactttcagcagctcccagtgaagtytgtaagactatgaatgraaagcataaacattcctgcaaaaacagctgcccaacttaactgtttcaggggccaggatttctctgtacaacagagatgctgtagataggcatggcatgaaggtaatccttggtatttagcacacatctccacactgcagatatcgatgtgttctcaccctctgaactatgcagcacttatttttcaca

SEQ ID NO: 62246 - DNA, 600 bp, Chicken  19866894324019_4
ccaaagcagcagatactgctatcaaacaaacaaacctgaggggatcggttatgatggagcagagttcacctgcagaaaagatcaggttcaacagttaagagtaacatgagatgagggcagggcaagcagcaaagtgtggagaggaagccactgctggtcatgggggagggaagcaagtggcacattygttccactgtcctcrggcmgtgatgacgtgtgccaccatgatgggcactgaaggcaacaccaagacaggagacagcaccaagatactaactttcagcagctcccagtgaagtytgtaagactatgaatgraaagcataaacattcctgcaaaaacagctgcccaacttaactgtttcaggggccaggatttctctgtacaacagagatgctgtagataggcatggcatgaaggtaatccttggtatttagcacacatctccacactgcagatatcgatgtgttctcaccctctgaactatgcagcacttatttttcacatgagtaaactagctttaatattggctttgaatgcagataaatacactgaagggtatagatttctctctgcccccataatactgcatgcatctct

SEQ ID NO: 62247 - DNA, 600 bp, Chicken  19866894324019_5
gctatcaaacaaacaaacctgaggggatcggttatgatggagcagagttcacctgcagaaaagatcaggttcaacagttaagagtaacatgagatgagggcagggcaagcagcaaagtgtggagaggaagccactgctggtcatgggggagggaagcaagtggcacattygttccactgtcctcrggcmgtgatgacgtgtgccaccatgatgggcactgaaggcaacaccaagacaggagacagcaccaagatactaactttcagcagctcccagtgaagtytgtaagactatgaatgraaagcataaacattcctgcaaaaacagctgcccaacttaactgtttcaggggccaggatttctctgtacaacagagatgctgtagataggcatggcatgaaggtaatccttggtatttagcacacatctccacactgcagatatcgatgtgttctcaccctctgaactatgcagcacttatttttcacatgagtaaactagctttaatattggctttgaatgcagataaatacactgaagggtatagatttctctctgcccccataatactgcatgcatctctggcctggatctctggct

SEQ ID NO: 62248 - DNA, 600 bp, Chicken  19866894324022_1
cagctaactgagtttagtgctaccactcctggaataaggtgtgataccatgtttgaatcagttgcctgccctagccctggaggaaaaattatgtatttgaagccactacgttaaaatgtcgctttcttatacaatactgttccccggacagctgtaggttccaacagcttactttatgggaaaaccactttttaaaattttccttaatgttttggagtttatccagttagaagaacctcaggtttccaaactgaaccgagagatcgaatgctgagcacatcatcttgatgaccaccgcascttgcatgtgcacaacttgattctcagactgcggattgaattctgtgctgataggcgatcaatacacgctagaaataaatcagttttctatttttgaaggggaaaagccttttaagggctgcagcatccctctctgccattctggtagcatcccaggtagaattacctgggatttttgagaacgcatagccagggtgagcaatagcagaggccagcttaaggtaggaggcctgtgtctggttcttgcactttcaagccagggcacaccattgggatcagtggttaaaacaaacatgggct

SEQ ID NO: 62249 - DNA, 600 bp, Chicken  19866894324025_1
caatcattggtattgatcacctgaagcaactgggaaggggttgtggataaacagaggtaaataaattattcacacctatatattgctgcattttttggaggctcagaaatggagaataacagcaaatcttgttaatgattgactgatcttcacttgttggctaggtaatggtccctcagttgcagtgtaagggaagtctggaaaatcaaacatatcaaagtcacactcatttctatgttccccagagaagggaaatgcataacaagtttgcacttatcctataagtaagattcttgaagrgctggtatcagctcctctctcaggcttgggctcctggtgcaggctgggttagggtgagggattttgattagaattaagatttcaggaaaagagaaatttctgaattaggctgaatgctgtgttctatgtggagtggaactgtaggataagtgaggttgtcagcagtgatgaatgacaactatttgtttttcttctggattctgttctcttgggtgtcattaaagctagtgataggattagggatggagaaagaatgtatttatgaattgggtttagtgctgcagtactgcaggatctcca

SEQ ID NO: 62250 - DNA, 591 bp, Chicken  19866894324025_2
cctctctcaggcttgggctcctggtgcaggctgggttagggtgagggattttgattagaattaagatttcaggaaaagagaaatttctgaattaggctgaatgctgtgttctatgtggagtggaactgtaggataagtgaggttgtcagcagtgatgaatgacaactatttgtttttcttctggattctgttctcttgggtgtcattaaagctagtgataggattagggatggagaaagaatgtatttatgaattgggtttagtgctgcagtactgcaggatctccaaatttagggtaarcgtgarcacaggtatggaagaatacataatgtttggttttcatcagggatatataatgtggatgcagatgagggaaatagctaggttaagctatatttggaaaagaagagttaggtttattccaacatgctcctagtccatgaaatctggaataaggtttaaggtcagctgggataagttgcttgtgtttagattgcctgtcatagttatgtctgtagttaaggtaaagaaaagcttttatgagtttgcttcaggtaggatatggtagtctgaaaatggatgtatgtagtt

SEQ ID NO: 62251 - DNA, 585 bp, Chicken  19866894324025_3
tcaggcttgggctcctggtgcaggctgggttagggtgagggattttgattagaattaagatttcaggaaaagagaaatttctgaattaggctgaatgctgtgttctatgtggagtggaactgtaggataagtgaggttgtcagcagtgatgaatgacaactatttgtttttcttctggattctgttctcttgggtgtcattaaagctagtgataggattagggatggagaaagaatgtatttatgaattgggtttagtgctgcagtactgcaggatctccaaatttagggtaarcgtgarcacaggtatggaagaatacataatgtttggttttcatcagggatatataatgtggatgcagatgagggaaatagctaggttaagctatatttggaaaagaagagttaggtttattccaacatgctcctagtccatgaaatctggaataaggtttaaggtcagctgggataagttgcttgtgtttagattgcctgtcatagttatgtctgtagttaaggtaaagaaaagcttttatgagtttgcttcaggtaggatatggtagtctgaaaatggatgtatgtagtt

SEQ ID NO: 62252 - DNA, 458 bp, Chicken  19866894324030_1
atgcagcctggtctgctgggaccgaagcgccggcgctgggatgtcagtagctttccacttcagctccatgaacacagtgcctgcacacaactgtctgagcatctctactctctgaagatctctgtgatttcagccgcttgctttgacgatataaataatacattctattcttagctgtacagcgatatgtactcaaatcttcatctaaattctgcagaattttccatttcagatgtttgggtgtccaggagcagactgctgctcatcccgtgcatgacattattcctttgatacacgatytgaaaattcaattaccagaccaattactgatttttctgaaatttacaaggaaaacattaaagtttgattaagtcagaattcccactgggctgatcagcaatgagaccaaaattaaattgggtttttaagagctttaccacattgcaacgtgtgagaaa

SEQ ID NO: 62253 - DNA, 558 bp, Chicken  19866894324034_1
tttctgctccagatttaccattatgcatggtgacacctttgctgtagcaactggctctgtgactgtgttgcacatacatggagaagcacaaagctaaggttgctctgtgtgcatgagtctgtgcgtgtatgcgtgcaaattacacaaaagacagtttcctattagcttcactttacagcttctgatgttcactgtgacaaatttcagtaagaggggattttgtatgctgatttatttgaggccaacagtgtgacataaatatattgtatgttttttgagtggtttgctttttatgacttyttaaagagatcctgacctgggaatgcaaaatgaaatgagaagaatgattcatctctagctcttgaagtatatccgaaattatcaaaagctttagttgtagctgaacagtattaaaacttatagcagaaaggtgaaatctgacaaacacatggaacacaactgcttgtagcacagtggtatttacaaggtgtagtgtatggggaagaggggcaagggcttacagctccgtggcaaggatgtttcttgtgttgtgattat

SEQ ID NO: 62254 - DNA, 599 bp, Chicken  19866894324036_1
  misc_feature (1)..(209): n is any nucleotide
nnnnnnnnnnnnnnnnnnnnnnnnnnnnnnnnnnnnnnnnnnnnnnnnnnnnnnnnnnnnnnnnnnnnnnnnnnnnnnnnnnnnnnnnnnnnnnnnnnnnnnnnnnnnnnnnnnnnnnnnnnnnnnnnnnnnnnnnnnnnnnnnnnnnnnnnnnnnnnnnnnnnnnnnnnnnnnnnnnnnnnnnnnnnnnnnnnnnnnnnnnnnnnnnncccaaacacacctggaatcctgctccaccacagagacctgcagcagccttcccccggagctttaccacatctcacagtgcaatgcagggasttttctctcaaaagcccctctgtgcccttctatttcaacctgaatttactaaatctacccttccgcatagacattacacaggggctcaacccacrcctgcaagcaagcacgcttaccatcatgcagaaccaagctgcctgataaatacaactttaatttccagaataaccaactatgctggagcttctgttgccagttctgtgtgctgcattaaatcctgccaaacgaggagctgggcatggtgtcacgtatccccaccatttactgatgagctttattacgcagttgtgactaatctt

SEQ ID NO: 62255 - DNA, 599 bp, Chicken  19866894324036_2
  misc_feature (1)..(114): n is any nucleotide
nnnnnnnnnnnnnnnnnnnnnnnnnnnnnnnnnnnnnnnnnnnnnnnnnnnnnnnnnnnnnnnnnnnnnnnnnnnnnnnnnnnnnnnnnnnnnnnnnnnnnnnnnnnnnnnnnncccaaacacacctggaatcctgctccaccacagagacctgcagcagccttcccccggagctttaccacatctcacagtgcaatgcagggasttttctctcaaaagcccctctgtgcccttctatttcaacctgaatttactaaatctacccttccgcatagacattacacaggggctcaacccacrcctgcaagcaagcacgcttaccatcatgcagaaccaagctgcctgataaatacaactttaatttccagaataaccaactatgctggagcttctgttgccagttctgtgtgctgcattaaatcctgccaaacgaggagctgggcatggtgtcacgtatccccaccatttactgatgagctttattacgcagttgtgactaatctttggtgcattcttcacgtataagctagcctacagaacgtgaccttttaatagmatcctaataaaatggttgctcctacatatagaaacatttatgg

SEQ ID NO: 62256 - DNA, 600 bp, Chicken  19866894324036_3
aatctacccttccgcatagacattacacaggggctcaacccacrcctgcaagcaagcacgcttaccatcatgcagaaccaagctgcctgataaatacaactttaatttccagaataaccaactatgctggagcttctgttgccagttctgtgtgctgcattaaatcctgccaaacgaggagctgggcatggtgtcacgtatccccaccatttactgatgagctttattacgcagttgtgactaatctttggtgcattcttcacgtataagctagcctacagaacgtgaccttttaatagmatcctaataaaatggttgctcctacatatagaaacatttatggaaacaagcacaacggatacctggcgtgttgttcctgccagaaatgcaaacatcacttaaatcatatacctacaatcatgatgcagaagttatccatttattttaaagctaggaaaatgagggacagactaagaaacatcactaatattagatggtgggcatgagggaagccactttccagtccacatccaaatcattacaacaccctactgcagtgccagtgggagctatactgctttgtttatagcttgtaacagc

SEQ ID NO: 62257 - DNA, 600 bp, Chicken  19866894324037_1
tgtgatcctaaagaatgtggcacccacaagcagacacatggctttgatatttgtattttatccaaagccctctaatttagaatgccgtgtgtcaccagactaaaccaaatgtctcctgcctctgcccactcctcttccctgcagcagataactgctcaagaagttgtcagagaagctgtttgggaaagcctcccttgccttcttaaaaaacatgttgtttgctgactgccaaagagccaaaggagaaaaactcgaagagagacccggcacaagccctaagaaacactgagctctatagamagcccagcagcttgtgaatcataagcaagactaaatcgtcagcttgggcttagaataatggtatccttggtagtggcacagtggaagaatcaatacattcagacgcaacaaaacagttttgaaaaacgaatgtattctaagcactgacttgaggctgacacatacagtagacaagtcttctgtcagtgaactctattataattttatagcctgccccttcctttcatttctgcagcttgccagtgcttgcagagaagtctgtgatgctcagtttccctagcctgagcagtcctgttgact

SEQ ID NO: 62258 - DNA, 482 bp, Chicken  19866894324041_1
ggcttatcaccagtgcctaatactggatttgatgtgggaaggggttgtccttgtaagtgacacagaagagaacgctgtcattttaggaaagagcagaagaaaatctcagattggtcccagagaatttggggaaggcttctccagcaaggtaacacagacaatagcccagcttaagtgcctctataccaatgtttgcagcatgtctctcatgtccctgaacctccaggtgggggtcggagcagcaatatccctcccattgtaagagaagagcaagtctgaggccacctcatgaggctgaaygtatacaagtctatggggccaaatgacatgcgttctagggtcctgaaggaactgactgctgtggctgccaagtcactctccatcatacttgaaaaatcatggctgtcaggcaaagtgcctggtaactgaaaaaagggaaacataactcccatttttaagaaaggagaaaagtaagacccagg

SEQ ID NO: 62259 - DNA, 600 bp, Chicken  19866894324046_1
tttcctttatctgttctctttttttgctgttgtttataaagaaggaagttctgaacccacccctccccgcaagaagcactgataataacgtttcaaaatgtcaatgtgaatgtttgcagaaatgaagcaacaacaggatggatttatgcttgcacaaagcacatcaggtacacgcagtgctgcccttccactcagagcagccaggggagtgagggctgggccacaaagccaatgtgatgccttgctggatgaaaggcctgcaggaagctcagctgcagctcccaggaggagccgggagaygctctgcctggggccattaaaacacggtgtaatttgttgtcatttaaaccccgctatttaattcttataaagatggtgacctcacattgaaacggccatcagataacaacaaccacactgctccctgtgcaaaaggagcagccaggaaggctcagaaaacgctcctgcttgtttccttggggccgtcaccggtctgcagcacagcccaaagaaaacaggaactcatgcagtaggtgggaacaaaaccctgtgctgtcagggatatgggctcacccctctgagcaaagaggagctgtgcca

SEQ ID NO: 62260 - DNA, 599 bp, Chicken  19866894324047_1
  misc_feature (1)..(62): n is any nucleotide
nnnnnnnnnnnnnnnnnnnnnnnnnnnnnnnnnnnnnnnnnnnnnnnnnnnnnnnnnnnnnntcaatggcagctggcctgcttctcacctactgacgtgggagatcaggacggcacatataataacagcagcgttaatcacgcaatggaggcaaatggggatattctcaatggcggtggcattgctgtggcttccccagggcaccgtggtctcccacagccacagcagcccccggggaggtgagcggtgccctgagaggtggggaacggtctcacaaagggccgctgtgcggtgtctgcyggggccgccggcagcgggagtacatcaaaggcagtcctggagaaggaacctttctttgctgctttgcctttttatattaggaaaggtcatttgtgaaccgggcgtgccaaaaagggcccttccccgagaagtttactgttgttattttttactttctgattacagtaacttgcttatcccccaaacagaccgaagaacaataaacaaatacaaaaagaaaargaacagctcatcaataacaaagagctgcgttttaaagctttgagtgtacaggctctcacatctccctccaagcaaag

SEQ ID NO: 62261 - DNA, 600 bp, Chicken  19866894324047_2
cagcagcccccggggaggtgagcggtgccctgagaggtggggaacggtctcacaaagggccgctgtgcggtgtctgcyggggccgccggcagcgggagtacatcaaaggcagtcctggagaaggaacctttctttgctgctttgcctttttatattaggaaaggtcatttgtgaaccgggcgtgccaaaaagggcccttccccgagaagtttactgttgttattttttactttctgattacagtaacttgcttatcccccaaacagaccgaagaacaataaacaaatacaaaaagaaaargaacagctcatcaataacaaagagctgcgttttaaagctttgagtgtacaggctctcacatctccctccaagcaaagcaggagccccgcagagaaaggaatccaagagatacgaaaattataaagatagtgaaaacaatgtttggttgggaggtttcaacttgctgcgtagagctgggctttgcagtgcagcgcaccgagggacgcagctttccccccgctgctgtgggctgtgaatgcagggggcgaggggtcaatgcgaaatgccatcgtccagctgaaggcagaaaggctcagctct

SEQ ID NO: 62262 - DNA, 600 bp, Chicken  19866894324048_1
ttaggtgcagtttgagtacgtggtgaagggtaatatcatctactgttcatgtcccttgcaagttctcagctggtagctgccaagaaaatagtgaactttggttcagatgcactttggaacaattggtaagcaaatagagtgcttcattacattggcttttgtttctttggctgttggttggaagacgactgttcctctaatactaactagactctataccagttgtgagcctgtcagacagttccagcaaaactagagttggctgaactcttttgttagactttgaaaccagactgggawatgtatgcagtctataacaaccagtgaactgaattggctttttaaagtatttaattgaagttgagttgattatttccaggacrtttcatgtccaagaacagtttctgaagtcttctcaaaagcactgtggtgtggtggttatttgttatgctaatattgctctttaagtcattttacaattattatttaatttgatgtccagtgagtaagtacaattatcctgactgtatacagttatcctcagtctacccatctgcagagtttgtttcccgaaggctatgcatggagttcatgtcaaag

SEQ ID NO: 62263 - DNA, 600 bp, Chicken  19866894324048_2
gaaaatagtgaactttggttcagatgcactttggaacaattggtaagcaaatagagtgcttcattacattggcttttgtttctttggctgttggttggaagacgactgttcctctaatactaactagactctataccagttgtgagcctgtcagacagttccagcaaaactagagttggctgaactcttttgttagactttgaaaccagactgggawatgtatgcagtctataacaaccagtgaactgaattggctttttaaagtatttaattgaagttgagttgattatttccaggacrtttcatgtccaagaacagtttctgaagtcttctcaaaagcactgtggtgtggtggttatttgttatgctaatattgctctttaagtcattttacaattattatttaatttgatgtccagtgagtaagtacaattatcctgactgtatacagttatcctcagtctacccatctgcagagtttgtttcccgaaggctatgcatggagttcatgtcaaagcctagaatgaaatgttagatccctgttcctgcaattaggccatacgctgttctgtatagcaaaataattcatgactcagccac

SEQ ID NO: 62264 - DNA, 600 bp, Chicken  19866894324066_1
gtctcaggatttcatagaatcatgcaatcgcagaatccttagaattggaagggacctctaaaggccagctagtccaattcccctgcagtgcacggggacgccacagctagatcaggctgcccagggcctgacccagcctggccttgaggggatggggcatccccaggatggggcatcaatcacatcactgggcaacctgttccagtgcctcaccaccctcactggaaaaggccttttccttatatccaacctaaatctaccctctttgagcttgatttctgttcttacattgcaggcaaktgctttcgctggctatccaggctaactgctgcttctgcactgcacccttctggttttgaccagatatttcattcagaccccgaggaatccaggcagtaacaaacaccacccaaacttctagcagtaaataaccggttcaatttcagcgagtcagcagtttctgtcagacacacaatgtgatcaggaaatccctgacctgatctaaaccctacgaaagtttgggtcaatgcgtcgatattcttcatcacagggttgtaaatcatcattttactgcagacactgaaaaattctgctctcctg

SEQ ID NO: 62265 - DNA, 599 bp, Chicken  19866894324074_1
  misc_feature (1)..(17): n is any nucleotide
nnnnnnnnnnnnnnnnnctcctggttcctgatttctaagtcaattaactgaactgtcatttactcctatttgcaattcacttaagaatggaaaaagtttcaggatgaaatacagcatttttgttctttatcatcccaacagagaaactcgataactaactggtttgccatttaaacctagcagtataactggcagaatgctgaattgcatttatttatgtatatacacacacacactctctcttcaacctctgtgggcaggtacctgccttggaaatctcttaagcaggcagaccaaatraacttcaatacaacaacataataactttgcagctcatgaattgatttcagtactattacacctgcctcatcagcagagcccctgtctaaggaaaggatttgtgtgtctccctgtgcatgcgtgtgtgagtgagttttactacagcagtagtaggacacacaaatctagttttaaaagtattatctttagagtacagagatcacattttatggcagtaaggttaagagaagaaggaatatyttatgaataaggtgaaccagaacttcagaggttcaggttcaattcytcactctgccaga

SEQ ID NO: 62266 - DNA, 600 bp, Chicken  19866894324074_2
tcttcaacctctgtgggcaggtacctgccttggaaatctcttaagcaggcagaccaaatraacttcaatacaacaacataataactttgcagctcatgaattgatttcagtactattacacctgcctcatcagcagagcccctgtctaaggaaaggatttgtgtgtctccctgtgcatgcgtgtgtgagtgagttttactacagcagtagtaggacacacaaatctagttttaaaagtattatctttagagtacagagatcacattttatggcagtaaggttaagagaagaaggaatatyttatgaataaggtgaaccagaacttcagaggttcaggttcaattcytcactctgccagaggctacttctgtgacctcagacaactcgcagaagcagttgcttaactgcttaagtcatccttcayctgtcctagcacagagattacaaatgctttacaccagggtcccagaggtgctgtgtgggatgcttttctacactgggggggagggaggaacaaaaaaaacccaccagttcagctctgatttcactttgcaacattggaacttcactggcacataaatacctgaataataacacttt

SEQ ID NO: 62267 - DNA, 600 bp, Chicken  19866894324074_3
aggcagaccaaatraacttcaatacaacaacataataactttgcagctcatgaattgatttcagtactattacacctgcctcatcagcagagcccctgtctaaggaaaggatttgtgtgtctccctgtgcatgcgtgtgtgagtgagttttactacagcagtagtaggacacacaaatctagttttaaaagtattatctttagagtacagagatcacattttatggcagtaaggttaagagaagaaggaatatyttatgaataaggtgaaccagaacttcagaggttcaggttcaattcytcactctgccagaggctacttctgtgacctcagacaactcgcagaagcagttgcttaactgcttaagtcatccttcayctgtcctagcacagagattacaaatgctttacaccagggtcccagaggtgctgtgtgggatgcttttctacactgggggggagggaggaacaaaaaaaacccaccagttcagctctgatttcactttgcaacattggaacttcactggcacataaatacctgaataataacacttttacccatgaagtccagaaccgttgtatcacacacatcccagttctg

SEQ ID NO: 62268 - DNA, 600 bp, Chicken  19866894324074_4
cctcatcagcagagcccctgtctaaggaaaggatttgtgtgtctccctgtgcatgcgtgtgtgagtgagttttactacagcagtagtaggacacacaaatctagttttaaaagtattatctttagagtacagagatcacattttatggcagtaaggttaagagaagaaggaatatyttatgaataaggtgaaccagaacttcagaggttcaggttcaattcytcactctgccagaggctacttctgtgacctcagacaactcgcagaagcagttgcttaactgcttaagtcatccttcayctgtcctagcacagagattacaaatgctttacaccagggtcccagaggtgctgtgtgggatgcttttctacactgggggggagggaggaacaaaaaaaacccaccagttcagctctgatttcactttgcaacattggaacttcactggcacataaatacctgaataataacacttttacccatgaagtccagaaccgttgtatcacacacatcccagttctgagcagtgtcagagaacgcacattacctcatattaaacatggaattacaaggggaaatgaaggtgggcgtttgaggaaa

SEQ ID NO: 62269 - DNA, 599 bp, Chicken  19866894324079_1
  misc_feature (1)..(107): n is any nucleotide
nnnnnnnnnnnnnnnnnnnnnnnnnnnnnnnnnnnnnnnnnnnnnnnnnnnnnnnnnnnnnnnnnnnnnnnnnnnnnnnnnnnnnnnnnnnnnnnnnnnnnnnnnnncatgcagcactttatccttaacttgtgggcttgggcaccaatgcagtatggtgaaggagtgcgtacaaataaagaactttagctgggaaagctgtgatctaataaatgttgctctctcccaaagcaataaaaattgcattaaaaatggggaaaatagtacaattatgctcatatagcaatgcaacgttttcaygctgtacgtttagagagaggaagaactgcaaagaaagtgtaatctaggtattactcggtatcctaatgtgctaccctaatgctttcttacatgtaagagtcaagaggacagcagatttggcttacggtccacagaatactatccccaaatttataagcatccttcacttcgcttcctgtttttcatgttataattttaatttgcccaataattgtagctgcaactccttatggattcaagtgaggttacacagacatctaccagcctgatttgctgcaatcaagtaattgatcatttgc

SEQ ID NO: 62270 - DNA, 600 bp, Chicken  19866894324082_1
aggagggggccatctggtaagccaattgtccacttttaggcatctttaggctcttcctcagctcttctgtgttccccagcacatctgtactttcacagtattgttgctggcaatgcatttctcttggagcagttctgttcctaatgctgtttaacttttcagtgctgttttagtttatctctgatgacaacttctttccaaccctcacaactgtaaacttttctacaactagagaagagttatatatacagagtggaaaataagactcatttccacagcatcgtatccttgcagaaaagrcaatgatcctatgaattaatcacaattaggttgatattttggtacatttgtgtaaacatgacccagttcaagcaacagaaaatgtgagtgatgaaacataccattacatatacaccaccgaagagacttttacttcacttatttgtattttattatttgggctgctaccaacataatgtttcaaaggcatcaattatgtttcattttttaaatcaaactaattaagaaccagatgtaatctgaatgaaaaagatctgaggtcagtgttgtgcaccatatgtttgacagtgcttactcatg

SEQ ID NO: 62271 - DNA, 599 bp, Chicken  19866894324099_1
  misc_feature (1)..(21): n is any nucleotide
nnnnnnnnnnnnnnnnnnnnncagcttttctgggttgcaggagcaagaggagcttcatttcttggcttgccctgtcctcctctgccaaagggatgaccatgttcttcagcagagaagtgagggagatgtgggtcagcatcttcctgcatctccgggaccctagtctcacagtttccagtgtaagagccctcagaatttatctgcaaacccacagaaaggtgcaggacactggccgagctgtttggctgctgcaaacactcaggcacgtgcatgcttgtaacttttcttgcttgttccccrtgctctgtgyattagtgtacaataagccctaatcttctctgctgaaaatcatgcaacaattaatctggcgtgacactgtaatgcacgcaaaatagtcagatgcatcttgtgttgyaagtactctgagggcactgattggtccgggctgctgtgatggctgccctcccataagcaggaagagacctgaagcatctcctggcttggagctgcccccagctgctgtggctgcacaactacctgtcacctacgtccccagtgaagagagaaatggggtggaaacagccacagtcactgccagg

SEQ ID NO: 62272 - DNA, 599 bp, Chicken  19866894324099_2
  misc_feature (1)..(11): n is any nucleotide
nnnnnnnnnnncagcttttctgggttgcaggagcaagaggagcttcatttcttggcttgccctgtcctcctctgccaaagggatgaccatgttcttcagcagagaagtgagggagatgtgggtcagcatcttcctgcatctccgggaccctagtctcacagtttccagtgtaagagccctcagaatttatctgcaaacccacagaaaggtgcaggacactggccgagctgtttggctgctgcaaacactcaggcacgtgcatgcttgtaacttttcttgcttgttccccrtgctctgtgyattagtgtacaataagccctaatcttctctgctgaaaatcatgcaacaattaatctggcgtgacactgtaatgcacgcaaaatagtcagatgcatcttgtgttgyaagtactctgagggcactgattggtccgggctgctgtgatggctgccctcccataagcaggaagagacctgaagcatctcctggcttggagctgcccccagctgctgtggctgcacaactacctgtcacctacgtccccagtgaagagagaaatggggtggaaacagccacagtcactgccaggcagttgagag

SEQ ID NO: 62273 - DNA, 600 bp, Chicken  19866894324099_3
agtgagggagatgtgggtcagcatcttcctgcatctccgggaccctagtctcacagtttccagtgtaagagccctcagaatttatctgcaaacccacagaaaggtgcaggacactggccgagctgtttggctgctgcaaacactcaggcacgtgcatgcttgtaacttttcttgcttgttccccrtgctctgtgyattagtgtacaataagccctaatcttctctgctgaaaatcatgcaacaattaatctggcgtgacactgtaatgcacgcaaaatagtcagatgcatcttgtgttgyaagtactctgagggcactgattggtccgggctgctgtgatggctgccctcccataagcaggaagagacctgaagcatctcctggcttggagctgcccccagctgctgtggctgcacaactacctgtcacctacgtccccagtgaagagagaaatggggtggaaacagccacagtcactgccaggcagttgagaggtgactgtagcctgtgcagtcagcattgcaatgatgcaagaagagggggcaaagagggcttgagggtgcaaagccttcttaatattcaggagcattgcagggactg

SEQ ID NO: 62274 - DNA, 600 bp, Chicken  19866894324102_1
agctgaacaggctaagtgagactgaatagctatactctgttgtgtttggaaaaggagctggtatgtgtggttccaactttttgtttgagttcttgtgcagtggcaacccactctataaacattgtttgaagaatctttttccagaactgctttgtgactgcgtgaacctttctgtatatttctcttttgctaattctctctgtgtctctccctccatggtgcacagtaattttttactgaattattgtagaaatttactgaggttgtccaaaggcttttttttttcttttcttaaaaatktggcacttattatgcatagcagggattttatttatgcagataatagaatgatcttcatacagtcttgataaaagaaggatcttgaaacagactacaaatacagtaaatactgcagtcttattgtgactaaagaaggttcaataaggaaggcctggtatcaagctgtttctcctaattgctaataaaggaagcattatcaccaataccaaatcagaagcacagattactataaatacacagttaagttgcatgctgaagttgtgtttgtttgtttggttttttttcccaataaacatgtga

SEQ ID NO: 62275 - DNA, 600 bp, Chicken  19866894324104_1
tttgcttcccaaaatagatattaaataaataattttcttcacgggatgcctacaagtactgctgtagctgccagtttgaaaaaaaaagagtgcacagtttgagacactgagctccaacagtgatctttgctgctgcaaacacacatgcaatacaagttgtagagagctatttcatgagaatttccaccaagagaagcagacaagttcaggaaatatgtttatacattttgtgttcccaggtggagaaaattctctctatctttactgcatcattcaaaaggtttcagaaaacttggactrgatacatgaggctacaggtcaagtagtgaaagtataaaatagcaagcatgagcttactgcaagtacagaaatatgccaacagatttagatttcttcagaggatttgcatttctattagcatccagtgagccaaactgaacaatgagcgtggcaaatatgttgacttttgagagacggggaaacagaaggaasctgttgtaatgttcaaatatttatttttatttttgatccactcatatctttcctgaaatatactgatgttaaatgccctgttatagagggatgaagttaaagcaatgc

SEQ ID NO: 62276 - DNA, 600 bp, Chicken  19866894324104_2
gaagcagacaagttcaggaaatatgtttatacattttgtgttcccaggtggagaaaattctctctatctttactgcatcattcaaaaggtttcagaaaacttggactrgatacatgaggctacaggtcaagtagtgaaagtataaaatagcaagcatgagcttactgcaagtacagaaatatgccaacagatttagatttcttcagaggatttgcatttctattagcatccagtgagccaaactgaacaatgagcgtggcaaatatgttgacttttgagagacggggaaacagaaggaasctgttgtaatgttcaaatatttatttttatttttgatccactcatatctttcctgaaatatactgatgttaaatgccctgttatagagggatgaagttaaagcaatgcttttgttacaggtaaaactaatatttaagaaaagcttctctgaaataacaatatattttggtctaaaggttgcgtagaagctctgctttgaatgacagatatttgctagtaaaaggaaaaataccactagtcacactgggcttagttgcctagaatccactggacattataaaatagactgatacaatatat

SEQ ID NO: 62277 - DNA, 600 bp, Chicken  19866894324104_3
actgatgttaaatgccctgttatagagggatgaagttaaagcaatgcttttgttacaggtaaaactaatatttaagaaaagcttctctgaaataacaatatattttggtctaaaggttgcgtagaagctctgctttgaatgacagatatttgctagtaaaaggaaaaataccactagtcacactgggcttagttgcctagaatccactggacattataaaatagactgatacaatatatataaacacatagatgacaatttattgcatatgtgatcttctacatgcttcttatgtttaaygtttatgtttaatgaagggaggaagagagacagttgcccatgttccactcttttctttaaaggaaatgaaatgtatatctataattatgaattctttttaaagatgagtgtccttttgtataaagctgaataattaaatcacaaaactagtaagtaggaagttttgtgggctactccaaaagcaatgcctcctatttcattatgttggctcacaaagtcagaggcagatgttggtggaatggcagtaggtattgaatcttcccaccaatatttcattacgttttgttgctgtgcaacaga

SEQ ID NO: 62278 - DNA, 599 bp, Chicken  19866894324106_1
  misc_feature (1)..(102): n is any nucleotide
nnnnnnnnnnnnnnnnnnnnnnnnnnnnnnnnnnnnnnnnnnnnnnnnnnnnnnnnnnnnnnnnnnnnnnnnnnnnnnnnnnnnnnnnnnnnnnnnnnnnnntgcttcagtatcatcatcatcatcactgtcattttctgcactctccctagtatgttcatgtttgtcttgtataggtataatcagaactggacagagcactccagttgtgggcttatgagtgctgagcagagaggaaggatcacctacctatctttacttgctgggagcgttctgcctaatgcagcccaggatatcatwaaccttctttgctataaggatatattgttgacacattttcgacttggtgtccactgtgattcccagatatttttatgctaacctttttttccaaatggtcagcctccagcatgtacaggaagttgtccttcctcatgtgtaggaatttgtttaaccatgatgagatcaggataacaatgttcaaatttaaggggaagtcatttgtttccccatcattctttttgcaaacatcttcacaattcacaaattcagtttgttcatgcactattagcaaagatgtcctatatcgatagtaggcc

SEQ ID NO: 62279 - DNA, 600 bp, Chicken  19866894324121_1
gactttctcctggcacttgacataagcctcgtaatctgcaaagactttaaacctgaggcagaaaaaaagaagggaggagtgagggggagcagcgtgagagcatggctggcatggaggaacgggacgctcaaatggatgcttcagataaatttaccttccccagcttctactgaatcacagccctttagaaaagccctttagatacctgaaggcatccatcatcgggcaagggctggtctggtgtgaaatgtggaggttggtggccctgcctgtggttgggggttggagcttcatggtccrtgaggtcccttccagcccaagccattctatgattgtatgaagagctgtgcacccgaatgcattccagccttaatgcaggtttaatgcagcccagctgaagggctgagcacagagagccttttgtaccaggggtacacaaattgcttttccctgtgcacgggagccggggcaggaaatgggatattatcaggcagtgggggtagggctatgggtatatggtcttctttaggacgtgagctaatggctgcaaggggaaggttcagggttggatattaggaacagtttcttctctgaaagagt

SEQ ID NO: 62280 - DNA, 600 bp, Chicken  19866894324122_1
cagccacttttgagccaaaacctgtgtaaccacattagaatgacctcagtacaggtcatgtttagatggtagaacacagtgtgacaacagtacaagttaggtatcttctagacctcagctggctgtaatttgttttagaagaggctacacattaggtgataactgagctccttagaacacacaagatagaatatacaagatgagatggattctctggcataattctgtcccggtcagacataacatgaccattacagaaattatgtcctattaaggaggacaggcaacaagcacacattmatttttttttttcaatcattttcttggtaggggaacacaattgtgattctccagtaagcaacagaatctgtgtattgtttatcatattccatcacaaatgaaagtccattcagtgaataaaaatctgtctgtacttcatcccagagatagcatatttctttccctgaggtatgaaagtaatttgtggagtgacagacaggacacttacctttagttaacactttctagaatgatctctttacctaatgagactgcattgataccaagatgtaggaaaaacagtagatatcttaggataag

SEQ ID NO: 62281 - DNA, 600 bp, Chicken  19866894324122_2
gccaaaacctgtgtaaccacattagaatgacctcagtacaggtcatgtttagatggtagaacacagtgtgacaacagtacaagttaggtatcttctagacctcagctggctgtaatttgttttagaagaggctacacattaggtgataactgagctccttagaacacacaagatagaatatacaagatgagatggattctctggcataattctgtcccggtcagacataacatgaccattacagaaattatgtcctattaaggaggacaggcaacaagcacacattmatttttttttttmaatcattttcttggtaggggaacacaattgtgattctccagtaagcaacagaatctgtgtattgtttatcatattccatcacaaatgaaagtccattcagtgaataaaaatctgtctgtacttcatcccagagatagcatatttctttccctgaggtatgaaagtaatttgtggagtgacagacaggacacttacctttagttaacactttctagaatgatctctttacctaatgagactgcattgataccaagatgtaggaaaaacagtagatatcttaggataagataaaaaaaagcc

SEQ ID NO: 62282 - DNA, 469 bp, Chicken  19866894324122_3
taggggaacacaattgtgattctccagtaagcaacagaatctgtgtattgtttatcatattccatcacaaatgaaagtccattcagtgaataaaaatctgtctgtacttcatcccagagatagcatatttctttccctgaggtatgaaagtaatttgtggagtgacagacaggacacttacctttagttaacactttctagaatgatctctttacctaatgagactgcattgataccaagatgtaggaaaaacagtagatatcttaggataagataaaaaaaagccctgcagagtgctgwggaaatcatgaggatagatccttcaaggtttaatcaggcaattaacagttgcaagaactgttactgatgacagaggaagattaattccacttcctgattattcttcccaggcaggatcacaataaatcttctatatgtacaggaaagacatcattattacccagtacta

SEQ ID NO: 62283 - DNA, 536 bp, Chicken  19866894324128_1
atcctgaagctgagtgtaatctaatacaatgtgatgtaggaggcaccatgacacaactcagtatttaacaccaggataaattatcctggaaaattttgcagaaggcttatttgaaagctctcattctccaccagaatatgttaagttgatgtatagaggctgtctattgcctgtgggttggatttaggtgcctgctggtatcaactgagtagctgcttgcttctgtgccaccctctctcttgaccatctaacaggagaacaccaagggaacaagggctatccaaagagaatccctcagaygccaccagcccagccccttgccagtgaggtcatttaacttctctgtttacttttttttacatggaaatggattgcttggatgtcgtggaggatgccagggagaaaggggagattctctggctgagtgaagccacacaaacaagattaaattagaggtgtgagcacagagtctgcatggatcctgccaagaagtttaattaaagccacttgctgttgcagagtgacccagtttcatt

SEQ ID NO: 62284 - DNA, 600 bp, Chicken  19866894324129_1
aggaataaaaaagcctggaaagcaaagaaaataaatggtatttttttcacaagggaatgttcagttacaacacaacagtctatcatgaaacaatactgtgtgattgcatcacagtcacagtttcagtttgatttatgtgttcctgagctactcagtgtcatgctgtaagaagtataatgtattatttccagacaaaacactttattaatgtgcagttaaggctgagagtaactactgcttattcagtcaatagtctttttagaaaacactgaaccacagccataagaattctaaatttakgtttcattttacagaagaaaaatactgcaaraactcaaaatactagaagacartatctctacttttgcagtttatttattgtggtcaatcttgttctacttcaaataaatggaaaaaaagcacttatttgtaggaacaaatccttaaaaggcaggcagaaaccatgcggtattggttatctctctgattcatcttaccattgctcttgaagtgtagaatattttgctgtatcatgcctatagttctgcagactccacaggctcctgtattctctcatcaaacctagaaatagctgtgaaa

SEQ ID NO: 62285 - DNA, 600 bp, Chicken  19866894324129_2
taaatggtatttttttcacaagggaatgttcagttacaacacaacagtctatcatgaaacaatactgtgtgattgcatcacagtcacagtttcagtttgatttatgtgttcctgagctactcagtgtcatgctgtaagaagtataatgtattatttccagacaaaacactttattaatgtgcagttaaggctgagagtaactactgcttattcagtcaatagtctttttagaaaacactgaaccacagccataagaattctaaatttakgtttcattttacagaagaaaaatactgcaaraactcaaaatactagaagacartatctctacttttgcagtttatttattgtggtcaatcttgttctacttcaaataaatggaaaaaaagcacttatttgtaggaacaaatccttaaaaggcaggcagaaaccatgcggtattggttatctctctgattcatcttaccattgctcttgaagtgtagaatattttgctgtatcatgcctatagttctgcagactccacaggctcctgtattctctcatcaaacctagaaatagctgtgaaacacaatggaatgttgtaggaaagttgtatct

SEQ ID NO: 62286 - DNA, 600 bp, Chicken  19866894324129_3
ggaatgttcagttacaacacaacagtctatcatgaaacaatactgtgtgattgcatcacagtcacagtttcagtttgatttatgtgttcctgagctactcagtgtcatgctgtaagaagtataatgtattatttccagacaaaacactttattaatgtgcagttaaggctgagagtaactactgcttattcagtcaatagtctttttagaaaacactgaaccacagccataagaattctaaatttakgtttcattttacagaagaaaaatactgcaaraactcaaaatactagaagacartatctctacttttgcagtttatttattgtggtcaatcttgttctacttcaaataaatggaaaaaaagcacttatttgtaggaacaaatccttaaaaggcaggcagaaaccatgcggtattggttatctctctgattcatcttaccattgctcttgaagtgtagaatattttgctgtatcatgcctatagttctgcagactccacaggctcctgtattctctcatcaaacctagaaatagctgtgaaacacaatggaatgttgtaggaaagttgtatcttcaagtatttatatatatattt

SEQ ID NO: 62287 - DNA, 489 bp, Chicken  19866894324132_1
cctggatgtttacaaatagcagaactaattgccagcttcgcttgtggatttaagtgtcgcagcttgcagctcggtgaaatacaacccagtgagtttacacatctggggctataaccatgggaaaggattccaaggaagcatgcaagggaaagcagaatgtattaactgaaatatgtttagactggaagcattaatgggcaatatcaatggggattgaggtttacagctatggtgattgactcctctcagatatctttgcaaatccaaagaaaaacagatccaccagactagaaaactatygaatctttgtttccttgcttcttcctccctctgctcccaaaagcttttatttgcattccctgatgttttacaaatggacacccgaacagcaaccacagacaaacttaaaatcagtatctgccctgcactgcatgtgcacaaaatcatttctgccaccctgactgagggagatgaaacttcaggaaagat

SEQ ID NO: 62288 - DNA, 600 bp, Chicken  19866894324139_1
ttgtaaggaaaggaatgaactttggaaagaaggcaaatattcaaaaagtcctgaaggatctttcagaccaaattttattcttcttcttattttaactaaaagattgttgctttagaattcaatattgatccgttttactaaacaaatattactgggaaaatggaaggagattaaaaaataatggctccaaaaggaagtaggggaatggatcctctttggtagcaggaatgtgctctgagagaggatcctgtggcagaagcctctctaagcccctttttcctttggctcttccttccctcytcctctcactctcctgacatttgcttttcattggcagccatgggaatagtgtagcatttactttgagccagctggaaaaataggatggcagtttacaaactcagattccgttctaaactttcagcctctatttccattctcagatacatcctttcttccagtttgcttttctatgtaacattttgttctagttttgctcaagtgaaggcttgcaaaagaggaacaagtaatggttttatataacttttcccaggaggtttggtttcttttcctttctgtaagggatctggaatcccacag

SEQ ID NO: 62289 - DNA, 435 bp, Chicken  19866894324141_1
gcaaaaagaagccccttcaagctatttctcttacaatcagcagcagtaattttcaccctatctcttttgctctctgtctctctcacataaaatattactttaggtgtatgttaaaatgcttgctgctaattttaaagacaaataattggtacctgtcatccatatggagaaaaacaaaataacccaacaataaagaagaaatggtcataaacaagaggtgtatttttcatacttctgcagtaaaagggagtgataatggctacaggctatggattttttatatgggcaaagcactaaaaytggtctgggtaaaactccaggatgttctgaataaaaatgtacagaaataagtaaactatataagaaattgtcagaaaattggtccaaataatactcagagaagactgagatgactcctgggctacaagttattca

SEQ ID NO: 62290 - DNA, 600 bp, Chicken  19866894324156_1
aatctcaccagagaaagagaagtgcaaagaaagactgaaaaggcagcctagcaaaaaggtgtgttgtgaaatatccatatttatttaacagattgtttttcattcaagtggcagaaaatgtcccaagcagctgtgctggaggaatgatgaaatgaaatgatttggagatgaatagccctgtttccttcttgtagcatccattttgcagcttctgtcctgacagtgggagagtgaggtgaagtcagcagcctcttgactggaccagaattggtgtgtgcacctattcctctgttcctctgygcattagtgggaaagctacatggtgctgcaactcaaacagtattttgtgaagttatttcactaactaaacattttgaatatgtaatacaaggctcttaagaatttgcagcatggaatacagctagaaaagcaaactggaggrcaggggrtagtatcagaaaccaaagtctagtgaggttccaggacaagtctagcagggaaaaaaataatccaaaggccagagctagcacagcttattgtaaaatcatagagtgacttgggttggaaagaaccttaaagcctatccaattccactccctc

SEQ ID NO: 62291 - DNA, 600 bp, Chicken  19866894324156_2
aatgatgaaatgaaatgatttggagatgaatagccctgtttccttcttgtagcatccattttgcagcttctgtcctgacagtgggagagtgaggtgaagtcagcagcctcttgactggaccagaattggtgtgtgcacctattcctctgttcctctgygcattagtgggaaagctacatggtgctgcaactcaaacagtattttgtgaagttatttcactaactaaacattttgaatatgtaatacaaggctcttaagaatttgcagcatggaatacagctagaaaagcaaactggaggrcaggggrtagtatcagaaaccaaagtctagtgaggttccaggacaagtctagcagggaaaaaaataatccaaaggccagagctagcacagcttattgtaaaatcatagagtgacttgggttggaaagaaccttaaagcctatccaattccactccctctgctgttggcacagttgccacccaccaaatcaggctgcccaggacccgatccaacctggtcttgagcatcttcggagacagagcatccgcagcttctctgggcagcatgtgccactacctcacccccctctgagtgaaaaat

SEQ ID NO: 62292 - DNA, 600 bp, Chicken  19866894324156_3
aaatgaaatgatttggagatgaatagccctgtttccttcttgtagcatccattttgcagcttctgtcctgacagtgggagagtgaggtgaagtcagcagcctcttgactggaccagaattggtgtgtgcacctattcctctgttcctctgygcattagtgggaaagctacatggtgctgcaactcaaacagtattttgtgaagttatttcactaactaaacattttgaatatgtaatacaaggctcttaagaatttgcagcatggaatacagctagaaaagcaaactggaggrcaggggrtagtatcagaaaccaaagtctagtgaggttccaggacaagtctagcagggaaaaaaataatccaaaggccagagctagcacagcttattgtaaaatcatagagtgacttgggttggaaagaaccttaaagcctatccaattccactccctctgctgttggcacagttgccacccaccaaatcaggctgcccaggacccgatccaacctggtcttgagcatcttcggagacagagcatccgcagcttctctgggcagcatgtgccactacctcacccccctctgagtgaaaaatttctgcc

SEQ ID NO: 62293 - DNA, 599 bp, Chicken  19866894324157_1
  misc_feature (1)..(61): n is any nucleotide
nnnnnnnnnnnnnnnnnnnnnnnnnnnnnnnnnnnnnnnnnnnnnnnnnnnnnnnnnnnnnttcagaagaaggtagtgcccagatctgtgcgccgggggacccagagatgaggatgacgcatttgtctgagagcagagggaagcccttgtgcaaggcctggctgaagactccagccagtgaactttcccatcagtccagcattaaactagcccaagttattaggttattaaataaggaaatatttaatccctgagcaagctgtgaagtaattctcagcagaatgcacctggggtgtgtgwgyctggagctgatctcctgcctcaggccatacaggagagctctgctccctttgctcctgacttggtccctgcagcccacatgaggtgttcagacacttgtgcatggcagggagaatgagtctgggcagcaagttctgcccttgcaacccaggcatgtggatcstggcttgtccatgctgtgagcaccgtgcttcgccctcaggtaaggacagttgtctatagttaggagaaggacagttttaaagcagtgatttgtccagctcctaacacagctggggtcctacacatagaacagctca

SEQ ID NO: 62294 - DNA, 599 bp, Chicken  19866894324157_2
  misc_feature (1)..(59): n is any nucleotide
nnnnnnnnnnnnnnnnnnnnnnnnnnnnnnnnnnnnnnnnnnnnnnnnnnnnnnnnnnnttcagaagaaggtagtgcccagatctgtgcgccgggggacccagagatgaggatgacgcatttgtctgagagcagagggaagcccttgtgcaaggcctggctgaagactccagccagtgaactttcccatcagtccagcattaaactagcccaagttattaggttattaaataaggaaatatttaatccctgagcaagctgtgaagtaattctcagcagaatgcacctggggtgtgtgwgyctggagctgatctcctgcctcaggccatacaggagagctctgctccctttgctcctgacttggtccctgcagcccacatgaggtgttcagacacttgtgcatggcagggagaatgagtctgggcagcaagttctgcccttgcaacccaggcatgtggatcstggcttgtccatgctgtgagcaccgtgcttcgccctcaggtaaggacagttgtctatagttaggagaaggacagttttaaagcagtgatttgtccagctcctaacacagctggggtcctacacatagaacagctcatt

SEQ ID NO: 62295 - DNA, 600 bp, Chicken  19866894324157_3
gaagactccagccagtgaactttcccatcagtccagcattaaactagcccaagttattaggttattaaataaggaaatatttaatccctgagcaagctgtgaagtaattctcagcagaatgcacctggggtgtgtgwgyctggagctgatctcctgcctcaggccatacaggagagctctgctccctttgctcctgacttggtccctgcagcccacatgaggtgttcagacacttgtgcatggcagggagaatgagtctgggcagcaagttctgcccttgcaacccaggcatgtggatcstggcttgtccatgctgtgagcaccgtgcttcgccctcaggtaaggacagttgtctatagttaggagaaggacagttttaaagcagtgatttgtccagctcctaacacagctggggtcctacacatagaacagctcattctgcgtggcagcacccagaggaggaatgcagcaccactgggatgtggtggtccaaggtcatctggtgagtgatgtcacatctattttgctgtgcagatgggacttcctggtggctcactgggattatttatagtcagacaggatgaaacagtacacgccgac

SEQ ID NO: 62296 - DNA, 425 bp, Chicken  19866894324157_4
aggtaaggacagttgtctatagttaggagaaggacagttttaaagcagtgatttgtccagctcctaacacagctggggtcctacacatagaacagctcattctgcgtggcagcacccagaggaggaatgcagcaccactgggatgtggtggtccaaggtcatctggtgagtgatgtcacatctattttgctgtgcagatgggacttcctggtggctcactgggattatttatagtcagacaggatgaaacagtacacgccgacaaaggcaatggattatcctgactccttatggcttcasatccaaaccagatggctctctgaaagggctgcttcagccaacacaagctattaatctgagcaaggagcagctaggtgagagccgatgagcagtggaaggtgtgcaggacaggtggtttgtcattc

SEQ ID NO: 62297 - DNA, 600 bp, Chicken  19866894324165_1
gtgcaagtcaatagcaaatcgtaaactttctgtggctgcttcctcaccctgatgtccgaccaacctacaggagatttgaatgtcagcctgcccagctctgtctgacagggacaatgcgtgacagccatgatgaggcagcactgcagggacagcacacacagacaccccacagcacagttggacagtcccctcgttactgaaaaagcccaaggaccaatagagaattttggtctagggcagagttcagtaactgcagcatattgtcacttcagcatattttaatgcaatgccaatagtaaragccaaagtgattttatcccaaatctaactgcttgaaaattattaatggaagaaaaacatttgttattcccatcaatattcacagaggcaaagcaagtttccctggtcaagttttactcctgtggtggagaattctgcttatgacctacatagcaggaagtcatgtttcattacaatcttgtccccttgagcactgaaaaatttggaaatcagacaagatgaacacggtggcccagwttttctctgtcatttgggcagttttgcattgcatcattagtcctaaatcaccctaaagggacc

SEQ ID NO: 62298 - DNA, 600 bp, Chicken  19866894324165_2
cagagttcagtaactgcagcatattgtcacttcagcatattttaatgcaatgccaatagtaaragccaaagtgattttatcccaaatctaactgcttgaaaattattaatggaagaaaaacatttgttattcccatcaatattcacagaggcaaagcaagtttccctggtcaagttttactcctgtggtggagaattctgcttatgacctacatagcaggaagtcatgtttcattacaatcttgtccccttgagcactgaaaaatttggaaatcagacaagatgaacacggtggcccagwttttctctgtcatttgggcagttttgcattgcatcattagtcctaaatcaccctaaagggaccatcaagcttgttgtctaccatcctcctgcttcatgcctagaaaaaacaagaacatgttcaccttccagggcccctgactgctgaaactccactctgaagctgtagatgttaagtataaattacagcaaattttaggcttctgtaacttacatgggggatgcctattgaattttaagggcatatctgggacacataaatgcccagacagttctcccgtccacacagtttggatcagat

SEQ ID NO: 62299 - DNA, 600 bp, Chicken  19866894324165_3
aattctgcttatgacctacatagcaggaagtcatgtttcattacaatcttgtccccttgagcactgaaaaatttggaaatcagacaagatgaacacggtggcccagwttttctctgtcatttgggcagttttgcattgcatcattagtcctaaatcaccctaaagggaccatcaagcttgttgtctaccatcctcctgcttcatgcctagaaaaaacaagaacatgttcaccttccagggcccctgactgctgaaactccactctgaagctgtagatgttaagtataaattacagcaaawtttaggcttctgtaacttacatgggggatgcctattgaattttaagggcatatctgggacacataaatgcccagacagttctcccgtccacacagtttggatcagatggtttactgggtatggtggtaatgggcaaawggttggactagatgttcttagaggtcttttccaaccttaatgattctattattccaatatctttactcagatacagacctcaaggtcaatgataaagcaagcacggaaaaaagcatggagcatcaatatgtatttcatctgcctttacagtgccatcttacc

SEQ ID NO: 62300 - DNA, 600 bp, Chicken  19866894324165_4
catcattagtcctaaatcaccctaaagggaccatcaagcttgttgtctaccatcctcctgcttcatgcctagaaaaaacaagaacatgttcaccttccagggcccctgactgctgaaactccactctgaagctgtagatgttaagtataaattacagcaaattttaggcttctgtaacttacatgggggatgcctattgaattttaagggcatatctgggacacataaatgcccagacagttctcccgtccacacagtttggatcagatggtttactgggtatggtggtaatgggcaaawggttggactagatgttcttagaggtcttttccaaccttaatgattctattattccaatatctttactcagatacagacctcaaggtcaatgataaagcaagcacggaaaaaagcatggagcatcaatatgtatttcatctgcctttacagtgccatcttaccagcctctaggctttctagaataaacatgtcctcaaaaaccatgagagcaatgcagatttgtaggccatctgactatgaacagcctggtactacgtgaagagctgcatcccagctacagagctacgtgagggtaggcac

SEQ ID NO: 62301 - DNA, 600 bp, Chicken  19866894324165_5
ttgtcctattgcccagcagcctgcgctttcatcatcttcacaacctcttcattcttcctttttatcccaggtattcattccctccccattttatttccaaaagcaagctcttcagggaatactgtgttttatgtttaatagagaaaacaccatatctatgtagccatagaactaaaataataacaacaataataatatacaaacagcaaaactttaaaaagacactaatttcatgtgaacacataagctaagttgaaaaagatttatttttctcgaattcctataatcacaaagccctayatcaggtcagaatgcttatgtaacagtgatgcatcaggctctgtgtcccaaattagatagaatatgctgtgactgctacataacccttgtgtgcttgttcatcaaaggctcacatgcatctattggcccactgaaatctcagccttcaattttccaaaggcctgtaattgttacatgttctcagcctggtgcttgcaatcagacacactgaatcattttcctgaggcttttctctctctttttttttttcctcccagattcactagtaccaatcaattccattgcagttttgcttctaga

SEQ ID NO: 62302 - DNA, 600 bp, Chicken  19866894324167_1
cagagatgccgttcagcccaaaggagagggaggcaagcacacatcaagcagaccacaaactccttgccatggagaaagccgacaccagtgagtcctccgacgctctcagctggtggcagacagggctcctctctctgctggcaccagccaggagaggcaccagccctacacctttctcctgggagaaagatgggacattgcccacacccagcgtggtaggaaggtgctgggcacagcccagcctgatgcaagagcacttgttgccaagccaagcatcacgctgggctatgagatctggarggaacaccctctagctgcttccctgcgggggtgaggacaaagtctgcagaaaaatcatagcacaatggcaagctgggaactccaggagactccagtttgcaacacaggggatttccaagcatctcacacccacctttgctcaacagggacttcagggcttgcagcatcagcacgcagagttttgatgctgctcttgtcacctcctgttcacatgctgagttaaccagagactggggagcgctagaggagcctttagatccttcccaccgctacagtcccactccaggtgctacctgttgc

SEQ ID NO: 62303 - DNA, 599 bp, Chicken  19866894324169_1
  misc_feature (1)..(104): n is any nucleotide
nnnnnnnnnnnnnnnnnnnnnnnnnnnnnnnnnnnnnnnnnnnnnnnnnnnnnnnnnnnnnnnnnnnnnnnnnnnnnnnnnnnnnnnnnnnnnnnnnnnnnnnngctgaaaactgtagcctggaaaaaaaacaaacctgtaacatgctttaagactaacctaaaaagaaggttatggattatttcaggatgttctcagttatcactgaagcattttgaggcaattaggaccatacgcagtgcaacagagaagtctgacggtgagaaagacatatttgtttatatgggcaagtttttaaargactgtttaaaatctaataccatttaaaatctgtttaaacagtatttaccgtgtggttagacacactattaacaagtgaaagaagagcagtgtctgttgactcagtatttctgttaggcaaatattagtccagaaatttaaaattacwtccctcagactcttaaactcacactgtgtggactcctgctcgttaaaattccagagcatatttaattgcttgtctactctgtgtaagtatctctcactatgatgtccaagcactgtgcaaacacttggaccaacatgcttctgagaaccrc

SEQ ID NO: 62304 - DNA, 600 bp, Chicken  19866894324169_2
ttaagactaacctaaaaagaaggttatggattatttcaggatgttctcagttatcactgaagcattttgaggcaattaggaccatacgcagtgcaacagagaagtctgacggtgagaaagacatatttgtttatatgggcaagtttttaaargactgtttaaaatctaataccatttaaaatctgtttaaacagtatttaccgtgtggttagacacactattaacaagtgaaagaagagcagtgtctgttgactcagtatttctgttaggcaaatattagtccagaaatttaaaattacwtccctcagactcttaaactcacactgtgtggactcctgctcgttaaaattccagagcatatttaattgcttgtctactctgtgtaagtatctctcactatgatgtccaagcactgtgcaaacacttggaccaacatgcttctgagaaccrcaggtttcatgtggagtgtttctttcatctttgttgatgcaacacagcgttgcatactctgctagccccctgaagtaggggcatgaagttgaccttccaagattgatttatttgtagaactgagtgctttctttcattttctttatgtaa

SEQ ID NO: 62305 - DNA, 472 bp, Chicken  19866894324169_3
argactgtttaaaatctaataccatttaaaatctgtttaaacagtatttaccgtgtggttagacacactattaacaagtgaaagaagagcagtgtctgttgactcagtatttctgttaggcaaatattagtccagaaatttaaaattacwtccctcagactcttaaactcacactgtgtggactcctgctcgttaaaattccagagcatatttaattgcttgtctactctgtgtaagtatctctcactatgatgtccaagcactgtgcaaacacttggaccaacatgcttctgagaaccrcaggtttcatgtggagtgtttctttcatctttgttgatgcaacacagcgttgcatactctgctagccccctgaagtaggggcatgaagttgaccttccaagattgatttatttgtagaactgagtgctttctttcattttctttatgtaagttcccacaaaagaggttccaa

SEQ ID NO: 62306 - DNA, 600 bp, Chicken  19866894324182_1
atacagctgggctagcaggaaagataataaaaatatctactttgttttatcattcatattagacttcattgctctggtaggagtgtgttataatcaggcgaatggccaagcagtaaaccattaacccctgctctttttactcttgccagtgcctcacttttggagtacaaccaccactggctcataagcaacagttagtccaactattgctttaatgtcccaaactcctctcagggagctctctccccaagaccagcattttgcaaattttagccaccagtcctctccaaactgcatttygtaccatgctgtcaggtgtccccaggttatagcgtagccataatggcgttctgtgctaccctccattaaatcatttttttcctcctccaggttcagcatacgtttgttatttctttcccatacacttcacacagtaacagtttccagcaccaaaatagctcttccaccactgggaaaagagaaagtagacccattttcctgtacacttcttggaaaaggtcttcttgccaagcattgtttctcatttgttgtggaacatgacaccctatttaaatgtcaacaggagttcaactcaggcaa

SEQ ID NO: 62307 - DNA, 599 bp, Chicken  19866894324187_1
  misc_feature (1)..(276): n is any nucleotide
nnnnnnnnnnnnnnnnnnnnnnnnnnnnnnnnnnnnnnnnnnnnnnnnnnnnnnnnnnnnnnnnnnnnnnnnnnnnnnnnnnnnnnnnnnnnnnnnnnnnnnnnnnnnnnnnnnnnnnnnnnnnnnnnnnnnnnnnnnnnnnnnnnnnnnnnnnnnnnnnnnnnnnnnnnnnnnnnnnnnnnnnnnnnnnnnnnnnnnnnnnnnnnnnnnnnnnnnnnnnnnnnnnnnnnnnnnnnnnnnnnnnnnnnnnnnnnnnnnnnnnnnnnnnnnnnnnnngcggtgggagcagcgctgccctgsctgtgctgagcgctacctctgaccgagtgcatgtgctaccttttaaagtaattcctgttcggtttggrgmgtgagcacatttttacctgcaaggaagcacctttttgaaaccgtgtgtcacccgtttagcaatcgtgacacaagtatgggcacagcaacctcagcctaagaataacattacaacacagttaagtgggtctacttcaaggcgccgtcatccccgggagcgtgaagcagaggatgacaacaggttgcagcagcaacagctcggtcagacaacgcgggcagcccccggggcg

SEQ ID NO: 62308 - DNA, 571 bp, Chicken  19866894324187_2
  misc_feature (1)..(208): n is any nucleotide
nnnnnnnnnnnnnnnnnnnnnnnnnnnnnnnnnnnnnnnnnnnnnnnnnnnnnnnnnnnnnnnnnnnnnnnnnnnnnnnnnnnnnnnnnnnnnnnnnnnnnnnnnnnnnnnnnnnnnnnnnnnnnnnnnnnnnnnnnnnnnnnnnnnnnnnnnnnnnnnnnnnnnnnnnnnnnnnnnnnnnnnnnnnnnnnnnnnnnnnnnnnnnnnngcggtgggagcagcgctgccctgsctgtgctgagcgctacctctgaccgagtgcatgtgctaccttttaaagtaattcctgttcggtttggrgmgtgagcacatttttacctgcaaggaagcacctttttgaaaccgtgtgtcacccgtttagcaatcgtgacacaagtatgggcacagcaacctcagcctaagaataacattacaacacagttaagtgggtctacttcaaggcgccgtcatccccgggagcgtgaagcagaggatgacaacaggttgcagcagcaacagctcggtcagacaacgcgggcagcccccggggcgacactcaccgctgctcagctgctgcccgaaggccggcggg

SEQ ID NO: 62309 - DNA, 569 bp, Chicken  19866894324187_3
  misc_feature (1)..(206): n is any nucleotide
nnnnnnnnnnnnnnnnnnnnnnnnnnnnnnnnnnnnnnnnnnnnnnnnnnnnnnnnnnnnnnnnnnnnnnnnnnnnnnnnnnnnnnnnnnnnnnnnnnnnnnnnnnnnnnnnnnnnnnnnnnnnnnnnnnnnnnnnnnnnnnnnnnnnnnnnnnnnnnnnnnnnnnnnnnnnnnnnnnnnnnnnnnnnnnnnnnnnnnnnnnnnnngcggtgggagcagcgctgccctgsctgtgctgagcgctacctctgaccgagtgcatgtgctaccttttaaagtaattcctgttcggtttggrgmgtgagcacatttttacctgcaaggaagcacctttttgaaaccgtgtgtcacccgtttagcaatcgtgacacaagtatgggcacagcaacctcagcctaagaataacattacaacacagttaagtgggtctacttcaaggcgccgtcatccccgggagcgtgaagcagaggatgacaacaggttgcagcagcaacagctcggtcagacaacgcgggcagcccccggggcgacactcaccgctgctcagctgctgcccgaaggccggcggg

SEQ ID NO: 62310 - DNA, 600 bp, Chicken  19866894324189_1
gtcctggaccaaactgcagacattctgcacagtgcctctgtattagtgcagaccaagggagagctctgcctttgcctcttcgtttgttttttttcttgtgtatcttcaacctggccccaacgggcatttttgtggtctactttaaagtacagcatagtagaaaaagtgattgggtctgccaggcagccttgaggttactcaatgcatccatctagagctgcactttttgcggaggtaaggaaacattttgctgttcaatataaacaagcatatccgagttgctcttagagatgaccccarcaaatccatccccgttaagtgcttgcctgaccttgtggcagcaaaataaaagtaaaacattattaagagatagattaagccaagaagccttataatacaggttgcagcttgccaagtgtgggctttggcaggttattaggggcagtgaattttgtgggctggagttttggctgaggatattttgtcacaagttttgaaagcaagctgaagcaatgcattcagtcaaggtgctgggaggaaaatcacccttccaatkgtcctctgtcccacagcaggaatggtactctcaaaaggaaaaga

SEQ ID NO: 62311 - DNA, 600 bp, Chicken  19866894324189_2
aatataaacaagcatatccgagttgctcttagagatgaccccarcaaatccatccccgttaagtgcttgcctgaccttgtggcagcaaaataaaagtaaaacattattaagagatagattaagccaagaagccttataatacaggttgcagcttgccaagtgtgggctttggcaggttattaggggcagtgaattttgtgggctggagttttggctgaggatattttgtcacaagttttgaaagcaagctgaagcaatgcattcagtcaaggtgctgggaggaaaatcacccttccaatkgtcctctgtcccacagcaggaatggtactctcaaaaggaaaagaagaaaatgttattcagtgctgcaaatattccttctctttcatttttttcactcatttgggcaacggcaaatggtgragctgtgaatttgtcctctggctactaaaatactccacttcgccctttgtaccagttacaacagtgatggaggctgaagttttatagaagaaaattgccctactttcttaatgagggtgatcagtgtgtctgctgcttttcaagaggacaataactcattatgttaaatgggtgggatgg

SEQ ID NO: 62312 - DNA, 482 bp, Chicken  19866894324189_3
aagccaagaagccttataatacaggttgcagcttgccaagtgtgggctttggcaggttattaggggcagtgaattttgtgggctggagttttggctgaggatattttgtcacaagttttgaaagcaagctgaagcaatgcattcagtcaaggtgctgggaggaaaatcacccttccaatkgtcctctgtcccacagcaggaatggtactctcaaaaggaaaagaagaaaatgttattcagtgctgcaaatattccttctctttcatttttttcactcatttgggcaacggcaaatggtgragctgtgaatttgtcctctggctactaaaatactccacttcgccctttgtaccagttacaacagtgatggaggctgaagttttatagaagaaaattgccctactttcttaatgagggtgatcagtgtgtctgctgcttttcaagaggacaataactcattatgttaaatgggtgggatgggt

SEQ ID NO: 62313 - DNA, 599 bp, Chicken  19866894324194_1
  misc_feature (1)..(134): n is any nucleotide
nnnnnnnnnnnnnnnnnnnnnnnnnnnnnnnnnnnnnnnnnnnnnnnnnnnnnnnnnnnnnnnnnnnnnnnnnnnnnnnnnnnnnnnnnnnnnnnnnnnnnnnnnnnnnnnnnnnnnnnnnnnnnnnnnnnnnncttgatatgttaaatactgtgcgctttgtattcttcataaataattgaccaagttctaaaagagatgtactttgtgaattgggaaaatgaaaatatagaaatattcacaagaaagtaggagtttagactggaagtatgaacagctaagatttatgaaatgccgtcrataatactgcatcacgtacaaacacgttgctgagtgactggccttctgctcctgagtaatattctgtttatatcagacagtactcttcttgggggccgagggggagggtggagagagtgcctttttgcagtcagtgtgaaaaaataaaacatgccaaataatttcagtaactatacaaagacctggggatgctatgtagaaatacacattaaatcatagtcaaatgtacttcttcrcctggcctgctaatgttttttgcaactgtaaaatttggctgcaatcgtgcaacacaatactgg

SEQ ID NO: 62314 - DNA, 600 bp, Chicken  19866894324194_2
attcacaagaaagtaggagtttagactggaagtatgaacagctaagatttatgaaatgccgtcrataatactgcatcacgtacaaacacgttgctgagtgactggccttctgctcctgagtaatattctgtttatatcagacagtactcttcttgggggccgagggggagggtggagagagtgcctttttgcagtcagtgtgaaaaaataaaacatgccaaataatttcagtaactatacaaagacctggggatgctatgtagaaatacacattaaatcatagtcaaatgtacttcttcrcctggcctgctaatgttttttgcaactgtaaaatttggctgcaatcgtgcaacacaatactggtgagaaaatgtaaagatttttagcatgctctttcaaaagacaaatcctgaaattggacaatcgatgtacataaagcaatggcaatatatttttctaagtagcagagaaaacagaaaatatagaagaaaacctcccaaaccccctatgattatgaaaaggggagaatcatgtttatctgagtggtggagaaatcctaaaatgttttacctggtaagtttcccaaaagaagaggcccag

SEQ ID NO: 62315 - DNA, 600 bp, Chicken  19866894324198_1
atgcaaggtaattgctaatgcagtaatggaatgcagtactctggcagtctttcagtactttgaagttaaatactgctgaatatttgagaacttgatagtggtaaatctagaaatctctcatctttagttactaagataaaccctttataatatgtctctgacacagttatatggtatgtactgtattctctattgagcagctaaatgtcttagaagattgatagtatttggtatgcagtgttgttatcatatttggtacacaatgttgtatgccaaatactgctgtaaataatattgctratttctgaacaccagttttgtcacataacatctcatgcttttaatctcaatttgtgtaygttttatatcaggtcagcaatcgtatgkatgctttagtataaaactaaggtcttgtacagtattttctgttagcttattattaaactaacatccctgccatccagcaaattgtaatgatgctagcacagtattaaaatatacgtctgtaaagtgaaaaagtgaaaatataggtaagatattagtgctgagatattttggtatataacatcctctctgaaactrtatctgyaggtcaatgta

SEQ ID NO: 62316 - DNA, 600 bp, Chicken  19866894324198_2
ttgaagttaaatactgctgaatatttgagaacttgatagtggtaaatctagaaatctctcatctttagttactaagataaaccctttataatatgtctctgacacagttatatggtatgtactgtattctctattgagcagctaaatgtcttagaagattgatagtatttggtatgcagtgttgttatcatatttggtacacaatgttgtatgccaaatactgctgtaaataatattgctratttctgaacaccagttttgtcacataacatctcatgcttttaatctcaatttgtgtaygttttatatcaggtcagcaatcgtatgkatgctttagtataaaactaaggtcttgtacagtattttctgttagcttattattaaactaacatccctgccatccagcaaattgtaatgatgctagcacagtattaaaatatacgtctgtaaagtgaaaaagtgaaaatataggtaagatattagtgctgagatattttggtatataacatcctctctgaaactrtatctgyaggtcaatgtaaatgcatactgtatgcctcatacaaagtttgttcattatgttaaattcactctctatta

SEQ ID NO: 62317 - DNA, 600 bp, Chicken  19866894324198_3
gaacttgatagtggtaaatctagaaatctctcatctttagttactaagataaaccctttataatatgtctctgacacagttatatggtatgtactgtattctctattgagcagctaaatgtcttagaagattgatagtatttggtatgcagtgttgttatcatatttggtacacaatgttgtatgccaaatactgctgtaaataatattgctratttctgaacaccagttttgtcacataacatctcatgcttttaatctcaatttgtgtaygttttatatcaggtcagcaatcgtatgkatgctttagtataaaactaaggtcttgtacagtattttctgttagcttattattaaactaacatccctgccatccagcaaattgtaatgatgctagcacagtattaaaatatacgtctgtaaagtgaaaaagtgaaaatataggtaagatattagtgctgagatattttggtatataacatcctctctgaaactrtatctgyaggtcaatgtaaatgcatactgtatgcctcatacaaagtttgttcattatgttaaattcactctctattatatagactttagtttatatgaattatag

SEQ ID NO: 62318 - DNA, 600 bp, Chicken  19866894324198_4
ctgtaaataatattgctratttctgaacaccagttttgtcacataacatctcatgcttttaatctcaatttgtgtaygttttatatcaggtcagcaatcgtatgkatgctttagtataaaactaaggtcttgtacagtattttctgttagcttattattaaactaacatccctgccatccagcaaattgtaatgatgctagcacagtattaaaatatacgtctgtaaagtgaaaaagtgaaaatataggtaagatattagtgctgagatattttggtatataacatcctctctgaaactrtatctgyaggtcaatgtaaatgcatactgtatgcctcatacaaagtttgttcattatgttaaattcactctctattatatagactttagtttatatgaattatagatcattatcagttatgaacagtgaatggataattatgtaaatactacagtatgcattctgggactacagaggatgtagaacagacttgcaggctacatgcagcattgctaagaatttctttctaagatttttgttcatgattcaaatagaacttttgttctgtgagatagagctgtaaatgtatccccctttgta

SEQ ID NO: 62319 - DNA, 600 bp, Chicken  19866894324198_5
taatattgctratttctgaacaccagttttgtcacataacatctcatgcttttaatctcaatttgtgtaygttttatatcaggtcagcaatcgtatgkatgctttagtataaaactaaggtcttgtacagtattttctgttagcttattattaaactaacatccctgccatccagcaaattgtaatgatgctagcacagtattaaaatatacgtctgtaaagtgaaaaagtgaaaatataggtaagatattagtgctgagatattttggtatataacatcctctctgaaactrtatctgyaggtcaatgtaaatgcatactgtatgcctcatacaaagtttgttcattatgttaaattcactctctattatatagactttagtttatatgaattatagatcattatcagttatgaacagtgaatggataattatgtaaatactacagtatgcattctgggactacagaggatgtagaacagacttgcaggctacatgcagcattgctaagaatttctttctaagatttttgttcatgattcaaatagaacttttgttctgtgagatagagctgtaaatgtatccccctttgtaagagaag

SEQ ID NO: 62320 - DNA, 600 bp, Chicken  19866894324199_1
ttataacttaggaattgcatatgcatggcatcaggggacaaggaatcaacactttttaggatcaagaccattacacaagctgacttgattctttttcatgggttatttcaaaccaaatttacaaaaacaaagatacaaaacatcatacatacaaagtaaagaaaatggcattattgctgcatcaaaataactagctaaatacattttttggaacattcaatatatcaagtagtgccttatggctagggtatagtaaatcttggaagactgaagcagagacgaaccggccaagcacacacraagtaccatggataacagcagaggagcatagaatctttgtctgcggcagtagatggacagttgtggtttcaaaaatctgactaccacttccaacatagtacgcagaaacatactgtgcatcactggctgacagccaaggccacaagcaagttgtactgtcaatggaatctgatcagttaaaatactccacatagaagaatcatagaatggctgaggttggaggggaccttaaagatcacctagttccaagcctcctgccactggtagggttaccaacaactagatcgggctgccaaggcc

SEQ ID NO: 62321 - DNA, 599 bp, Chicken  19866894324202_1
  misc_feature (1)..(13): n is any nucleotide
nnnnnnnnnnnnnctcccagccatcatcttcaggctctggtgagtgtttttccttcctgctcactcctggtagtgcgaggaactctgcaacacaaatatttatggatgaggcagtgtttggattggggagcgaggagcacaggtcagctgcagtgcttatctcttggagagaatggatatgaagcacatgggcatatccttaggataacatcttacagctctgattccacaggacgtgcttgattaaaatgtagcccaaagaaggcagaggctccttcccagctccctgcagagctgcayggcttggcatcactttgcagtctcttggcagcacgtccaagcccgcggagagcagctgtgaaagcacagctacaaaacccatcrggtggtgccccacagtgcrgggcagcagagggctgcactgagagctgggtcctggccccactgccccagagatgagggcagagagcactgaccctctgggaactgctctgtagctgttctctgggcacacagagagctcctcccaagctctgccaggcctgcccctccccagcacacacattgcaggaaaataataaaaataatagccyggctaa

SEQ ID NO: 62322 - DNA, 600 bp, Chicken  19866894324202_2
ctgcaacacaaatatttatggatgaggcagtgtttggattggggagcgaggagcacaggtcagctgcagtgcttatctcttggagagaatggatatgaagcacatgggcatatccttaggataacatcttacagctctgattccacaggacgtgcttgattaaaatgtagcccaaagaaggcagaggctccttcccagctccctgcagagctgcayggcttggcatcactttgcagtctcttggcagcacgtccaagcccgcggagagcagctgtgaaagcacagctacaaaacccatcrggtggtgccccacagtgcrgggcagcagagggctgcactgagagctgggtcctggccccactgccccagagatgagggcagagagcactgaccctctgggaactgctctgtagctgttctctgggcacacagagagctcctcccaagctctgccaggcctgcccctccccagcacacacattgcaggaaaataataaaaataatagccyggctaatgaatgccctaggaattctctaggaggctaggcgacacctgcattaataccaaatgagttcattctgattaatgttattgaaaca

SEQ ID NO: 62323 - DNA, 600 bp, Chicken  19866894324202_3
ggatgaggcagtgtttggattggggagcgaggagcacaggtcagctgcagtgcttatctcttggagagaatggatatgaagcacatgggcatatccttaggataacatcttacagctctgattccacaggacgtgcttgattaaaatgtagcccaaagaaggcagaggctccttcccagctccctgcagagctgcayggcttggcatcactttgcagtctcttggcagcacgtccaagcccgcggagagcagctgtgaaagcacagctacaaaacccatcrggtggtgccccacagtgcrgggcagcagagggctgcactgagagctgggtcctggccccactgccccagagatgagggcagagagcactgaccctctgggaactgctctgtagctgttctctgggcacacagagagctcctcccaagctctgccaggcctgcccctccccagcacacacattgcaggaaaataataaaaataatagccyggctaatgaatgccctaggaattctctaggaggctaggcgacacctgcattaataccaaatgagttcattctgattaatgttattgaaacaaatgtcacgggaatgaata

SEQ ID NO: 62324 - DNA, 600 bp, Chicken  19866894324202_4
gctgcayggcttggcatcactttgcagtctcttggcagcacgtccaagcccgcggagagcagctgtgaaagcacagctacaaaacccatcrggtggtgccccacagtgcrgggcagcagagggctgcactgagagctgggtcctggccccactgccccagagatgagggcagagagcactgaccctctgggaactgctctgtagctgttctctgggcacacagagagctcctcccaagctctgccaggcctgcccctccccagcacacacattgcaggaaaataataaaaataatagccyggctaatgaatgccctaggaattctctaggaggctaggcgacacctgcattaataccaaatgagttcattctgattaatgttattgaaacaaatgtcacgggaatgaataatggcttggtcattattttaaagtgttgctactggatctataaaagccaatgattcagttctggggaagtaattctgcatttcacatctaaaacctgtgcaggattcaaacttttctgagaaaaatagccatgaagagaacatggagagctgtgtctgtgttctctgaaggcaaacagtgtgttctgctc

SEQ ID NO: 62325 - DNA, 428 bp, Chicken  19866894324202_5
acacagcccaccactcccagtgccctgagagcccatggatggcacaggagctcccatatcccagtagcacagccctcactgtccccatgcccggcccagggcagtgctcaccctggctgctctcgctgttctgagattgatcaatatttagaatgaaatattaatgtttgaaaatggctttagagatgaggaactgatcttcatttcagacttttcacagtgctttggagtcttggaggaggggaaagggagggcgcagcagggcagtgtcactgagctgcaggctgtgtgctgttgtgragggctaagtaaatgttaagctttatcattattattcattgatttatataccttttttttgtggcattcgcaggcattagctcaccttcaccttcaatgctaagaacatgttctgttcgttcaaaaca

SEQ ID NO: 62326 - DNA, 600 bp, Chicken  19866894324208_1
ctggatccccttgatctcaggagagatgctttaataaagaaattcattccacgcttaaaaaaatcaatagtacaaccgattgctcagcgcgatgcacactgatcagtctcctgcctcaaagacttccattttctgcatgtgaaaaagcagttttccgctaatgtcaaatggaattttgctttgccaggccagactttccttccaaacaacaaagctttgattgatttgtcttcctttaaatttatcctaatgaggacactaatttatcctaaaaggacactaatgacctcattaagctarttttcacctaatacctatattacatttttgccagaccttgcttactttattcactcaaatgactcctctatcagacacggacatcctgcttgctgccttggtatgaatactggcaagaagggaaatcacctctgggaacagaacttctaattatttttgagtactttagccctctccatgtccattcctggcatttttcacccttctcattaatcagagaggttcagtctccttaatcagtgtacctgtagaatctctttgttatttttcatatccctcatcaagttcagtagaaatagc

SEQ ID NO: 62327 - DNA, 599 bp, Chicken  19866894324211_1
  misc_feature (1)..(182): n is any nucleotide
nnnnnnnnnnnnnnnnnnnnnnnnnnnnnnnnnnnnnnnnnnnnnnnnnnnnnnnnnnnnnnnnnnnnnnnnnnnnnnnnnnnnnnnnnnnnnnnnnnnnnnnnnnnnnnnnnnnnnnnnnnnnnnnnnnnnnnnnnnnnnnnnnnnnnnnnnnnnnnnnnnnnnnnnnnnnnnnnnnnnnnaaattggcatttgtcaggcagctctccttcttacactgcttggtatagtcacactcttagccttgtgagaaggggcatggtgtcctgatcagggccatgtgctcctgttcagtcctgscacttgcattctaggcagaaatacacatcatgtccccttaactgcaagtataagggataagaaacttctgacacacttctgaggctttgaaaactcaaccaactgtgatagatgatggaatgccattagaagaacagttacctgccaacgaatggcctgtgacttgtacccttcccatctggagatttattcatttcaaaagtttactcttgatcacatcttactaccgacactggggtmtgcccactaaagggagttcttggacttcatctaggtcttcttggaatttatgctgacat

SEQ ID NO: 62328 - DNA, 600 bp, Chicken  19866894324211_2
agccttgtgagaaggggcatggtgtcctgatcagggccatgtgctcctgttcagtcctgscacttgcattctaggcagaaatacacatcatgtccccttaactgcaagtataagggataagaaacttctgacacacttctgaggctttgaaaactcaaccaactgtgatagatgatggaatgccattagaagaacagttacctgccaacgaatggcctgtgacttgtacccttcccatctggagatttattcatttcaaaagtttactcttgatcacatcttactaccgacactggggtmtgcccactaaagggagttcttggacttcatctaggtcttcttggaatttatgctgacattcatccagtttccaagaaggctttcactcacaagcatattccgggtgtgcaccttgataaagacatgaaaagctgcaaagaggaattaaaaatcattctgaatgcaggttgtaagtctggtgtcacaaaagatgtgaacgtttggtgggatcagtggaataaagaagtgagactgtcttgactcttaaaacaatgctgaaagaaagatgcaactgtgtgtgtacgtgtgtattttcaggtc

SEQ ID NO: 62329 - DNA, 600 bp, Chicken  19866894324211_3
tgctctgaaatcattccaaagaagtacttctctattctgtattccttgataaaccatctcctatcacatctggtttatggtcatattttaaagacatcagtgaagatatctggatagatatcttctagaaagatatgtggaagtccttttgcttcctgactgcagcgaaggataaataccatccactttccatcaacaaaacatacactgggatctcagtagactcctctatccctctccatcaataacactgttcagacactgaggaaagaagaggctctagatcttattactgacacygttccttccgagttaccctcccttcacaaacaggaggatctttatccataaaaacacccaggagtacaaaaatgaccacaccttgatcactgacagggaggtttgaccttgccctcaacttgaacgttgtaccttcagtcaacagaatggagggaaatgaatacgaaacttccatttctaggacagtcatgggatcatgcttgaagtgagcttgaagagatgcttgtacaggcagaaaaagccttgttaccttttatatgtcaagattctataatgccattttcaccagagacaggatat

SEQ ID NO: 62330 - DNA, 600 bp, Chicken  19866894324236_1
gtctactgggttactgagccatacagatactggaactgtgaaaagatgtgtctcctgtctgactgtggaaaatgaaggtttggtagagcaggaattttttactcactagattccttattcgaaatgagtgagagaaaaaagcagctgtatcaagagctggagatgagggaaggaagagaaaatggccatccacaactgcagactcccaaggactctaggactcaactgtcctatctccgcaaaatctctcttgactaagaagcttcaagtcagtcctgcttataatgaatatatgtaggyagacaacattctgtcagtgataaacaaatagtccttttaactaaaactattttgtaaaaaatacttcctgattttccattaaraaataaagataatacataagtaaaatttgtaacatttcatttacccatggcccaaaggcagaacgttcctattttaaacacaaaactcagctagtttttttctgagaaatcactgccaatgcatctcataaaattacttttacacatcaacattcatttccagaagaatgaataaaacacaaaataatggaaacatagaaattaaacgttccatcat

SEQ ID NO: 62331 - DNA, 600 bp, Chicken  19866894324236_2
tagagcaggaattttttactcactagattccttattcgaaatgagtgagagaaaaaagcagctgtatcaagagctggagatgagggaaggaagagaaaatggccatccacaactgcagactcccaaggactctaggactcaactgtcctatctccgcaaaatctctcttgactaagaagcttcaagtcagtcctgcttataatgaatatatgtaggyagacaacattctgtcagtgataaacaaatagtccttttaactaaaactattttgtaaaaaatacttcctgattttccattaaraaataaagataatacataagtaaaatttgtaacatttcatttacccatggcccaaaggcagaacgttcctattttaaacacaaaactcagctagtttttttctgagaaatcactgccaatgcatctcataaaattacttttacacatcaacattcatttccagaagaatgaataaaacacaaaataatggaaacatagaaattaaacgttccatcatataaatgttttaaagtacaaatatagatggttaatactttccattaaaaaagaaactttttcccccaaacatcacctgtagtt

SEQ ID NO: 62332 - DNA, 600 bp, Chicken  19866894324237_1
tgctttgtggaagctttttattctacttctttttttaatttggctttaaaaagcctgcaactgaatattaaacagaatttcacctctagtatttcaccttttcccctaccaacgtcagcttctctctagctctgtgtctcagtgttctttgtttgtgcattctgtgctcataattatggcttaatcaaaatatatcagtgattttcaaaagtattttcatagtttccatgaattacagcaaatgcttactgcaaacatcagtgttgtgagacaacagaatagatctagtggaaaaccaamgcaaggagatgcacagaaaaggtatattccaaagtaaatgctccagcactgctaggcgttacaacaaaatgagcaatcagacgaagaaargctaccagtaagccattgtatgaaaacgttttaccagtttgactaatgaatcactgtgcaaatgtgagcagtgtacttacagtcagggtactgcagctaactagtctttctgatgggtgagaacagtgtccctccatgatcggtggtttaggtgatatttgaaaagctcttaagctttactcttactgaaaggcacattatatacatttc

SEQ ID NO: 62333 - DNA, 600 bp, Chicken  19866894324237_2
atttcaccttttcccctaccaacgtcagcttctctctagctctgtgtctcagtgttctttgtttgtgcattctgtgctcataattatggcttaatcaaaatatatcagtgattttcaaaagtattttcatagtttccatgaattacagcaaatgcttactgcaaacatcagtgttgtgagacaacagaatagatctagtggaaaaccaamgcaaggagatgcacagaaaaggtatattccaaagtaaatgctccagcactgctaggcgttacaacaaaatgagcaatcagacgaagaaargctaccagtaagccattgtatgaaaacgttttaccagtttgactaatgaatcactgtgcaaatgtgagcagtgtacttacagtcagggtactgcagctaactagtctttctgatgggtgagaacagtgtccctccatgatcggtggtttaggtgatatttgaaaagctcttaagctttactcttactgaaaggcacattatatacatttctaaaacaaaattctgtagaattatattatttgctacaagtcaaactattatttcatgaaataattcacactctgtgaaacacagaatttt

SEQ ID NO: 62334 - DNA, 600 bp, Chicken  19866894324257_1
tctgccctaaatgtgggaaaaatcgatgctaaactctcaagcatttcatcactgtgtcagaagagagctggctattacaaaggaagcttctgtagctccacaacgttaagtcagaacaagctggcactactcgtgtaaagaaacagtcccgtctctcctgttgtctagtaactcacattcctgatggttttctcctttatgccagcacaagtatttgcacagccacactgtgaactggaccagaaagcatatggaccatgtgattagtttcaatacaagtgatttttcagcacggctcaygacacatttgggttgtgacatttgggacgtgacaggtaagctgcaatagcccccactcaggactgcttcctttggcaacagtgcaatcctaaggctgccctgaaacagcttcgaaaggcagcaacaaacctggatcttaagctttttaacagtacttacaagcagagtactgttaaagaaaacatactaccaaaccttgacacagccaactgcacattcttcaagaaacggatactgagtcacattaatgatcaaagtcagtaagtttcttaatgtaacagcagtatatacaggtgcctt

SEQ ID NO: 62335 - DNA, 468 bp, Chicken  19866894324259_1
acagcatgctgtagcatggcgcagttcggctcgcagcgcagcgccggacccctctcgctgctcgcggcgctccggtgcggctgcggcggatcccggcgccgcgcggggctgtgtgtgcggggacatcggggacagaaccgccactcgaagcctttggggctccgcaggaggaggtgctgccgtgccgtaccgcgccgtaccgcggacgggcagctttccgtggcgatagacgggacgcgcggtgcgtgtgtggcgttttaccgatgtgtgcgaaagttttgcgactcgctgagagcaaaycccgacaagcttggtgaggagccggcgtgcatcccgaggctcacgcagctggcaaaggcgcagcgtgcttttctcctgccttgtcatttagggcctgcagcccccgggtctgagttctcgttgtgtactttcagcagcattcccgtgaggagttgctgtggggttgtg

SEQ ID NO: 62336 - DNA, 600 bp, Chicken  19866894324260_1
ctttaactcatctgaagttgcgctataagtagtgagtatctggttcatctgaagaaataggcagtagtgctttcaagatccaggaatactacttcagacaatttttttgcgtgttgaaatctcttatattaaatttaaagttaagcatatagttaaaacatttgaatgtaaccacaccattcggcaatactgactcaatatgtctaggctcatgtaacagacttgatcctaaacatgatagtaatgcttaattttcctatcaaactgccactcagttattctcaagttaccatttccacrttttttcaaccctctaatgattatcacttttatctgctaacttatagctcccattgggaatgcagggaaatggattacaactgaagaacagtaaatattccaatgattttaccaacagaagcactgtaacacagctgcatgtgaattcatattgtcctcagaaattatttctttggtttccacaagcaccaaatcaatttcaagtaactttatttcattcatccacctccatccagtgccaattttgatctatgtttacttctaccatcttctgtttcttgcctcatgtactaccatggc

SEQ ID NO: 62337 - DNA, 599 bp, Chicken  19866894324265_1
  misc_feature (1)..(110): n is any nucleotide
nnnnnnnnnnnnnnnnnnnnnnnnnnnnnnnnnnnnnnnnnnnnnnnnnnnnnnnnnnnnnnnnnnnnnnnnnnnnnnnnnnnnnnnnnnnnnnnnnnnnnnnnnnnnnntgattacaatacatagaactgcaacgtatccctatctaataccgaacagatactatccacttgctgaggaatagcaaagggagtctccagaaaatttctctagtgcgtgctggagtccagcttatgacactttcctgacaggagcaagaactcggaggttcaatctgactgtccttgtaatttcttattwatggccacttggggtctttgaggagaaactttcaggaaggttgttttatcttagtttagctggacatctggaacttaaagaaaggagcttcaaccttaaatgaactttctcagccagacaaaaatattaaataattggcatttggaatatcagttttcatgctttggaagtttcatatctcttatttgagaattccatattcttcataatctccattattttaagtagcattaggttatgagcaaagaacatccacatcagtgcagtttttatattctcgaatatcataatcgtaacta

SEQ ID NO: 62338 - DNA, 600 bp, Chicken  19866894324272_1
tccccgggagacacgcggggccgcgctgaccccggcaccgccgtgacacggaaacctattagcggtctcgctgggagactcccattagctgaaagggaggaggccataaaaacaaacagctctcctcgccctccctccagcatccttcgtgccgccgtccgtcctggatggctgtaaatcacagcgcatccttccgcagctgcggccgctttcggtgggtgcccacggaaatgggatgttaaggggaagaggaagcattagataagcacggtgtgtgcataaaaagtttatcctgggggyccctgggggcrtggagctccacagggttcagggcactgccagggggatacagggcagccccctcyctgcatccccctccmckcaccccwctttagggtgagtcagagagccagcagggatacgctgagcccccacaccgctgttgggtgatgtgcttcccaaccccacttgattcgtgtgttccaccttcacagcatcatcrcgttcatgtggttcggggctgagcaaaccccatctccccacgtgtaattcgatagcggtttggaaagcgagctcctcgggtgctcgtgttgtcatgga

SEQ ID NO: 62339 - DNA, 600 bp, Chicken  19866894324272_2
cacgcggggccgcgctgaccccggcaccgccgtgacacggaaacctattagcggtctcgctgggagactcccattagctgaaagggaggaggccataaaaacaaacagctctcctcgccctccctccagcatccttcgtgccgccgtccgtcctggatggctgtaaatcacagcgcatccttccgcagctgcggccgctttcggtgggtgcccacggaaatgggatgttaaggggaagaggaagcattagataagcacggtgtgtgcataaaaagtttatcctgggggyccctgggggcrtggagctccacagggttcagggcactgccagggggatacagggcagccccctcyctgcatccccctccmckcaccccwctttagggtgagtcagagagccagcagggatacgctgagcccccacaccgctgttgggtgatgtgcttcccaaccccacttgattcgtgtgttccaccttcacagcatcatcrcgttcatgtggttcggggctgagcaaaccccatctccccacgtgtaattcgatagcggtttggaaagcgagctcctcgggtgctcgtgttgtcatggagcccgtgaaat

SEQ ID NO: 62340 - DNA, 600 bp, Chicken  19866894324272_3
tctcgctgggagactcccattagctgaaagggaggaggccataaaaacaaacagctctcctcgccctccctccagcatccttcgtgccgccgtccgtcctggatggctgtaaatcacagcgcatccttccgcagctgcggccgctttcggtgggtgcccacggaaatgggatgttaaggggaagaggaagcattagataagcacggtgtgtgcataaaaagtttatcctgggggyccctgggggcrtggagctccacagggttcagggcactgccagggggatacagggcagccccctcyctgcatccccctccmckcaccccwctttagggtgagtcagagagccagcagggatacgctgagcccccacaccgctgttgggtgatgtgcttcccaaccccacttgattcgtgtgttccaccttcacagcatcatcrcgttcatgtggttcggggctgagcaaaccccatctccccacgtgtaattcgatagcggtttggaaagcgagctcctcgggtgctcgtgttgtcatggagcccgtgaaataagattaatcggggcagaggaaaagaaagtgagaaatcagagagcgggaggggg

SEQ ID NO: 62341 - DNA, 600 bp, Chicken  19866894324272_4
cccattagctgaaagggaggaggccataaaaacaaacagctctcctcgccctccctccagcatccttcgtgccgccgtccgtcctggatggctgtaaatcacagcgcatccttccgcagctgcggccgctttcggtgggtgcccacggaaatgggatgttaaggggaagaggaagcattagataagcacggtgtgtgcataaaaagtttatcctgggggyccctgggggcrtggagctccacagggttcagggcactgccagggggatacagggcagccccctcyctgcatccccctccmckcaccccwctttagggtgagtcagagagccagcagggatacgctgagcccccacaccgctgttgggtgatgtgcttcccaaccccacttgattcgtgtgttccaccttcacagcatcatcrcgttcatgtggttcggggctgagcaaaccccatctccccacgtgtaattcgatagcggtttggaaagcgagctcctcgggtgctcgtgttgtcatggagcccgtgaaataagattaatcggggcagaggaaaagaaagtgagaaatcagagagcgggagggggaacgagagcagctga

SEQ ID NO: 62342 - DNA, 600 bp, Chicken  19866894324272_5
cattagctgaaagggaggaggccataaaaacaaacagctctcctcgccctccctccagcatccttcgtgccgccgtccgtcctggatggctgtaaatcacagcgcatccttccgcagctgcggccgctttcggtgggtgcccacggaaatgggatgttaaggggaagaggaagcattagataagcacggtgtgtgcataaaaagtttatcctgggggyccctgggggcrtggagctccacagggttcagggcactgccagggggatacagggcagccccctcyctgcatccccctccmckcaccccwctttagggtgagtcagagagccagcagggatacgctgagcccccacaccgctgttgggtgatgtgcttcccaaccccacttgattcgtgtgttccaccttcacagcatcatcrcgttcatgtggttcggggctgagcaaaccccatctccccacgtgtaattcgatagcggtttggaaagcgagctcctcgggtgctcgtgttgtcatggagcccgtgaaataagattaatcggggcagaggaaaagaaagtgagaaatcagagagcgggagggggaacgagagcagctgagg

SEQ ID NO: 62343 - DNA, 600 bp, Chicken  19866894324272_6
tgaaagggaggaggccataaaaacaaacagctctcctcgccctccctccagcatccttcgtgccgccgtccgtcctggatggctgtaaatcacagcgcatccttccgcagctgcggccgctttcggtgggtgcccacggaaatgggatgttaaggggaagaggaagcattagataagcacggtgtgtgcataaaaagtttatcctgggggyccctgggggcrtggagctccacagggttcagggcactgccagggggatacagggcagccccctcyctgcatccccctccmckcaccccwctttagggtgagtcagagagccagcagggatacgctgagcccccacaccgctgttgggtgatgtgcttcccaaccccacttgattcgtgtgttccaccttcacagcatcatcrcgttcatgtggttcggggctgagcaaaccccatctccccacgtgtaattcgatagcggtttggaaagcgagctcctcgggtgctcgtgttgtcatggagcccgtgaaataagattaatcggggcagaggaaaagaaagtgagaaatcagagagcgggagggggaacgagagcagctgaggaggattg

SEQ ID NO: 62344 - DNA, 574 bp, Chicken  19866894324272_7
cggccgctttcggtgggtgcccacggaaatgggatgttaaggggaagaggaagcattagataagcacggtgtgtgcataaaaagtttatcctgggggyccctgggggcrtggagctccacagggttcagggcactgccagggggatacagggcagccccctcyctgcatccccctccmckcaccccwctttagggtgagtcagagagccagcagggatacgctgagcccccacaccgctgttgggtgatgtgcttcccaaccccacttgattcgtgtgttccaccttcacagcatcatcrcgttcatgtggttcggggctgagcaaaccccatctccccacgtgtaattcgatagcggtttggaaagcgagctcctcgggtgctcgtgttgtcatggagcccgtgaaataagattaatcggggcagaggaaaagaaagtgagaaatcagagagcgggagggggaacgagagcagctgaggaggattgccatcgaataccaatacagctctcatctgaagctctccagacctctcacagcgctgagagctgagctactccttcacaggaggagcg

SEQ ID NO: 62345 - DNA, 599 bp, Chicken  19866894324286_1
  misc_feature (1)..(118): n is any nucleotide
nnnnnnnnnnnnnnnnnnnnnnnnnnnnnnnnnnnnnnnnnnnnnnnnnnnnnnnnnnnnnnnnnnnnnnnnnnnnnnnnnnnnnnnnnnnnnnnnnnnnnnnnnnnnnnnnnnnnnntgtctcctttcattcactcctgctagcaaagcactacaagagcaagaagaaaataaagcatgaaagcaacacaggcattttgagtcaaagggaataatggcaagagcaacaaaagggaaggccaagtgttggagacttcaaaataaggcaactggcctaatgggaaaagactgctctcaaaygatggcagggtggcacttcagcttgtgcatctattacacaggggaacgatcgctgacttgctaaatcaatcatttcagcaaatctagtcctaattcctacagagataaaacaaatcatccccaaactgacatcacatcaccgctctgaaagtattactagactgtactcaaacgcaaagctcgcttaatctcttccaattgcagcctgaagattaaaataccttgagcccctacatgacgcagagcagtggtttggggacctgcttttcactcagaatcacagaattgctcaggttgga

SEQ ID NO: 62346 - DNA, 600 bp, Chicken  19866894324287_1
ctgagagccaccacctggatggtttagaaaggagcgctgctcaggtcagccatgcaccaggcaaggtgagtgcttcagcaggaagactgccgtctgctttgggtgttgagggggacctgaaggtccttggagcacctggaagtgctctccacctccgagagggattgtgcattagcaaaatagatctttctttatggtttagtgctctgcagtagggaatggatgcatagtaatatcttgaagtcattttcagtctctccagtttgtgtgaactctgtaacctgtaagcccatcagtgtktaggatcagagcccatagcagggcagcacatccttgcaggaacggctgtgcaggtgccaggcagtgctgtgggatctgtgcaccatcaccacagagcagggcaggagctgtgccctcagccccacgggggctggaagcgatctgctcccttccctcagaagaaagaatcactcctgtatttcccttttccacttcttgctctttttttttcttcttcaactcaaagaatgatggtaagagtagagctaaaggatgactgaacagcaaatgcaaattttttaatttaaaatcggatttata

SEQ ID NO: 62347 - DNA, 600 bp, Chicken  19866894324288_1
ggaagtggtttgttttatagacaatgcgatcaaaatctctgtgagagccgtaaaatagagagcagccactgaagtgatgaccactgaggcatatggtatctaaattaacacggagcatagcatctcctgggaggaggtcatcagggtatcatgaggctagggcagaaggctccttttgtctcttcctacattaaattcctaagataaggtaacactatactcatatggaaaaccagataaaactggaaatgcaatgggtttttttgagtctttgacaccaagtttaaaggataaggctaygcacattgctggaactcttatcctttttggggagggtgggaagaactacctctaatccctctgtgtgatttctaaatcttgatttaagagggattttgattactctgttctcttataaacactgttttacttctagaatgcaaatgatcttttccttaatttagagccaagtaaatgagaacaggcaggagaaattcataaatcaactgataactatatctcattaaagagaatcattggcactgaggaacagcttctctctgaatcactgcatgtgccaagtattcttagcgtgaaaaa

SEQ ID NO: 62348 - DNA, 600 bp, Chicken  19866894324292_1
ctcttggttctctcacatctatggagctttgctgcagatttggtcttgtgcaactgcgggagaatgttccctaaagaaaaaaagtgtaggataaagatgtggtatcgcttctagtcgtaattcctatttcatatgatagagtgcaccgggattgttttgcatagcaccattaaggatcgggaagtctattttttattgaatggttccaaaaagccacaaatgaataggtgatagcacacctctgtttattacaacacttctgcaactgtaaaagccaaataaatcttagcagcacattayctgtttctatttcagcctcctcttggggctatgtcagttacctacaggtaatccctttaccctttgtggatggagacgtttcctcacgaggttgaaagcttcccagcttcttcaaaacattgctgtcctatatgtgctgatrgacaaaatgagatatgtgttaactcatattaacgaggagttaatatttctgatggtactaatttaaccactcatgagctgatatytaatgcacaacccaaatacrtcccagagacagctcctatgtgtgcctgctctgcccgcagcagggacttgctg

SEQ ID NO: 62349 - DNA, 600 bp, Chicken  19866894324292_2
gcaccgggattgttttgcatagcaccattaaggatcgggaagtctattttttattgaatggttccaaaaagccacaaatgaataggtgatagcacacctctgtttattacaacacttctgcaactgtaaaagccaaataaatcttagcagcacattayctgtttctatttcagcctcctcttggggctatgtcagttacctacaggtaatccctttaccctttgtggatggagacgtttcctcacgaggttgaaagcttcccagcttcttcaaaacattgctgtcctatatgtgctgatrgacaaaatgagatatgtgttaactcatattaacgaggagttaatatttctgatggtactaatttaaccactcatgagctgatatytaatgcacaacccaaatacrtcccagagacagctcctatgtgtgcctgctctgcccgcagcagggacttgctgcttcacttctctgcatgcacagaaattagctgcaaaacttaggagctccctggtttttgtatcttctggctcagtacccaactttactcccacggaagtgttcccccagacacagcagggctgaggagcacaagcagagcay

SEQ ID NO: 62350 - DNA, 600 bp, Chicken  19866894324292_3
gtgatagcacacctctgtttattacaacacttctgcaactgtaaaagccaaataaatcttagcagcacattayctgtttctatttcagcctcctcttggggctatgtcagttacctacaggtaatccctttaccctttgtggatggagacgtttcctcacgaggttgaaagcttcccagcttcttcaaaacattgctgtcctatatgtgctgatrgacaaaatgagatatgtgttaactcatattaacgaggagttaatatttctgatggtactaatttaaccactcatgagctgatatytaatgcacaacccaaatacrtcccagagacagctcctatgtgtgcctgctctgcccgcagcagggacttgctgcttcacttctctgcatgcacagaaattagctgcaaaacttaggagctccctggtttttgtatcttctggctcagtacccaactttactcccacggaagtgttcccccagacacagcagggctgaggagcacaagcagagcayggctgctcgtggcacaggttgagcagctgacttcctcacagctgcaaacaagggcagcttgctgtgtgggataaaatgagaactg

SEQ ID NO: 62351 - DNA, 600 bp, Chicken  19866894324292_4
attacaacacttctgcaactgtaaaagccaaataaatcttagcagcacattayctgtttctatttcagcctcctcttggggctatgtcagttacctacaggtaatccctttaccctttgtggatggagacgtttcctcacgaggttgaaagcttcccagcttcttcaaaacattgctgtcctatatgtgctgatrgacaaaatgagatatgtgttaactcatattaacgaggagttaatatttctgatggtactaatttaaccactcatgagctgatatytaatgcacaacccaaatacrtcccagagacagctcctatgtgtgcctgctctgcccgcagcagggacttgctgcttcacttctctgcatgcacagaaattagctgcaaaacttaggagctccctggtttttgtatcttctggctcagtacccaactttactcccacggaagtgttcccccagacacagcagggctgaggagcacaagcagagcayggctgctcgtggcacaggttgagcagctgacttcctcacagctgcaaacaagggcagcttgctgtgtgggataaaatgagaactggcagagctgctttgtgtgtt

SEQ ID NO: 62352 - DNA, 600 bp, Chicken  19866894324292_5
gacaaaatgagatatgtgttaactcatattaacgaggagttaatatttctgatggtactaatttaaccactcatgagctgatatytaatgcacaacccaaatacrtcccagagacagctcctatgtgtgcctgctctgcccgcagcagggacttgctgcttcacttctctgcatgcacagaaattagctgcaaaacttaggagctccctggtttttgtatcttctggctcagtacccaactttactcccacggaagtgttcccccagacacagcagggctgaggagcacaagcagagcayggctgctcgtggcacaggttgagcagctgacttcctcacagctgcaaacaagggcagcttgctgtgtgggataaaatgagaactggcagagctgctttgtgtgttttaaataagcttcacagttaaggacacattatgttaatctagaaccacaggcagtgcaggcatctgggccctgcgtgctcacctggtgagtgagcttcctcttagagtgatgggttcatgggatgtagctgggttttggagccgtgtgtggatttggcttttctcagtacattcttttctgcttgtctgagttca

SEQ ID NO: 62353 - DNA, 600 bp, Chicken  19866894324303_1
gttgtgctcagtaaagcatattcaattccagtgcatccacatactcacatccgtacaaagaggaatgttgactctgatcatttaaagaaagatcggctttgaatctgtaattttctcagtattgtaaagatgctgtgtctacaaggaaggctgtgagctctcctctgcttaaggtctgcaacatctctatgcaccaaacatgaaaatgcaaaggttgtcaggtcctgccagaaaggaaatcggctgtgagcaacccgtggtgtgcattaaatctcccacctcagcatgcagacggtgccrggctgagtgggatctgtaaatcctgcacggtcaattcaatgcaatttagagttcactgcaagttggccctcagtctcttttgatttaaaatattcctaatttgcactggttcacctcaggagagggagtcctccctggcttcttaatattagcaacaagtggaagtgctatcaccatttatcattcagactttgctgactacattacactacagatttcattgctccttctgcagaaggagaggaagggagctgtgttaaatgccctgcggctgtgctgggggctgctggtgttcctgct

SEQ ID NO: 62354 - DNA, 456 bp, Chicken  19866894324303_2
agtgctatcaccatttatcattcagactttgctgactacattacactacagatttcattgctccttctgcagaaggagaggaagggagctgtgttaaatgccctgcggctgtgctgggggctgctggtgttcctgctgcctagggctctatccacgagcacagatcctgtccccagcggccaggaaactcagatggtgctgggttttgaatgatactctggtgagcaggatttgttgggtaggggagaacagctgcagcgggcaatgagtgagcaggtttgtcctcccacctccagcatkgagcaagcttgctgcctttgcttttctctcctctgcacagagcagtggtctcctgcaatgcgtgtcttccagaaacagacccactcctgcaaaaagactgcaaggcagtggtaccacgttgattataagaaataggaacacgatgctcttccatct

SEQ ID NO: 62355 - DNA, 600 bp, Chicken  19866894324307_1
attaccagatggctatcatctgctctcctcatttaaccacaactgagcaaggccaggccaggaaacagaaacgaggtttattccaactgaacccaattgatttcttgtataggaattccccctgcatgaccctagggatttcagcagcctcacactgctttggaacaggggtttcatgttcttaaacattctttgtgcagattactcgtccttacagtaagcagcactgaactcaacaagcagctttgaaatccagatgttgctccatcaggctcagaactcacgcaactctccagtgtytgcctcagagataattttgctttccatttaatgctcaccttctattggccttcctaaaagttgcagcaatacctcagtgttgctgagagcaccttcagaagagttgtctcccagttacagacaacatttaagtatttccaaatgcaaattcctttttatttgctgtgaatgtggtgaagcatgtgatcaatatttcattagcttcatgtaacatcagatgagcaacgctcatttatttctttgtcttgcaaacaaagaacttgcaccacgtacctcacacagggtacagtgacaggctgg

SEQ ID NO: 62356 - DNA, 600 bp, Chicken  19866894324311_1
acaagttgcatgacactgtacgttgacttttatgaatgcatgtgagcagtgtgtgtggagttcctgctgaccaagacttctgggatttcagatgtcctgaaagtcttcacacgttgccaattctctctttgtatttacacaaaatttccagacggaaaagatgtctgcagggaaactcagagagacaataacctaaaattagagctgtgaacaatggatctgggcagggtcggtagcccagactcccctaaatgggatttttgtttagttttagtctggataaaaattgtttttgaagtsaaatatttaattggcttgttaaatccttttwtaaaccttcctgaatattgcagaatgttaatgtttcttttaaaagtgagagttattttyccccaaactgaaactaataagtaattagttctcgtgtcctccaaatcatatggcctaatgaatgtaacagtcattacaataactttttacagcacmattgttttgcatgtcaattttttcatctgataactgagggtaaagaacaggctattcctctttccaaaactgctttggaatccactttaaaaatccttggcaagtgctgctatt

SEQ ID NO: 62357 - DNA, 600 bp, Chicken  19866894324311_2
atgaatgcatgtgagcagtgtgtgtggagttcctgctgaccaagacttctgggatttcagatgtcctgaaagtcttcacacgttgccaattctctctttgtatttacacaaaatttccagacggaaaagatgtctgcagggaaactcagagagacaataacctaaaattagagctgtgaacaatggatctgggcagggtcggtagcccagactcccctaaatgggatttttgtttagttttagtctggataaaaattgtttttgaagtsaaatatttaattggcttgttaaatccttttwtaaaccttcctgaatattgcagaatgttaatgtttcttttaaaagtgagagttattttyccccaaactgaaactaataagtaattagttctcgtgtcctccaaatcatatggcctaatgaatgtaacagtcattacaataactttttacagcacmattgttttgcatgtcaattttttcatctgataactgagggtaaagaacaggctattcctctttccaaaactgctttggaatccactttaaaaatccttggcaagtgctgctattgaatgaaagaaggaattgtgcagaagaggtg

SEQ ID NO: 62358 - DNA, 600 bp, Chicken  19866894324311_3
gatgtcctgaaagtcttcacacgttgccaattctctctttgtatttacacaaaatttccagacggaaaagatgtctgcagggaaactcagagagacaataacctaaaattagagctgtgaacaatggatctgggcagggtcggtagcccagactcccctaaatgggatttttgtttagttttagtctggataaaaattgtttttgaagtsaaatatttaattggcttgttaaatccttttwtaaaccttcctgaatattgcagaatgttaatgtttcttttaaaagtgagagttattttyccccaaactgaaactaataagtaattagttctcgtgtcctccaaatcatatggcctaatgaatgtaacagtcattacaataactttttacagcacmattgttttgcatgtcaattttttcatctgataactgagggtaaagaacaggctattcctctttccaaaactgctttggaatccactttaaaaatccttggcaagtgctgctattgaatgaaagaaggaattgtgcagaagaggtgcctctgccttgcaattatttgagttcctatttacaggtaacttgcagagggtcaacaga

SEQ ID NO: 62359 - DNA, 600 bp, Chicken  19866894324311_4
aataacctaaaattagagctgtgaacaatggatctgggcagggtcggtagcccagactcccctaaatgggatttttgtttagttttagtctggataaaaattgtttttgaagtsaaatatttaattggcttgttaaatccttttwtaaaccttcctgaatattgcagaatgttaatgtttcttttaaaagtgagagttattttyccccaaactgaaactaataagtaattagttctcgtgtcctccaaatcatatggcctaatgaatgtaacagtcattacaataactttttacagcacmattgttttgcatgtcaattttttcatctgataactgagggtaaagaacaggctattcctctttccaaaactgctttggaatccactttaaaaatccttggcaagtgctgctattgaatgaaagaaggaattgtgcagaagaggtgcctctgccttgcaattatttgagttcctatttacaggtaacttgcagagggtcaacagataattagaaaatcatttgaaatagtaaataaaaaagctagacaggaattgtacaaacacagtacttgcagcagctggctataactatccttaacac

SEQ ID NO: 62360 - DNA, 600 bp, Chicken  19866894324313_1
gagcagggctgccttagcagagcagttatcactgtcaaaagtgctcatgctaacactgatgggtctgatgctatttaatgtcactgttaatgatccagctgaaaggagagtgacagactaggcagtctgcgagttctgaacagattacatggtggcccaaacttcatgtgcacaatgattttggtataagacagcagaagtaaagcaaaaataaaaatatctgtagatttgctttcaggagaagctaaagaaagtgaagcaaaagtctacaggtctatccaggaactgcacccatcacasaacattgagatttgtaccaaaaaggttcagccagagaccagggaagcagaaacagttttcttcatggattctcgttcccttgcattacatcagaagctgtgcagagtgctctgtgcatttacacggctctgcagcaagtccattagaggttagcatttgagtcctgatttatgctgatacagcgcatgcatttatctgactgtgagttgattatgtactgtctgaaagtctctgggaactcacaggggctaaagatgacactttgcatgctggaggaaacagaaatggctagatatgctt

SEQ ID NO: 62361 - DNA, 600 bp, Chicken  19866894324320_1
taattgggcttccagtgccagtgcaatttgaaatgttttcctcagatctacaaatgtataactataagataacacctcttcatgcatgcaagggacccgaaaacgttatgcattctttctttaataaatttgtaagttgaaagcattaaagttgtctgctgggcacttctgatatttttcagcgtatcaccatgtgtgaggacacacaatgtcgctaacttcaacacagcaacttttcacaatcattcttactcaattagtttgaaagtagtgtattttacacagatgtactatcactgyrcctttgcaattcatgaatgcttccacatctgtcatgtctaatcccagtttataactgaagagtaagaagcttattcaygctctacaaaatccatgagaaaacatataggtgtatctatggattacatctactaaagatacttaaatgagagaacatcagtattcacaaatagaaaatgatgaacaagaatcctttttttttcttgccaatcagatcaagagtttctgaattgttaattggagtttcaaatttagaagtgtggaaatagctgtaaaatctgaagcgtaggaaaactttcc

SEQ ID NO: 62362 - DNA, 600 bp, Chicken  19866894324320_2
aattgggcttccagtgccagtgcaatttgaaatgttttcctcagatctacaaatgtataactataagataacacctcttcatgcatgcaagggacccgaaaacgttatgcattctttctttaataaatttgtaagttgaaagcattaaagttgtctgctgggcacttctgatatttttcagcgtatcaccatgtgtgaggacacacaatgtcgctaacttcaacacagcaacttttcacaatcattcttactcaattagtttgaaagtagtgtattttacacagatgtactatcactgyrcctttgcaattcatgaatgcttccacatctgtcatgtctaatcccagtttataactgaagagtaagaagcttattcaygctctacaaaatccatgagaaaacatataggtgtatctatggattacatctactaaagatacttaaatgagagaacatcagtattcacaaatagaaaatgatgaacaagaatcctttttttttcttgccaatcagatcaagagtttctgaattgttaattggagtttcaaatttagaagtgtggaaatagctgtaaaatctgaagcgtaggaaaactttcct

SEQ ID NO: 62363 - DNA, 600 bp, Chicken  19866894324320_3
tcatgcatgcaagggacccgaaaacgttatgcattctttctttaataaatttgtaagttgaaagcattaaagttgtctgctgggcacttctgatatttttcagcgtatcaccatgtgtgaggacacacaatgtcgctaacttcaacacagcaacttttcacaatcattcttactcaattagtttgaaagtagtgtattttacacagatgtactatcactgyrcctttgcaattcatgaatgcttccacatctgtcatgtctaatcccagtttataactgaagagtaagaagcttattcaygctctacaaaatccatgagaaaacatataggtgtatctatggattacatctactaaagatacttaaatgagagaacatcagtattcacaaatagaaaatgatgaacaagaatcctttttttttcttgccaatcagatcaagagtttctgaattgttaattggagtttcaaatttagaagtgtggaaatagctgtaaaatctgaagcgtaggaaaactttcctttcacattttcaaataaacgcttccatatttttctctcttaaagtctaagaagtgtttaatttaagtaaactctatac

SEQ ID NO: 62364 - DNA, 600 bp, Chicken  19866894324325_1
gctctgtgctgacagacttttcttggtagcaagcctgcattgctggaatgcattccctgcagaaatgcaattaagtatgtgcttggctacttttaaaagagctgcaaagccccacctctctgcccaagccttccacttgctaaatctccacttcttggtttactagaaaggctacaggcggctcagaggctggcgtggagctatttttatggcagttatttcccactctagccctgaaaaaaactttttacgaacaatttacaaaaaaattttacaaacaaataaattaaatttgaaaargagcattttgacagcagaagatcttgtcactgagactggtgccaaccagacagcaactctgatgtgtgggatatgagctcaccccattgtactcagggggtgtcactgccaatgaatggcttctgccaggttaacaaacaagctattacttcttttgtgaggtgtcaatacagctgtcctcgtataatttattttgtggaggaccatttttacctcattctaatgtttgattaaagggttatcttcaggaaatgggaatattcataagatttaattcctgtgagtcataacctgttattt

SEQ ID NO: 62365 - DNA, 599 bp, Chicken  19866894324329_1
  misc_feature (1)..(43): n is any nucleotide
nnnnnnnnnnnnnnnnnnnnnnnnnnnnnnnnnnnnnnnnnnntttcatatcactgcacataattctacatctcagctgagtgagatgcagttgaaaaaataaaaaggaacccatgcacagataaatgtagctcttgtttaaaacatcatcattatctctcaattttgctgatttctccaaacaaaactgtgtttgcgagtgttttcagcatctgagttgctcactcagaagagtttaatgaacgctttttactgtgactgcttgcacgcctgcctttcttgtttccatattccactcaktatatgtttgtggctatgagctggaaggggtctgactcttaggagttcggatgggatctaagcaagagcaatctgtacccgaagaaagatgtaatggtaaacttaaagaaatgttatggataaaataaagaaatatgaagacatttgctgtagggatttgtaaactaaaatattgtttcagattctctttttttccttttctgtggaaatttttgaaacacctcttccatctctccagggccttttcatgtcatacagaagatgaaaagttctgctcttcttccaggcaaaaactgatg

SEQ ID NO: 62366 - DNA, 600 bp, Chicken  19866894324337_1
ttatgaagagtaagcttactgtaagctcacattttgattttaacgttatctcgagtcccctttcccctatctccacctgttgtaagccacagtgccagcatcagccctcagagacgcagcagtatcttctgcctggacaacctgcgaccttacccacagagctgcaggtcagagcaggggggacacaaacacgctccagaaggaacgcttgtggccagctctgtcggtacagcagtgccttaaaggcttctccctgcgtgcacccgaagcgttgtgtccgcaggaaaaggggtttgcttwttccaaagcaacattctcatcatttgtgaacctgcaaatgtcatctaactgttaaacattcagagtcgcaaaacaaactgcaccgcacgacaccctgggtcagctcgggaacgggcaaatggggaaaggtgtttaatgctgttttgcttagtgaccagaatccactgctttatatacgtgggattcagtcgcagccaagaccacagtaggactacataccccctgyrtttaacctgtgaaagacaacacagactgcagcatgatacaggacaagagagcgttgaacctgcgaatctcaca

SEQ ID NO: 62367 - DNA, 412 bp, Chicken  19866894324337_2
gtacagcagtgccttaaaggcttctccctgcgtgcacccgaagcgttgtgtccgcaggaaaaggggtttgcttwttccaaagcaacattctcatcatttgtgaacctgcaaatgtcatctaactgttaaacattcagagtcgcaaaacaaactgcaccgcacgacaccctgggtcagctcgggaacgggcaaatggggaaaggtgtttaatgctgttttgcttagtgaccagaatccactgctttatatacgtgggattcagtcgcagccaagaccacagtaggactacataccccctgyrtttaacctgtgaaagacaacacagactgcagcatgatacaggacaagagagcgttgaacctgcgaatctcacaggaggcatcggcctccctcgcacacagttttgccacac

SEQ ID NO: 62368 - DNA, 411 bp, Chicken  19866894324337_3
tacagcagtgccttaaaggcttctccctgcgtgcacccgaagcgttgtgtccgcaggaaaaggggtttgcttwttccaaagcaacattctcatcatttgtgaacctgcaaatgtcatctaactgttaaacattcagagtcgcaaaacaaactgcaccgcacgacaccctgggtcagctcgggaacgggcaaatggggaaaggtgtttaatgctgttttgcttagtgaccagaatccactgctttatatacgtgggattcagtcgcagccaagaccacagtaggactacataccccctgyrtttaacctgtgaaagacaacacagactgcagcatgatacaggacaagagagcgttgaacctgcgaatctcacaggaggcatcggcctccctcgcacacagttttgccacac

SEQ ID NO: 62369 - DNA, 599 bp, Chicken  19866894324344_1
  misc_feature (1)..(82): n is any nucleotide
nnnnnnnnnnnnnnnnnnnnnnnnnnnnnnnnnnnnnnnnnnnnnnnnnnnnnnnnnnnnnnnnnnnnnnnnnnnnnnnnnnaaaaattcagcatggattttgaggagcatcatccagattcctattagccaagatgttctgcatgctttacttacagttaaaacgcactgaactgggagctgggtgaacactttgacagtatgatgggcttaacaaaacaatcatggaatcatagaatggcctgggttgaaaaggacctcagagatcatctggtttcaaccccctgccacgagctgggytgccaaccactagaaaaacagaacaaaaaataccatttctgcaaccagagataggtgagggctctaaaacttcctctgcaaattaatcgttacaaagttttggtgctgttccttttagcaaggtcagcccttaactgtgctctgccaatgcctcagcatctgctactaccagacctattttgatgtgatatttgagcaaagtatagcacagaactaagaaaagcaagcactggkgtgaaggatggcragtactgcttttagagcaatgaaatacaaagacagttgtaaggttctgccta

SEQ ID NO: 62370 - DNA, 600 bp, Chicken  19866894324344_2
agaatggcctgggttgaaaaggacctcagagatcatctggtttcaaccccctgccacgagctgggytgccaaccactagaaaaacagaacaaaaaataccatttctgcaaccagagataggtgagggctctaaaacttcctctgcaaattaatcgttacaaagttttggtgctgttccttttagcaaggtcagcccttaactgtgctctgccaatgcctcagcatctgctactaccagacctattttgatgtgatatttgagcaaagtatagcacagaactaagaaaagcaagcactggkgtgaaggatggcragtactgcttttagagcaatgaaatacaaagacagttgtaaggttctgcctatgtagctctggaagtgcaaaggtctgatccctccccggcaagtgcatgctggcacagcttctwgcacagacgtgatttgatcagcaacatttctcttccaactgactgtgcctgatttactcagaaaggaatataaacacctgtaaaaatggtactttgtcagtactgtgggcacaccttactgcctgagaatcactgcagtattgcacttcaggtgcagatgttcatatgcagg

SEQ ID NO: 62371 - DNA, 600 bp, Chicken  19866894324344_3
ttgaaaaggacctcagagatcatctggtttcaaccccctgccacgagctgggytgccaaccactagaaaaacagaacaaaaaataccatttctgcaaccagagataggtgagggctctaaaacttcctctgcaaattaatcgttacaaagttttggtgctgttccttttagcaaggtcagcccttaactgtgctctgccaatgcctcagcatctgctactaccagacctattttgatgtgatatttgagcaaagtatagcacagaactaagaaaagcaagcactggkgtgaaggatggcragtactgcttttagagcaatgaaatacaaagacagttgtaaggttctgcctatgtagctctggaagtgcaaaggtctgatccctccccggcaagtgcatgctggcacagcttctwgcacagacgtgatttgatcagcaacatttctcttccaactgactgtgcctgatttactcagaaaggaatataaacacctgtaaaaatggtactttgtcagtactgtgggcacaccttactgcctgagaatcactgcagtattgcacttcaggtgcagatgttcatatgcaggcaaaaggcagcac

SEQ ID NO: 62372 - DNA, 600 bp, Chicken  19866894324344_4
tctaaaacttcctctgcaaattaatcgttacaaagttttggtgctgttccttttagcaaggtcagcccttaactgtgctctgccaatgcctcagcatctgctactaccagacctattttgatgtgatatttgagcaaagtatagcacagaactaagaaaagcaagcactggkgtgaaggatggcragtactgcttttagagcaatgaaatacaaagacagttgtaaggttctgcctatgtagctctggaagtgcaaaggtctgatccctccccggcaagtgcatgctggcacagcttctwgcacagacgtgatttgatcagcaacatttctcttccaactgactgtgcctgatttactcagaaaggaatataaacacctgtaaaaatggtactttgtcagtactgtgggcacaccttactgcctgagaatcactgcagtattgcacttcaggtgcagatgttcatatgcaggcaaaaggcagcacggcaagagcaaactttgttcaagctgtgattgctccgagcagggcttgtcggaagtggagttaattgagcatagccaggagcactgccctggggtcctcagcactgggactgctg

SEQ ID NO: 62373 - DNA, 600 bp, Chicken  19866894324345_1
acaagagtattgctcacctaaggtttggagaaacacctaatcgcaacattttggcctttgactttctaaaccaaattctgtaagacaataaaatcatttggtactatcaatcactttatatttaatatgcatacacaggacaagtatcagaacaggggaaagaaacaatgccatctattaaggtgacccttcctaacctgatgactgcccactggtgttttgtggcaatgttcacaaataaccttaacgtgtactatctgcagaaaaatgagtctcatgaacaggaaaacagctaaactygctgcgtgacttgcaatgaacagcattgcagaagtactgatgtgtagctttatttaaaagccaagagtggaaaagtagtgttaagcaccmaagaaaacagaggttttcaccttcagtataaactgagaaaaggagcaacaacacaagcatctacaacaaagggcccctctgggcactatgccatcatcacctctgctttccattatcagcagacattaacaagaattacaatgttcaggttccattttgaactcctgttcattagagtgtataaacttgtccttttccattttcttcaaa

SEQ ID NO: 62374 - DNA, 600 bp, Chicken  19866894324345_2
aaatcatttggtactatcaatcactttatatttaatatgcatacacaggacaagtatcagaacaggggaaagaaacaatgccatctattaaggtgacccttcctaacctgatgactgcccactggtgttttgtggcaatgttcacaaataaccttaacgtgtactatctgcagaaaaatgagtctcatgaacaggaaaacagctaaactygctgcgtgacttgcaatgaacagcattgcagaagtactgatgtgtagctttatttaaaagccaagagtggaaaagtagtgttaagcaccmaagaaaacagaggttttcaccttcagtataaactgagaaaaggagcaacaacacaagcatctacaacaaagggcccctctgggcactatgccatcatcacctctgctttccattatcagcagacattaacaagaattacaatgttcaggttccattttgaactcctgttcattagagtgtataaacttgtccttttccattttcttcaaactgaaaattggcagaggagtgcttgtgggtggggagtttttggaaagactattatttttaaaatttagtcttttcaaactgttctaaata

SEQ ID NO: 62375 - DNA, 600 bp, Chicken  19866894324356_1
gaaaaataaggtatttctcaagaatttttgaattcctgtacacctcattctgcaatggatctttcatttctcatagctaatatggaaaggagcagatctttccctctctggatggacacatttctctctgtcctttaacacacaaaggctgtaaaacacaaaagaatataaaacatagaagaaactatgtgccctaaactcaggacaattgaattcctagttctaaacaggacaggatcagacatcaggcatgaaatattttaccacccataatatccttttctctgggagccaccaatmctgatgtaagaagtctaatagaagaaatctgagraaartaaaggtagtcttgagtcctgattctgatttggagtcagggtggcccttcaataacagggaaatggatgaactgcaagtattaaatttatttaacagaaaaatggaaaaagagagacttgtaaagaaaagactagtygtattattctcaatygtccctggttaggcatcaaaagagagacaaattaaaagaaattgaaaagcaagaagaatccaaaagaattgtttttatcttttaatgcatcactcccaatttggatcaag

SEQ ID NO: 62376 - DNA, 600 bp, Chicken  19866894324356_2
cctgtacacctcattctgcaatggatctttcatttctcatagctaatatggaaaggagcagatctttccctctctggatggacacatttctctctgtcctttaacacacaaaggctgtaaaacacaaaagaatataaaacatagaagaaactatgtgccctaaactcaggacaattgaattcctagttctaaacaggacaggatcagacatcaggcatgaaatattttaccacccataatatccttttctctgggagccaccaatmctgatgtaagaagtctaatagaagaaatctgagraaartaaaggtagtcttgagtcctgattctgatttggagtcagggtggcccttcaataacagggaaatggatgaactgcaagtattaaatttatttaacagaaaaatggaaaaagagagacttgtaaagaaaagactagtygtattattctcaatygtccctggttaggcatcaaaagagagacaaattaaaagaaattgaaaagcaagaagaatccaaaagaattgtttttatcttttaatgcatcactcccaatttggatcaaggaaaatgaggaaagaaacttgagacaaggcttya

SEQ ID NO: 62377 - DNA, 600 bp, Chicken  19866894324356_3
tacacctcattctgcaatggatctttcatttctcatagctaatatggaaaggagcagatctttccctctctggatggacacatttctctctgtcctttaacacacaaaggctgtaaaacacaaaagaatataaaacatagaagaaactatgtgccctaaactcaggacaattgaattcctagttctaaacaggacaggatcagacatcaggcatgaaatattttaccacccataatatccttttctctgggagccaccaatmctgatgtaagaagtctaatagaagaaatctgagraaartaaaggtagtcttgagtcctgattctgatttggagtcagggtggcccttcaataacagggaaatggatgaactgcaagtattaaatttatttaacagaaaaatggaaaaagagagacttgtaaagaaaagactagtygtattattctcaatygtccctggttaggcatcaaaagagagacaaattaaaagaaattgaaaagcaagaagaatccaaaagaattgtttttatcttttaatgcatcactcccaatttggatcaaggaaaatgaggaaagaaacttgagacaaggcttyagaag

SEQ ID NO: 62378 - DNA, 600 bp, Chicken  19866894324356_4
tagaagaaactatgtgccctaaactcaggacaattgaattcctagttctaaacaggacaggatcagacatcaggcatgaaatattttaccacccataatatccttttctctgggagccaccaatmctgatgtaagaagtctaatagaagaaatctgagraaartaaaggtagtcttgagtcctgattctgatttggagtcagggtggcccttcaataacagggaaatggatgaactgcaagtattaaatttatttaacagaaaaatggaaaaagagagacttgtaaagaaaagactagtygtattattctcaatygtccctggttaggcatcaaaagagagacaaattaaaagaaattgaaaagcaagaagaatccaaaagaattgtttttatcttttaatgcatcactcccaatttggatcaaggaaaatgaggaaagaaacttgagacaaggcttyagaagccatgtgcagtccaccttgtgttctgcttctgtgagacagatgccaattagtctggaagaagctggtagtcattcctcagtactcatacctactgtagttttcatgccacagccctgcaaaagaagcactctaaggc

SEQ ID NO: 62379 - DNA, 600 bp, Chicken  19866894324356_5
gccctaaactcaggacaattgaattcctagttctaaacaggacaggatcagacatcaggcatgaaatattttaccacccataatatccttttctctgggagccaccaatmctgatgtaagaagtctaatagaagaaatctgagraaartaaaggtagtcttgagtcctgattctgatttggagtcagggtggcccttcaataacagggaaatggatgaactgcaagtattaaatttatttaacagaaaaatggaaaaagagagacttgtaaagaaaagactagtygtattattctcaatygtccctggttaggcatcaaaagagagacaaattaaaagaaattgaaaagcaagaagaatccaaaagaattgtttttatcttttaatgcatcactcccaatttggatcaaggaaaatgaggaaagaaacttgagacaaggcttyagaagccatgtgcagtccaccttgtgttctgcttctgtgagacagatgccaattagtctggaagaagctggtagtcattcctcagtactcatacctactgtagttttcatgccacagccctgcaaaagaagcactctaaggccaatacagcaaacag

SEQ ID NO: 62380 - DNA, 600 bp, Chicken  19866894324356_6
raaartaaaggtagtcttgagtcctgattctgatttggagtcagggtggcccttcaataacagggaaatggatgaactgcaagtattaaatttatttaacagaaaaatggaaaaagagagacttgtaaagaaaagactagtygtattattctcaatygtccctggttaggcatcaaaagagagacaaattaaaagaaattgaaaagcaagaagaatccaaaagaattgtttttatcttttaatgcatcactcccaatttggatcaaggaaaatgaggaaagaaacttgagacaaggcttyagaagccatgtgcagtccaccttgtgttctgcttctgtgagacagatgccaattagtctggaagaagctggtagtcattcctcagtactcatacctactgtagttttcatgccacagccctgcaaaagaagcactctaaggccaatacagcaaacagaaaccagggaacttaaaaaactcaagccaagtgttcgtctgtgacagcaactcctgcttccatgactcagtgcacctacgacattatgcaaaggtgaagttaacagctctaaccacagcctgggtttgagatccttgacaagg

SEQ ID NO: 62381 - DNA, 600 bp, Chicken  19866894324357_1
gcttctcagcagtgaggtttatcccatatttcgaatgaaatctgcccacttgtccactcttcagttagtaagagagcagtacaggaaattgttttcctttgagataaatgcacatcagtatacatcatggcctctttggaattaattgttcctcgtagacaaatttccctgaacatgtgcagcagcagccagctacagaaaagtacttgtaagctgtgattgcattgcagtaccccagcaatgtgaaagaaaacaaaactacaaaaactgaaaattcttggtctaagtctatgtgcactrtgtgctttttaaacttatttaaataggaaacaatgtgtatggcattttttatagcccttgcaaactagtactattttttgaggaagaacgcaagttaatttcaagcatctttggtgatgtgagcattctggctcttcagtgaaagatagataacctacctatgtttttgggttttttttttctttgcctatttaaagattgaaaaaataagaacacatcagctttcttcaaaactttctagttaagtaccttcaagcatacaataaaatacatattattttatttatctattcattatat

SEQ ID NO: 62382 - DNA, 600 bp, Chicken  19866894324357_2
acatgatggtgacatatagggacaaagagacattatatattttattgaatatgaacacacatattcaataaaatatgaacacacacacgaaggcacccacgtgtataagcagatttttaaataacagtacatgtattagctttcagaatgttttatagtcttatccccagtataatactttgacatccaaatggtgttttcatcattgtaaaatgttagaatttaaaacccagggctatattggcattaaactatgcttgctttttaagcacttctttgactgcagcaaatgctagcatrttattgacagaacagttttacttcaggtgcagatacamcttcatctgaaactgcacagcaaatagttttgtaactgctattttagtgcatcagaaatgttttaattctctgaattgcaagttctaatgaaattgctgcacagaaaaaaatgatacctctttttaattaacttcagattcttcatataccttggatatccacattataaagtcatttaacatgaatcagagattgtagtctatatgtctgtaaatatccataactgtatatatggaaagaataattatattagtgctcact

SEQ ID NO: 62383 - DNA, 600 bp, Chicken  19866894324357_3
attttattgaatatgaacacacatattcaataaaatatgaacacacacacgaaggcacccacgtgtataagcagatttttaaataacagtacatgtattagctttcagaatgttttatagtcttatccccagtataatactttgacatccaaatggtgttttcatcattgtaaaatgttagaatttaaaacccagggctatattggcattaaactatgcttgctttttaagcacttctttgactgcagcaaatgctagcatrttattgacagaacagttttacttcaggtgcagatacamcttcatctgaaactgcacagcaaatagttttgtaactgctattttagtgcatcagaaatgttttaattctctgaattgcaagttctaatgaaattgctgcacagaaaaaaatgatacctctttttaattaacttcagattcttcatataccttggatatccacattataaagtcatttaacatgaatcagagattgtagtctatatgtctgtaaatatccataactgtatatatggaaagaataattatattagtgctcactgtttctgacgtagaggtatttgcatcattggtagacta

SEQ ID NO: 62384 - DNA, 600 bp, Chicken  19866894324358_1
tgaggcacgtgcaatcaccctaaatgggcaaaaaagccaactgcattcttctcagcaacaatggttcagcttctgggtctggatcttccagctctggggccaattggtgcataatgttggggaaaatctccaagccattcccccaccccccttccttggataaattcatttttttccacagcctttcttcagctttctagttccacatacctaagtaacattcaaaactaacttgcataccaaacccctgtccctgttccataggactctgacttcccatgcttgggagggtgcaagccrgcctgctctcaccccagtctttgctcagcctgctccgtaagttcgstgccttcgttctcctggcaggagctctggctggagaggttagcagtgagggttttgttggagatgtttgagcttgcagcttgtttttatggcatgcgatgccttaagatgtacaaaagggatctctctaatgtaggcatgaaactgctggtaggaggaggtggtttgaactgtaaagagtaaacaggcagtccgaaactgcacaattgcagagatccagaggaaagcttgcaaggcttaaagcatgtctgttct

SEQ ID NO: 62385 - DNA, 600 bp, Chicken  19866894324358_2
tcttctcagcaacaatggttcagcttctgggtctggatcttccagctctggggccaattggtgcataatgttggggaaaatctccaagccattcccccaccccccttccttggataaattcatttttttccacagcctttcttcagctttctagttccacatacctaagtaacattcaaaactaacttgcataccaaacccctgtccctgttccataggactctgacttcccatgcttgggagggtgcaagccrgcctgctctcaccccagtctttgctcagcctgctccgtaagttcgstgccttcgttctcctggcaggagctctggctggagaggttagcagtgagggttttgttggagatgtttgagcttgcagcttgtttttatggcatgcgatgccttaagatgtacaaaagggatctctctaatgtaggcatgaaactgctggtaggaggaggtggtttgaactgtaaagagtaaacaggcagtccgaaactgcacaattgcagagatccagaggaaagcttgcaaggcttaaagcatgtctgttcttaccaactgcatcacttggtctgaaaagatacggcctccttgctct

SEQ ID NO: 62386 - DNA, 599 bp, Chicken  19866894324359_1
  misc_feature (1)..(11): n is any nucleotide
nnnnnnnnnnngtgcagatttttatgagtatggcaggcagactcttgttccttgacagagttttgtagatgagcatttactctatcaaataatgtcattgtgctgtttgtatcagttgtactttccatggaaataaatcggaggcgttgcttgcagagtgacctacatatgttatttaaagagcattacagatcatttatctggtattgttaactgattgtattttattttctaatcatatcaagtaaaaaaaaaaagtcatatttttccattacaccaactccgtaggttaactgcctrctttaggttaatcctattagagttgtatcttggcagaggctcttctggcaagggaaagtccagagacaggacaaaacttttcctgttctgccaagaatggttttggctgagaaggttgcgaggttattgaaarctgcataagcagctagcaaagtgcaaatgtccatcacacaattttgcagataataggcttggcagtaatactgtccctggcaccgagaggatctgaatcaggtgcaatatccacaacaatagcagaagagcccacgggattaccacactgtgacagcatcaaatct

SEQ ID NO: 62387 - DNA, 600 bp, Chicken  19866894324359_2
taaatcggaggcgttgcttgcagagtgacctacatatgttatttaaagagcattacagatcatttatctggtattgttaactgattgtattttattttctaatcatatcaagtaaaaaaaaaaagtcatatttttccattacaccaactccgtaggttaactgcctrctttaggttaatcctattagagttgtatcttggcagaggctcttctggcaagggaaagtccagagacaggacaaaacttttcctgttctgccaagaatggttttggctgagaaggttgcgaggttattgaaarctgcataagcagctagcaaagtgcaaatgtccatcacacaattttgcagataataggcttggcagtaatactgtccctggcaccgagaggatctgaatcaggtgcaatatccacaacaatagcagaagagcccacgggattaccacactgtgacagcatcaaatctcacctacgatcacacctaaaatttaaaagataacgtgagtgattccatcatgaaattcaagcagtccctgtagtctgaggagtgccaacaaaccaccttgcaacatatcaagtaaaaacgagatgaaaagattg

SEQ ID NO: 62388 - DNA, 600 bp, Chicken  19866894324359_3
tagcaaagtgcaaatgtccatcacacaattttgcagataataggcttggcagtaatactgtccctggcaccgagaggatctgaatcaggtgcaatatccacaacaatagcagaagagcccacgggattaccacactgtgacagcatcaaatctcacctacgatcacacctaaaatttaaaagataacgtgagtgattccatcatgaaattcaagcagtccctgtagtctgaggagtgccaacaaaccaccttgcaacatatcaagtaaaaacgagatgaaaagattgaaattcttcatcyatagatattccaaagaatgaagcttgtcctctctcaaatgcatttggccacyactggctgtgattttctcagccaggagatgtcctgcagtaatcatctctcatggcatctcattgcccttcagaggcaggtgcctcccgttaccttggtgccaggcrtgccagtgtggaaacactcagggatttcccagaagtcagtagtcttctgcgtgagatttccaatagctgtgttaatatatgaagtcctaagaaatatgcacacaattttttatcactttccctagaccacaatgccctggga

SEQ ID NO: 62389 - DNA, 600 bp, Chicken  19866894324359_4
taatactgtccctggcaccgagaggatctgaatcaggtgcaatatccacaacaatagcagaagagcccacgggattaccacactgtgacagcatcaaatctcacctacgatcacacctaaaatttaaaagataacgtgagtgattccatcatgaaattcaagcagtccctgtagtctgaggagtgccaacaaaccaccttgcaacatatcaagtaaaaacgagatgaaaagattgaaattcttcatcyatagatattccaaagaatgaagcttgtcctctctcaaatgcatttggccacyactggctgtgattttctcagccaggagatgtcctgcagtaatcatctctcatggcatctcattgcccttcagaggcaggtgcctcccgttaccttggtgccaggcrtgccagtgtggaaacactcagggatttcccagaagtcagtagtcttctgcgtgagatttccaatagctgtgttaatatatgaagtcctaagaaatatgcacacaattttttatcactttccctagaccacaatgccctgggagatatctgcaygtgcactctgaaatctcacttcagttaagggtcttttggct

SEQ ID NO: 62390 - DNA, 600 bp, Chicken  19866894324359_5
acgatcacacctaaaatttaaaagataacgtgagtgattccatcatgaaattcaagcagtccctgtagtctgaggagtgccaacaaaccaccttgcaacatatcaagtaaaaacgagatgaaaagattgaaattcttcatcyatagatattccaaagaatgaagcttgtcctctctcaaatgcatttggccacyactggctgtgattttctcagccaggagatgtcctgcagtaatcatctctcatggcatctcattgcccttcagaggcaggtgcctcccgttaccttggtgccaggcrtgccagtgtggaaacactcagggatttcccagaagtcagtagtcttctgcgtgagatttccaatagctgtgttaatatatgaagtcctaagaaatatgcacacaattttttatcactttccctagaccacaatgccctgggagatatctgcaygtgcactctgaaatctcacttcagttaagggtcttttggctgaagaactttctctctccctctttgttttgctgaaagagagatgygttagccctctgagcatgctgcttactctgtcttttcttctgatatatgaagtttagattt

SEQ ID NO: 62391 - DNA, 545 bp, Chicken  19866894324359_6
aaagaatgaagcttgtcctctctcaaatgcatttggccacyactggctgtgattttctcagccaggagatgtcctgcagtaatcatctctcatggcatctcattgcccttcagaggcaggtgcctcccgttaccttggtgccaggcrtgccagtgtggaaacactcagggatttcccagaagtcagtagtcttctgcgtgagatttccaatagctgtgttaatatatgaagtcctaagaaatatgcacacaattttttatcactttccctagaccacaatgccctgggagatatctgcaygtgcactctgaaatctcacttcagttaagggtcttttggctgaagaactttctctctccctctttgttttgctgaaagagagatgygttagccctctgagcatgctgcttactctgtcttttcttctgatatatgaagtttagatttaattattatcaatgtatatgcatgcatacatatatatgtttgtatgtgtacacatatgtgtatatatgtgcccgtgtgtgcattttgttcagtaggtc

SEQ ID NO: 62392 - DNA, 459 bp, Chicken  19866894324359_7
ctctcatggcatctcattgcccttcagaggcaggtgcctcccgttaccttggtgccaggcrtgccagtgtggaaacactcagggatttcccagaagtcagtagtcttctgcgtgagatttccaatagctgtgttaatatatgaagtcctaagaaatatgcacacaattttttatcactttccctagaccacaatgccctgggagatatctgcaygtgcactctgaaatctcacttcagttaagggtcttttggctgaagaactttctctctccctctttgttttgctgaaagagagatgygttagccctctgagcatgctgcttactctgtcttttcttctgatatatgaagtttagatttaattattatcaatgtatatgcatgcatacatatatatgtttgtatgtgtacacatatgtgtatatatgtgcccgtgtgtgcattttgttcagtaggtc

SEQ ID NO: 62393 - DNA, 600 bp, Chicken  19866894324366_1
gccatcgttgccgttccccatgcagctgtcggtccttaactccagctcctcctctggctgctgttgcacacccacgtctggtgcaaaccagcaggaagaaacaactgagggctgtcagagcccaagaggagcacggagatcagaggctttggatgctctctttcctccttttggtggggacagcaggaccggcacccacttcttgaaatctcctcccacaggagctggaccatctgctgtgcagctgcagcatttgctgcccatgtgtgcgcctctgccgcttgtcctcccctctgcaawgatgaattggccactcacgggggaaggagagacaccagaacacatgtaaacacgaggaaaaactgcagggatcagctggctcctctactgggacgtgatttgtttcgggtacctaaatgcaggttgacatgctgatgacacgaggctaattgtggctggaggcgtattgcaccgccgccaagcattgctggcatcccagcagarccacgcggctgtgccaacatctagcttgccccaggcagcgcagggagggctgagcgtttgatctaagcccttccctatacctccctctgcatgccg

SEQ ID NO: 62394 - DNA, 600 bp, Chicken  19866894324366_2
gaaatctcctcccacaggagctggaccatctgctgtgcagctgcagcatttgctgcccatgtgtgcgcctctgccgcttgtcctcccctctgcaawgatgaattggccactcacgggggaaggagagacaccagaacacatgtaaacacgaggaaaaactgcagggatcagctggctcctctactgggacgtgatttgtttcgggtacctaaatgcaggttgacatgctgatgacacgaggctaattgtggctggaggcgtattgcaccgccgccaagcattgctggcatcccagcagarccacgcggctgtgccaacatctagcttgccccaggcagcgcagggagggctgagcgtttgatctaagcccttccctatacctccctctgcatgccgtgcttcaaaccctcgtacttggttggaaagcagaactgatcctgcacggcgagtgccaggcgttgtgcagcccgatcccctctgctcttggccagacccagagtctgaactgtctgaagcgacaggctgtgcgctacagcaagtcagaaaacaagctttgcaaaccattatgggggggttttcctgatctcctcgaacatctcc

SEQ ID NO: 62395 - DNA, 600 bp, Chicken  19866894324371_1
aggccgcaaagaatttgccttcaactgttctaatttaatgtggctttctaaaatgctattatctccattctgtaatttgttatttcatttttatggtttccagcaaatgccatgtctggaacggaaaattccaccttttcttgtactctgttgtgacttgcaatttgcattcattctgcatgaaatactcagttcccatcaaagaattctaaatgtaacataaagatataaagaaaacaaactgtcagcagcttcctaatgttgttaacgcaaaaaaaatgtcagcaatactcactagayaaattaaaaccctcttgccctttcgctaccctcttcccaaggaaatgagatacagttttacatacacaaagctttacgttggatccaaccttcagaccaagctccagttccaacaaacagtgaccacaaactagcttggatgtctggacagtaacttagaaccaatgccaaactcagaagcaaggagctgacattctgtctgtgggcctgtccacacagtaagtagaagagactgataactgtaggattaactgagcaattatgttctttatgactagtttgcttcacagagcatagcac

SEQ ID NO: 62396 - DNA, 600 bp, Chicken  19866894324379_1
ctgacactctatctctaatgctgttttccatgacatgacttaaagcatgagttacagctttaactttaaatttcctgtcttttgtcagtttgtgtcacaacctccacatatttaaacatcagtcttgtgcatttaattctatattacactttttactgctgattcacatttcaataaaacagaaccttctaaaaatagttctgagaaaagcatgtatgagtttgaagttgtccgagtctggcatttgaccttcactatacatttttctcaaatgaaagttagcagaaaacattttctggygtcaaacaaagctatttcatttacaaaccacatatgataaaaataaatctctaggagaaaatagcaaaatctatattcagtggataaamcatttttcgtatcacaattgttatttattgcatctgtaaatccatctcatattaataattttactttgtgaggtatagtaaaaagagaatagtaactgtctccatggaattcagcatatgactgtaaatgctctgcatgggccttggacttattgtgtaacaaaaatrctacatttcaatttttgctgttgcaaagcttgatggtggaaaa

SEQ ID NO: 62397 - DNA, 600 bp, Chicken  19866894324379_2
ttgtgtcacaacctccacatatttaaacatcagtcttgtgcatttaattctatattacactttttactgctgattcacatttcaataaaacagaaccttctaaaaatagttctgagaaaagcatgtatgagtttgaagttgtccgagtctggcatttgaccttcactatacatttttctcaaatgaaagttagcagaaaacattttctggygtcaaacaaagctatttcatttacaaaccacatatgataaaaataaatctctaggagaaaatagcaaaatctatattcagtggataaamcatttttcgtatcacaattgttatttattgcatctgtaaatccatctcatattaataattttactttgtgaggtatagtaaaaagagaatagtaactgtctccatggaattcagcatatgactgtaaatgctctgcatgggccttggacttattgtgtaacaaaaatrctacatttcaatttttgctgttgcaaagcttgatggtggaaaagtagaggaaatgtgcttgtaaacatcagcagtttcaaagcactacaaatatgtttgcaatgtattctactctatttacaggagaaaaag

SEQ ID NO: 62398 - DNA, 600 bp, Chicken  19866894324379_3
tacatttttctcaaatgaaagttagcagaaaacattttctggygtcaaacaaagctatttcatttacaaaccacatatgataaaaataaatctctaggagaaaatagcaaaatctatattcagtggataaamcatttttcgtatcacaattgttatttattgcatctgtaaatccatctcatattaataattttactttgtgaggtatagtaaaaagagaatagtaactgtctccatggaattcagcatatgactgtaaatgctctgcatgggccttggacttattgtgtaacaaaaatrctacatttcaatttttgctgttgcaaagcttgatggtggaaaagtagaggaaatgtgcttgtaaacatcagcagtttcaaagcactacaaatatgtttgcaatgtattctactctatttacaggagaaaaagcaagagcaaattaattgccaacatatatcttgttgctagtaatgtactattctattccaaaagcttatgtttttccatctctttgtatgtattaggttcacaggtagaaatgataatttaaagatgaagaatgcagctttgtacttctacactacagatccagaacaa

SEQ ID NO: 62399 - DNA, 600 bp, Chicken  19866894324379_4
agtagaggaaatgtgcttgtaaacatcagcagtttcaaagcactacaaatatgtttgcaatgtattctactctatttacaggagaaaaagcaagagcaaattaattgccaacatatatcttgttgctagtaatgtactattctattccaaaagcttatgtttttccatctctttgtatgtattaggttcacaggtagaaatgataatttaaagatgaagaatgcagctttgtacttctacactacagatccagaacaacctgcattttaaattgtctggaacagctgtaaatattttctraaaaaaactcattaagactgtaagtctactgagacaagtaaatttttatttactttttttttaaagcagagtgaagtaaaaaggtaataacattagttgtgtaattataggcatcttgttctaatttggtcagtgagtagataggaaataacatactagaaatctttctgcaaaccagtaatatcatatatgatgtaactagattatttcatatctaaacttgtctaagagggacatatttattcacaatattcatcagaattacaccaggaattttcctttggggaatgattttacctg

SEQ ID NO: 62400 - DNA, 600 bp, Chicken  19866894324379_5
taatatcatatatgatgtaactagattatttcatatctaaacttgtctaagagggacatatttattcacaatattcatcagaattacaccaggaattttcctttggggaatgattttacctggtgcagattcatctccagtataaatcccctgatttactttgacttgatttatgacaggtaggaatgaggcccactgtgtcaaaagaccaaaatttttgtttctcaggaaaaactgctaagatgaaaagtaaagcaatcttaattgtagtacccattaactatatatttttcctaaatrtattcatttagtcagttctttttaataaacatcttataaattcctaaaaaaatgataatatattgtaaaacatagaggttttggtataatatagatattaataaatgttaacaaattaatatctttcctgaggatgtacttttttcctcaaagctacttcattcacaccaaacatacacataagtcaaaggacacatccacaggaggagcctaataagtaggtcaaggtatacatacacatcgatatgcatctctctgtatcttttcccattacccatatgaacatacatgccatttggt

SEQ ID NO: 62401 - DNA, 599 bp, Chicken  19866894324382_1
  misc_feature (1)..(209): n is any nucleotide
nnnnnnnnnnnnnnnnnnnnnnnnnnnnnnnnnnnnnnnnnnnnnnnnnnnnnnnnnnnnnnnnnnnnnnnnnnnnnnnnnnnnnnnnnnnnnnnnnnnnnnnnnnnnnnnnnnnnnnnnnnnnnnnnnnnnnnnnnnnnnnnnnnnnnnnnnnnnnnnnnnnnnnnnnnnnnnnnnnnnnnnnnnnnnnnnnnnnnnnnnnnnnnnnnaacaacagagttatagaaacacaagtagatttctaggcagttctaaaatcaactacagaagtcttgggggacatttgttaaccttttgagyattacatgtgcccttgttgtatcatggtctattaaagcagcagggagacgagccryttcaaaagttttccatagattcccagagcaataagcaacataaaagtacagatccagccacctacaggtacttagaggctaaattacctgtgtggagcttggagggaagagcataggttgcaggaaggcagagcttggaggcagcacagatgggcgagttgtgtgcaactcatttgctcrctcagtgtctcagtgaatgagtctgttaataaggagacagttcacttttagaaacagtgtctt

SEQ ID NO: 62402 - DNA, 599 bp, Chicken  19866894324382_2
  misc_feature (1)..(154): n is any nucleotide
nnnnnnnnnnnnnnnnnnnnnnnnnnnnnnnnnnnnnnnnnnnnnnnnnnnnnnnnnnnnnnnnnnnnnnnnnnnnnnnnnnnnnnnnnnnnnnnnnnnnnnnnnnnnnnnnnnnnnnnnnnnnnnnnnnnnnnnnnnnnnnnnnnnnnnnnnnaacaacagagttatagaaacacaagtagatttctaggcagttctaaaatcaactacagaagtcttgggggacatttgttaaccttttgagyattacatgtgcccttgttgtatcatggtctattaaagcagcagggagacgagccryttcaaaagttttccatagattcccagagcaataagcaacataaaagtacagatccagccacctacaggtacttagaggctaaattacctgtgtggagcttggagggaagagcataggttgcaggaaggcagagcttggaggcagcacagatgggcgagttgtgtgcaactcatttgctcrctcagtgtctcagtgaatgagtctgttaataaggagacagttcacttttagaaacagtgtcttcccgtgctgatgtgcagcacgcagtacatgaagcagagcggtcagaagaatgttt

SEQ ID NO: 62403 - DNA, 599 bp, Chicken  19866894324382_3
  misc_feature (1)..(153): n is any nucleotide
nnnnnnnnnnnnnnnnnnnnnnnnnnnnnnnnnnnnnnnnnnnnnnnnnnnnnnnnnnnnnnnnnnnnnnnnnnnnnnnnnnnnnnnnnnnnnnnnnnnnnnnnnnnnnnnnnnnnnnnnnnnnnnnnnnnnnnnnnnnnnnnnnnnnnnnnnaacaacagagttatagaaacacaagtagatttctaggcagttctaaaatcaactacagaagtcttgggggacatttgttaaccttttgagyattacatgtgcccttgttgtatcatggtctattaaagcagcagggagacgagccryttcaaaagttttccatagattcccagagcaataagcaacataaaagtacagatccagccacctacaggtacttagaggctaaattacctgtgtggagcttggagggaagagcataggttgcaggaaggcagagcttggaggcagcacagatgggcgagttgtgtgcaactcatttgctcrctcagtgtctcagtgaatgagtctgttaataaggagacagttcacttttagaaacagtgtcttcccgtgctgatgtgcagcacgcagtacatgaagcagagcggtcagaagaatgtttc

SEQ ID NO: 62404 - DNA, 600 bp, Chicken  19866894324382_4
gatttctaggcagttctaaaatcaactacagaagtcttgggggacatttgttaaccttttgagyattacatgtgcccttgttgtatcatggtctattaaagcagcagggagacgagccryttcaaaagttttccatagattcccagagcaataagcaacataaaagtacagatccagccacctacaggtacttagaggctaaattacctgtgtggagcttggagggaagagcataggttgcaggaaggcagagcttggaggcagcacagatgggcgagttgtgtgcaactcatttgctcrctcagtgtctcagtgaatgagtctgttaataaggagacagttcacttttagaaacagtgtcttcccgtgctgatgtgcagcacgcagtacatgaagcagagcggtcagaagaatgtttctagtgtccatttctttcttcaccaaatgaatttggcaagacgagcttgtggacacagaaaacagagggactgcctggttataaaaaaaaatgataagtgctctgaagctgggaaaagtgtctgccttcagaggcgttaccatccagaaggcatcagtycccaggaagggggctccaaggaa

SEQ ID NO: 62405 - DNA, 590 bp, Chicken  19866894324382_5
gttgtgtgcaactcatttgctcrctcagtgtctcagtgaatgagtctgttaataaggagacagttcacttttagaaacagtgtcttcccgtgctgatgtgcagcacgcagtacatgaagcagagcggtcagaagaatgtttctagtgtccatttctttcttcaccaaatgaatttggcaagacgagcttgtggacacagaaaacagagggactgcctggttataaaaaaaaatgataagtgctctgaagctgggaaaagtgtctgccttcagaggcgttaccatccagaaggcatcagtycccaggaagggggctccaaggaagagttagggtttgggttttgtctatgctttaagacacagtctcatctttaacatattcctctccaagtgtgttgttctattcctgcatataagtcatattttgcttgggagaagcctctatgttactacggttagcttctgcagcctggcagatgcgagagccggttggacctgctgtgggatgtggctgagcactaaaggagctgggctgtgggtgggagaatgttaaattccacctggagagggaagaaggccctcagcccactg

SEQ ID NO: 62406 - DNA, 600 bp, Chicken  19866894324384_1
agcaattaacagcagacctttcagatgaggcagggaatggtaatgcaggtgtgagcatgccagccccactgcttccatatagatctcctttcccgtcactgtgtctctgcactccattgatttcaatagagaaactctatagagtgaggaataattgtttaattgtttatcatgaagattattgattctgattaaaatgtgtggcatgtaataaagcagaaattgattggagacaccacagtgacttgcttttgagaagcaattcaattcaacttcatcagcactcgtttccatataagygcacccctgactgcatgattcctcccagctctgtactgtgagcactttgtttccctgccatcccccagaacatttcctgtatgttttggcatctctctgcagcatgctcttgctgacatcagtgccaaaagatctgtaagctattagctgcaggaattcctcggtgccagcagcctgcgatccagagcacaatgcaaaaggtcaacgccttacactgacaggctgagacaggtatttggggttattttatcagaggaagtgagtgtcatgtggggatttaatactgctgataagctttaa

SEQ ID NO: 62407 - DNA, 600 bp, Chicken  19866894324384_2
taaaatctcctgtgttgcaagatatacttcctgactgtacgtacaaagccattagtgtgaagagtttatttatgggagtttagccacgagcaaatgctcaggtgagctgtttgtgcaggaatgtaaggctgggccatatgactcaatggactccgtttaatttcttgctacatttacatcttgtggctccattctgcctggatccctggtgctgactattctgaagggtattgttccattctgtggacccagagcactacagaagcacctctggtgaatgcagctgccatacagcctggsatctgtaaatcagaggtagcactgtaaaatgcaaagattcctattggcagtacccagggaattaaaggacacgaatgagggaccaatttcagtgattttcaagggaatttttatgcctgcttacctcagtatcaaggacgacaaggacttcaaatgcatttttattaatggaaagtaaatatcttctcgctctggaatatttattgttatgtatacaagttccaggcttgtttgtttatttacttgttaccagaatagttgcactggataaatttctttatcaacccagaatattaatca

SEQ ID NO: 62408 - DNA, 600 bp, Chicken  19866894324392_1
tcctggttcccacagaatattccaaaagcagcccatcctcccacccactctccctgtgtgtcatcactggtagactgcagtgactaggagaagaggtaactgttttaagttgtgccaggagaggttcaggttggatatttagaaaattttcttatcagaaagagtggtaatgccttaaaactggctgcccagtgaagaggtaggatcacaccctgtggaggtgttcaaggagtgtgttgatatggcactgacagacataggttagtgagttgggtctgatgatgaccttagtggtctttyccaacctaaataattctatgattctatgacttattttctttcctacacagatatctgtaacaatatggtccttgttccaaacgcccatccatgtgatgtttggaacagctttcacagtttctctcagcatggtcaaagcctacacttaccattctgatgctcaccacagctccccctatccatgcagtcttaccatgcagcaggtggaggcaactttccattttggtggcatcttagtcagtaggggmggctgatgactctcaactcattgcagtgctgaagtcgagagtaacaaataac

SEQ ID NO: 62409 - DNA, 600 bp, Chicken  19866894324392_2
tgacagacataggttagtgagttgggtctgatgatgaccttagtggtctttyccaacctaaataattctatgattctatgacttattttctttcctacacagatatctgtaacaatatggtccttgttccaaacgcccatccatgtgatgtttggaacagctttcacagtttctctcagcatggtcaaagcctacacttaccattctgatgctcaccacagctccccctatccatgcagtcttaccatgcagcaggtggaggcaactttccattttggtggcatcttagtcagtaggggmggctgatgactctcaactcattgcagtgctgaagtcgagagtaacaaataacctctagtgaggagctatgttgccagccaggcagcagcccataaagttgtcagtgcttcctactctgtgtcaggagccctgcttggtgcaggaatagcagcagcagcactagcacacctcaaaccctcccgctttagcaagaaaatcaacaacctgctctactgaactctgaggacgttttatcagaaacattctccaacgttgcctgctggagtcaatgttttagagcgctgtgatcttttagttacc

SEQ ID NO: 62410 - DNA, 509 bp, Chicken  19866894324395_1
ttatttttttaattgtctttttctataatctttcctcctgccaaaacaggtggagaatgatagtaattggcttatccaactgaagaaccctgaacttgtcagaagtaatatccagctctgtctttatgatatgagttcataggcttcttattatgatgaaaaatctatgaacagaaaatagaaagacatgaaactgatcactacacccacaacagtataggttttagatattcttctgacaagccaacttctgtgtctttctgtagtactcacttaggtagccaatgaatagtgttcccraagatggtggtggtgattctgctcctcactaccaagcagaataagtacacttttgtattcattgcttctgggaaccacattcttagaacacggacatccctcacctttagcagttgcttcattaatttcaactgttacattggagttggcataataggtagtatttgtccttgcagatttaacggctgagcaaagaattacatatatat

SEQ ID NO: 62411 - DNA, 600 bp, Chicken  19866894324396_1
tttccaagacatctctgacttaaaatgctgtcagcctgaatctatggctgttcacctaattgttcactttgtgaaagatctgagtgtaccaaagtttccacaggagatcacctcacagcagcacagcctggagccagtgtgcctgtttgttgtgggcagatacagactgctgcacaaggaaggggctcattttgtatgtacaaataatgagctcgggaaataatcagaaatgtaatcctcttcttagaaataagtatttactgttcagtgcactgtagaagttgagctataaagaaccartctgagcagctgattgcctacaaatagtctgtattcagcaggtacgcaggccattgttgttttttatctttacatatttttataactcttccaaaagtcctagttttaattttaatctagcattaraaccacaaatgcagacctgtttctgaatcctgctaaggttttttttcctttaaatcccattctaaaggaaggacgtggtcactgcagaaactatcgtggcgtctaagaaccaaagccagacccctgtagttccttcctgccctcagtctggtgtgtattgggttcagctgactg

SEQ ID NO: 62412 - DNA, 600 bp, Chicken  19866894324396_2
cctggagccagtgtgcctgtttgttgtgggcagatacagactgctgcacaaggaaggggctcattttgtatgtacaaataatgagctcgggaaataatcagaaatgtaatcctcttcttagaaataagtatttactgttcagtgcactgtagaagttgagctataaagaaccartctgagcagctgattgcctacaaatagtctgtattcagcaggtacgcaggccattgttgttttttatctttacatatttttataactcttccaaaagtcctagttttaattttaatctagcattaraaccacaaatgcagacctgtttctgaatcctgctaaggttttttttcctttaaatcccattctaaaggaaggacgtggtcactgcagaaactatcgtggcgtctaagaaccaaagccagacccctgtagttccttcctgccctcagtctggtgtgtattgggttcagctgactgttcgggctggaggatattctctattgttactgaaagtagaactgctgtctgtataggtggttctgacatttcttcataatgccttagggaagtgaaacataagaagggttttagaaaaccctagtg

SEQ ID NO: 62413 - DNA, 600 bp, Chicken  19866894324399_1
aaatacaagaaatactggaagtgtgacttgttttttcccttgtattcttagcagagttgttattgatagagtactttctaaagcagtagataatctaaaagccattcttttgtctttggcaagaatttttcatcttgtgtgttgagatgcacagatgctggtcttttagatcctctcttacaaggatgctgtttgacttggagtagtgtggagatgttggcattgacaactgttgctgtaggaggggagttctgaacctgtgcattgagtttgttctgccttgtgctgcctctgctcctyccactgccagcttcttgaaggagccaactcccctaacagaaagctatttggtgttattgcagacaaacctcaaagtgacattagacctcctcctccaatacggggaaggatgcagaatgcccatgatrcatcccaaatatctgcagaaaagcaacttgaaatgagactcagagactttcttttggacattgaagacaggatctaccaaggaacattgggagctattaaggtatttgtgaactgtaaagcacctaggagcacagtggtgccatcaagtctgtgacttaaatgagaactctt

SEQ ID NO: 62414 - DNA, 600 bp, Chicken  19866894324399_2
ttcatcttgtgtgttgagatgcacagatgctggtcttttagatcctctcttacaaggatgctgtttgacttggagtagtgtggagatgttggcattgacaactgttgctgtaggaggggagttctgaacctgtgcattgagtttgttctgccttgtgctgcctctgctcctyccactgccagcttcttgaaggagccaactcccctaacagaaagctatttggtgttattgcagacaaacctcaaagtgacattagacctcctcctccaatacggggaaggatgcagaatgcccatgatrcatcccaaatatctgcagaaaagcaacttgaaatgagactcagagactttcttttggacattgaagacaggatctaccaaggaacattgggagctattaaggtatttgtgaactgtaaagcacctaggagcacagtggtgccatcaagtctgtgacttaaatgagaactcttgcgtgctgtgggttttactgacagtgtagtttaattaagtgtagacagtaattggcactaaaagtttgcggcctttcattccttggaaacataaaatttgtgtgtttgcttcaggttacagacaggca

SEQ ID NO: 62415 - DNA, 600 bp, Chicken  19866894324399_3
tgaatttctaaatgatgaaaataaagaaaatggtataattaaaactgtgaatgaagaatctgaagaaatggaaactgatgatcaagataagttcattgttaaagaccggtaagagctagaatttaaacagctcttctatttgagcttcctaccagtactccagtttttcacattcaaactttttactcttcatttctataacttggtatttttcaacagatacatttaagatttgagttgtaaaatgtgttatttctgcattgctttatattatctaaacgacactgttctattgctaasaagtgtcttagttttattttggcaatttcgacgacaactaccattcagataatgaattcatttcaatatcacttaaaatacagagggaaatgattctgccaatatatgttttcttttccagaataaaaacactgctttttatggagtgtttaaaatggacaatggtagtagtgattaatcctcagctgaactgtacagtgtactccatgagtcacagaaagccatgattgcagcaggccgtggtctgaattggcctytagtgctgcagcaaaacagtgataccatctcgtaactttaata

SEQ ID NO: 62416 - DNA, 600 bp, Chicken  19866894324399_4
gcattgctttatattatctaaacgacactgttctattgctaasaagtgtcttagttttattttggcaatttcgacgacaactaccattcagataatgaattcatttcaatatcacttaaaatacagagggaaatgattctgccaatatatgttttcttttccagaataaaaacactgctttttatggagtgtttaaaatggacaatggtagtagtgattaatcctcagctgaactgtacagtgtactccatgagtcacagaaagccatgattgcagcaggccgtggtctgaattggcctytagtgctgcagcaaaacagtgataccatctcgtaactttaataatgctaatccttttgtagaacaaactgcaacctcaaatcatagtgttgcaactacaaaatgttttctttttttctaaacaatcttctgagaaagatgagagactttcactaaatggatgtttgttgtaaatcaaaccatggaggctaggacttttctgtgaatatttgtaaatattttcctctcagaagttgtgttctttgcagaaattaagattaatttacgtcctttaagattttttttcgtatttattaaataa

SEQ ID NO: 62417 - DNA, 600 bp, Chicken  19866894324413_1
taaaaaacagcatcagtaagttaatacagtttaaagaagtgtacttgagaattaggatgtttgattccagctgagtctattcaatttgagtagtcatgtgattaattactgcagatgagcttctttatgttgtaggcaagaccttaccattggtagtttttacactaaattccattttattcttaattatacactgatttctgtcatactgacagatacacgaggaaaatgcagccgtttgtcctcaagaagttgctctactttgttacacttgagttttcctggagtttagcttattgrtatgttctgggagaagacagttgaaggtgacagattcaatttctcagtctcctgagcttttatgaggtgaaaaggatagatagcctttcactctgaaagctagaggtctcatctgaactgcagtagcaaaaaacatgatgaaaataaatccatgtagcttattgatgactgatcgctatgttttctgatgttggaattcactgcggtggaaaataagcactgaaatgtagttttggtttctgaaatactttgagttgaaactgccgatctgtggtactaagttaagctatctctttcagg

SEQ ID NO: 62418 - DNA, 600 bp, Chicken  19866894324414_1
ctcttgttactccaggggcagagtttccccatggggatttatatccattcatagtatcatagaactgtttgagttggaagggacccttaaaagtcactgagtccaacttccctgcatgaacagggacagctacagctcagagccctgtccagcctgaccatccaccacctctctgggcaacctgttccagtgcctcaccaccctcattgtaaaataattctcccttatatccaatctaaatctcccctcttttagtttaaccgtttccccttatcctatcacgacagaccccgctaaagrgtccgtcctcttctttcctatatcctccctgtagatactgaaaaattgctatcagtcatccacgygtgcttacatatactgcagtaaatattggtaatggataaatctcatcagtgtggaagtatgttggagacaaaaagcttgagaagaggggggataagtggaaggagagagaaggagccagagacagagggctgctctgtttcactcttgccctgacaaaaaaaaccttggcactacatctttaaagtaaggttttcagtgatcagacaccactctcgcatgtgctttgtcagttcc

SEQ ID NO: 62419 - DNA, 600 bp, Chicken  19866894324414_2
tgtttgagttggaagggacccttaaaagtcactgagtccaacttccctgcatgaacagggacagctacagctcagagccctgtccagcctgaccatccaccacctctctgggcaacctgttccagtgcctcaccaccctcattgtaaaataattctcccttatatccaatctaaatctcccctcttttagtttaaccgtttccccttatcctatcacgacagaccccgctaaagrgtccgtcctcttctttcctatatcctccctgtagatactgaaaaattgctatcagtcatccacgygtgcttacatatactgcagtaaatattggtaatggataaatctcatcagtgtggaagtatgttggagacaaaaagcttgagaagaggggggataagtggaaggagagagaaggagccagagacagagggctgctctgtttcactcttgccctgacaaaaaaaaccttggcactacatctttaaagtaaggttttcagtgatcagacaccactctcgcatgtgctttgtcagttccaggaaagctgatgagacactctttctgagaaagcaggtggccacgctccatccagctctttgaaa

SEQ ID NO: 62420 - DNA, 600 bp, Chicken  19866894324416_1
agcagcaagtctacaagaagtacaagtgttttctgaagccgtattcctatcaatgcacagaatgacaagaatatcatagccaaagagcttaaaaacattgaaaagagcatagatcagaccagcataaaatacgaggtcatagtcttaggaaccaattaaatgctgtaattataatggaaagcactcacataaggggaagaaaagtaacgtacacttttcactgaaatagtctggtgcatccttgacagtttttgctcctaggaagcaaaacaaaagaggtatctctgttctttcaacctygttctggagctcacgctttctatgcagctcatgatttttaagaccgtttttctgttaacgtaccttgtacaacatttacttctgtgttttacaagagtgtaacatcagtggtttgtgttctgtcggtgatcaaacgtgaatgccactgctggtctgctcaggttactgcagacacacacgcaccagcaagcgagatgggtgcctgcagccttgcactaacggcgctatccttcttagtgcttataagccaggtttggatggtgggtctttcactgccccattcctgctgatgaagtctgt

SEQ ID NO: 62421 - DNA, 600 bp, Chicken  19866894324419_1
tggctgcttgtgaacctgatagcgagagaagcgagaaggagcgaaatgacctacattttgctagagcaaacctggtcactaatgaacgacaagagcacacggtaattcctgcctctgtaggtgtgcattcactgtgcctgtgtgcctgtagccaaaccatcatctgtcttgaaatcaccccgaggtattaaacagctttctagaaatgctgcttcacccatacagcagatgtattggagctgaatcttctcagattgcagcagtggacttgcaaaattcagccaatattggcaaaaaaarccatcaccaccamcaacaaaaaaacaacagccaaggcattggttttcctgctcaggcaaatgtaaacattttagttgttaaaggagatgcttctctgcagctcatagctgtgtttgagtttcaaacaaaaccaaagcaaaacacaaaccaaaaccaacccaaacctggcaactgttttcatttgaatttcaattttaagaacttgcagccattcgaggggggttgcagcctacgctgattaatcattagcagcagcacaatgcactcgaataaaacctcttcaaatcaatagcaatcctg

SEQ ID NO: 62422 - DNA, 600 bp, Chicken  19866894324419_2
acctgatagcgagagaagcgagaaggagcgaaatgacctacattttgctagagcaaacctggtcactaatgaacgacaagagcacacggtaattcctgcctctgtaggtgtgcattcactgtgcctgtgtgcctgtagccaaaccatcatctgtcttgaaatcaccccgaggtattaaacagctttctagaaatgctgcttcacccatacagcagatgtattggagctgaatcttctcagattgcagcagtggacttgcaaaattcagccaatattggcaaaaaaarccatcaccaccamcaacaaaaaaacaacagccaaggcattggttttcctgctcaggcaaatgtaaacattttagttgttaaaggagatgcttctctgcagctcatagctgtgtttgagtttcaaacaaaaccaaagcaaaacacaaaccaaaaccaacccaaacctggcaactgttttcatttgaatttcaattttaagaacttgcagccattcgaggggggttgcagcctacgctgattaatcattagcagcagcacaatgcactcgaataaaacctcttcaaatcaatagcaatcctgatgcaagacagat

SEQ ID NO: 62423 - DNA, 547 bp, Chicken  19866894324420_1
cagaaaagggttttcagtgatgtgtctctattggtggtgaactgtatatttttgtcaattacaactttgcatgacactttctcagatcagctttattcagtctttttacaggtgagatcaactcttcatgtagtgggagaaagcattaatttatttttcagattggagtgtaattgtgcctaactaattctcatacttacgcacaacaattaatttgattttttttcattatactttatccacaattttcagcaattacagtattgtcatctcatcttttttgtgatgaaaaaatctccycytggctttgttacattatgcttattttgttatattatgatgatactggcgtaagcctgtaggttttgtaccacgatgcacaaaaatgtctgttctagacttgctgatgaagatgagtcccccttcagccagcgggagagtcacagctttacacagcagtaatggggccactacagctgagtgtggcatcagctgagcctagccaggaagagaaagaccttttgttttatcttctcgtactgtattt

SEQ ID NO: 62424 - DNA, 545 bp, Chicken  19866894324420_2
gaaaagggttttcagtgatgtgtctctattggtggtgaactgtatatttttgtcaattacaactttgcatgacactttctcagatcagctttattcagtctttttacaggtgagatcaactcttcatgtagtgggagaaagcattaatttatttttcagattggagtgtaattgtgcctaactaattctcatacttacgcacaacaattaatttgattttttttcattatactttatccacaattttcagcaattacagtattgtcatctcatcttttttgtgatgaaaaaatctccycytggctttgttacattatgcttattttgttatattatgatgatactggcgtaagcctgtaggttttgtaccacgatgcacaaaaatgtctgttctagacttgctgatgaagatgagtcccccttcagccagcgggagagtcacagctttacacagcagtaatggggccactacagctgagtgtggcatcagctgagcctagccaggaagagaaagaccttttgttttatcttctcgtactgtattt

SEQ ID NO: 62425 - DNA, 600 bp, Chicken  19866894324423_1
gatgctttgcagagagcttgtttgggctgttctgtccgcataatttttcagctgtgtcctaatacagaaaaaacaaacaaacaaaaaaaccaccctaattacagctgttccaaggagagttacttagctacatgagggacaggccaaagccatttaatacagaacatttttccttatatgaaagtcatcagtccacaggatatttttgtctaatggtcttcagattgttttggttgtttattttgtaatatatcatacaagcttgagtttcagttcttgcttgattatgtgaatacccaygtagatgtaaatacatttaggctgggacaacaaaatagacattgctcataggaatcctcctacttctgtagtcacagagaagggattacctgtgtcctcagagtgtgggactgccaagtttgaaacttgggagacatgtttgttttggtaaatagaaggcttgacctgatttcaagtacttttcttaagaggaggagggagaaagctacagagaatagggagatgcatgaagccagaggttggaaatcttacagcaggcttacggcattatttcaattgagtgtgtctgactgatggtga

SEQ ID NO: 62426 - DNA, 599 bp, Chicken  19866894324424_1
  misc_feature (1)..(158): n is any nucleotide
nnnnnnnnnnnnnnnnnnnnnnnnnnnnnnnnnnnnnnnnnnnnnnnnnnnnnnnnnnnnnnnnnnnnnnnnnnnnnnnnnnnnnnnnnnnnnnnnnnnnnnnnnnnnnnnnnnnnnnnnnnnnnnnnnnnnnnnnnnnnnnnnnnnnnnnnnnnnnnttgtttgggtttggaaccctagtgaagccggcactatgggctgacaaaggcactgctattaagttgcatgggacatccctcatgagagggtcaggacctgctttgcccaatagttcttaggatggatccccaaatcctcatrttggaagtggaccagaatgtgacaaaagcagcgattaagcaatctcagaagttctggccgagagaagcatcaggcttagtattctgacgtctgcagatgatctgcccaaaagatcaggtgtaactgccctctgaagtgcgttgccaccaaacaatactgatgctcgaaactggggtttatgaaaggtcagattttcatttcagcatcagccagctctttaaatcaaatagcaaaytttttttggcttttaagaagaaacccaagaagataaagaaaccctcagagtatgggttctttgg

SEQ ID NO: 62427 - DNA, 600 bp, Chicken  19866894324424_2
cctcatgagagggtcaggacctgctttgcccaatagttcttaggatggatccccaaatcctcatrttggaagtggaccagaatgtgacaaaagcagcgattaagcaatctcagaagttctggccgagagaagcatcaggcttagtattctgacgtctgcagatgatctgcccaaaagatcaggtgtaactgccctctgaagtgcgttgccaccaaacaatactgatgctcgaaactggggtttatgaaaggtcagattttcatttcagcatcagccagctctttaaatcaaatagcaaaytttttttggcttttaagaagaaacccaagaagataaagaaaccctcagagtatgggttctttggtgcgggctagaaagtaagaatcaccccgagcaggctataccatggacttccactcaaaaatttctttcatgcatctgcaaagcacccaggcagtatcaaagataggggtgagctacatgagcctcaggtagaatcaggcatggttttttctacactggcaccctactaaatgtgattggattgagtaggcgtctcacagtactacctccatggtggatctggcttatgcaaacagt

SEQ ID NO: 62428 - DNA, 600 bp, Chicken  19866894324441_1
tttttgattgatttgttggggaaatcaccattttatttattgatttaccagctagcaatccagagcgtaaaagccaaggagctgtaaatcctccagtcaagctcccagaaaagttaaacagtactagctgtgcccagctgtatctcgagcactgaggacagtttgatttctcatttgtgatgaaaccctctcaagagcgacagacaccacatattcccccagcctacacgtctggataacggagtttcagggtgaaatttcaatgagccagaaacagagggaagagatctccattccagyctgcttcactgggggctgtagtgaccacagatccctgaactactctgccagcccccacttccagttctcmtacagcacaagtgagcagtctaagtgctaaactaattagtaagaagctgggatgttgcctccacgcttcctgtgttgcagggttaagtgtggacatcattctcagggagggctgaagggtgtgagtcaaggtttcagatatggaaaaattgtacagtgtaaaatcaagtctacagagtaaacattctcatatgggagtgagtctgttctcaaatcaggtcattacatgta

SEQ ID NO: 62429 - DNA, 600 bp, Chicken  19866894324441_2
aagccaaggagctgtaaatcctccagtcaagctcccagaaaagttaaacagtactagctgtgcccagctgtatctcgagcactgaggacagtttgatttctcatttgtgatgaaaccctctcaagagcgacagacaccacatattcccccagcctacacgtctggataacggagtttcagggtgaaatttcaatgagccagaaacagagggaagagatctccattccagyctgcttcactgggggctgtagtgaccacagatccctgaactactctgccagcccccacttccagttctcmtacagcacaagtgagcagtctaagtgctaaactaattagtaagaagctgggatgttgcctccacgcttcctgtgttgcagggttaagtgtggacatcattctcagggagggctgaagggtgtgagtcaaggtttcagatatggaaaaattgtacagtgtaaaatcaagtctacagagtaaacattctcatatgggagtgagtctgttctcaaatcaggtcattacatgtaggtcagagccattccctaacatgcacacttggcaaatgcagaggatattactttaacttggctgcacttg

SEQ ID NO: 62430 - DNA, 600 bp, Chicken  19866894324441_3
tctaagtgctaaactaattagtaagaagctgggatgttgcctccacgcttcctgtgttgcagggttaagtgtggacatcattctcagggagggctgaagggtgtgagtcaaggtttcagatatggaaaaattgtacagtgtaaaatcaagtctacagagtaaacattctcatatgggagtgagtctgttctcaaatcaggtcattacatgtaggtcagagccattccctaacatgcacacttggcaaatgcagaggatattactttaacttggctgcacttggactttcccattctacaragtgctcttccttgaactcggcaaccattaggacaggcactgggtgaatgttttggctggacgtgcatgcctctcccatatgcttcctcttccaagtaacaytacttttgcaatggttgcatccaggttatttctaatactagtttgaatagcagtgaggttggtaactcagcgctgttttggttgttatactgccatcatcagtgtactgtgtgaacaaaataactaacagtaatttatggctttcccctcaatcgtatttccagtaagggaattacacatggcaatgctttgatttta

SEQ ID NO: 62431 - DNA, 600 bp, Chicken  19866894324441_4
gtgagtcaaggtttcagatatggaaaaattgtacagtgtaaaatcaagtctacagagtaaacattctcatatgggagtgagtctgttctcaaatcaggtcattacatgtaggtcagagccattccctaacatgcacacttggcaaatgcagaggatattactttaacttggctgcacttggactttcccattctacaragtgctcttccttgaactcggcaaccattaggacaggcactgggtgaatgttttggctggacgtgcatgcctctcccatatgcttcctcttccaagtaacaytacttttgcaatggttgcatccaggttatttctaatactagtttgaatagcagtgaggttggtaactcagcgctgttttggttgttatactgccatcatcagtgtactgtgtgaacaaaataactaacagtaatttatggctttcccctcaatcgtatttccagtaagggaattacacatggcaatgctttgattttacactttttgttctcctctctccaagagctgcagtgctacacaatgagagtagagaaggccaagccaaaaaagtgcatccaagtgttggtgtggaggtcagca

SEQ ID NO: 62432 - DNA, 600 bp, Chicken  19866894324452_1
aacttgtaacttagatcatgttcatttagcctgtttataataccataatagtgtgttatctttaattacttgtaggaacagttccataaagctgaagaaatcattgtcccacaaaaaaaacaaaaaaaaaaagagagaaagaaattaagagtagaatcatataagaagctaatctacactttgagatttttgaagatttgttcaattactagagatcaagccagaattgaggtcaggttgttcctaaaaattattgatttcagatgaaatgtagttataatggcataaaatgcacaaacmaaaagagacacaagaaaaaaacaaaaacctccgctaaagcaaactactcaagaaaatgttggaggattctggcttttccaaaacaaacaggcaaggttgaatatgcatcctggttctggccaggatggagtctctgtagctgatacggtgctatgttttggatttaggatgagaataatgttgatagcacaccagtgttgtagctgttgctgagtagtggctgcattatggcaagaactttccagtttcttgtgctgtctgccagagaggggttggtgatgcagaagttgtgatgagaca

SEQ ID NO: 62433 - DNA, 600 bp, Chicken  19866894324452_2
tgagatttttgaagatttgttcaattactagagatcaagccagaattgaggtcaggttgttcctaaaaattattgatttcagatgaaatgtagttataatggcataaaatgcacaaacmaaaagagacacaagaaaaaaacaaaaacctccgctaaagcaaactactcaagaaaatgttggaggattctggcttttccaaaacaaacaggcaaggttgaatatgcatcctggttctggccaggatggagtctctgtagctgatacggtgctatgttttggatttaggatgagaataatgmtgatagcacaccagtgttgtagctgttgctgagtagtggctgcattatggcaagaactttccagtttcttgtgctgtctgccagagaggggttggtgatgcagaagttgtgatgagacacagccagaacagctgtccagaggtgggcaaagggacatcccatattgtaggagttggcaggaggggcttggaggctcctcaggattcagctggacactgatcagctagtggagagcaattgcagtgtgtatcactggttttgtgtattcttttcatttctcctcctgtttctttcctgtag

SEQ ID NO: 62434 - DNA, 600 bp, Chicken  19866894324454_1
tccataaatttttttaaagcaaatagatgcataccatttctgctgacagtggtaacctgatcgctatactttggctaagtgaagaattgtacctgcctttaacatacaaataacctgtctttgcatctgtgcaggtaaaaaatgaggttaccgctcgctcccgcattgcaagaacacttggtcttagtaaacctgtgcgtggggcctcacttccttccatgtacaaaccaacggagcccctcacttggtctgatgagagcagatattggtgcagcttctctgtctgtgtttggagacccrtatgaattggatccgtatgaagggtaagatgtcatgagtgtacaagactgtaatccaaagataattttacaagtcttgagttgtttgtacatatgcacggatgtatttgcatcttcctgaatatttgaaacctgggatattttgagacttcaacagttggagtattgggttatattttggaaaagagcttgtgactttgtgcagagagtgtaaatctcacatgtgaaaatagctttggatgcacagtttatgataatgtaatgctgtacttgttctttcttccctccttggccaagttgc

SEQ ID NO: 62435 - DNA, 600 bp, Chicken  19866894324454_2
tcatgagtgtacaagactgtaatccaaagataattttacaagtcttgagttgtttgtacatatgcacggatgtatttgcatcttcctgaatatttgaaacctgggatattttgagacttcaacagttggagtattgggttatattttggaaaagagcttgtgactttgtgcagagagtgtaaatctcacatgtgaaaatagctttggatgcacagtttatgataatgtaatgctgtacttgttctttcttccctccttggccaagttgctgagctcttaaagaatcagccttcttaaaasaggtttgctgaaatggtgagcctcatgaaaatctttcataagwtctttagattctggcctttgggtaatatcataaggagtcaggtgctaataattctttgtttattcaaagatagcagcgtttttgttatacagtgaacagtaattccatgcagaattaggtggacctgtgaaattttcgatgcttcttctttccctctgttcctttctccagatgctttaaattctggaggaatcttactataccatagtttgtgtcagtcttaagctctggattttggaagtaatcaaatttcctac

SEQ ID NO: 62436 - DNA, 600 bp, Chicken  19866894324454_3
cttgagttgtttgtacatatgcacggatgtatttgcatcttcctgaatatttgaaacctgggatattttgagacttcaacagttggagtattgggttatattttggaaaagagcttgtgactttgtgcagagagtgtaaatctcacatgtgaaaatagctttggatgcacagtttatgataatgtaatgctgtacttgttctttcttccctccttggccaagttgctgagctcttaaagaatcagccttcttaaaasaggtttgctgaaatggtgagcctcatgaaaatctttcataagwtctttagattctggcctttgggtaatatcataaggagtcaggtgctaataattctttgtttattcaaagatagcagcgtttttgttatacagtgaacagtaattccatgcagaattaggtggacctgtgaaattttcgatgcttcttctttccctctgttcctttctccagatgctttaaattctggaggaatcttactataccatagtttgtgtcagtcttaagctctggattttggaagtaatcaaatttcctactgagcaaacctttttgacagtcttttggaaggaaactccgcat

SEQ ID NO: 62437 - DNA, 599 bp, Chicken  19866894324462_1
  misc_feature (1)..(171): n is any nucleotide
nnnnnnnnnnnnnnnnnnnnnnnnnnnnnnnnnnnnnnnnnnnnnnnnnnnnnnnnnnnnnnnnnnnnnnnnnnnnnnnnnnnnnnnnnnnnnnnnnnnnnnnnnnnnnnnnnnnnnnnnnnnnnnnnnnnnnnnnnnnnnnnnnnnnnnnnnnnnnnnnnnnnnnnnnnnatctgctttgggaagacgggatgttatctgagaagtgaagctgtgtgagcgccctgctctccagcagccctccagcaatcgctatggttgctcttagaatgggactgggaccacagggaccggggctgygtgggacgtgggacaccacccacagtcaggcacccagccttcctcccaccgggactgctcccaagcagcagagctgagtgctgcgcctgcagcagagctcgctgtgcaccacgcagsagcactgctgggttaatgctgaggttggggctgtgtgagccccagggcgccccatggggcaaccacacgacaccggggagctcctttctgccctctgcatgggagctccaggaggggcctcgggactgtggcttcacctcattgcgtcagccaaagccacctgggtgaccaagcacaggtgt

SEQ ID NO: 62438 - DNA, 599 bp, Chicken  19866894324462_2
  misc_feature (1)..(54): n is any nucleotide
nnnnnnnnnnnnnnnnnnnnnnnnnnnnnnnnnnnnnnnnnnnnnnnnnnnnnnatctgctttgggaagacgggatgttatctgagaagtgaagctgtgtgagcgccctgctctccagcagccctccagcaatcgctatggttgctcttagaatgggactgggaccacagggaccggggctgygtgggacgtgggacaccacccacagtcaggcacccagccttcctcccaccgggactgctcccaagcagcagagctgagtgctgcgcctgcagcagagctcgctgtgcaccacgcagsagcactgctgggttaatgctgaggttggggctgtgtgagccccagggcgccccatggggcaaccacacgacaccggggagctcctttctgccctctgcatgggagctccaggaggggcctcgggactgtggcttcacctcattgcgtcagccaaagccacctgggtgaccaagcacaggtgtgtgggagaaactgctgagggatctctgcagagcagctgcagccacctcgtaaccttcgtgggtaattgactcgaaatggctcactttgcctcacaggccattggccacttctgcttc

SEQ ID NO: 62439 - DNA, 525 bp, Chicken  19866894324462_3
actgctgggttaatgctgaggttggggctgtgtgagccccagggcgccccatggggcaaccacacgacaccggggagctcctttctgccctctgcatgggagctccaggaggggcctcgggactgtggcttcacctcattgcgtcagccaaagccacctgggtgaccaagcacaggtgtgtgggagaaactgctgagggatctctgcagagcagctgcagccacctcgtaaccttcgtgggtaattgactcgaaatggctcactttgcctcacaggccattggccacttctgcttcccarcagagcagctgaagtttacaggcaggaaaaaaagagatagcgaacgttggccaggaaggaccgtttgtcttgtgtagagttactccagctggaattcatcagtgggttggtaaacaccttgcagccctccagagagcttttagggttggggtttttttggggggggggcaaacaaaaaagcagtgaaccgaatggaaactgagcactcagaactatctttgcaaa

SEQ ID NO: 62440 - DNA, 599 bp, Chicken  19866894324467_1
  misc_feature (1)..(9): n is any nucleotide
nnnnnnnnncgtgccctctagacccttccccatctttgtagccctcccttggacactttctaattgctttctgtccttacattatggtgcccaaacctgcacgcaatgcttgaggtgaggccacacagtgcagggccgagaggcacagctacttccctcacacacagaccatgctgggcctaaagtaccccagggtacagttggcccttttggctgccaggacacactgctgacttagattcaacttgtcatcaaccagaacccccagatcctttaacgttggactgctctccagtctcragctatattttatttccttgacttggacaaaaatgagaatattattttgaacattaatttartgacttgttagggaaattccttaggggattgttttttctagaaactgcaatattttagaacactttaattagcctgataataaattaaacttgatacagtaggcacaacataattcagtgaaaattcagcatctaaaccatacatacttgagtaacccataatctcagctggagcaatgctgaagtcatcatatcagtttgttctgtggtccaagattatatttaacactagcaatt

SEQ ID NO: 62441 - DNA, 600 bp, Chicken  19866894324467_2
attgctttctgtccttacattatggtgcccaaacctgcacgcaatgcttgaggtgaggccacacagtgcagggccgagaggcacagctacttccctcacacacagaccatgctgggcctaaagtaccccagggtacagttggcccttttggctgccaggacacactgctgacttagattcaacttgtcatcaaccagaacccccagatcctttaacgttggactgctctccagtctcragctatattttatttccttgacttggacaaaaatgagaatattattttgaacattaatttartgacttgttagggaaattccttaggggattgttttttctagaaactgcaatattttagaacactttaattagcctgataataaattaaacttgatacagtaggcacaacataattcagtgaaaattcagcatctaaaccatacatacttgagtaacccataatctcagctggagcaatgctgaagtcatcatatcagtttgttctgtggtccaagattatatttaacactagcaattcattgtgattagttttaggtatttaaatgctgactgtttaattaaatttaacccaaattactg

SEQ ID NO: 62442 - DNA, 599 bp, Chicken  19866894324478_1
  misc_feature (1)..(95): n is any nucleotide
nnnnnnnnnnnnnnnnnnnnnnnnnnnnnnnnnnnnnnnnnnnnnnnnnnnnnnnnnnnnnnnnnnnnnnnnnnnnnnnnnnnnnnnnnnnnnnntacatgttcagcaaatatcaaatgaatgtcagcggggtgagattctttcagcacagaggagttcaattccacatttttgcttcatacgcacttctgtgttagacttctttttgtcagactgctcctctgcttccatttctcacaaaacaacaaaaatgaatgctattttgatgggaaggttcatcttctactgccatatcaccamtgtctgcctctgacatcgtgtgtcaatataataaaacaggagacatgacttttggagaatcccctgtaaagtgctacatacactaaggtttttgtttggttggtttttgattagcagaagaatgcagttatcagaatataattcattatttcctagagaaattctacagcttcctagaaatgagaaaactgataaacatgtttgttttgagttgcaataggaagaagagctgacaatgatgtccgtactttttacacagtaatttagtgaatactatgccatcagtaactgattaagta

SEQ ID NO: 62443 - DNA, 600 bp, Chicken  19866894324478_2
tataataaaacaggagacatgacttttggagaatcccctgtaaagtgctacatacactaaggtttttgtttggttggtttttgattagcagaagaatgcagttatcagaatataattcattatttcctagagaaattctacagcttcctagaaatgagaaaactgataaacatgtttgttttgagttgcaataggaagaagagctgacaatgatgtccgtactttttacacagtaatttagtgaatactatgccatcagtaactgattaagtaggtaagtaggtaagacatcccatgtcmttgcccttcttcacctgtgagcttaagcatacaccttttaggggatccccaaagcataagataaaaggtctctgtatccttccatttcaagtaaattgtgactggaactggaaggtgttggacattctaaagcactccaggttttcagagacaccattgtgaactcctctctgttagctggcctccaactggcatccttatcagagcccaaacatcttgttcattcaccagaggatgtatgaaattccccatgtccaaacagttaccgcattctttggaaatacattggaacagctggct

SEQ ID NO: 62444 - DNA, 599 bp, Chicken  19866894324483_1
  misc_feature (1)..(84): n is any nucleotide
nnnnnnnnnnnnnnnnnnnnnnnnnnnnnnnnnnnnnnnnnnnnnnnnnnnnnnnnnnnnnnnnnnnnnnnnnnnnnnnnnnnnccccaccccgggcagggaacaaggcgatgtcctcacaccgagctgcagtaatgcagccacccccaccaccccggcaccaacgtcacgctcgggcaccttgctcacagtccccacccttttacacatccaggattgcttcacaccgacaaatcccatccacgccaacgagccgtgcgaggggaaaggagccaaagcatttctgtttgcacaggctcrgggaaacgttcaggcaccaaatcactctcagaagccatgctcttacgtaagcacaagaaatacaacccctgtcttgtgaagaaacagctacctgccttcaccctgcccgcacagaaggcagggagcagcaygctgtgcagccctgcacgttttggcaaggctataaaaacgaggaggaggagcagcagcagctctcccaaaccctgtcatcccgtctcctccccggcagcctgaaacccaaactgtttgtttgcataaggctctggagtaggtcagtattactgctggagcgcacagcc

SEQ ID NO: 62445 - DNA, 588 bp, Chicken  19866894324483_2
gtaatgcagccacccccaccaccccggcaccaacgtcacgctcgggcaccttgctcacagtccccacccttttacacatccaggattgcttcacaccgacaaatcccatccacgccaacgagccgtgcgaggggaaaggagccaaagcatttctgtttgcacaggctcrgggaaacgttcaggcaccaaatcactctcagaagccatgctcttacgtaagcacaagaaatacaacccctgtcttgtgaagaaacagctacctgccttcaccctgcccgcacagaaggcagggagcagcaygctgtgcagccctgcacgttttggcaaggctataaaaacgaggaggaggagcagcagcagctctcccaaaccctgtcatcccgtctcctccccggcagcctgaaacccaaactgtttgtttgcataaggctctggagtaggtcagtattactgctggagcgcacagcccgcctgacgcagccaagacgacactgacaaacactccatatggccccgcgtaaggatctacagaatccatctgttcagaactgggttgtctttgcagaaatccgatgctcgcagtccact

SEQ ID NO: 62446 - DNA, 600 bp, Chicken  19866894324484_1
aaatcagcagtcaaatgttattcactgaatttgcagtatacaaaagtgctccttctcatgcacttgtatatatcaaaactgttatttttttccccctttaacatcccaaacgctctcccagtatagatttttaagaaaagccaaaatgagtgtgaacgctgccattaacagaaaggccaaaagatgcgacttatgttcatgactcgtgcacagataggtattttattgctaggagtaaggtatctggtcattgggtttaacaggagaatctcacaggatttgtacctaaggaaaacagcrggaaatgcaaatctcaactctgacatttcttaaaaatgagcattacaaacacttttaatgtgacttaagcatctgacatagctcctgcagtcctgaaataggttagaataggagtctcaacttcttaggaggctgtagtaagagtaactgctggaggaactggcagcaatttatcaactggaccttcctttattgtgtttgctaggaaccgtgaatatcgaasggtgatgattcagaaacagttattacacacaataatraagactttttaaaaaatggatacatgtgtatatgtggaaa

SEQ ID NO: 62447 - DNA, 600 bp, Chicken  19866894324484_2
tattgctaggagtaaggtatctggtcattgggtttaacaggagaatctcacaggatttgtacctaaggaaaacagcrggaaatgcaaatctcaactctgacatttcttaaaaatgagcattacaaacacttttaatgtgacttaagcatctgacatagctcctgcagtcctgaaataggttagaataggagtctcaacttcttaggaggctgtagtaagagtaactgctggaggaactggcagcaatttatcaactggaccttcctttattgtgtttgctaggaaccgtgaatatcgaasggtgatgattcagaaacagttattacacacaataatraagactttttaaaaaatggatacatgtgtatatgtggaaagaaaatttgttccactgaactctggataaatttaaattcgggagaaagtattcagctgtaccttcttgcaatgatgtctgttgccattccttcacagaggaatcacagaatggttaaggttggaagggactactggaagccttctgctcaagcagggccacccagagcagtgtgcccaggaacatgtcctggtatcttgcagatctccaaggaggaacctgca

SEQ ID NO: 62448 - DNA, 600 bp, Chicken  19866894324484_3
caggagaatctcacaggatttgtacctaaggaaaacagcrggaaatgcaaatctcaactctgacatttcttaaaaatgagcattacaaacacttttaatgtgacttaagcatctgacatagctcctgcagtcctgaaataggttagaataggagtctcaacttcttaggaggctgtagtaagagtaactgctggaggaactggcagcaatttatcaactggaccttcctttattgtgtttgctaggaaccgtgaatatcgaasggtgatgattcagaaacagttattacacacaataatraagactttttaaaaaatggatacatgtgtatatgtggaaagaaaatttgttccactgaactctggataaatttaaattcgggagaaagtattcagctgtaccttcttgcaatgatgtctgttgccattccttcacagaggaatcacagaatggttaaggttggaagggactactggaagccttctgctcaagcagggccacccagagcagtgtgcccaggaacatgtcctggtatcttgcagatctccaaggaggaacctgcacagcctctctatgccagtactgcagaactcacagaag

SEQ ID NO: 62449 - DNA, 599 bp, Chicken  19866894324503_1
  misc_feature (1)..(84): n is any nucleotide
nnnnnnnnnnnnnnnnnnnnnnnnnnnnnnnnnnnnnnnnnnnnnnnnnnnnnnnnnnnnnnnnnnnnnnnnnnnnnnnnnnnntataaaattttgttcatttaaaataaattgtgtgtgtgtgtgtgtgtgtaaaatcttctatctgatgataaagaagttttgttgcactcttatggcaactgcaaataatggaacaggagattcctttcagcagatttagcacttttacctcaaaggagccaaataaggctgttctatgatggatgttcacagtgccattgaatatcatagctacasaattcttctacctgcagactgagtatgatgtgaagatacagcagaatctgccttgttcatgggagctttaaattmttgttgcttcctgcttttgtacctcagatatttgctctagacagagttaatagttgtgttttttgaaaaatgagttatgcytactttgcaaggcccaaattgctttttttaggagaattgccctctggtttttaaaaacaagtgctctcatatttacaaataattaacaaatattatctccctttcagttgatgatggtagttggaggacaggcaccaaaggca

SEQ ID NO: 62450 - DNA, 599 bp, Chicken  19866894324503_2
  misc_feature (1)..(9): n is any nucleotide
nnnnnnnnntataaaattttgttcatttaaaataaattgtgtgtgtgtgtgtgtgtgtaaaatcttctatctgatgataaagaagttttgttgcactcttatggcaactgcaaataatggaacaggagattcctttcagcagatttagcacttttacctcaaaggagccaaataaggctgttctatgatggatgttcacagtgccattgaatatcatagctacasaattcttctacctgcagactgagtatgatgtgaagatacagcagaatctgccttgttcatgggagctttaaattmttgttgcttcctgcttttgtacctcagatatttgctctagacagagttaatagttgtgttttttgaaaaatgagttatgcytactttgcaaggcccaaattgctttttttaggagaattgccctctggtttttaaaaacaagtgctctcatatttacaaataattaacaaatattatctccctttcagttgatgatggtagttggaggacaggcaccaaaggcaattcgcagtgttgaatgctatgattttaaagaagaacgctggcatcaggtggctgagttgccttccagaagatgt

SEQ ID NO: 62451 - DNA, 600 bp, Chicken  19866894324503_3
gaagttttgttgcactcttatggcaactgcaaataatggaacaggagattcctttcagcagatttagcacttttacctcaaaggagccaaataaggctgttctatgatggatgttcacagtgccattgaatatcatagctacasaattcttctacctgcagactgagtatgatgtgaagatacagcagaatctgccttgttcatgggagctttaaattmttgttgcttcctgcttttgtacctcagatatttgctctagacagagttaatagttgtgttttttgaaaaatgagttatgcytactttgcaaggcccaaattgctttttttaggagaattgccctctggtttttaaaaacaagtgctctcatatttacaaataattaacaaatattatctccctttcagttgatgatggtagttggaggacaggcaccaaaggcaattcgcagtgttgaatgctatgattttaaagaagaacgctggcatcaggtggctgagttgccttccagaagatgtagagcaggtaaataatgtccaatatcatattacattggttaatgcttcagactttagctgtctacataaagcttcctacgct

SEQ ID NO: 62452 - DNA, 600 bp, Chicken  19866894324512_1
ggtacatccttctaatactgtcatttggagtggtgagctctcagagcaatttgaattttcttatgaccccttaatgttctttaataggtttcatttagtagattgactaattttagcaattcatcagcttgctaagggaggagagaaccagcatctgaaagtcaccaggtttggtgatttaatcttcttgcagatgtattaaagtcctaaaattctgatcctttctgataattacatatatacccactgaggcataaaaattaagaaatgaaaactcctcagatatgtaggatttgttcwtctctagatgcagttgtcccctttacctgcagaataatcttggctctcattcttgttgtgaaatacagttttaatcagtatattgaaattttgcttcctttttaggtattggtggatttatggtacgtcaaaagaagtcgtacagggcaggggaagactaagagatctctctctaggaaagattcttctggatctgtttctgagcagatgcctggcagagatgagggtaagtgcagaaattggcttttaattttttgttcatgcatagtagagtaaaaatagtgcaacttgcaatgtatg

SEQ ID NO: 62453 - DNA, 600 bp, Chicken  19866894324514_1
ctcttcaataataaatgcagattcatgcaattttcccaattaatttaaaatttacattttattttgtcttcaagaagtgttcatgtttattgcctcaaataaattaaaagaattatggtgaagatacagctcgtgaatcagcctggttcttgctttctaatatctaggctcaaaagttttttgaaattttccattcttgacaaacactaataataaaacatatgctaatgggctcctgtaactcttaaagaacaccaccataactcatttccgtgcccacagttatgctatttttttttwaatgaaaactcaaagtttggcatttgattatagagaaagaaagatatctcatgaatatgaaattgctcatgccttttaatatctcactctggaatctggagttaatgtttgatacaaatgtcaaactgatcctcactggtgatatacagtggatttgtgttaccacattacattggagtagaatttttctaaactaatttaacttatcagctattttaaattacaacgaatcactctctggaaacagttattttcattgactatasaggtgacttattaaagagtagacatcaaaatgtt

SEQ ID NO: 62454 - DNA, 600 bp, Chicken  19866894324514_2
atttccgtgcccacagttatgctatttttttttwaatgaaaactcaaagtttggcatttgattatagagaaagaaagatatctcatgaatatgaaattgctcatgccttttaatatctcactctggaatctggagttaatgtttgatacaaatgtcaaactgatcctcactggtgatatacagtggatttgtgttaccacattacattggagtagaatttttctaaactaatttaacttatcagctattttaaattacaacgaatcactctctggaaacagttattttcattgactatasaggtgacttattaaagagtagacatcaaaatgttggttgaatttgggacaaactaacattatccatggaaatttaatctacaaatgtaatgcatcrggtattaatggaaagtggaaatggaactgaaagtggtttgaattctgagaaccttgaattttgcatttcctaatggtgcctataatgggtagaaataagttcacacataatttggtttttatttattttttcacaatatcttgggagtcataacaattaaggcctgtaaaatactagtcttagatattaatatttcattaacaa

SEQ ID NO: 62455 - DNA, 600 bp, Chicken  19866894324514_3
ttgctcatgccttttaatatctcactctggaatctggagttaatgtttgatacaaatgtcaaactgatcctcactggtgatatacagtggatttgtgttaccacattacattggagtagaatttttctaaactaatttaacttatcagctattttaaattacaacgaatcactctctggaaacagttattttcattgactatasaggtgacttattaaagagtagacatcaaaatgttggttgaatttgggacaaactaacattatccatggaaatttaatctacaaatgtaatgcatcrggtattaatggaaagtggaaatggaactgaaagtggtttgaattctgagaaccttgaattttgcatttcctaatggtgcctataatgggtagaaataagttcacacataatttggtttttatttattttttcacaatatcttgggagtcataacaattaaggcctgtaaaatactagtcttagatattaatatttcattaacaaatgaaaaaagtatgaaaaaaaaatcccaaatcaatcagcacagatggttatttcagtaacaatctttttcacatgtctccctgtggaaatgtttaa

SEQ ID NO: 62456 - DNA, 600 bp, Chicken  19866894324529_1
aattccatcctttctccagttatctggagaagctggcagcccatgtcttggtcagatacactctttgctgcatgaagaactggatggaaagctgagcctagagagtggtagtgaatggatttaaatctagctggctacttgtccccaaggatcagtatttgggcccatcttgtttaattactcacgatctggatgacggcactgagtgcatcctcagtaagttagcagacaacaccaagctgtggggaagtatagagaggacattctgagggatctggacaggttggattgatggtttgrggccaacgggatgaagttcagcaagatacrtactgggccttgcactttggtcacaaccacaggcaacgctacaggctcagagcagagtggctggaaagctgcacagaggaaaaggatatggaattgctggtcagcgctaggctaaacatgagccagcagtgctaagaaggccaagggatcctggcttgtatcagaaatagtgcagtcagcaggaacagggaaggtgatccctctgtactgagctctgatgaggccccatctcatgtactgcattcagttttgggtctcttgccatgagaa

SEQ ID NO: 62457 - DNA, 600 bp, Chicken  19866894324529_2
agctggcagcccatgtcttggtcagatacactctttgctgcatgaagaactggatggaaagctgagcctagagagtggtagtgaatggatttaaatctagctggctacttgtccccaaggatcagtatttgggcccatcttgtttaattactcacgatctggatgacggcactgagtgcatcctcagtaagttagcagacaacaccaagctgtggggaagtatagagaggacattctgagggatctggacaggttggattgatggtttgrggccaacgggatgaagttcagcaagatacrtactgggccttgcactttggtcacaaccacaggcaacgctacaggctcagagcagagtggctggaaagctgcacagaggaaaaggatatggaattgctggtcagcgctaggctaaacatgagccagcagtgctaagaaggccaagggatcctggcttgtatcagaaatagtgcagtcagcaggaacagggaaggtgatccctctgtactgagctctgatgaggccccatctcatgtactgcattcagttttgggtctcttgccatgagaaggacataaatgccctggagtgtgaccagag

SEQ ID NO: 62458 - DNA, 600 bp, Chicken  19866894324531_1
tgtttttgacttgcatgttatgattatcattttcccacttcaagtccctggcaataatggttgctaccagcgaaggttctgtgcgctactggcccaatcttgcccatgaaggttcctatactgagactttcacagactttggaggctctctgtgcagtttcctgacagcagtgaaggtacagtgcaatagatttatataaaagtgctgctttactgtgtccagttttcaaatgtcaagctgaggaaagcaaaatcttcacgttgaattctacattaaaactaggagtattagaattaagmactaaaggaaccwttttaagccaacgatctaatagtgtgttattagatattagtccacctrttggtgggcagacttaatctgtagcgtaaccttcatatggtatgaaaattaggtaaagtttgttcttttagtagcctccaggctgtggctatgtggtggtatggcaatgccactgtctacgctggttaatttttacagggttgttatttgaaacaagttcatgagatggaatgaatatctgtcagtggtcagaacccatctttcagtttagattctttcaaagtatatagtaccagtac

SEQ ID NO: 62459 - DNA, 600 bp, Chicken  19866894324531_2
catgttatgattatcattttcccacttcaagtccctggcaataatggttgctaccagcgaaggttctgtgcgctactggcccaatcttgcccatgaaggttcctatactgagactttcacagactttggaggctctctgtgcagtttcctgacagcagtgaaggtacagtgcaatagatttatataaaagtgctgctttactgtgtccagttttcaaatgtcaagctgaggaaagcaaaatcttcacgttgaattctacattaaaactaggagtattagaattaagmactaaaggaaccwttttaagccaacgatctaatagtgtgttattagatattagtccacctrttggtgggcagacttaatctgtagcgtaaccttcatatggtatgaaaattaggtaaagtttgttcttttagtagcctccaggctgtggctatgtggtggtatggcaatgccactgtctacgctggttaatttttacagggttgttatttgaaacaagttcatgagatggaatgaatatctgtcagtggtcagaacccatctttcagtttagattctttcaaagtatatagtaccagtacacatagaggactg

SEQ ID NO: 62460 - DNA, 600 bp, Chicken  19866894324531_3
tgctaccagcgaaggttctgtgcgctactggcccaatcttgcccatgaaggttcctatactgagactttcacagactttggaggctctctgtgcagtttcctgacagcagtgaaggtacagtgcaatagatttatataaaagtgctgctttactgtgtccagttttcaaatgtcaagctgaggaaagcaaaatcttcacgttgaattctacattaaaactaggagtattagaattaagmactaaaggaaccwttttaagccaacgatctaatagtgtgttattagatattagtccacctrttggtgggcagacttaatctgtagcgtaaccttcatatggtatgaaaattaggtaaagtttgttcttttagtagcctccaggctgtggctatgtggtggtatggcaatgccactgtctacgctggttaatttttacagggttgttatttgaaacaagttcatgagatggaatgaatatctgtcagtggtcagaacccatctttcagtttagattctttcaaagtatatagtaccagtacacatagaggactgtgatgtgatccagcacgtagtacatggagactagcagatcacttcaga

SEQ ID NO: 62461 - DNA, 599 bp, Chicken  19866894324533_1
  misc_feature (1)..(130): n is any nucleotide
nnnnnnnnnnnnnnnnnnnnnnnnnnnnnnnnnnnnnnnnnnnnnnnnnnnnnnnnnnnnnnnnnnnnnnnnnnnnnnnnnnnnnnnnnnnnnnnnnnnnnnnnnnnnnnnnnnnnnnnnnnnnnnnnnncagacgacaaacaggagcagctgcagcaagctcagtgcttccagaggatctgtgtttatcaaaagctgtcgctctccagccagaacaggtgtcagtcacagcaaaatctcatggcagctattcaatatgaaggcacagagtttgacatcggggaaaaagaaggaaaaaaraaaaagaaaaaaaaagcaccgttggcaatttctctgctctccatctctactacagccctggtggaaggaaggtgaagggccaggaagagaagacggcttgcatcagggcagcacagtgacctgaagcaggcatctccccaccrtaagatgttcagagcagacctggccacctgtgccacatcagccagctgccccaggctttgtcccactcacggacctgctagctgctcagagatttatgctgagagtgacacagagcagcccctgcactgcctgtgcaacacctcccactagccaga

SEQ ID NO: 62462 - DNA, 600 bp, Chicken  19866894324533_2
ggagcagctgcagcaagctcagtgcttccagaggatctgtgtttatcaaaagctgtcgctctccagccagaacaggtgtcagtcacagcaaaatctcatggcagctattcaatatgaaggcacagagtttgacatcggggaaaaagaaggaaaaaaraaaaagaaaaaaaaagcaccgttggcaatttctctgctctccatctctactacagccctggtggaaggaaggtgaagggccaggaagagaagacggcttgcatcagggcagcacagtgacctgaagcaggcatctccccaccrtaagatgttcagagcagacctggccacctgtgccacatcagccagctgccccaggctttgtcccactcacggacctgctagctgctcagagatttatgctgagagtgacacagagcagcccctgcactgcctgtgcaacacctcccactagccagacaccaacccctactaacactgccaacatcctaattagcaccttccctgtgcctaccctgctcccgactgctctgcatctgtctgaggacatggcacaggacttggagcatctctgaaggtacagcagcagtcctacatacaccc

SEQ ID NO: 62463 - DNA, 600 bp, Chicken  19866894324553_1
gaattctgggaatttaggactgatgagagagaacttgtattagcgcttaacaaagaagaaatgtggcatcaaaacatttgctgactgaacatgttcaaagttgcttagaacaatagaagctgtcagtgagaaatgaaaatgtaaaaataacagtatttagaaaggtttgttccttttcctgagtaattgctttcctgcttaagtaatctggctctttaatcctacagtagaattcatattcatccttgcagcttttatcaccgttcagactaccaagagagtactttagccttgttatakcagattacctcaataagctaagggaagatatgtgctgaagagaaataagaagatagccacaattttcagcagagatgccttctctatgtgtgagtgaatggtacgcactcaatgacttcagatcctgactactcaaaacactgaggatttttgcaaagtcctcaacaccagcagttcaactcctcatggggagataagaaccctccacagaactgatattttcccacccaatttaactgtaattgttaaagtgcaggctggatgataaacagtgggatgccatctgcaattgctttctgt

SEQ ID NO: 62464 - DNA, 576 bp, Chicken  19866894324553_2
cacagaactgatattttcccacccaatttaactgtaattgttaaagtgcaggctggatgataaacagtgggatgccatctgcaattgctttctgtagagttaattgctgaagagtataactactatttaaaaagagtctgaataaatgaatttgccactaaatatataaaagaacaaaccctaaaattacaagggaaagcatatttgcagttacggatgaggaatgaaaatagtcatgctaattaaatgctctggggttgattccctttatacctctatagtaacaatggagtctctcckacaaaccaaggaaaaatcatacttgttcttttcttcttccatcagagttccttaaatatattgctggtttaacacatttaattaaggctgtattttctagcattctaagttttgaataactattgaatattacaagttattaagtaactaatcttgtcatcgcttttttcactggttaatccaaagtaatttgtaggagactggtgacataggaagtgatgtactacccttcacactgtcagcaaaattactcacaatcagtgtaaataaatatga

SEQ ID NO: 62465 - DNA, 600 bp, Chicken  19866894324557_1
aagaaatcccccaaaccaactaacacacaaataaagtcttcaagcaaatgaaaaggccatataaaaacagaactgtaaatatggtccaaagctgcacagctggagtttcttttaacagagttatctaataaacgcagatgaagtgaagtaacttcgcaaatccaattcacaatgaaaacattacattgcctcacagtaacactgaacagctgccagttttgaacaggagagaaaaatgtagctatttatacttaaaatgctcagctacctgctcatacaagttgtaatagatatgtctaygggcagctacagaaatgagaaacgatgattaaatgtattcagttaaaccccaaaaattaactgagtaacacaacattcagctgttaaggcttatggagttaaaaaaaaaaacagctatttctccccactcttttttaatttttatttatttatgaaaaaatggttttgtgttttttttttcccccccagcaatcttccaagtgtagcattttatactactacccctttggggactccaagctttggcatttttgtttttttaaacagcaaacaaacccaactacagcctcaacactccgt

SEQ ID NO: 62466 - DNA, 600 bp, Chicken  19866894324557_2
cagctatttctccccactcttttttaatttttatttatttatgaaaaaatggttttgtgttttttttttcccccccagcaatcttccaagtgtagcattttatactactacccctttggggactccaagctttggcatttttgtttttttaaacagcaaacaaacccaactacagcctcaacactccgtgttctctgggtcagaatccctttttatggtttggaaacagaaaccaagcagctagatcagttcccccacttggttcactgagatgccaacccaacatcaagctattacaaygtctgatgcaatggctacctagacaggcagtgatattggaaaaggtacttttgcaagctacataaagaacatgaagacaacaycaataaatatctcttacatcacagaaaactccyctactcttctgatacactcaaccatgactgctacctatcatagaaacacctctaccactgttaccaggagcctcaaatatgtttaaaatccatatttaatccttttgacaccacccactaaatacctcaatttaagtctacattgaagatacatttaggaatatacttcagtaggtgaacaagt

SEQ ID NO: 62467 - DNA, 600 bp, Chicken  19866894324557_3
ttccaagtgtagcattttatactactacccctttggggactccaagctttggcatttttgtttttttaaacagcaaacaaacccaactacagcctcaacactccgtgttctctgggtcagaatccctttttatggtttggaaacagaaaccaagcagctagatcagttcccccacttggttcactgagatgccaacccaacatcaagctattacaaygtctgatgcaatggctacctagacaggcagtgatattggaaaaggtacttttgcaagctacataaagaacatgaagacaacaycaataaatatctcttacatcacagaaaactccyctactcttctgatacactcaaccatgactgctacctatcatagaaacacctctaccactgttaccaggagcctcaaatatgtttaaaatccatatttaatccttttgacaccacccactaaatacctcaatttaagtctacattgaagatacatttaggaatatacttcagtaggtgaacaagtagggcatgaagttacgtattcatcaccgaaatccatgcacagttacaggccagagtgtttggcttttttccccactacaggta

SEQ ID NO: 62468 - DNA, 600 bp, Chicken  19866894324557_4
tggggactccaagctttggcatttttgtttttttaaacagcaaacaaacccaactacagcctcaacactccgtgttctctgggtcagaatccctttttatggtttggaaacagaaaccaagcagctagatcagttcccccacttggttcactgagatgccaacccaacatcaagctattacaaygtctgatgcaatggctacctagacaggcagtgatattggaaaaggtacttttgcaagctacataaagaacatgaagacaacaycaataaatatctcttacatcacagaaaactccyctactcttctgatacactcaaccatgactgctacctatcatagaaacacctctaccactgttaccaggagcctcaaatatgtttaaaatccatatttaatccttttgacaccacccactaaatacctcaatttaagtctacattgaagatacatttaggaatatacttcagtaggtgaacaagtagggcatgaagttacgtattcatcaccgaaatccatgcacagttacaggccagagtgtttggcttttttccccactacaggtaaaaaaaaaattatcggaattgcattaactcaga

SEQ ID NO: 62469 - DNA, 600 bp, Chicken  19866894324562_1
ggagagctcttcagtccttttcattggcaaaacttgatctgcattggtcttttggtctttatcctgtgcctgggctgctgagtggagctctaactgctgttgacctcagtgtagccctattgcttttatttcaagggttggctgtcttctgtctgataataagctcagtgcagtgtagtccttgtgagaaacactgtctatatcagaacagcatgtttctctttttaagtctgcatcccagtttgcagtatcctgacctctcaaatggaaagaaaaggataacttggctgaaacaagagytccaattccaaaagtaagaaagtaaataaataactcaaaatcaaaataccattttatatagtatagactaaactaaatctgaataacttgtctatatttcaaattcgggattgcatcttccagctggaagtctggaactattgcagtcaaaatgagtattcatgygtggtttggataatggatcactgtgtcagatgtgaaaacctatggatgagaagagtaagtgagataggctttctttttattattatttgttgttatgactattcacatgggaaaaactcatcaaatgcagttctt

SEQ ID NO: 62470 - DNA, 555 bp, Chicken  19866894324562_2
cagtgcagtgtagtccttgtgagaaacactgtctatatcagaacagcatgtttctctttttaagtctgcatcccagtttgcagtatcctgacctctcaaatggaaagaaaaggataacttggctgaaacaagagytccaattccaaaagtaagaaagtaaataaataactcaaaatcaaaataccattttatatagtatagactaaactaaatctgaataacttgtctatatttcaaattcgggattgcatcttccagctggaagtctggaactattgcagtcaaaatgagtattcatgygtggtttggataatggatcactgtgtcagatgtgaaaacctatggatgagaagagtaagtgagataggctttctttttattattatttgttgttatgactattcacatgggaaaaactcatcaaatgcagttcttccaactgtaaaactttagaattgaaagccaaagccacgtactggtttagtttgatatttatttgggcaagtaatggtccattttcatgtcattttattatctcactttatgatcacattt

SEQ ID NO: 62471 - DNA, 600 bp, Chicken  19866894324563_1
tttttttttaatcagagttgtgactccatgcccagtcaacataaatacattacttactaattttcaaatggaatgtgtaaagctgcaatcggacattcgactcaacaatctcattgtgtctctttaccagacctttataagccccatctgaccagagggaaaacaccccttgctttgccatcacgccttattcgtggcattgctttttggctgtacatacacttgtaaatgactgttttcaaggatgaatcacaggaagagtaaaatgtcaccaaaaatctctgatgaacagcttaggarctcaccaagagttgcagccagtaccaccaaaccagactgatgcattagtgtcacaaaaacaatgtcaaataacccactgttttgtttttgttgctttccgtgttttaataaaagatatttttaaataaagttttgttagttacatacttgaactatacagcagcccagacaagcccaaaggttggatggtcatgtattgagccatgtccccaagtgccacatggacacgtctattaaatcccttcacagagcaacagctgcacatggcagcaccagctctgtgttgggtaagaacaagac

SEQ ID NO: 62472 - DNA, 599 bp, Chicken  19866894324578_1
  misc_feature (1)..(9): n is any nucleotide
nnnnnnnnnttggtcaaagtactttcccccaaggctcttcttgactcctgttgtcccactcccagcagcagactgttagtgggactgcagttcttgtagagactcatagagtggcttgggttggaagggatcttaaagatcatctagttccaatctgctttggagagagcttcagctcagcacaatttcatctacacctgcaattgttaatgcttaataattattgtctggggaaggtatatttatttagcaaatagctaattgcctatctactgtggaggttcatggggtcatctttaragcttcagacaaaaatcctaaatcaaacataggcacactggccaagacatcactgtggtgcttctgcaactgcctggtttacagtccttctatgctggtagtgctctgactcacactagcaactcctaggcatcaaactcttatcccatagagagggtgggagtttctgtcctgcctgggagccagctttcaacctaggttcgtaaagaagtgtgcagtgtccttcctcaatgtgaagaaagattctgccacaggaattactcagtacttytcagtctgatttctcactacttgttttt

SEQ ID NO: 62473 - DNA, 600 bp, Chicken  19866894324578_2
actgtggaggttcatggggtcatctttaragcttcagacaaaaatcctaaatcaaacataggcacactggccaagacatcactgtggtgcttctgcaactgcctggtttacagtccttctatgctggtagtgctctgactcacactagcaactcctaggcatcaaactcttatcccatagagagggtgggagtttctgtcctgcctgggagccagctttcaacctaggttcgtaaagaagtgtgcagtgtccttcctcaatgtgaagaaagattctgccacaggaattactcagtacttytcagtctgatttctcactacttgtttttgtgagacccaaaattaccaaacactttggaaaactgttacgaccaactccaggagtgatctcaacagattacctacagtgcagcatgaagaaatatttcctgctactgatgtaaaatttatatgcagccaacttcagtgaagaacactcattgcctctaccccttggggaaaaaaaataaaggagaaaaaaatagaaatagctgctctggttttatttatgttctctgtaatcataaatatctgcattcagtttccctcttacaagcaaaac

SEQ ID NO: 62474 - DNA, 600 bp, Chicken  19866894324578_3
aagcaaaacaaaccaacgctgcaatctcttatatcaggactacttctgcactcattgtagtcagtggccaaaatgcatatggatttcatgcagaacaagagtaggctctacatataagccctccttatacatctcaccatctgtgctgaagtaaacaaaaaaagccatattaaaatcaagctcagctggaaacagaaggagaggaggaaataccagcaattgctaaatataaagcaataaacagatttaaaaggtgttacaaataatggatggattttttaagaagttatggctgcactrcatattactttcttraacacgcctgtgtggatgatctytcttgtgtttagtgtatattctgtttaataataccacgtataaaataatctatagcattcattaacagtatagatagcaatataaaatattttaaattattgtttttcactcctgcaaggagaaagatttcttccttgcaacccctgccctgttacaggctgtgtgcacgcccagatttgcatcgtttcatttaacagggaaccatacaagctccaagatttatccccaaacatttttgctcaggagtgacagaatgaggct

SEQ ID NO: 62475 - DNA, 600 bp, Chicken  19866894324578_4
acgctgcaatctcttatatcaggactacttctgcactcattgtagtcagtggccaaaatgcatatggatttcatgcagaacaagagtaggctctacatataagccctccttatacatctcaccatctgtgctgaagtaaacaaaaaaagccatattaaaatcaagctcagctggaaacagaaggagaggaggaaataccagcaattgctaaatataaagcaataaacagatttaaaaggtgttacaaataatggatggattttttaagaagttatggctgcactrcatattactttcttraacacgcctgtgtggatgatctytcttgtgtttagtgtatattctgtttaataataccacgtataaaataatctatagcattcattaacagtatagatagcaatataaaatattttaaattattgtttttcactcctgcaaggagaaagatttcttccttgcaacccctgccctgttacaggctgtgtgcacgcccagatttgcatcgtttcatttaacagggaaccatacaagctccaagatttatccccaaacatttttgctcaggagtgacagaatgaggctctcattatacaaaat

SEQ ID NO: 62476 - DNA, 600 bp, Chicken  19866894324578_5
actacttctgcactcattgtagtcagtggccaaaatgcatatggatttcatgcagaacaagagtaggctctacatataagccctccttatacatctcaccatctgtgctgaagtaaacaaaaaaagccatattaaaatcaagctcagctggaaacagaaggagaggaggaaataccagcaattgctaaatataaagcaataaacagatttaaaaggtgttacaaataatggatggattttttaagaagttatggctgcactrcatattactttcttraacacgcctgtgtggatgatctytcttgtgtttagtgtatattctgtttaataataccacgtataaaataatctatagcattcattaacagtatagatagcaatataaaatattttaaattattgtttttcactcctgcaaggagaaagatttcttccttgcaacccctgccctgttacaggctgtgtgcacgcccagatttgcatcgtttcatttaacagggaaccatacaagctccaagatttatccccaaacatttttgctcaggagtgacagaatgaggctctcattatacaaaatttgatggtatggcagaggcttca

SEQ ID NO: 62477 - DNA, 600 bp, Chicken  19866894324578_6
tttttgctcaggagtgacagaatgaggctctcattatacaaaatttgatggtatggcagaggcttcaaatcagtaaagtacctctgtttaggaaaacatactgaagacaagcagccttaggcatgtgcttatgtgcttccttgaatcagcctgattgctgaaagtattttccccgaggcagagataaggcttacagacataggtcccaaatttgggccggtccaaggctaatttaaatggatctcttccctctctctctttcctctactgaaagagccaggtttgctgcacatcttattyctatctgcctttattaggatttttataaatgtgaaggaaaaaaataaaataaaattcagcatcccagacgtctccttgggtttaagatcttaacaaatgaggacacagctgggctacttggtccatggatttgctagctgcaggattaagtccagctgagctgaagtttataaaccaagttattgactttaaaaattctcataccgcttatcaaaacacaccacattgaaagaacacccttcccagaatcagacgtggtaaagctttctcaattataggcagcctctccccacacagcag

SEQ ID NO: 62478 - DNA, 600 bp, Chicken  19866894324580_1
tacattttgagtttctctcaagagtttctgtagtaaatggttttattaaaacactttcaaactaattttcctagtaagggctgagggaagtagcataggatatacttctatatctctaccatctctaagtgcaattgttccggtcttgtgctctgccaggctcacatgtgcttgagagtctaatctggctctgaatgtatataggaaccaccaatttccttgcctcactacaggcagagatctataacaggacaaaacactgtaggtagtagatgctttcctttctgatagaagttaaaraattgttttatttcagatgtcctgcttactgctgttttatctacttgaacaaacacgcttatctcaccaactttttttttttaggatgtagatatgatggatcaaaatggaatgacacctcttatgtgggcagcttacagaacacataggtaatacaaacactcactgcaatttttacttaatcttggtgttaactatgtacgtcacttggaataatgtctgattttgagttatggagtgtgctttggtttaattagtcagtgtgcttttcacagttgctgctttatctttcttaattta

SEQ ID NO: 62479 - DNA, 599 bp, Chicken  19866894324581_1
  misc_feature (1)..(118): n is any nucleotide
nnnnnnnnnnnnnnnnnnnnnnnnnnnnnnnnnnnnnnnnnnnnnnnnnnnnnnnnnnnnnnnnnnnnnnnnnnnnnnnnnnnnnnnnnnnnnnnnnnnnnnnnnnnnnnnnnnnnnnccttcaacacaatgtccaacgttccttgaacacctccatggttggtgactccaccacctctctgcgcagcccattccagtgcctgaccaccctttcagagaagtagtatttcctaacattcagcctgaacctcccctggtgcaacttgaagccattccctctagtcctatcactagtcacasgagagaaggggctgacccccagctcactacaacctcccttcaggtagttayagagaacaataaggtctcccatgagcctcctcttctctagactgaacaatcccagctccttcagccactcctcataaggcctgtgctccagacccctcaccagctttgttgccctcctctggacacgctccagggccttgatgtctttcttgcagtgaggggcccaaaactggacacagtactcaaggtgcagcctcaccagtgctgagtttttcctcagaaaatgcagtacagtggactgatgcata

SEQ ID NO: 62480 - DNA, 599 bp, Chicken  19866894324581_2
  misc_feature (1)..(67): n is any nucleotide
nnnnnnnnnnnnnnnnnnnnnnnnnnnnnnnnnnnnnnnnnnnnnnnnnnnnnnnnnnnnnnnnnnnccttcaacacaatgtccaacgttccttgaacacctccatggttggtgactccaccacctctctgcgcagcccattccagtgcctgaccaccctttcagagaagtagtatttcctaacattcagcctgaacctcccctggtgcaacttgaagccattccctctagtcctatcactagtcacasgagagaaggggctgacccccagctcactacaacctcccttcaggtagttayagagaacaataaggtctcccatgagcctcctcttctctagactgaacaatcccagctccttcagccactcctcataaggcctgtgctccagacccctcaccagctttgttgccctcctctggacacgctccagggccttgatgtctttcttgcagtgaggggcccaaaactggacacagtactcaaggtgcagcctcaccagtgctgagtttttcctcagaaaatgcagtacagtggactgatgcataaataagcatgggattgctttagaaaggctgtgaaatgctgagttagcctga

SEQ ID NO: 62481 - DNA, 600 bp, Chicken  19866894324584_1
tcctaaacaaaataatatcacgaaacgtacagcagtaaacaccagcccatgcccaacaaccatcagctgcattgtatgagagatgaccacatgtggcaccacagctgaatgagcacctgcccacaggaggctatttccaaaagccaacatcctgtatatacaaaaatatataggtaaactaatatacactaaaatacacatacaaaaactaatgaactccaagatataacctcacaatgtttatccaaagctttatagagaaactaatagttttttaagtgccacacagatttattgaaytgaaaagaatattaacataatatgctaatgaaatctgcatttaataagatatgtatccattcagattctcagtacctttctgtcagcacagcatattgcaaaaatgaaccatcgaggcagcaatttaatctgatataaaatcaaatgatccatgttaacaagacaattaaataactgtctgaaactgaagaaaaatcatcagaagttcaccagataaaaactggttttgaataatgtgaaagtatgattatacagcaggcaaacagagttgtttctgtgattagaataatacggtggtaa

SEQ ID NO: 62482 - DNA, 600 bp, Chicken  19866894324586_1
gatagaagtcagaggcatgatacactctcaacatcctcaacaatagaacacttctgactcttctcaggtaagcacgggacaatacagctgcctctctaagtaagtaagagaaagtgctctttaagtgccatgtacaaatatatcttgacctctgcaaaggccaagagagacagggaccacaaccaacagaatcttgcccatcccagaaccggttttgaaaacctcatttgaaatgtccactgtatggtaagtacagtcctgctctggaatattggtctgaaagcagaaagcagtgagcaygtaccagagataacctgttaactgactggataatgcagcgtggaccattttgccaaccagcaaaaggaagacaaaccatttcagtattttgatggaaccacaacttctgcaatgtactgagccaatagctcacccctgttgtcactgatccttctaaggatgtcctgaaagagtcagaacaccattaaacacagggaaccgacaggctcaaggctctaggttgagtcaatttaccatcagcagcaattgttctatcctaaaaatgttgtctgaagaatccatttacatctgcacacaact

SEQ ID NO: 62483 - DNA, 600 bp, Chicken  19866894324588_1
tttctgagttgctgagtcattacatagagtctggagagacagcagctgtcacaaattactaacgccccattacacatctagctgcatttggttgattcaattactcatcagaagggcaaagaactgtctggctgtcctagaattacttcaagcaatgcaatgtcagacacctacttacagaccataatcttttcaagtgtagctctcttctgccataatataaaatctcaataggggaaaaatattcctactcaaagacctcagtgggaaaaaaaaaatcacacagtgtttgatgaaacygccacgtagaacatcaccattcagtaatgaacactaaccacaaaccaaattcagtaaaaaaaaaataaaacaaaaaaaaacaaagtttgaaaagacactgggagtggaaaatcacaactgcaatttcagaggtcccagaatgttgtgccaggggttaaaaagggtttcatggcagatctgatcaaagaattttcctcagaagagagtgaaaatctctctgcacgaagcataatgcttggcaaagaacaagtgttctttctgacaggaaatctttgggtactcaagctacaatttctggtt

SEQ ID NO: 62484 - DNA, 599 bp, Chicken  19866894324592_1
  misc_feature (1)..(114): n is any nucleotide
nnnnnnnnnnnnnnnnnnnnnnnnnnnnnnnnnnnnnnnnnnnnnnnnnnnnnnnnnnnnnnnnnnnnnnnnnnnnnnnnnnnnnnnnnnnnnnnnnnnnnnnnnnnnnnnnnntattttctgtgttaattttaacaccagtaagtagagctttctcaagtaatgccagcttgcttttgcttactactctgccatcagctgtgcttgacaaacctgtaaatgcatcagctacagtcaggtaatagcccacatgtcatactgcaaacacctgcacccatctcaacataaaccttggttttkcttgccaactttctagaaactagttcatttaggaaacttgctgggactgagaagtaatggcccattttgcacgagggaataagcagtgaaaattaatgtgcagtgtgtttgtcaaaaagcattaacaggaaaagagggagggaaaaaaaataaaagctgataaacctgagctggttcaaggaagttcactgtgctgtgagtacttacctgcccagttggcaaacaaaaaattacactgcatcacatgtaataaccatgagcttgagggatctttttgagggtatttattgataaaattc

SEQ ID NO: 62485 - DNA, 600 bp, Chicken  19866894324592_2
ttcaaggaagttcactgtgctgtgagtacttacctgcccagttggcaaacaaaaaattacactgcatcacatgtaataaccatgagcttgagggatctttttgagggtatttattgataaaattcattaatgtgttggaggtagccctgggttttataaagatggttggcttgccgagctttgctcagagctaacagaagcaacataacaggctgaagagtctcctggtatcacactgagagaggtgagttctgttgtgtaatgagtgatctagattaaaattgctgacagtcaaatacrtggactcagtgagaaaatcccatcagttctctcactggttcctctcacacttccatcatgtattttacaccttctggagcagatgagtttagagctttctcatggtgttttctttaccctgtggagaagtgtgaagcagccttctgtagagaaataggctgcagtcactagagggttttttgacacttctcatccttttctaaattttcctgattctataagaactcccatctgatgcctattttaataaatacaagatacacattttaagtaatggtttcttgcagttgaaataacaca

SEQ ID NO: 62486 - DNA, 600 bp, Chicken  19866894324596_1
aaagctcgtcagtaccccttggggcacagtgcagggtgagtcaagacctgaaaatttcatggcatgaatggtgacatttccaccaggaggcagtggactcgctcttgtaagagcagcaaggacctgctggactgtaatttctcttggaggttatcctttgtctccttgtaataataaatccttgcgtcaggccaatagtagcagtgtcctctgttcagaagggctgttaaatctattggaggagtagcccagtggggaatgtgagaagagacctttgtttctacccctctcttacctttwatgtcttcttaaagtggagaatgaagctcactgtgattttgtgaagctgcgggagatgctgatccgtgtgaacatggaagaccttcgtgaacagacccacacacgccactatgagctgtaccggagatgtaaactggaagagatgggtttcaaggacactgatccggacagcaagcctttcaggtgggatccttggagtagacaggagagcttgagggaggaggcaccattggatgcactgagtgtttgtgtgtatgtgygtgtcctcgagagagcatataaagagccastgtggcaaga

SEQ ID NO: 62487 - DNA, 565 bp, Chicken  19866894324596_10
tagaaggttagggtgtggttagcaggagtatcccgctaccccagagaggagtgtgtcctatttcagggtcttgatttgatttagaaaaagctttggaaattattcagggaacataatagtaytgaactcttgaatctgcaaaatataagtctctgaaagtgtyagtagtctckacagccttataccaaaatttgacctccccagaaacagtaagagataatgcacaggtttrgaagggttccccatgcaagggaatggtgtgacaggatctcaagccccttgtcagtgtctctgggatawcagcagtgccttaatgttctgtagttcctccatagcaacccagctgtgcagctgaaacaatttttctaatccacctagcaatgagaaatggtacataatctgaaatggagggctgtcccaccttagcatgtgtacaaagggcagtgtgcagatagacaagtgtctgtttttttataccactgtcatataattccctctctgcccgtccgtgaagcaaatccatagtaaatactgcctgtcaaaggcagttttagtacatggggaa

SEQ ID NO: 62488 - DNA, 600 bp, Chicken  19866894324596_2
gtgagaagagacctttgtttctacccctctcttacctttwatgtcttcttaaagtggagaatgaagctcactgtgattttgtgaagctgcgggagatgctgatccgtgtgaacatggaagaccttcgtgaacagacccacacacgccactatgagctgtaccggagatgtaaactggaagagatgggtttcaaggacactgatccggacagcaagcctttcaggtgggatccttggagtagacaggagagcttgagggaggaggcaccattggatgcactgagtgtttgtgtgtatgtgygtgtcctcgagagagcatataaagagccastgtggcaagaaaacctgctaggtcagatcaatctagacttcagcaaaggtgttggctgaatgagagaaggtgaaagcacagagagcatgtgcaggactgactgtgaaatggcagatgtaaaaatgtcagtgctgcagagatacagaggtgtgaacgagtgtttgttaccagctggtctctctgaatcgcccaacattcaacatatagggaaagtacaatagcttacagacctcagaaatgattggataaagataacttcaagcgtacagg

SEQ ID NO: 62489 - DNA, 600 bp, Chicken  19866894324596_3
cttacctttwatgtcttcttaaagtggagaatgaagctcactgtgattttgtgaagctgcgggagatgctgatccgtgtgaacatggaagaccttcgtgaacagacccacacacgccactatgagctgtaccggagatgtaaactggaagagatgggtttcaaggacactgatccggacagcaagcctttcaggtgggatccttggagtagacaggagagcttgagggaggaggcaccattggatgcactgagtgtttgtgtgtatgtgygtgtcctcgagagagcatataaagagccastgtggcaagaaaacctgctaggtcagatcaatctagacttcagcaaaggtgttggctgaatgagagaaggtgaaagcacagagagcatgtgcaggactgactgtgaaatggcagatgtaaaaatgtcagtgctgcagagatacagaggtgtgaacgagtgtttgttaccagctggtctctctgaatcgcccaacattcaacatatagggaaagtacaatagcttacagacctcagaaatgattggataaagataacttcaagcgtacagggatgggtgataggaaagcagtattcatggt

SEQ ID NO: 62490 - DNA, 600 bp, Chicken  19866894324596_4
caaagctagattgcagcaattgcctgtacagcttactgcgccatgaaagtgccatatactttgattctgaccgtcagctttggcgtttcaaattcaaggagagaaatggaacccctgaggtcagcttattatataaaaattatacccatacaactttcttagtgttagggaagggcatgaaaacccactaatgcattttaaaagaaataaggccaacaactctggtaagaaaatgaaatggattgattatttatttatctatttatttgcgattatactctcccagtcctctattgttartctgtgcactggttcctcctcaccagagtggttcttgttgtgtaggctgctttggaagaagactttcctgccctttgtctatgtgttgtcaggtcagggtgcaagaaacgatgtaaagtccaacagagatttttgggctgagatctcatgggaatcctcctcccttctcttctgtgaacagagtatctggtagtgttcacctctctcttttctgtctagctccatgaaaagtttgatcgtctgaagaagttacatcaggatgaaaaaaagaagctggaggataagaagaaatctttggat

SEQ ID NO: 62491 - DNA, 600 bp, Chicken  19866894324596_5
agctggaggataagaagaaatctttggatgatgaagttaatgcatttaaacaaaggaagacggcagctgaattgctccaatctcaggctcagcaggctggaggatcacaaactcttaaaagagataaggaaaggaaaaagtaagttgctaacctgacggtatttgcttctcttttaatattttctgggtattcatatctctttcctaacctagccagtccttaccaggggaaggtttgcaaacagttataatccctagtaaggctaagtggtagctggatgcattttagctctacatgtygtcctcaggagcagcgagcgcaataccagcctcccttactggttgctgacagcatggaagaggatgaacttggttgcatttgctgggattccctggccttcctttggtctgtcagtgtctctaatgtagtagaaggttagggtgtggttagcaggagtatcccgctaccccagagaggagtgtgtcctatttcagggtcttgatttgatttagaaaaagctttggaaattattcagggaacataatagtaytgaactcttgaatctgcaaaatataagtctctgaaagtgtyagtagtct

SEQ ID NO: 62492 - DNA, 600 bp, Chicken  19866894324596_6
tccctagtaaggctaagtggtagctggatgcattttagctctacatgtygtcctcaggagcagcgagcgcaataccagcctcccttactggttgctgacagcatggaagaggatgaacttggttgcatttgctgggattccctggccttcctttggtctgtcagtgtctctaatgtagtagaaggttagggtgtggttagcaggagtatcccgctaccccagagaggagtgtgtcctatttcagggtcttgatttgatttagaaaaagctttggaaattattcagggaacataatagtaytgaactcttgaatctgcaaaatataagtctctgaaagtgtyagtagtctckacagccttataccaaaatttgacctccccagaaacagtaagagataatgcacaggtttrgaagggttccccatgcaagggaatggtgtgacaggatctcaagccccttgtcagtgtctctgggatawcagcagtgccttaatgttctgtagttcctccatagcaacccagctgtgcagctgaaacaatttttctaatccacctagcaatgagaaatggtacataatctgaaatggagggctgtcccacc

SEQ ID NO: 62493 - DNA, 600 bp, Chicken  19866894324596_7
tacatgtygtcctcaggagcagcgagcgcaataccagcctcccttactggttgctgacagcatggaagaggatgaacttggttgcatttgctgggattccctggccttcctttggtctgtcagtgtctctaatgtagtagaaggttagggtgtggttagcaggagtatcccgctaccccagagaggagtgtgtcctatttcagggtcttgatttgatttagaaaaagctttggaaattattcagggaacataatagtaytgaactcttgaatctgcaaaatataagtctctgaaagtgtyagtagtctckacagccttataccaaaatttgacctccccagaaacagtaagagataatgcacaggtttrgaagggttccccatgcaagggaatggtgtgacaggatctcaagccccttgtcagtgtctctgggatawcagcagtgccttaatgttctgtagttcctccatagcaacccagctgtgcagctgaaacaatttttctaatccacctagcaatgagaaatggtacataatctgaaatggagggctgtcccaccttagcatgtgtacaaagggcagtgtgcagatagacaagtgt

SEQ ID NO: 62494 - DNA, 600 bp, Chicken  19866894324596_8
cctcaggagcagcgagcgcaataccagcctcccttactggttgctgacagcatggaagaggatgaacttggttgcatttgctgggattccctggccttcctttggtctgtcagtgtctctaatgtagtagaaggttagggtgtggttagcaggagtatcccgctaccccagagaggagtgtgtcctatttcagggtcttgatttgatttagaaaaagctttggaaattattcagggaacataatagtaytgaactcttgaatctgcaaaatataagtctctgaaagtgtyagtagtctckacagccttataccaaaatttgacctccccagaaacagtaagagataatgcacaggtttrgaagggttccccatgcaagggaatggtgtgacaggatctcaagccccttgtcagtgtctctgggatawcagcagtgccttaatgttctgtagttcctccatagcaacccagctgtgcagctgaaacaatttttctaatccacctagcaatgagaaatggtacataatctgaaatggagggctgtcccaccttagcatgtgtacaaagggcagtgtgcagatagacaagtgtctgttttttt

SEQ ID NO: 62495 - DNA, 600 bp, Chicken  19866894324596_9
ggatgaacttggttgcatttgctgggattccctggccttcctttggtctgtcagtgtctctaatgtagtagaaggttagggtgtggttagcaggagtatcccgctaccccagagaggagtgtgtcctatttcagggtcttgatttgatttagaaaaagctttggaaattattcagggaacataatagtaytgaactcttgaatctgcaaaatataagtctctgaaagtgtyagtagtctckacagccttataccaaaatttgacctccccagaaacagtaagagataatgcacaggtttrgaagggttccccatgcaagggaatggtgtgacaggatctcaagccccttgtcagtgtctctgggatawcagcagtgccttaatgttctgtagttcctccatagcaacccagctgtgcagctgaaacaatttttctaatccacctagcaatgagaaatggtacataatctgaaatggagggctgtcccaccttagcatgtgtacaaagggcagtgtgcagatagacaagtgtctgtttttttataccactgtcatataattccctctctgcccgtccgtgaagcaaatccatagtaaatac

SEQ ID NO: 62496 - DNA, 600 bp, Chicken  19866894324614_1
acgtccatgtcagacgccgtctggtcccagtgcccctgtgctgccattgcataatgggatattggtgggaaggttcaaccacaagctcagtcaagccagggcctcgtacttcattctgttcttacgcaacatcgacagcggctgaaaatctccgtgcatgtgattacaactggacaaacaccaggggccacaggaccttcaggtttccccaagatagacctggaacctccatcatcccagaagaccaggcttacagcagagctccgctagcgccccggcagaaagcctgtgagctgggargaggcagcgtgcttcctcacctctgttttctggaaggctgtggagcacactgcagccccaagctgcttcctctcctccgcctgctaacgtggctccagagaatcagataagggagccgatttgtgtatttctgtcggattagtcttaacctacatcggtgccctaatctctgtggctggaggcacgcgggtgctggagcggtgcggcggggaagggcgaggcagggcctgcgtccgctcagagctcttcagggttccttccccatctccttactttcaaacgccactctattggaaacgt

SEQ ID NO: 62497 - DNA, 558 bp, Chicken  19866894324615_1
cccaagaattttctcactttttctcttccttgtcctaacgtcagattgggagtgaatgaacaggtagatgggtgtttagctacttgtcagggacaacccatcacaattttcttccatactgaaagaattaaagaaagacaggtttatggatttcaacaagagactgtccagtagttacataatgtctatcagtttctctcttccatgtgcaaatgcaaattccctacagggaaaggagactgtactctagaaatcctttcagaactctggtgaggcctgagtatgagactgcagagcaaytgtgctgcactttaaatgcaatagaactcatgacattgcatttggggggtgggttcaggggaaagttattttttgtattgctactaaactaaggcccagctgtagccaccatggaagcagatcttaagtgagtcttcatccttccttgctggaagtgtccctctcctcagtgccaattccaggacgacattcaggtcaccagctccacagaagttctggaagctagtgcaacagagaataggagaaataagaatcagg

SEQ ID NO: 62498 - DNA, 599 bp, Chicken  19866894324620_1
  misc_feature (1)..(140): n is any nucleotide
nnnnnnnnnnnnnnnnnnnnnnnnnnnnnnnnnnnnnnnnnnnnnnnnnnnnnnnnnnnnnnnnnnnnnnnnnnnnnnnnnnnnnnnnnnnnnnnnnnnnnnnnnnnnnnnnnnnnnnnnnnnnnnnnnnnnnnnnnnnnaagagctggaagatgccatagaacgaatacacaaaactctgatgtaagaattgagtacttttgggagctttgtaggtagaattgaattcagaaatgcttgataggtggaataggaagcaccctgtagtgcagagtggaggtctgcagcacagggcatccrtttgtaaccttcagggacagaaaaaattttctgtagatggagttttcttttagaaaccaaaggaaaaactgatyggaaatcagtccagccttggtgatgttttttctaaatgatgacttgcaacagtgctccaatttcctctttgtttgtagttcaaagaatgaaacaaaaatcttttgacatctttgagtttagttctctgttcagtgcagttttcctgtgcaattttgggcaagttgtttactatgcacatgcctcagtctgctgtctgtaaaatggatataataacatttcttttc

SEQ ID NO: 62499 - DNA, 599 bp, Chicken  19866894324620_2
  misc_feature (1)..(66): n is any nucleotide
nnnnnnnnnnnnnnnnnnnnnnnnnnnnnnnnnnnnnnnnnnnnnnnnnnnnnnnnnnnnnnnnnnaagagctggaagatgccatagaacgaatacacaaaactctgatgtaagaattgagtacttttgggagctttgtaggtagaattgaattcagaaatgcttgataggtggaataggaagcaccctgtagtgcagagtggaggtctgcagcacagggcatccrtttgtaaccttcagggacagaaaaaattttctgtagatggagttttcttttagaaaccaaaggaaaaactgatyggaaatcagtccagccttggtgatgttttttctaaatgatgacttgcaacagtgctccaatttcctctttgtttgtagttcaaagaatgaaacaaaaatcttttgacatctttgagtttagttctctgttcagtgcagttttcctgtgcaattttgggcaagttgtttactatgcacatgcctcagtctgctgtctgtaaaatggatataataacatttcttttcttagtactgccctgtatattcaaataatgaactgttaggaaaaaaacaacaacaacaacaaaaaaccccaacaa

SEQ ID NO: 62500 - DNA, 600 bp, Chicken  19866894324621_1
tcactgtggttaaacatataaaaatagtgttaatgttacgacagtactgagcaaacatcataggactcctgtatattctgaaacagaacgtggggtaattcagaaaattcaatctgtgatctgactgcatctgatgtgtgcaaatcacaaaatctgtagtagaaggtgagtcaaaaagaattttgaaagataattacttgtgttttcccattccctaacaaataaaaatggttacacgcttgtttttaattatgtgcatatatgctagtgctacagatggatactgggttcaggtgtctrtttyttaataaagtaagtgacagcagaacaaatcaaatgcttgactatcaaccactggtcacctaaaaacaygggagcaagctgaaaaaggaaaaagatgcagagaasgatttgtgagaagcctgctccctctactggctgctgtcgtgaatggtaaaaatgatagtaaaacttgaagctgctttctaatgcacagttaatgcagatttcagatattttgtcagcagaaaggatgcagatcccaaaataactagaaatccaatgactgcagatcagctgataattacaattatcatgatg

SEQ ID NO: 62501 - DNA, 600 bp, Chicken  19866894324621_2
tgtggttaaacatataaaaatagtgttaatgttacgacagtactgagcaaacatcataggactcctgtatattctgaaacagaacgtggggtaattcagaaaattcaatctgtgatctgactgcatctgatgtgtgcaaatcacaaaatctgtagtagaaggtgagtcaaaaagaattttgaaagataattacttgtgttttcccattccctaacaaataaaaatggttacacgcttgtttttaattatgtgcatatatgctagtgctacagatggatactgggttcaggtgtctrtttyttaataaagtaagtgacagcagaacaaatcaaatgcttgactatcaaccactggtcacctaaaaacaygggagcaagctgaaaaaggaaaaagatgcagagaasgatttgtgagaagcctgctccctctactggctgctgtcgtgaatggtaaaaatgatagtaaaacttgaagctgctttctaatgcacagttaatgcagatttcagatattttgtcagcagaaaggatgcagatcccaaaataactagaaatccaatgactgcagatcagctgataattacaattatcatgatgcagc

SEQ ID NO: 62502 - DNA, 600 bp, Chicken  19866894324621_3
atattctgaaacagaacgtggggtaattcagaaaattcaatctgtgatctgactgcatctgatgtgtgcaaatcacaaaatctgtagtagaaggtgagtcaaaaagaattttgaaagataattacttgtgttttcccattccctaacaaataaaaatggttacacgcttgtttttaattatgtgcatatatgctagtgctacagatggatactgggttcaggtgtctrtttyttaataaagtaagtgacagcagaacaaatcaaatgcttgactatcaaccactggtcacctaaaaacaygggagcaagctgaaaaaggaaaaagatgcagagaasgatttgtgagaagcctgctccctctactggctgctgtcgtgaatggtaaaaatgatagtaaaacttgaagctgctttctaatgcacagttaatgcagatttcagatattttgtcagcagaaaggatgcagatcccaaaataactagaaatccaatgactgcagatcagctgataattacaattatcatgatgcagctgcttagtttagaaagcaattcaaacaagactttgaatatccatgtrcatgaagagatgacttaataa

SEQ ID NO: 62503 - DNA, 600 bp, Chicken  19866894324621_4
tcaatctgtgatctgactgcatctgatgtgtgcaaatcacaaaatctgtagtagaaggtgagtcaaaaagaattttgaaagataattacttgtgttttcccattccctaacaaataaaaatggttacacgcttgtttttaattatgtgcatatatgctagtgctacagatggatactgggttcaggtgtctrtttyttaataaagtaagtgacagcagaacaaatcaaatgcttgactatcaaccactggtcacctaaaaacaygggagcaagctgaaaaaggaaaaagatgcagagaasgatttgtgagaagcctgctccctctactggctgctgtcgtgaatggtaaaaatgatagtaaaacttgaagctgctttctaatgcacagttaatgcagatttcagatattttgtcagcagaaaggatgcagatcccaaaataactagaaatccaatgactgcagatcagctgataattacaattatcatgatgcagctgcttagtttagaaagcaattcaaacaagactttgaatatccatgtrcatgaagagatgacttaataaccatgtctgctttcagttccttgcaagccaacctta

SEQ ID NO: 62504 - DNA, 600 bp, Chicken  19866894324621_5
ccactggtcacctaaaaacaygggagcaagctgaaaaaggaaaaagatgcagagaasgatttgtgagaagcctgctccctctactggctgctgtcgtgaatggtaaaaatgatagtaaaacttgaagctgctttctaatgcacagttaatgcagatttcagatattttgtcagcagaaaggatgcagatcccaaaataactagaaatccaatgactgcagatcagctgataattacaattatcatgatgcagctgcttagtttagaaagcaattcaaacaagactttgaatatccatgtrcatgaagagatgacttaataaccatgtctgctttcagttccttgcaagccaaccttattgggtagggtgtttttcaggtcttcagtttctgctagcaattatttactatattggagaaacagatatttagcacattggaaaactaagttctaataggcaaaaatatccctttcacacccgacattcacatttgataaaaacacagaactgagtagactggagcagttctcctgcctagtttctagaacttagtattcatcctaaaccatttaaaaccaggtcttacctgttgctcactga

SEQ ID NO: 62505 - DNA, 600 bp, Chicken  19866894324624_1
ataggatatacttatttgcaacacttacaatggcattcatgagaataattatatcactagatcaggttcccaaagcatatacaaatatgattcacattctaaaaatacttcactctaaaaattacaaaactgaaaactaaaaatatctatacattacatttttattttcaagagattttattttatattttgaaagctacagaaagcttctatgatttcttggaattattttcttagtgttctcattctgggattattctacaccttctacaccttttctttctaagttgagaagattgyatattgtagaaataaccaagcaatatcttctgaaagcctaatttctttaaaatccttagttatttgtcctatgttgagatagtggatgttgatttagaaggaacacaatactattgtcttttatatgaccttataaattatwaaaaaattaatttcttttgaaagctgtccaataaaacactgtttattaactgcctttgttcattctggctttaataataaaacaggcatggttaataaatctggctgttcagctttaggcattgcgtccacctctagagcacggaaagtacactatgc

SEQ ID NO: 62506 - DNA, 600 bp, Chicken  19866894324624_2
atatctatacattacatttttattttcaagagattttattttatattttgaaagctacagaaagcttctatgatttcttggaattattttcttagtgttctcattctgggattattctacaccttctacaccttttctttctaagttgagaagattgyatattgtagaaataaccaagcaatatcttctgaaagcctaatttctttaaaatccttagttatttgtcctatgttgagatagtggatgttgatttagaaggaacacaatactattgtcttttatatgaccttataaattatwaaaaaattaatttcttttgaaagctgtccaataaaacactgtttattaactgcctttgttcattctggctttaataataaaacaggcatggttaataaatctggctgttcagctttaggcattgcgtccacctctagagcacggaaagtacactatgcaattaaagcagtaatgttacatcaattaacatttagaaggtatatttggatttgacctagtgtgtgtttctcttgcatgtacatttttaggaaatacagaataaaattatttgacattgaactagatatcatagaatcatag

SEQ ID NO: 62507 - DNA, 600 bp, Chicken  19866894324624_3
aagcagtaatgttacatcaattaacatttagaaggtatatttggatttgacctagtgtgtgtttctcttgcatgtacatttttaggaaatacagaataaaattatttgacattgaactagatatcatagaatcatagaatggcctgggaccaataatgatcattgagtttcaacccccctactacgtgcagggttgccaatcactagaccaagatgcccagagccacatccagcctggccttgaatgcctccagggatggggcatccacaatctccttgggcaacctgaatatcttagaytagatctctttgtacaacatatctgtcacctattgtatgcgagatagatraggattatttcttgctagaytaagaaatacattgtatgcaccttaacttttaacaactcagtaaagtgcaattatgtattacatgataggcaaatttatttctagaatggaggattttgctctgattgaaatcaagtcttaaaatacgatgatatacagaacagtcaaaaaatcctcattaatttataatcaacactagagatgagcacacaaaacataattgaatcaaatatcatacaccaaatagcac

SEQ ID NO: 62508 - DNA, 600 bp, Chicken  19866894324624_4
cctagtgtgtgtttctcttgcatgtacatttttaggaaatacagaataaaattatttgacattgaactagatatcatagaatcatagaatggcctgggaccaataatgatcattgagtttcaacccccctactacgtgcagggttgccaatcactagaccaagatgcccagagccacatccagcctggccttgaatgcctccagggatggggcatccacaatctccttgggcaacctgaatatcttagaytagatctctttgtacaacatatctgtcacctattgtatgcgagatagatraggattatttcttgctagaytaagaaatacattgtatgcaccttaacttttaacaactcagtaaagtgcaattatgtattacatgataggcaaatttatttctagaatggaggattttgctctgattgaaatcaagtcttaaaatacgatgatatacagaacagtcaaaaaatcctcattaatttataatcaacactagagatgagcacacaaaacataattgaatcaaatatcatacaccaaatagcacatatactcttttcatattttctagatttctgaaagagaaaatgctttaaa

SEQ ID NO: 62509 - DNA, 600 bp, Chicken  19866894324624_5
catgtacatttttaggaaatacagaataaaattatttgacattgaactagatatcatagaatcatagaatggcctgggaccaataatgatcattgagtttcaacccccctactacgtgcagggttgccaatcactagaccaagatgcccagagccacatccagcctggccttgaatgcctccagggatggggcatccacaatctccttgggcaacctgaatatcttagaytagatctctttgtacaacatatctgtcacctattgtatgcgagatagatraggattatttcttgctagaytaagaaatacattgtatgcaccttaacttttaacaactcagtaaagtgcaattatgtattacatgataggcaaatttatttctagaatggaggattttgctctgattgaaatcaagtcttaaaatacgatgatatacagaacagtcaaaaaatcctcattaatttataatcaacactagagatgagcacacaaaacataattgaatcaaatatcatacaccaaatagcacatatactcttttcatattttctagatttctgaaagagaaaatgctttaaattacatactgaagataaaat

SEQ ID NO: 62510 - DNA, 600 bp, Chicken  19866894324628_1
agagtgcaagttagaactcaggtcttctgtttggaaaaagatacccgcaaccctttagatagagtactgaggtgtccctttaggggtgtgataagcagtgcgttataccgaggagataaagaaatgtgtcatgttattagtgggaattataatacttttattgcatattatttctttgggacacagtcagctatacttgcacgtatactctttgaaagatgtgcttttatctgtgtgtcagtttacaaactttaagtggaaaactcaacgtagcattaaaaagctgtttttgtaattttkgctttaarttaatatgtgatgttaagatggattatctttcacgtaatgaatgataattattagtagaggaagatgttttttataggttaacactgtgagttcttttaaatacccagttaattaaatatgtatctatttcaaatatagaggtgtttttcaaatgtattaatagacaaaaagaggtcctagttggttgatgcataccttgaattgcagatgaaattgtttctaaaccgactagaaaggattatttttgcaaatgtccataatgttatgatagtcacagagggagggggrcat

SEQ ID NO: 62511 - DNA, 600 bp, Chicken  19866894324628_2
agttagaactcaggtcttctgtttggaaaaagatacccgcaaccctttagatagagtactgaggtgtccctttaggggtgtgataagcagtgcgttataccgaggagataaagaaatgtgtcatgttattagtgggaattataatacttttattgcatattatttctttgggacacagtcagctatacttgcacgtatactctttgaaagatgtgcttttatctgtgtgtcagtttacaaactttaagtggaaaactcaacgtagcattaaaaagctgtttttgtaattttkgctttaarttaatatgtgatgttaagatggattatctttcacgtaatgaatgataattattagtagaggaagatgttttttataggttaacactgtgagttcttttaaatacccagttaattaaatatgtatctatttcaaatatagaggtgtttttcaaatgtattaatagacaaaaagaggtcctagttggttgatgcataccttgaattgcagatgaaattgtttctaaaccgactagaaaggattatttttgcaaatgtccataatgttatgatagtcacagagggagggggrcattcrttgct

SEQ ID NO: 62512 - DNA, 600 bp, Chicken  19866894324628_3
ttkgctttaarttaatatgtgatgttaagatggattatctttcacgtaatgaatgataattattagtagaggaagatgttttttataggttaacactgtgagttcttttaaatacccagttaattaaatatgtatctatttcaaatatagaggtgtttttcaaatgtattaatagacaaaaagaggtcctagttggttgatgcataccttgaattgcagatgaaattgtttctaaaccgactagaaaggattatttttgcaaatgtccataatgttatgatagtcacagagggagggggrcattcrttgctaatctgtttgcttacagaatttgtggtaatatcccaaagagatcatcttaggctgcctgaattgcctccaagcaaaccaacttatttcagtttctgttaattgcagtattgggttctcactattgctaatgaaatgcttgagaatacactttggtttcctctggtgaggtgtatacaggagatatggaatttaattcatggtgaaaatgatctgtggtgcagtgacggaatgcatgtgaggaattctaccacagtaaaaagatgacaaggcagaaacaaagagtttgtg

SEQ ID NO: 62513 - DNA, 600 bp, Chicken  19866894324628_4
ttaarttaatatgtgatgttaagatggattatctttcacgtaatgaatgataattattagtagaggaagatgttttttataggttaacactgtgagttcttttaaatacccagttaattaaatatgtatctatttcaaatatagaggtgtttttcaaatgtattaatagacaaaaagaggtcctagttggttgatgcataccttgaattgcagatgaaattgtttctaaaccgactagaaaggattatttttgcaaatgtccataatgttatgatagtcacagagggagggggrcattcrttgctaatctgtttgcttacagaatttgtggtaatatcccaaagagatcatcttaggctgcctgaattgcctccaagcaaaccaacttatttcagtttctgttaattgcagtattgggttctcactattgctaatgaaatgcttgagaatacactttggtttcctctggtgaggtgtatacaggagatatggaatttaattcatggtgaaaatgatctgtggtgcagtgacggaatgcatgtgaggaattctaccacagtaaaaagatgacaaggcagaaacaaagagtttgtgacaatg

SEQ ID NO: 62514 - DNA, 600 bp, Chicken  19866894324635_1
gagtttctacggtttctctgcgactccattgtaaagaatgtgcatccctcagagaggcttctgcagattataaaccctggcaactaataagctctggagatgggcaagtttggattcacgtggggcttagagacgccaatggattgtggatgaagcatttgttgaccgctgtgtaataggctctattttctcacctgtaaggcgtgccacaaaaccgtggttaaacagacttcagatctaagagtgagttttttcaggttcttgggacacatctgtttagcaccttgttttgcacagccstcggtggctgttgctggtcaaccaaaaagaagggagaacagattcgtatcctgagtcatcccatgtccaagtatttggggctctgaacgtgtcctgatgcttttccaaagttttcaagagatctgagctctccatgtgttggaaggaaataaaataactctttagaaatgcttatttcctttactgcgagttaggaaattcccagggacaaaatcttattaggatagaactaagttggaagataaattgaaatcctttgattgaaagtattgttattaaaaagttttaattattgagaag

SEQ ID NO: 62515 - DNA, 599 bp, Chicken  19866894324637_1
  misc_feature (1)..(89): n is any nucleotide
nnnnnnnnnnnnnnnnnnnnnnnnnnnnnnnnnnnnnnnnnnnnnnnnnnnnnnnnnnnnnnnnnnnnnnnnnnnnnnnnnnnnnnnnngtgagcagagcagaggcatggctgccctgcgtagggctgaggtggtcccccagctgtgccccaggcaaccacgaaggccatccttccttctgaagagtcagcaaggtgacattcgctgctctggtagtgtagaaactgcaaagcttttaagaaagaatatgttagtaagaaaggtggtagatgggtcccgcctggctctgcttagcagagygctgatggccttcctggtattaaaaatgccaacagaactgtgctagcacttcctaccttttgcagggctcttccacattgagttttggtgaccacacacccccagatcagctcactgactgcaggagcagtgtgatgccagctgcctgcagaaagggctcccgaggaaatgcggagccactgctgagagatgccaaggtcgttctggagaagtctgtgtagaaatctacaggctgtctcctgagcaaagcaaccattgcggggcagaaattggtgctctacactgggatacttcactga

SEQ ID NO: 62516 - DNA, 460 bp, Chicken  19866894324637_2
cagatcagctcactgactgcaggagcagtgtgatgccagctgcctgcagaaagggctcccgaggaaatgcggagccactgctgagagatgccaaggtcgttctggagaagtctgtgtagaaatctacaggctgtctcctgagcaaagcaaccattgcggggcagaaattggtgctctacactgggatacttcactgaaaataatagtatcggtgctgagaaggcattaagtatctgaatgagtggaactgcggtggcttaagaacatttagggaatgtagcagccagatactgcctgagrcagagtcatggaatcayagaatggcctgggttgcacaggaccacaatgctcatccagttccaaccccctgctacgtgcagggtcgccaaccaccagaccaggctgcccagagccacatccagcctggcctcgaatgcctccagggatggggcaggaattg

SEQ ID NO: 62517 - DNA, 443 bp, Chicken  19866894324637_3
tgcaggagcagtgtgatgccagctgcctgcagaaagggctcccgaggaaatgcggagccactgctgagagatgccaaggtcgttctggagaagtctgtgtagaaatctacaggctgtctcctgagcaaagcaaccattgcggggcagaaattggtgctctacactgggatacttcactgaaaataatagtatcggtgctgagaaggcattaagtatctgaatgagtggaactgcggtggcttaagaacatttagggaatgtagcagccagatactgcctgagrcagagtcatggaatcayagaatggcctgggttgcacaggaccacaatgctcatccagttccaaccccctgctacgtgcagggtcgccaaccaccagaccaggctgcccagagccacatccagcctggcctcgaatgcctccagggatggggcaggaattg

SEQ ID NO: 62518 - DNA, 599 bp, Chicken  19866894324640_1
  misc_feature (1)..(31): n is any nucleotide
nnnnnnnnnnnnnnnnnnnnnnnnnnnnnnncccaccccatatgggaattattgttttctctataggaaatattaagaaaagaaaccaagaaacattctcaccagaacagaggaaaagtccaactgaaccaaaccctgtcattctgcaactacagaatggaagctcgagctgtcagttatggcacaaatcaggaaagggattctggaataagaaattgttaatacatagttcacagttaacatgcagttttcaagagttcaggtgttacctgcatgccagagataaggaagccttcacaractacctctctgacattctcttcaagcagtcttyctacgcatactctgccttaatagwatcagccacaggagggtattggtacgcagcttgtaagggacacaaatctggtcatcttcatttatctggtcctcgttagctttctgctytcatgaaccctttgaaaataaccctttctgaaaacagcctgtcagcactgccttgtctatcacatggggtggacacaacattaaagatgcacgccttattttcagacaaatgtgctactcactgaaggtggtgtcacagataaataaaatgc

SEQ ID NO: 62519 - DNA, 600 bp, Chicken  19866894324640_2
accccatatgggaattattgttttctctataggaaatattaagaaaagaaaccaagaaacattctcaccagaacagaggaaaagtccaactgaaccaaaccctgtcattctgcaactacagaatggaagctcgagctgtcagttatggcacaaatcaggaaagggattctggaataagaaattgttaatacatagttcacagttaacatgcagttttcaagagttcaggtgttacctgcatgccagagataaggaagccttcacaractacctctctgacattctcttcaagcagtcttyctacgcatactctgccttaatagwatcagccacaggagggtattggtacgcagcttgtaagggacacaaatctggtcatcttcatttatctggtcctcgttagctttctgctytcatgaaccctttgaaaataaccctttctgaaaacagcctgtcagcactgccttgtctatcacatggggtggacacaacattaaagatgcacgccttattttcagacaaatgtgctactcactgaaggtggtgtcacagataaataaaatgctgacgttaacttgtttaaattaccaaattagtata

SEQ ID NO: 62520 - DNA, 600 bp, Chicken  19866894324640_3
ctctataggaaatattaagaaaagaaaccaagaaacattctcaccagaacagaggaaaagtccaactgaaccaaaccctgtcattctgcaactacagaatggaagctcgagctgtcagttatggcacaaatcaggaaagggattctggaataagaaattgttaatacatagttcacagttaacatgcagttttcaagagttcaggtgttacctgcatgccagagataaggaagccttcacaractacctctctgacattctcttcaagcagtcttyctacgcatactctgccttaatagwatcagccacaggagggtattggtacgcagcttgtaagggacacaaatctggtcatcttcatttatctggtcctcgttagctttctgctytcatgaaccctttgaaaataaccctttctgaaaacagcctgtcagcactgccttgtctatcacatggggtggacacaacattaaagatgcacgccttattttcagacaaatgtgctactcactgaaggtggtgtcacagataaataaaatgctgacgttaacttgtttaaattaccaaattagtatacacacacatgtattgctcttaaga

SEQ ID NO: 62521 - DNA, 600 bp, Chicken  19866894324640_4
aactacagaatggaagctcgagctgtcagttatggcacaaatcaggaaagggattctggaataagaaattgttaatacatagttcacagttaacatgcagttttcaagagttcaggtgttacctgcatgccagagataaggaagccttcacaractacctctctgacattctcttcaagcagtcttyctacgcatactctgccttaatagwatcagccacaggagggtattggtacgcagcttgtaagggacacaaatctggtcatcttcatttatctggtcctcgttagctttctgctytcatgaaccctttgaaaataaccctttctgaaaacagcctgtcagcactgccttgtctatcacatggggtggacacaacattaaagatgcacgccttattttcagacaaatgtgctactcactgaaggtggtgtcacagataaataaaatgctgacgttaacttgtttaaattaccaaattagtatacacacacatgtattgctcttaagacctcagaggtttatattaaaaatactacttacacaatgagaagtgaaatttttcataaaaggtactgactcaaaatgaattaagaagca

SEQ ID NO: 62522 - DNA, 600 bp, Chicken  19866894324642_1
ttttgcacagggctttgaaggaggagtaaattaaagatttccacaagcatcctaaaaaaataatgcccccctcccccccaaagggaggcttctttgctccagcattacagtattcattcttcagtcacagccaagccaaacacctggggctgggagcaagtatcttctctcaaaataaacgagagaagtgattacttcagagctataccagcatccttggagatcagattacatccccctagccctgtgctaagcagccatcttcacttccactttgtgttaattacaagcctctgcctyagatagcttagaagcttggtggttcaagggggggaacaaagaaaaaaaactcaaatcttattaggagtagtccagcaacccaaaggctctgaaaggtaggaagccattctcaatataaacaaataatagagttgcacttcaaaaatgcaggcaagtagctgcaaagactgcaagtagcaattctaagccatcctgcttctgggggctgctgtcagacagttcatgcccagcagcttcccaccaccagccacatacatgaccacacttacaaggtatcacaaaagcctcccaaagctgcag

SEQ ID NO: 62523 - DNA, 600 bp, Chicken  19866894324650_1
aaggtttcttgctgctattgatcaaaataaatgcaggcgttggcatttttttccccatctgcaactagtcagaaaaatatacccatcaaattggagacactttggtcacagtgatgtatttatttctattcaagtctagctgtcatacctcataccttccattagaaactaagtggtgaaagctaaagaagacgtagaggaggaaaagagttttctttgttagaactaagaacttgcaagtctgaacacaaacttactgtgctttagataaggtgaatggtttgtgcctctgaaatatgmgtagtgattttaaagtgtttttaatttgtttgatcactaaagttgtgtcactcattgtagaggatacttctagaccattttttagtcacaccttaaaattaaaggtgcagaaattgttgcagtacaaatataaaccagtggatcctctttctgattagactgtgagcccaatgaagagaacctgtatctaaacacagattatagcagatayttaattcatagagccatgtttcatgctttgtagctctttgatgagggaatacatttcataaaaatcttggtgtagaatcatagaatatt

SEQ ID NO: 62524 - DNA, 600 bp, Chicken  19866894324650_2
tttctttgttagaactaagaacttgcaagtctgaacacaaacttactgtgctttagataaggtgaatggtttgtgcctctgaaatatgmgtagtgattttaaagtgtttttaatttgtttgatcactaaagttgtgtcactcattgtagaggatacttctagaccattttttagtcacaccttaaaattaaaggtgcagaaattgttgcagtacaaatataaaccagtggatcctctttctgattagactgtgagcccaatgaagagaacctgtatctaaacacagattatagcagatayttaattcatagagccatgtttcatgctttgtagctctttgatgagggaatacatttcataaaaatcttggtgtagaatcatagaatattctgagttggaagggacccataaagattgagttgttattccaagcaagaattcctactggragagaaacaaacaacaggcaaacaatgtcaagccacatcaggttccactccagatagatggctttgaaactcatccaacaggtatttatatgggtaaattgtgatagaagtactgtgtgataggctcatcttcatgcactgcacaccttgc

SEQ ID NO: 62525 - DNA, 600 bp, Chicken  19866894324650_3
aggatacttctagaccattttttagtcacaccttaaaattaaaggtgcagaaattgttgcagtacaaatataaaccagtggatcctctttctgattagactgtgagcccaatgaagagaacctgtatctaaacacagattatagcagatayttaattcatagagccatgtttcatgctttgtagctctttgatgagggaatacatttcataaaaatcttggtgtagaatcatagaatattctgagttggaagggacccataaagattgagttgttattccaagcaagaattcctactggragagaaacaaacaacaggcaaacaatgtcaagccacatcaggttccactccagatagatggctttgaaactcatccaacaggtatttatatgggtaaattgtgatagaagtactgtgtgataggctcatcttcatgcactgcacaccttgcagctcagttagcctctctcagtctgatgaaataattacattgagagcatgatgatgcaccgttttaatcctgctgttgctgatagcttattattttgtctacttcagcttaaaaaggtgcaaagaatgtgaaactaaaatgcacaaacc

SEQ ID NO: 62526 - DNA, 600 bp, Chicken  19866894324650_4
cagctcagttagcctctctcagtctgatgaaataattacattgagagcatgatgatgcaccgttttaatcctgctgttgctgatagcttattattttgtctacttcagcttaaaaaggtgcaaagaatgtgaaactaaaatgcacaaacctccacttgcactggtggaaagtctgacttccaagatttcctgcaatagcatgactggaatatctgaataggaagagcaagtgtgtcctggaggcaaaaaatgaatgcctggcttcaccccatgcaggcagcctgttttaagcatggagtsctttttttgtgtgcttagcagaggaatcagggctatccctgagcagctgctgagaggaggatgtcttctcctgctccatatctggccttctgcgtggtgttctgaatactggacttcaaagcatttgtatctgctttcacttggctgctcctccatactgcagcatcacatacagaactccgcaaaactctttttccactgtcagcaaatgtcaagcatctgaatctgacttgtctaccagaatggatttactccatttgaattctaactgtagaatcatagggtttgacctttggtttt

SEQ ID NO: 62527 - DNA, 600 bp, Chicken  19866894324655_1
gaggtcatcactacatacccacgtacggtatatttggaattatttgcagctgcactgctgacaggttcatttaaactacctgcgatctgcactaacctatctgggtgagatgctcccttaattaataccaacaggaggaaaacaatgtgagcgctcagcaaacacacacacacacgccaggtccacatcgctgagagcagcagaagctacagcaaggagactgcaagaagggctttgaggagaactgcttcacgttgggaatctttcccctctgcactcccaatcaatggggttgttttycaaaatttgtaaacaactcccaaacagtgcaaataactctctgctttaagtatgaatgtcaatgaactcattcaaatcatcctgaaatgtcagcagagattaacacgtcctggccacgggagggaggtcagaggaaggcaygctctcagcctgccatgggcacgatccaaagccaatctaagtctatrggaaattccaggaagggaccagcatgtcaaaattccacggcaagcgctggagacacaagagaccagaacaatctgggatcaatagcttccaggtcattaatcccatgcaggt

SEQ ID NO: 62528 - DNA, 600 bp, Chicken  19866894324655_2
acaatgtgagcgctcagcaaacacacacacacacgccaggtccacatcgctgagagcagcagaagctacagcaaggagactgcaagaagggctttgaggagaactgcttcacgttgggaatctttcccctctgcactcccaatcaatggggttgttttycaaaatttgtaaacaactcccaaacagtgcaaataactctctgctttaagtatgaatgtcaatgaactcattcaaatcatcctgaaatgtcagcagagattaacacgtcctggccacgggagggaggtcagaggaaggcaygctctcagcctgccatgggcacgatccaaagccaatctaagtctatrggaaattccaggaagggaccagcatgtcaaaattccacggcaagcgctggagacacaagagaccagaacaatctgggatcaatagcttccaggtcattaatcccatgcaggtgacatccagtgcacagagcactgctctgctccacggacacatccaggaaacctggtgcgattggcatccgatagctttgaatatttttcgtgttttgcctttacacttctcctatttgtttggcatatggctttctagcat

SEQ ID NO: 62529 - DNA, 600 bp, Chicken  19866894324655_3
cgctgagagcagcagaagctacagcaaggagactgcaagaagggctttgaggagaactgcttcacgttgggaatctttcccctctgcactcccaatcaatggggttgttttycaaaatttgtaaacaactcccaaacagtgcaaataactctctgctttaagtatgaatgtcaatgaactcattcaaatcatcctgaaatgtcagcagagattaacacgtcctggccacgggagggaggtcagaggaaggcaygctctcagcctgccatgggcacgatccaaagccaatctaagtctatrggaaattccaggaagggaccagcatgtcaaaattccacggcaagcgctggagacacaagagaccagaacaatctgggatcaatagcttccaggtcattaatcccatgcaggtgacatccagtgcacagagcactgctctgctccacggacacatccaggaaacctggtgcgattggcatccgatagctttgaatatttttcgtgttttgcctttacacttctcctatttgtttggcatatggctttctagcatcccattaatgtcaaaccgtttaatcataatgcaggctaaacgcacag

SEQ ID NO: 62530 - DNA, 600 bp, Chicken  19866894324656_1
ccgctgagacatcagtgcacgagcattgccattttggtgctttctgcaggcagtgagcagcacaatgtcagcagtgggagctgctgctgctgtcttcaagtgcagcctggaggacatgcctgccccgtgcttcctatcactgatgtgtggagggctgtgagcagctctgtccgtgcgggtttccccaccaaggcagtgtgacacctgcacgcctggacacggcagcatttttcactgccactctgtaagctgtcacaagagtctgtgcaatgtaatttcacttaggcctggctgaagcaygccacagggagggtaaagcarcttgctttggacatgcattgccaaaggaaaactttgcctttcctgttgacttggtgcagatcaatgggttaaacaacagaccccaatttaggtctcttgatttgtagttgtgtggtttaggaaacgtaccttcaccgccaccagagagctgtgcagctgctgcctgagcagctttctgctttttgctgcctactttttaactgtctgcaggctatttctatctgctgtgctgtgtctaaaaaagctacggagagctcccatggaacgcctgtaggtgga

SEQ ID NO: 62531 - DNA, 600 bp, Chicken  19866894324656_2
agcattgccattttggtgctttctgcaggcagtgagcagcacaatgtcagcagtgggagctgctgctgctgtcttcaagtgcagcctggaggacatgcctgccccgtgcttcctatcactgatgtgtggagggctgtgagcagctctgtccgtgcgggtttccccaccaaggcagtgtgacacctgcacgcctggacacggcagcatttttcactgccactctgtaagctgtcacaagagtctgtgcaatgtaatttcacttaggcctggctgaagcaygccacagggagggtaaagcarcttgctttggacatgcattgccaaaggaaaactttgcctttcctgttgacttggtgcagatcaatgggttaaacaacagaccccaatttaggtctcttgatttgtagttgtgtggtttaggaaacgtaccttcaccgccaccagagagctgtgcagctgctgcctgagcagctttctgctttttgctgcctactttttaactgtctgcaggctatttctatctgctgtgctgtgtctaaaaaagctacggagagctcccatggaacgcctgtaggtggatcgggtcactccacaaaccta

SEQ ID NO: 62532 - DNA, 553 bp, Chicken  19866894324657_1
agtcatgcccttaccactaaacagttctctttcagtaagtcacgtgagagatcttaactgttaaccaaatctaaactatttttgtttcttttccagtatgctctgatcagcagcacgaaccacaaagagtgcccagcagatccccaaatactatgtttttcatctcattttcatatccttgactcatgcatcctgtctaagctaatgttagtttcctgactgcagtgtgtctgcagccctggactgtcaacaagtgctggagctatcccgtaaagatcactactcctcaaattttttttwgtcttctaatgactctctcaaagctacctcattacaccaagttaaatctggaatctctggatttacactggaatagcagagcactttcccctcctgttttataaacagaaattttgttgtggcagtctagaacattcagctttgacttgatgtcttggaagaaaataagctactaccatgagcagttgcaataatcattccacattacacaatcatatcctgcccctgaatgaaacagccctaaacaggaaga

SEQ ID NO: 62533 - DNA, 600 bp, Chicken  19866894324663_1
caaatccctatttttttttttttcagaactttagcattatccatgggtaatctaatagccaaagcagtgtggccaattaaacagagaaaagatttttatttcagtgctatctcagtccagtaaacggccagcacttccatgcttcaatcactttaggaagttcataatatcatctccagttagaagaatcagaaaagaaaacggatcacttccttgtttcaagttcaagaataaagccaatgaactccacctttactgacagtcatttgatctctatcatcgtcatcatcaacagaatcwttttgcttgctttgttatagactgcacagaggattccaccttaagtgatatgaatttgacttagttcaatagcagcatacagtactggagcaaatggaattgacagaaagagtccatattcctctctcactagtctccttttaaacttgtgcttattttttttttgttcccttattctatagctgtaaacccatggtaggacagctgcaaacagcctggttttcaaagtaagtatgcaattagcttagctcatatgttcttatctctttgatttctgggttagtaatagttcatcttctt

SEQ ID NO: 62534 - DNA, 599 bp, Chicken  19866894324666_1
  misc_feature (1)..(107): n is any nucleotide
nnnnnnnnnnnnnnnnnnnnnnnnnnnnnnnnnnnnnnnnnnnnnnnnnnnnnnnnnnnnnnnnnnnnnnnnnnnnnnnnnnnnnnnnnnnnnnnnnnnnnnnnnnntgattgaaattaagaatttactctgttacatatagggtgaaaaccatgagaatgagacctgggagagacagattgaattgttctgaaaatatctttctttttcaagcaatgctttatcacccagtgcatttttacacaagaaaatggtgcaggaaatgtggaattttccttgctttaattttcaaattgtcakgaaagttttacttttccaatcccacattacaccaaaaatgaaaagtcaaacaaaattaaaatagttgtcccttcactcagaagggcatacagagaagtattcaagttttatagaaattttaaggaaaaaacctttggaggagctttcaatctaatggatgaactcagaaaaagggtaatttcacatcagagaaatgatttgatggataagcatgcatgtgattttcttctttgcagtctctgtgtatgagaaagtaatccaaagctctcccgtaggtaatttcatacttcatcaggctt

SEQ ID NO: 62535 - DNA, 600 bp, Chicken  19866894324671_1
atgaaggaggggagaaggaattcttagttatttcaacatgaaaaaaaaattagcaatttaggatacagctattgtggactattaaattgatcaagcaatgaatggggagggctgttcagggtgcaaacaaacaactaaggctggcaacagactgaatagccaggaagtataatcggaacaccttaatatcacttctgtcgtgctgcctatcttcacagacccgatacacccataggacagcacactatcacagatcactgttctactgacacagttcagcccccaactggcacttacccrtctgtgatgaaagatggagtcctactgcctattctrtacatagagggctgctcctaggtgcatgagagaagaccctggatgatatgcagagggcaaaatgccacagttggacagggcaggattccttttaaatccatacactctgcattggtgttcttacatgagagtaatttcatatatcagaatctcaaaacaggcttcttactgtagtatatagcaacaacgtatccttcccagaaacactttccaatttttcatctagttacttgttctaatgacttctaagtatttgttccttat

SEQ ID NO: 62536 - DNA, 600 bp, Chicken  19866894324671_2
catgaaaaaaaaattagcaatttaggatacagctattgtggactattaaattgatcaagcaatgaatggggagggctgttcagggtgcaaacaaacaactaaggctggcaacagactgaatagccaggaagtataatcggaacaccttaatatcacttctgtcgtgctgcctatcttcacagacccgatacacccataggacagcacactatcacagatcactgttctactgacacagttcagcccccaactggcacttacccrtctgtgatgaaagatggagtcctactgcctattctrtacatagagggctgctcctaggtgcatgagagaagaccctggatgatatgcagagggcaaaatgccacagttggacagggcaggattccttttaaatccatacactctgcattggtgttcttacatgagagtaatttcatatatcagaatctcaaaacaggcttcttactgtagtatatagcaacaacgtatccttcccagaaacactttccaatttttcatctagttacttgttctaatgacttctaagtatttgttccttatgttccctgctaggcctgctctggtgagcaatcagct

SEQ ID NO: 62537 - DNA, 600 bp, Chicken  19866894324674_1
tcacttgagattgatgacttcacctcagctactgttattaaacataaaaatgcaagggtataaactctagtataaaccccaaagatttatgcttgagctcttccacccagccttggtatttgtattatggcttacttgaggggctgagctctgtcttgggagaggctgggggaaggaagctgccccctacacgacgtggtgtggtgcttcagggaggtgtggtaccttctggctgcaggaagtggggagggatggcagcaacacccccccaccccagtgcacgtggggcaggtgaagacygagggctgagaatgcatggagggacaggaatgccccgaccacctgcgtgctctgctgctccaaaaacagcctccaccaccaccaaaaaaccttctgctgagcacagggtaaggggctgggggaccccgggagcatggcctcaaggggatccctcctgctgtccccatcaccagaggtgggctgtgtgttgttctcactttcccttcctctgcatcaagaggaaatcttcagtgcaccattgatagccttaagcacaaacatggcaagtggtgtggtcagcctgactgataatggggggga

SEQ ID NO: 62538 - DNA, 599 bp, Chicken  19866894324682_1
  misc_feature (1)..(108): n is any nucleotide
nnnnnnnnnnnnnnnnnnnnnnnnnnnnnnnnnnnnnnnnnnnnnnnnnnnnnnnnnnnnnnnnnnnnnnnnnnnnnnnnnnnnnnnnnnnnnnnnnnnnnnnnnnnntctactgtaatgttttattagtgagtgtccaccagtgtagtgttacacactagttttgcagtgtgcatgtctcagtgttgtctctattttaaaacaataggctaggtgatctggacagacacgtattattctgtgtcagaatcaggaaaagaatataaccatcctgacacccattctacctattagccacaygattattctctgcttggagatagttagcatttttattatactttataatttttcttataaattcaagctgccagtcaacatattagtaaaatgcagacagagaagggaacaaatacagtgacaaagactatttttctctcwtttgtgttcatggaattgcactgaatgggatggtaagatggtcttttgtaaaatgtactattcactaggagtgaagcgattcaatacatttactatgtcatcaaaacttgtgaaatgctaaagaagccaatttatccctggcaaatatttattttctt

SEQ ID NO: 62539 - DNA, 600 bp, Chicken  19866894324682_2
agtgtagtgttacacactagttttgcagtgtgcatgtctcagtgttgtctctattttaaaacaataggctaggtgatctggacagacacgtattattctgtgtcagaatcaggaaaagaatataaccatcctgacacccattctacctattagccacaygattattctctgcttggagatagttagcatttttattatactttataatttttcttataaattcaagctgccagtcaacatattagtaaaatgcagacagagaagggaacaaatacagtgacaaagactatttttctctcwtttgtgttcatggaattgcactgaatgggatggtaagatggtcttttgtaaaatgtactattcactaggagtgaagcgattcaatacatttactatgtcatcaaaacttgtgaaatgctaaagaagccaatttatccctggcaaatatttattttcttcascaggatgcatttggattctataaagcctaaagcagagtttgggtgtaaataggtgcctacatccaaatatgcagaagaaaattcckctgttcagcagctcctgcacaagcccagaactgttatggtgagaatacatgaa

SEQ ID NO: 62540 - DNA, 600 bp, Chicken  19866894324682_3
ttattctctgcttggagatagttagcatttttattatactttataatttttcttataaattcaagctgccagtcaacatattagtaaaatgcagacagagaagggaacaaatacagtgacaaagactatttttctctcwtttgtgttcatggaattgcactgaatgggatggtaagatggtcttttgtaaaatgtactattcactaggagtgaagcgattcaatacatttactatgtcatcaaaacttgtgaaatgctaaagaagccaatttatccctggcaaatatttattttcttcascaggatgcatttggattctataaagcctaaagcagagtttgggtgtaaataggtgcctacatccaaatatgcagaagaaaattcckctgttcagcagctcctgcacaagcccagaactgttatggtgagaatacatgaagtatcttatgctcctacaactcccatgtaaacttagtagagatacaactgctaagaattcccctggttaagtttcttaagtgggttgttgtcatagttttgatgcacactattgcatggaaaaatagattatctacagaataacgttctggttttttgctt

SEQ ID NO: 62541 - DNA, 600 bp, Chicken  19866894324682_4
aaatgcagacagagaagggaacaaatacagtgacaaagactatttttctctcwtttgtgttcatggaattgcactgaatgggatggtaagatggtcttttgtaaaatgtactattcactaggagtgaagcgattcaatacatttactatgtcatcaaaacttgtgaaatgctaaagaagccaatttatccctggcaaatatttattttcttcascaggatgcatttggattctataaagcctaaagcagagtttgggtgtaaataggtgcctacatccaaatatgcagaagaaaattcckctgttcagcagctcctgcacaagcccagaactgttatggtgagaatacatgaagtatcttatgctcctacaactcccatgtaaacttagtagagatacaactgctaagaattcccctggttaagtttcttaagtgggttgttgtcatagttttgatgcacactattgcatggaaaaatagattatctacagaataacgttctggttttttgcttttttttttctttcatgttgccttgtcagtgctgccaccattactttttgctcattaatgtacatattcagcatgcaaggtaccaca

SEQ ID NO: 62542 - DNA, 600 bp, Chicken  19866894324684_1
tgtaaataaccttgtatggtggacattatctttcacaagctggaaggtcacgctctcattctgaatgtgtccatcggatataagaagaatgttacgatgtccttgagaaggaaatagtaaacttaagtaacgtaaggtcttccataagtcagtgtttcccattgttgccgtagcggactggaaagtaaagtattaaaattttagtttaaacttaatttatcttttctaaagtaacatctaatacataattgatttgttacttactatgtatttatttaaatattaattattaatttttgktttttttctgctcttccataatttcaattagaggtggagcttgaggttaatctcattctgtatcttctctgatttaagcaataaacattttgcataggcaatatacataacaacaattataaattctcccaaaatactctcagaaatttmagtaatctgtactttgggaatttcttgaactggagtttttatcaacattactgcatccagaagctgtttacagctctatcttttaatctgcctatcctacttctgaactgaagaatagtttactctcaagtgtgacaagaagttccacta

SEQ ID NO: 62543 - DNA, 600 bp, Chicken  19866894324684_2
agtgtttcccattgttgccgtagcggactggaaagtaaagtattaaaattttagtttaaacttaatttatcttttctaaagtaacatctaatacataattgatttgttacttactatgtatttatttaaatattaattattaatttttgktttttttctgctcttccataatttcaattagaggtggagcttgaggttaatctcattctgtatcttctctgatttaagcaataaacattttgcataggcaatatacataacaacaattataaattctcccaaaatactctcagaaatttmagtaatctgtactttgggaatttcttgaactggagtttttatcaacattactgcatccagaagctgtttacagctctatcttttaatctgcctatcctacttctgaactgaagaatagtttactctcaagtgtgacaagaagttccactatttattatacactttagttcttgaaatctgttggcggatcatttgctgggcgtgctatgacctctcagaggtgagaaatagcaaataaccactcctattctcctcttcctctctgtttatcctagaagagatgactatataaggatgcaa

SEQ ID NO: 62544 - DNA, 600 bp, Chicken  19866894324704_1
aggctagagaaggacgtgcatctctgattgtagacacttttaatatttgcatttttttcacaggtaaaagctcgatctgctgcacgagaagtcattgctacctattcagttgatgatatatttattgagctaataatacagcttccatcaaattacccactggggtctataacagttgagagtggaaagagagttggtgtggctgttcagcaatggcgcaactggatgctgcagttaagcacatatcttacacatcaggtgagttcagagaaagcctctagttttgagagcatacaacartattcctagtagtatactatttagatttatataacgcatctcttcagatctcaaacttctttatagaactgattactcttaccacctgcttttctccagatgttaaaacaaagagggaggtaaaattatctgcgtagttagtcctaaaaaaatccatagccaaaattgagaactayaaggtctcataaggcatgggccagtagtcacagcatgcggcaatgccatctcaactatagtttgaaaaatatatatatccctgagattggtgattgctgaagttgcatcatctgagtttagaaa

SEQ ID NO: 62545 - DNA, 600 bp, Chicken  19866894324704_2
tgagagtggaaagagagttggtgtggctgttcagcaatggcgcaactggatgctgcagttaagcacatatcttacacatcaggtgagttcagagaaagcctctagttttgagagcatacaacartattcctagtagtatactatttagatttatataacgcatctcttcagatctcaaacttctttatagaactgattactcttaccacctgcttttctccagatgttaaaacaaagagggaggtaaaattatctgcgtagttagtcctaaaaaaatccatagccaaaattgagaactayaaggtctcataaggcatgggccagtagtcacagcatgcggcaatgccatctcaactatagtttgaaaaatatatatatccctgagattggtgattgctgaagttgcatcatctgagtttagaaacaacagagagaaaacggtgaattaaagttctgaattcaaaagtgcagtctctttttttctttttttttttttggtgaggattggttgtaattctaaagattaaactactacctgtagttcatatgttgggtttgggaaattacttaacccgcacgttgccaataacttggattttt

SEQ ID NO: 62546 - DNA, 600 bp, Chicken  19866894324708_1
gaatataattcttaagctacattcactgtttgctcttctaatttatcacttaaactccaaaacaaaagacagctaaaatgcatcaactcactgaagaattgttttgtaacttagtcacagtccagttaaagtcaatgtaaaggagagagagagaaaaaaaaatgtaactgtagaggaatatattcgctgtctaaaaaatcttgttccagtattgttgagaaggcttacattactctttttgttgtaatttacttgtttttcattggtcatagagtactgccataaatggataattttcaygattttttttttacttccgccattcctttttgattagctcaattgcaaaaagtactttatgtataaaatatttatagccaagtcatatctattagtatccaatcatcaaagttgttttttttcctcctagccttttaattacgaagaatatacttgagcttcacagaacagaatttttacaatttcattcacttttaaaatggtgaagagctgagagaaagagagggagatagatgaaacctgtaccaatgagtatcagtcagattttcattagagtcaacgtcattgatgtattgtccc

SEQ ID NO: 62547 - DNA, 600 bp, Chicken  19866894324709_1
aacaacacagaggcgtcgaggcgacatcctccctcccagcagctcttctgatgctgctgcagccctgcacgtctcctggctgctcaccttcaggatctccagcacttcatctgccttcttctgggaaacgatggcatcgtcatagaagcggctcagctgtcgctggagccaaaaggcatcgatgtctcggggatggagatccttcttctttgagctcatcaattcacctgatgccacaagcttgaaaaaaagccaaaacaacccataataacgttacttccttctattaaaagttggcaygtggcattcgtgctgcagaatgagcatctcagggctacctctgcccacagacagcaacagggaaccagcaaacgtgacacatcccaacccctcccgtgtgactttgggcctccacagctgctcagctgagctcagctccatccataaagcaaaaggagccctggccctcctccacatgaccccaaatcacgtttcacatcctcctcacattggctgagagggtgcagcggacgacggcttcgtctccttccatgtcatcatcggacgcctcgtcacgcacctcgccatagatgtcctcat

SEQ ID NO: 62548 - DNA, 600 bp, Chicken  19866894324712_1
cagcaaggcaattcagaagctggtactaacaagcactttaaatcagtccaaaacatgtctcatggtgggtgacatctgctattgatcaaaaggacaggatgagtcaagtcaaggaaacatgattgagaaaacaataaagcagcgccaatgaatgtatcaaggttgctcttagcgtgaatggctacactaaaacacattgatggccaggaggtgacatctgtgggataatccctagacaaagaggagacagcgtgcattagagaaacagtaagaatgaatttccttcctctcaaccctctrtactatctgcagttcattcatgttcttcttaacattaakattatactcaactaattattttctgacaaatctttctttatatagcatggcagataggtaattttaaggacctggcaaagcagcatgtccctcagtgtaaaagctatgcacagaggctgtctgctcacagacctgctgattgaattaaatagaatcacagcctgaaagagagaagcttgggggatctgtttcctggatagggcccttctcaaaaagagatcaggagcattcctcttacctggagggagcattttccctagg

SEQ ID NO: 62549 - DNA, 600 bp, Chicken  19866894324712_2
aaatcagtccaaaacatgtctcatggtgggtgacatctgctattgatcaaaaggacaggatgagtcaagtcaaggaaacatgattgagaaaacaataaagcagcgccaatgaatgtatcaaggttgctcttagcgtgaatggctacactaaaacacattgatggccaggaggtgacatctgtgggataatccctagacaaagaggagacagcgtgcattagagaaacagtaagaatgaatttccttcctctcaaccctctrtactatctgcagttcattcatgttcttcttaacattaakattatactcaactaattattttctgacaaatctttctttatatagcatggcagataggtaattttaaggacctggcaaagcagcatgtccctcagtgtaaaagctatgcacagaggctgtctgctcacagacctgctgattgaattaaatagaatcacagcctgaaagagagaagcttgggggatctgtttcctggatagggcccttctcaaaaagagatcaggagcattcctcttacctggagggagcattttccctagggtgactaaaggcacctgctgtcttaacagaaggcagact

SEQ ID NO: 62550 - DNA, 551 bp, Chicken  19866894324713_1
aattcatgaaaacaacatttaagaaaaaaatccccaaacataagaaacacgttcacaaagagatcaacagaatccacatctgtggtcactctgtctccctttttcttagtgctcctttctttctcctctggcacaccttgcgtaccttcatcgtgaccagtttgtgactttccgcccagccccagcactttttgcatttctgcagtggagccaccagatccctgagcgagccgaggcatatgcacacagccaaccttttgttcccagcagtcatgctgttttcagacacaatattccctygtgacacctcacgtttctcttgcagtgtcaactgcagggggtgtacaaaatatcaacaagcagtgacaaaccacagcgtgagctgcacaggtacccctgcaattctttctattaacaccagactgggggtgtcacctttccttgccacgcattttccccactatcttacccatcatgaaacctaaatactctatcatctaatactcagtaaagccctactgcacgaagctttgtcacagcaaatgtcctaa

SEQ ID NO: 62551 - DNA, 600 bp, Chicken  19866894324719_1
cagagcccaaacaacagctgcccttacagccccataaagtcagaatatcaaatggtattttataaaaaaaactgcaagaaataatatgcctgtattctccacttattagactgcaataaaaactgcaggaggtaaaaaacaaatggcaaagcagttgccaaatacaacacactactgccacctaatgcttactagaaggttacaccaaaaacatttcattgtctctgcattacagtagcattatgaaaaatggagacgaaagaaaacaaagtttacaatcatttgtaagtacattcttcycagttcttcccctacaggctttgtaattgaactgatgtgatcatatcctctcttgtatacaaagactaacatgcaaggtgaatgttaagtgggctaaatatgaggttcaaatgttttatctgtaaaaataccagggatgtaatacatttatttaattagcatacccacataaagaagtacaagtgcattcacttgatcagagtccacacttgtttatatacacgtaagctgttggtaactgagaagatagtagcacaattcagccttgaaaagcttcaaccagcaagtatttggaaagga

SEQ ID NO: 62552 - DNA, 599 bp, Chicken  19866894324726_1
  misc_feature (1)..(248): n is any nucleotide
nnnnnnnnnnnnnnnnnnnnnnnnnnnnnnnnnnnnnnnnnnnnnnnnnnnnnnnnnnnnnnnnnnnnnnnnnnnnnnnnnnnnnnnnnnnnnnnnnnnnnnnnnnnnnnnnnnnnnnnnnnnnnnnnnnnnnnnnnnnnnnnnnnnnnnnnnnnnnnnnnnnnnnnnnnnnnnnnnnnnnnnnnnnnnnnnnnnnnnnnnnnnnnnnnnnnnnnnnnnnnnnnnnnnnnnnnnnnnnnnnnnnnnnntcttatgaaagagctgccttcttccaaaggcacaacttttagttccagcagyggtcagtactgtgcaaaaggtaattgaggtaggtctgtaaggtgcagtgaagatgcccagatatgaggacagaacattcagctgtgtggctggcttacgtgcatctccgcattgcatcacatcttcttttactgctttgctcctgcctctgaagagctgacactgacgctccaaggaagatttacgtctggtttagtcccctgctgcctgatgagagcccagagagggaggcaaagattcaaagccagccactccccttgctyggcaggctgcaaagcaagaacatttcaaatgcgatc

SEQ ID NO: 62553 - DNA, 600 bp, Chicken  19866894324726_2
gccttcttccaaaggcacaacttttagttccagcagyggtcagtactgtgcaaaaggtaattgaggtaggtctgtaaggtgcagtgaagatgcccagatatgaggacagaacattcagctgtgtggctggcttacgtgcatctccgcattgcatcacatcttcttttactgctttgctcctgcctctgaagagctgacactgacgctccaaggaagatttacgtctggtttagtcccctgctgcctgatgagagcccagagagggaggcaaagattcaaagccagccactccccttgctyggcaggctgcaaagcaagaacatttcaaatgcgatccttcacttattttgggaaactcataaaattttcagaggtaggccagttatttttaagcctttccagacrtgcttttaacgcagggtctgctctggatgctgtcaaggtcgaccatttctttgtgatgaagtttccctctcctggggaagtatctggtagatgtaattagctgtatgccttggtcctctctcatttcctcacagcctgctaaaccaatcactgggcctttcagcttcagccaaggtggatcacgtgagttcttgt

SEQ ID NO: 62554 - DNA, 600 bp, Chicken  19866894324726_3
acagaacattcagctgtgtggctggcttacgtgcatctccgcattgcatcacatcttcttttactgctttgctcctgcctctgaagagctgacactgacgctccaaggaagatttacgtctggtttagtcccctgctgcctgatgagagcccagagagggaggcaaagattcaaagccagccactccccttgctyggcaggctgcaaagcaagaacatttcaaatgcgatccttcacttattttgggaaactcataaaattttcagaggtaggccagttatttttaagcctttccagacrtgcttttaacgcagggtctgctctggatgctgtcaaggtcgaccatttctttgtgatgaagtttccctctcctggggaagtatctggtagatgtaattagctgtatgccttggtcctctctcatttcctcacagcctgctaaaccaatcactgggcctttcagcttcagccaaggtggatcacgtgagttcttgtctgccttgccatggctttgtccattttatgtacagactttctctagcccgtttgagaagactgcatcagaatactactgagacagcacacctctactgaggtaca

SEQ ID NO: 62555 - DNA, 600 bp, Chicken  19866894324730_1
taaatgtgggttttggaaacatggagtgcctacacatcccatggtcaacattgggaaattcgggtgctctgcacatctgaaaatgcaggcccttgggatgccacgttccctactgtaggctgcaggcagcactactggctggcatatgagagactgaaacagcatggggagatcagaacaggccttcgttatcccagagctttgtgtgtgactgctctgcagaaagcagcgttgtcattcccagatatgtttacatcactgttctctgtaggtgttagaaagatctgctagcgggagagygagcatctgtgtgaaaacaaacctgctttatgcagtcctctaagccaccagagctgctggaaatccaacaatggtaccttatttacatgccttgtgtaacacacatcctatttgtttgtgtggtgcaaaggacagcttcccattgaagatatgctggggtttgtgtttgttctcattcctgaccctggtggcagaggaacaggcttttggtaataccctgaaagcaggcgtgaagcagttttccagtataagaagtttgcactgaagtgtaccagctacattgcagggaaagcagaagtg

SEQ ID NO: 62556 - DNA, 600 bp, Chicken  19866894324730_2
tgcagtcctctaagccaccagagctgctggaaatccaacaatggtaccttatttacatgccttgtgtaacacacatcctatttgtttgtgtggtgcaaaggacagcttcccattgaagatatgctggggtttgtgtttgttctcattcctgaccctggtggcagaggaacaggcttttggtaataccctgaaagcaggcgtgaagcagttttccagtataagaagtttgcactgaagtgtaccagctacattgcagggaaagcagaagtgccacatgcaagctcatgatgaatataaagrcaccacatcagatctgctaatagatcagatcatagatcagcccagcaagcagggacaagcgatagcaaagtaacgtgaatgaaggtaatgaaaacagactggaagcagatttaggatgaacataattagagttaatgttagcactgaaagcagagatttgggggttggtggtgcctggggctagttgacgtttatcagcatagcttgactgtctctctaagtggggttttgtacctgggaagggattctgacattttgttcacaattggaccacctgctcatgtctcatcagctaaaaag

SEQ ID NO: 62557 - DNA, 600 bp, Chicken  19866894324730_3
agcaaagtaacgtgaatgaaggtaatgaaaacagactggaagcagatttaggatgaacataattagagttaatgttagcactgaaagcagagatttgggggttggtggtgcctggggctagttgacgtttatcagcatagcttgactgtctctctaagtggggttttgtacctgggaagggattctgacattttgttcacaattggaccacctgctcatgtctcatcagctaaaaagagcttaaaggcgtcttagcacacaggaggtatggatcaggcatgcaaaaacacttgtgccttrgatgctctatctytcaggcatggccacaggaatagataacatttatatatgcccttttattttcagtaaaatcaagacataaatatctacataagctcatgtctagctagtagcatgtgaaaaattccatcatatgtttggagctgaaaacatgctgaagtgctgggatttatcaagctctcctgagctctcatattcatatgttgcacccctacccgttatgccagtgccattccagtgaycagccctgaccaagggcctctccaactgctctgatgtgtctggtgctggtccaggcag

SEQ ID NO: 62558 - DNA, 600 bp, Chicken  19866894324730_4
gaatgaaggtaatgaaaacagactggaagcagatttaggatgaacataattagagttaatgttagcactgaaagcagagatttgggggttggtggtgcctggggctagttgacgtttatcagcatagcttgactgtctctctaagtggggttttgtacctgggaagggattctgacattttgttcacaattggaccacctgctcatgtctcatcagctaaaaagagcttaaaggcgtcttagcacacaggaggtatggatcaggcatgcaaaaacacttgtgccttrgatgctctatctytcaggcatggccacaggaatagataacatttatatatgcccttttattttcagtaaaatcaagacataaatatctacataagctcatgtctagctagtagcatgtgaaaaattccatcatatgtttggagctgaaaacatgctgaagtgctgggatttatcaagctctcctgagctctcatattcatatgttgcacccctacccgttatgccagtgccattccagtgaycagccctgaccaagggcctctccaactgctctgatgtgtctggtgctggtccaggcagtgtgtaacaactc

SEQ ID NO: 62559 - DNA, 492 bp, Chicken  19866894324730_5
aaaggcgtcttagcacacaggaggtatggatcaggcatgcaaaaacacttgtgccttrgatgctctatctytcaggcatggccacaggaatagataacatttatatatgcccttttattttcagtaaaatcaagacataaatatctacataagctcatgtctagctagtagcatgtgaaaaattccatcatatgtttggagctgaaaacatgctgaagtgctgggatttatcaagctctcctgagctctcatattcatatgttgcacccctacccgttatgccagtgccattccagtgaycagccctgaccaagggcctctccaactgctctgatgtgtctggtgctggtccaggcagtgtgtaacaactctgtttggagtgtaaccctgaccaagtgtgctgggtttgcatgaaagggttctccttgctccttccacttgaggatgctggaataatcttaatgagaagccaatattttttttagcaagcaa

SEQ ID NO: 62560 - DNA, 599 bp, Chicken  19866894324731_1
  misc_feature (1)..(104): n is any nucleotide
nnnnnnnnnnnnnnnnnnnnnnnnnnnnnnnnnnnnnnnnnnnnnnnnnnnnnnnnnnnnnnnnnnnnnnnnnnnnnnnnnnnnnnnnnnnnnnnnnnnnnnnntgggggacatctaatctgcattatgtattggaggaggagtctttgtgctccacaagctgctccatgcacagagaagtccagaagagaccatcagtacacaaaaaagctttacatgcagaagacaagtaggtaatggtgccattcctgagcccatccagaactgctgtcagcttccagatgtgatctcagagagctrtcctaactcaggctcctggctttttcccccacgtcatcacaacttctgcacctacaccagctttacctaatcaccagcacaccagagcattggaagtcagatgctatcccaaatcccttctgtaataaaycttgaaatrcacccccctaaaagccccagataatttcaattattttagtataaatacttctggagacagagraacatgaggggcacatgaaagcaacaaacaacctgtgaatgctggtgtcacatcctgccccgtaaggggaggaaaggggtaaccagattcttgttgg

SEQ ID NO: 62561 - DNA, 600 bp, Chicken  19866894324731_2
attggaggaggagtctttgtgctccacaagctgctccatgcacagagaagtccagaagagaccatcagtacacaaaaaagctttacatgcagaagacaagtaggtaatggtgccattcctgagcccatccagaactgctgtcagcttccagatgtgatctcagagagctrtcctaactcaggctcctggctttttcccccacgtcatcacaacttctgcacctacaccagctttacctaatcaccagcacaccagagcattggaagtcagatgctatcccaaatcccttctgtaataaaycttgaaatrcacccccctaaaagccccagataatttcaattattttagtataaatacttctggagacagagraacatgaggggcacatgaaagcaacaaacaacctgtgaatgctggtgtcacatcctgccccgtaaggggaggaaaggggtaaccagattcttgttggtcctttacagctggagagggggaaggaggagaaataagggatttagcactggagatggtagtaatgtggcaagaggaagccagaggacaagagacaggactggctgagcaaaatgctctctgaagaagctc

SEQ ID NO: 62562 - DNA, 600 bp, Chicken  19866894324731_3
ggagtctttgtgctccacaagctgctccatgcacagagaagtccagaagagaccatcagtacacaaaaaagctttacatgcagaagacaagtaggtaatggtgccattcctgagcccatccagaactgctgtcagcttccagatgtgatctcagagagctrtcctaactcaggctcctggctttttcccccacgtcatcacaacttctgcacctacaccagctttacctaatcaccagcacaccagagcattggaagtcagatgctatcccaaatcccttctgtaataaaycttgaaatrcacccccctaaaagccccagataatttcaattattttagtataaatacttctggagacagagraacatgaggggcacatgaaagcaacaaacaacctgtgaatgctggtgtcacatcctgccccgtaaggggaggaaaggggtaaccagattcttgttggtcctttacagctggagagggggaaggaggagaaataagggatttagcactggagatggtagtaatgtggcaagaggaagccagaggacaagagacaggactggctgagcaaaatgctctctgaagaagctctctttctcg

SEQ ID NO: 62563 - DNA, 600 bp, Chicken  19866894324731_4
caaaaaagctttacatgcagaagacaagtaggtaatggtgccattcctgagcccatccagaactgctgtcagcttccagatgtgatctcagagagctrtcctaactcaggctcctggctttttcccccacgtcatcacaacttctgcacctacaccagctttacctaatcaccagcacaccagagcattggaagtcagatgctatcccaaatcccttctgtaataaaycttgaaatrcacccccctaaaagccccagataatttcaattattttagtataaatacttctggagacagagraacatgaggggcacatgaaagcaacaaacaacctgtgaatgctggtgtcacatcctgccccgtaaggggaggaaaggggtaaccagattcttgttggtcctttacagctggagagggggaaggaggagaaataagggatttagcactggagatggtagtaatgtggcaagaggaagccagaggacaagagacaggactggctgagcaaaatgctctctgaagaagctctctttctcgctcctgtttaattcctctgtggagacacctgctcctggacttgtatctttctaaggaggatct

SEQ ID NO: 62564 - DNA, 600 bp, Chicken  19866894324732_1
agatacagtcccagttttcttgttggtgttattgtgtcaactgccctactcagcatgttgtctgtggctaattgctgggagtgtactcaaatcccactgtgtatgtatttgataaaaatcttgaagagcactggtcccaaaacaggccagttgtcattggccttctcctggacatagagccattaaccacaactctctggctgcgaccttccaagcaattctcaatccaccctttgaacagctatctctccgatttggagctccaatgaggagcagaacacctcccctcctatcacagcrtctgagcctccatctccatcattctgtcacactgctgacacccatttgattggggcaggctggggcagatgctgatcacagccgatcactcgctgtcccagtcccagggtgtgcaggatttgccctccagctgtgtgcaggagtgctttgacctgtctttatgctcttgtgagataccaggagacactgcagcactggagcaggggtgtgtccagctcctccccagtgctggttccagtcccacccaagtctgtgtggtcagcagcaaaagcatgtgctgtgttagtgctgctctgctct

SEQ ID NO: 62565 - DNA, 599 bp, Chicken  19866894324736_1
  misc_feature (1)..(14): n is any nucleotide
nnnnnnnnnnnnnntggagaggacttggcaggtgagtctgacgtgggatcctaaatagctcctgcaggcttcacagccagatccattactggctgttggtttggtctcccgccagcagcacttggatcctctccctcgtctcattatttctccagttactttggtcctaatttggtggggcagtgggaaagaaacatgcatcgtgcctgccagtctcaccctgtccttggtctgcaggtaggagaccagatcctggaggtgaatggcaggagcttcctcagcatcccccacgatgaggcrgtgaagctgctcaagtcctcccgccacctcatcatgacagtgaaggacattgggaggctgccccatgcccgcaccactgtggacgagaccaggtggatagcgagttcccagattggagaaacccttgtcagctccacggggtgagtgcttggtgcagccccataggggtacagagtgcagagctggttcagagctcccacaggggctgtgcagatgtgtagggtgggtgtagaacagcagcatgctgccgtgagatgctgagagcctcatgcctcagccagctgtcagtgggagcaccc

SEQ ID NO: 62566 - DNA, 600 bp, Chicken  19866894324736_2
acgagaccaggtggatagcgagttcccagattggagaaacccttgtcagctccacggggtgagtgcttggtgcagccccataggggtacagagtgcagagctggttcagagctcccacaggggctgtgcagatgtgtagggtgggtgtagaacagcagcatgctgccgtgagatgctgagagcctcatgcctcagccagctgtcagtgggagcacccccagagcttagattggtggtccccacatccggtgctcatagacagcacctatgtggtggatcaaggctggacataatgggagygtttcccctgttagcttacaggcatccagggtgtaggacaggtgaagaatgatgggcayggggtgctcagtgctgactgatcttctccctcctcgcagggtggtgggcgatcacgctgcggaggcaacagccagggtaagagctgctacagcccttcctataaaacagccatcatcatcatctttcccagggcagggaagcagccagccagaccctgcccagcgctgtgcctgcagctctgcctcagcctgccctgtccaagcaatcctttacaaagcatgctccttttaaatggaaatg

SEQ ID NO: 62567 - DNA, 600 bp, Chicken  19866894324736_3
tgagtgcttggtgcagccccataggggtacagagtgcagagctggttcagagctcccacaggggctgtgcagatgtgtagggtgggtgtagaacagcagcatgctgccgtgagatgctgagagcctcatgcctcagccagctgtcagtgggagcacccccagagcttagattggtggtccccacatccggtgctcatagacagcacctatgtggtggatcaaggctggacataatgggagygtttcccctgttagcttacaggcatccagggtgtaggacaggtgaagaatgatgggcayggggtgctcagtgctgactgatcttctccctcctcgcagggtggtgggcgatcacgctgcggaggcaacagccagggtaagagctgctacagcccttcctataaaacagccatcatcatcatctttcccagggcagggaagcagccagccagaccctgcccagcgctgtgcctgcagctctgcctcagcctgccctgtccaagcaatcctttacaaagcatgctccttttaaatggaaatgaagccgtgaggtttcacaggtggctcacgctgataatggcttcgtgctatttgcttggc

SEQ ID NO: 62568 - DNA, 600 bp, Chicken  19866894324737_1
tagaagcccccggtacttttcttcaaagctgtagcactagggtcctcagcctctaccaacacatatggaggtcttcacatttcttggctgaacttcacaagaatccttttggcccatttctctggtatgaagggggcatagcactgcaccacagcctctcgaccatcctcatagtttcatcttatctgcagacataatgagggacctactgaaggtgaagaatactggcacctgtcctattgtgtcttgcaaatacaccaaatatgtaattccttattattactgctgtaatgcacatayccccagatcctgtgatcagtatctccttctacattacaaaacagatgaggaaattgttgatatatgtagaratctactgttcagagacgcaacattttgcttgcagttcctgggaatatttgggaatgcacgcacacatcctgtgttgtatgccctccgcagatgcatcttactcttttgggctggtgctgtagggaaggctaatgaatctgcttcttggctctgtgtccatgaagaaggcacacagtgtctgtgtaggaggcagtgaatgaaacagcaggcagctgtgctgtgacctgc

SEQ ID NO: 62569 - DNA, 600 bp, Chicken  19866894324737_2
tcttcacatttcttggctgaacttcacaagaatccttttggcccatttctctggtatgaagggggcatagcactgcaccacagcctctcgaccatcctcatagtttcatcttatctgcagacataatgagggacctactgaaggtgaagaatactggcacctgtcctattgtgtcttgcaaatacaccaaatatgtaattccttattattactgctgtaatgcacatayccccagatcctgtgatcagtatctccttctacattacaaaacagatgaggaaattgttgatatatgtagaratctactgttcagagacgcaacattttgcttgcagttcctgggaatatttgggaatgcacgcacacatcctgtgttgtatgccctccgcagatgcatcttactcttttgggctggtgctgtagggaaggctaatgaatctgcttcttggctctgtgtccatgaagaaggcacacagtgtctgtgtaggaggcagtgaatgaaacagcaggcagctgtgctgtgacctgcagctaaagggcaggcagagaagcactacctgcacaccattctactgactgactgacaaaatgtttgttttt

SEQ ID NO: 62570 - DNA, 600 bp, Chicken  19866894324738_1
attgtcgagcttttttttcctttgaatatcacactgaatactcaaacaaggaatttgaaaacgaatactaaaattaatataaaaactagaaacatacaattgactttacactatttccatgttcaatataggcagtcttcttttttttccccttacatttgcaatttgtaaatgtatcagctgcattgttgaggaagatagggatggaaggagtagttcagaccttctctatatactgactagacctgttgttttccaagtttcctcagaagcgatggggtaaaaccccctatgtagctkcttcttatttctagaattagagatatttgccaggttcaatggtggagcatcataaaatatacagcattgagtatatggaacaaaaaatgtgtgttgtgttttaaaaacaggtaatgcatttatgctatacatatatattgtatttgtacatacatatgtagtcagagttttatcatgttaatgataaccagatttcaaggtagacaagagtgttaaaagatgtgaaagtgagcattagagcttagtagaagactgcttgctttgcttgagtttgaagaactattgctttcattaattatg

SEQ ID NO: 62571 - DNA, 599 bp, Chicken  19866894324739_1
  misc_feature (1)..(96): n is any nucleotide
nnnnnnnnnnnnnnnnnnnnnnnnnnnnnnnnnnnnnnnnnnnnnnnnnnnnnnnnnnnnnnnnnnnnnnnnnnnnnnnnnnnnnnnnnnnnnnnnccctttgggagagctgcctctgcccttctagctctctaggtttgaggtgggtgaggaagaggagggaggcacggaggctgtacaagtgtcggtgctttgctgatgaggttaatgagcctcggatggtgatgctgcagtaagttcatttatgttctcagtcttaatggggtgtgtgtaagtaaggcattctcctcttcagcatcrttttcatcctactaattacatattaaagcataattgtggtagcaaggaagcagccctaatgcaccctgggtaaagctaatggtgtgggcacgctctgctcgatggtatttgtcaaggttccctctcccaagcctgtccttaggagttgtgggaatttttgcaccagtctggagttggtaaatgtttgcagtcgtatctactaaagaataaggcagtgtgggagaggctggctttggagacttctccctggctgacagatggtggggatttcacagcctgttccttaagttttgaaaaag

SEQ ID NO: 62572 - DNA, 600 bp, Chicken  19866894324739_2
ctaatgcaccctgggtaaagctaatggtgtgggcacgctctgctcgatggtatttgtcaaggttccctctcccaagcctgtccttaggagttgtgggaatttttgcaccagtctggagttggtaaatgtttgcagtcgtatctactaaagaataaggcagtgtgggagaggctggctttggagacttctccctggctgacagatggtggggatttcacagcctgttccttaagttttgaaaaaggtggtgaatatttcagaggaaggagcttatgtgcaaataggctggaagtaaggcgkgtttcagggccagcagtttgcgtgtccttctgggacttggatggggcatcccttccccgtccccagccagggcttcatcctgctgtcttgctgctggcaagcagagccaaatatcagggggaaaatgagaagccatcacaccatatgtagagcttccagtgttggtgccgccagcgtgcactgagagttgggggtcccagaggatcccacctgcaagcactggttttggcagcaggatgggttcctctgggctcgtgcagaacccaaccaacccaaggttggtgctggagctctggtgtg

SEQ ID NO: 62573 - DNA, 600 bp, Chicken  19866894324748_1
cctcctagcatcagtcactgtgatgttcccattaaaaagaaaaagcaatgcagtgtgattcatcacaaaaaccaaaagtcacccagcagcacacggccaccgggagctgccctcgtcagaccagggaagcagcagcacaggttacgagacccggcagttaagaaagcatttgttgtccactcagggaaaaaattatctaattttgggcttaagttagaggctgttccagacacactggaaacagcatttctttctctatatgagcctgaaattaaaaacaaaatgaaagtcaaagtctcwgtgtgcactctggtatttcaccctgcgctgcacaaagaaccacatgacatcactttctgcacagaccgtgttccctacaacttaacctgataaaaaggtcgtcattgaaagtagtgcattttggtgtcatctgacttaaagtggggcttcctgctcttctgcctcagcagaaaatgccatgagttcatgcagctgcagagaagaagggacgggaaggcgatcgctcgggcgctgcagaagacgagcgcgcataaggtagattatccttctacaccacacagtcagcctgtggatagaaaa

SEQ ID NO: 62574 - DNA, 600 bp, Chicken  19866894324749_1
aatcatattcctagaactcataatggccctctctgaagctcttcctttgcttaaagggctttgttgatgattaccttttgacagccatgcccggtaatgaggggctaataaggcttttcagaactcactaacaacacagaaaacttctcctggtgggcatcaggactgagctctacctgttggcaggctgcaccaggacagaggaagcagaactcgagctgtctgccctttgctgaagtgtgatgggtagcagccagcactcagtttgaacccccatttctgtttagaggattgactttyggccgagccatcagaaatgttgtgtagacatgtacgtagatgggtttatttttaagagagatttatttttaagaagataagaaaggttctgcaccagagggaggtgggcatggaacgagctgccagggytgtgggcacggccctgagtgctgaagctcaaggagcgtctggacagcgctctcagacacagggtttgattttgggtggtgctgtgtggagccaggagttggactcgatggtccctgccagtgccttccaactcaggatattctgtggttctatgaaaactaaactgttccc

SEQ ID NO: 62575 - DNA, 600 bp, Chicken  19866894324749_2
aacaacacagaaaacttctcctggtgggcatcaggactgagctctacctgttggcaggctgcaccaggacagaggaagcagaactcgagctgtctgccctttgctgaagtgtgatgggtagcagccagcactcagtttgaacccccatttctgtttagaggattgactttyggccgagccatcagaaatgttgtgtagacatgtacgtagatgggtttatttttaagagagatttatttttaagaagataagaaaggttctgcaccagagggaggtgggcatggaacgagctgccagggytgtgggcacggccctgagtgctgaagctcaaggagcgtctggacagcgctctcagacacagggtttgattttgggtggtgctgtgtggagccaggagttggactcgatggtccctgccagtgccttccaactcaggatattctgtggttctatgaaaactaaactgttccctgatgccattaaatgagcgtgaaggtcaagcagaacagagctttatggggagaagagaatggtttcttcaagatttaaactcctagaagagatgatgctggtactaagggtatttagaataaaagatgc

SEQ ID NO: 62576 - DNA, 600 bp, Chicken  19866894324760_1
aaatacattcattgattcatctgtttgaaattgaagttcaatatatgttgtgaaaaaaatgatagatagaacacaaatacaagcctgagatagccctgtcaggttaaatacaacagacaaaatatgaaaagctgatgatttcatcattgtcctttgctcttaccttcatatagcaaaaaagactaaacttccaggatgatgtaaatgaaaatctccaggaaaaatcaacaaagaacaaaatcagaagtatagccacaacgaaaattcaatattatcagaggaagaaggatagaaagaaamcaatgtttcgtaagaaaatccagatttttttatcatcattttatggcacatagcaatatagtaaaatgaccctaatccctgccaagttacataatgtctcaagctcttaaagatggatttatatagctgactaccatggctttacatcaattaaacccagtaatttatatttttcataattccagtgtcatgtaaataaacgtatgaaaatgaatgtgttactttttcccttcttttttcttctctaacatatatttacccacatcaaaaaaaaaaatgcgtcaatttatagactttctg

SEQ ID NO: 62577 - DNA, 599 bp, Chicken  19866894324761_1
  misc_feature (1)..(198): n is any nucleotide
nnnnnnnnnnnnnnnnnnnnnnnnnnnnnnnnnnnnnnnnnnnnnnnnnnnnnnnnnnnnnnnnnnnnnnnnnnnnnnnnnnnnnnnnnnnnnnnnnnnnnnnnnnnnnnnnnnnnnnnnnnnnnnnnnnnnnnnnnnnnnnnnnnnnnnnnnnnnnnnnnnnnnnnnnnnnnnnnnnnnnnnnnnnnnnnnnnnnnntcttccttatgatctgaactgtatgtctacctttgagacccatggtaccctgtaaacacatttttctaactctaaatactcagttagattagtcagacatcmcttacttaagtaccagtaatacttggatgacacacagcttcttgttgacagagcatcactattacacrcaatgattcagtatgtggagaaggccaattaaaagatgatggaaggtttgttgaaatgaaatctgaggaaggtaatacttcagtcacactagagattagccacctgattttagcagactatctgcagcttcgggctgaaagttggagcaaatctttcttcccttctgactttatgggcatctcttggggagaggaatgaggtagtcagggaggaagaaatactcactgtgt

SEQ ID NO: 62578 - DNA, 599 bp, Chicken  19866894324761_2
  misc_feature (1)..(130): n is any nucleotide
nnnnnnnnnnnnnnnnnnnnnnnnnnnnnnnnnnnnnnnnnnnnnnnnnnnnnnnnnnnnnnnnnnnnnnnnnnnnnnnnnnnnnnnnnnnnnnnnnnnnnnnnnnnnnnnnnnnnnnnnnnnnnnnnnntcttccttatgatctgaactgtatgtctacctttgagacccatggtaccctgtaaacacatttttctaactctaaatactcagttagattagtcagacatcmcttacttaagtaccagtaatacttggatgacacacagcttcttgttgacagagcatcactattacacrcaatgattcagtatgtggagaaggccaattaaaagatgatggaaggtttgttgaaatgaaatctgaggaaggtaatacttcagtcacactagagattagccacctgattttagcagactatctgcagcttcgggctgaaagttggagcaaatctttcttcccttctgactttatgggcatctcttggggagaggaatgaggtagtcagggaggaagaaatactcactgtgtaggagatacattaaaaaaaaacagcaaaaaattcatgcccacttcttttctttgcctcttctaaaaat

SEQ ID NO: 62579 - DNA, 600 bp, Chicken  19866894324761_3
ccagtaatacttggatgacacacagcttcttgttgacagagcatcactattacacrcaatgattcagtatgtggagaaggccaattaaaagatgatggaaggtttgttgaaatgaaatctgaggaaggtaatacttcagtcacactagagattagccacctgattttagcagactatctgcagcttcgggctgaaagttggagcaaatctttcttcccttctgactttatgggcatctcttggggagaggaatgaggtagtcagggaggaagaaatactcactgtgtaggagatacattraaaaaaaacagcaaaaaattcatgcccacttcttttctttgcctcttctaaaaatctgcatgtaakaaggaaaaagccacccacagagcgatccactgcatttctgcccccacaaggtgggaggaaaaaatcacaacakcttttyggtggccttatagaagaagatgaacagaacatagaaacatrgggaggtctgcagcggtgcagaaaacaggagaacraggcaagctaactgtaatgctaagtgatccaaactcaaataaatccactgcaatcattactcctaagacaaagcaatgt

SEQ ID NO: 62580 - DNA, 600 bp, Chicken  19866894324761_4
gtatgtggagaaggccaattaaaagatgatggaaggtttgttgaaatgaaatctgaggaaggtaatacttcagtcacactagagattagccacctgattttagcagactatctgcagcttcgggctgaaagttggagcaaatctttcttcccttctgactttatgggcatctcttggggagaggaatgaggtagtcagggaggaagaaatactcactgtgtaggagatacattaaaaaaaaacagcaaaaaattcatgcccacttcttttctttgcctcttctaaaaatctgcatgtaakaaggaaaaagccacccacagagcgatccactgcatttctgcccccacaaggtgggaggaaaaaatcacaacakcttttyggtggccttatagaagaagatgaacagaacatagaaacatrgggaggtctgcagcggtgcagaaaacaggagaacraggcaagctaactgtaatgctaagtgatccaaactcaaataaatccactgcaatcattactcctaagacaaagcaatgtaagccctaaattaaatccagaaggacatttagatcagcatcagtctgttgcagaaaatgggtaaag

SEQ ID NO: 62581 - DNA, 600 bp, Chicken  19866894324761_5
tcacactagagattagccacctgattttagcagactatctgcagcttcgggctgaaagttggagcaaatctttcttcccttctgactttatgggcatctcttggggagaggaatgaggtagtcagggaggaagaaatactcactgtgtaggagatacattaaaaaaaaacagcaaaaaattcatgcccacttcttttctttgcctcttctaaaaatctgcatgtaakaaggaaaaagccacccacagagcgatccactgcatttctgcccccacaaggtgggaggaaaaaatcacaacakcttttyggtggccttatagaagaagatgaacagaacatagaaacatrgggaggtctgcagcggtgcagaaaacaggagaacraggcaagctaactgtaatgctaagtgatccaaactcaaataaatccactgcaatcattactcctaagacaaagcaatgtaagccctaaattaaatccagaaggacatttagatcagcatcagtctgttgcagaaaatgggtaaagtcaaagcaggcatgttttatattctcatctgtgaaattactcctacttaaaacaagtttggttcaaatgaact

SEQ ID NO: 62582 - DNA, 600 bp, Chicken  19866894324761_6
tagagattagccacctgattttagcagactatctgcagcttcgggctgaaagttggagcaaatctttcttcccttctgactttatgggcatctcttggggagaggaatgaggtagtcagggaggaagaaatactcactgtgtaggagatacattaaaaaaaaacagcaaaaaattcatgcccacttcttttctttgcctcttctaaaaatctgcatgtaakaaggaaaaagccacccacagagcgatccactgcatttctgcccccacaaggtgggaggaaaaaatcacaacakcttttyggtggccttatagaagaagatgaacagaacatagaaacatrgggaggtctgcagcggtgcagaaaacaggagaacraggcaagctaactgtaatgctaagtgatccaaactcaaataaatccactgcaatcattactcctaagacaaagcaatgtaagccctaaattaaatccagaaggacatttagatcagcatcagtctgttgcagaaaatgggtaaagtcaaagcaggcatgttttatattctcatctgtgaaattactcctacttaaaacaagtttggttcaaatgaactctctcc

SEQ ID NO: 62583 - DNA, 600 bp, Chicken  19866894324761_7
cgggctgaaagttggagcaaatctttcttcccttctgactttatgggcatctcttggggagaggaatgaggtagtcagggaggaagaaatactcactgtgtaggagatacattaaaaaaaaacagcaaaaaattcatgcccacttcttttctttgcctcttctaaaaatctgcatgtaakaaggaaaaagccacccacagagcgatccactgcatttctgcccccacaaggtgggaggaaaaaatcacaacakcttttyggtggccttatagaagaagatgaacagaacatagaaacatrgggaggtctgcagcggtgcagaaaacaggagaacraggcaagctaactgtaatgctaagtgatccaaactcaaataaatccactgcaatcattactcctaagacaaagcaatgtaagccctaaattaaatccagaaggacatttagatcagcatcagtctgttgcagaaaatgggtaaagtcaaagcaggcatgttttatattctcatctgtgaaattactcctacttaaaacaagtttggttcaaatgaactctctccaccttgtatcccagagacaattgttttctttcttaaattct

SEQ ID NO: 62584 - DNA, 600 bp, Chicken  19866894324761_8
tgactttatgggcatctcttggggagaggaatgaggtagtcagggaggaagaaatactcactgtgtaggagatacattaaaaaaaaacagcaaaaaattcatgcccacttcttttctttgcctcttctaaaaatctgcatgtaakaaggaaaaagccacccacagagcgatccactgcatttctgcccccacaaggtgggaggaaaaaatcacaacakcttttyggtggccttatagaagaagatgaacagaacatagaaacatrgggaggtctgcagcggtgcagaaaacaggagaacraggcaagctaactgtaatgctaagtgatccaaactcaaataaatccactgcaatcattactcctaagacaaagcaatgtaagccctaaattaaatccagaaggacatttagatcagcatcagtctgttgcagaaaatgggtaaagtcaaagcaggcatgttttatattctcatctgtgaaattactcctacttaaaacaagtttggttcaaatgaactctctccaccttgtatcccagagacaattgttttctttcttaaattctatggcgttatgactatcactactactttaaagtta

SEQ ID NO: 62585 - DNA, 600 bp, Chicken  19866894324762_1
ttcaaaccttaagcaccactcaccactttctctctattttcttatcattacttagaccaaggaagcagcagaaatgtcccaagaacagcagtgattgtccctaattgcacagcccatcaggcaacatgagtacccctgtatctttcaagactgctggacaacaatgataggtaaaaatcacacaagatgcagaagaagcaacagttatgttgaaggacttgccacagtcatggtatgaaggttttcatttccaaactcctctcagcacagatgacggtgccagtaatcgcagctctctaygggcatctttatatgttttagagaagtgacatacatggaaagtgctataaaaatgtgaaatatcaccagaatccaatcttcctaattataacagaggatgtaaggatggttgctttatatggaaattttctacgaaaagaaataagattaattataacgaattgcaatcggtgctgttaaatggacagtgttaacatggatttaacagagatttgtatctttttacctagaaatcaytatggtagaattaaaccccatattttcatctatatgttgccttatgaagattcaataacatat

SEQ ID NO: 62586 - DNA, 600 bp, Chicken  19866894324762_2
aaggttttcatttccaaactcctctcagcacagatgacggtgccagtaatcgcagctctctaygggcatctttatatgttttagagaagtgacatacatggaaagtgctataaaaatgtgaaatatcaccagaatccaatcttcctaattataacagaggatgtaaggatggttgctttatatggaaattttctacgaaaagaaataagattaattataacgaattgcaatcggtgctgttaaatggacagtgttaacatggatttaacagagatttgtatctttttacctagaaatcaytatggtagaattaaaccccatattttcatctatatgttgccttatgaagattcaataacatatattctactccaaggccagttgtcttaccactagtttgttcaagagcaattatgttttggagatggcctgtcaagtctctgggggtgtgagtttagaagactggaaaaggtttatttcactaatattctcctcaataccttttagttacatttttcattcagtatttcacttgctttttggaacaagccagcaaagaaaatgtagaaaatcagatagaactgtacatcaataaatact

SEQ ID NO: 62587 - DNA, 600 bp, Chicken  19866894324763_1
tggctgtgtttgattataatttgatataaatgctgtaagcatccagctaggattccaactaaaaggaaattcagtgacagcaataataacaataataataaaaacactatttattttcccctggagtgtttagcttttattaaatgtcaacaaatctaaagacgtgctttgctaatctatgttgcgtacaggaagtaagttacaagcacaagttactgaagataatgtttgctttgttttagatagacaggatccagagaactgagatctctcacaagcatttaaaacctaccgcttgtwttccttcaacatttgtcagatctcccactggtgatcaaagaatgccaaactgaaagcagacctatatttgtgattgtttgctaccctctgcgataagtttatccatcagtttctttcctgttgactttcatgtgcgctatcaccccaggatgttatatttgctcaaacagaaaatggaattacaagcagaagaagccgctgcatggaaggtctgctgctgtgctgcccgctggagacttgccttgcggtgagggctacagacacaaaaacagcttggcactgggagctccatcttgctgt

SEQ ID NO: 62588 - DNA, 590 bp, Chicken  19866894324764_1
atggaaagaaaagagccatgccttgtgtacggatgtcaactgggagcagcagcgctgcagtgtgtaattgaatgagtaatgggtgactgacccagttgttctcaacctgacttataaaactcagctccaaagatccaaggcataataaaaatgtaaagtgcagttatagccagaagaacaacaacacaaaacagcacctttatttaacaaacctcttcagtgtgtatttcttctcagctgtttactttcctcacaaagaacccccccaggtttatatgatgtctcagtcctctctagaastcacatagctaacaggaaacaagatcaattttaatttacttttaaaatatatgtccaaaacagcattacaaactatgacctagttttagaacccttactgaggatttgcaaacccacatggactctcaggtctagcacttgagtgggaaaagacacctttatcctctgatttctttttatgatcatctatgaagtcactgaaaaataaatacataattacatgctgcaatttcagtgaaagcagaattttgaggaaattttacattaatctgagcaacatcagtaaataa

SEQ ID NO: 62589 - DNA, 600 bp, Chicken  19866894324775_1
caagggtggcatctcccccctccccaagagggacaggctgagcaactgcaagaagaaaacccacagcagccagcagtgaggtgagagctgggctgcagtgctgtgtggggtctgtcctcaccctgggagctgggggaggcttctgaggaagtgtttaaagcgcagatggaagggctggctggggctgtaagagagggaagggtggttttgattgtgatacatttgtgccataaagcttcaaatagctaggaaaaggcttcacgagtgggtctaaatgttttcacagttgtggcacgataygcacgttctgtaagacacacayttgctttgccctgcaggacgctgggactcagcttgtgctccaagctctgcggtgaccatgtcscctccgctcacctcggacctgggctaygtgccccctgatggtggctggggctgggcagtggtgttcggatcctccatctcagtggggttctcgtacaccttccccaaagccttcaccatctactttaaagagctccaggctgttttcagcatctcctacagccagcttgcctggatcacatccatcatgtgcgctaccacctatgggggaggtaa

SEQ ID NO: 62590 - DNA, 600 bp, Chicken  19866894324775_2
cccaagagggacaggctgagcaactgcaagaagaaaacccacagcagccagcagtgaggtgagagctgggctgcagtgctgtgtggggtctgtcctcaccctgggagctgggggaggcttctgaggaagtgtttaaagcgcagatggaagggctggctggggctgtaagagagggaagggtggttttgattgtgatacatttgtgccataaagcttcaaatagctaggaaaaggcttcacgagtgggtctaaatgttttcacagttgtggcacgataygcacgttctgtaagacacacayttgctttgccctgcaggacgctgggactcagcttgtgctccaagctctgcggtgaccatgtcscctccgctcacctcggacctgggctaygtgccccctgatggtggctggggctgggcagtggtgttcggatcctccatctcagtggggttctcgtacaccttccccaaagccttcaccatctactttaaagagctccaggctgttttcagcatctcctacagccagcttgcctggatcacatccatcatgtgcgctaccacctatgggggaggtaagtgaagcaagagctcaaccttt

SEQ ID NO: 62591 - DNA, 600 bp, Chicken  19866894324775_3
agctgggctgcagtgctgtgtggggtctgtcctcaccctgggagctgggggaggcttctgaggaagtgtttaaagcgcagatggaagggctggctggggctgtaagagagggaagggtggttttgattgtgatacatttgtgccataaagcttcaaatagctaggaaaaggcttcacgagtgggtctaaatgttttcacagttgtggcacgataygcacgttctgtaagacacacayttgctttgccctgcaggacgctgggactcagcttgtgctccaagctctgcggtgaccatgtcscctccgctcacctcggacctgggctaygtgccccctgatggtggctggggctgggcagtggtgttcggatcctccatctcagtggggttctcgtacaccttccccaaagccttcaccatctactttaaagagctccaggctgttttcagcatctcctacagccagcttgcctggatcacatccatcatgtgcgctaccacctatgggggaggtaagtgaagcaagagctcaacctttcctcatatgggatgggagaatgtattcctttgagaaagtccttggaaagttctgacataaaac

SEQ ID NO: 62592 - DNA, 600 bp, Chicken  19866894324775_4
tgtcctcaccctgggagctgggggaggcttctgaggaagtgtttaaagcgcagatggaagggctggctggggctgtaagagagggaagggtggttttgattgtgatacatttgtgccataaagcttcaaatagctaggaaaaggcttcacgagtgggtctaaatgttttcacagttgtggcacgataygcacgttctgtaagacacacayttgctttgccctgcaggacgctgggactcagcttgtgctccaagctctgcggtgaccatgtcscctccgctcacctcggacctgggctaygtgccccctgatggtggctggggctgggcagtggtgttcggatcctccatctcagtggggttctcgtacaccttccccaaagccttcaccatctactttaaagagctccaggctgttttcagcatctcctacagccagcttgcctggatcacatccatcatgtgcgctaccacctatgggggaggtaagtgaagcaagagctcaacctttcctcatatgggatgggagaatgtattcctttgagaaagtccttggaaagttctgacataaaacatagctttttctgatgctgtgcattgg

SEQ ID NO: 62593 - DNA, 600 bp, Chicken  19866894324782_1
aatgtccttgtcagaaatttagcaaaatcctatgaatcactttaattacagggggaagtatttacttcaaaggatgccagattttccctttgcacgggctccaccattacctctacttttgtactataatacatacgatgtgagatatgcaatatgatacttcaaaaaacaaaacacattggcgctgatttatagctgcaaacattcaccataatttcagtgttgggaaaaaaaaatacatatatttcacattttacagcctcaggggaaaacaaaaaaggagagcatatcatagaaaayggtaaaacaatactgcacacagcatatgtgctgtggcaatctyccgaactggcaagaaytgcttggaaacgatcagcacagctaatgggctcaaagacaacgtgctctcatcacaaatcacacccatggcacaggggcgtcgtgatggagctcctgaaaccttggcaaactccttgagaaagacaaaatgtttgaagctcttaagtgatttgtttgagacttctgtcaggctttgctcactagtttccaaccctgtcgttgttctgcacaaagatatgaaagaagtgttgccatgaaaac

SEQ ID NO: 62594 - DNA, 600 bp, Chicken  19866894324782_2
aattacagggggaagtatttacttcaaaggatgccagattttccctttgcacgggctccaccattacctctacttttgtactataatacatacgatgtgagatatgcaatatgatacttcaaaaaacaaaacacattggcgctgatttatagctgcaaacattcaccataatttcagtgttgggaaaaaaaaatacatatatttcacattttacagcctcaggggaaaacaaaaaaggagagcatatcatagaaaayggtaaaacaatactgcacacagcatatgtgctgtggcaatctyccgaactggcaagaaytgcttggaaacgatcagcacagctaatgggctcaaagacaacgtgctctcatcacaaatcacacccatggcacaggggcgtcgtgatggagctcctgaaaccttggcaaactccttgagaaagacaaaatgtttgaagctcttaagtgatttgtttgagacttctgtcaggctttgctcactagtttccaaccctgtcgttgttctgcacaaagatatgaaagaagtgttgccatgaaaaccatcctgttgagtgtaatcctcactttgtatatacaataggct

SEQ ID NO: 62595 - DNA, 600 bp, Chicken  19866894324782_3
atttacttcaaaggatgccagattttccctttgcacgggctccaccattacctctacttttgtactataatacatacgatgtgagatatgcaatatgatacttcaaaaaacaaaacacattggcgctgatttatagctgcaaacattcaccataatttcagtgttgggaaaaaaaaatacatatatttcacattttacagcctcaggggaaaacaaaaaaggagagcatatcatagaaaayggtaaaacaatactgcacacagcatatgtgctgtggcaatctyccgaactggcaagaaytgcttggaaacgatcagcacagctaatgggctcaaagacaacgtgctctcatcacaaatcacacccatggcacaggggcgtcgtgatggagctcctgaaaccttggcaaactccttgagaaagacaaaatgtttgaagctcttaagtgatttgtttgagacttctgtcaggctttgctcactagtttccaaccctgtcgttgttctgcacaaagatatgaaagaagtgttgccatgaaaaccatcctgttgagtgtaatcctcactttgtatatacaataggctttgcctacactagagg

SEQ ID NO: 62596 - DNA, 600 bp, Chicken  19866894324782_4
tgatttgtttgagacttctgtcaggctttgctcactagtttccaaccctgtcgttgttctgcacaaagatatgaaagaagtgttgccatgaaaaccatcctgttgagtgtaatcctcactttgtatatacaataggctttgcctacactagaggctgtttccctgtaacaacagtgataaaattaaatagtcggtttcagtaaagccagatgtagtacggatcagaagtgtttcagaccagtaccttcaaaagaagcatcttccctgaactcgagtaccaacgagcacccactgcaggcrggtagcatggcacagcatcctcacaccactgactataacatgacatccagaaacacacgctctaatgccttctgctgaattttgcagaagaaaatggaagggaacaaaagctgcctaaatcggacctataggcaaactatgatttcccattataaatctaactaaaataatttaaaaaaaacacccaagttgcagaatggcagaatttggactagttggacaactgtaacttcacactgcatgtgatttcagctgagatcacctggaagaagtgaaggaagtaaccagcggcactgcaca

SEQ ID NO: 62597 - DNA, 590 bp, Chicken  19866894324796_1
attttgtgactgtcagtgtcacaaaatggagtgtgactcctttgccaaatttcagtgtttggtggtaaactttttttattctcaaagtaaaaataagttagctgctgttcctcttttttttcttaggggcttatcttttggcgataaaaattgttttggatagtttcagttcaaatggagtattaacttgcattgttttgctttccttttctgcaaaaggacatataaggtgaactatggggaattgtctttgctcaaattgcagtataggtccttctacaataactgatgtcaactaayttaactacctgggaatttacatatttatatcactcttgaactacaaacataagattattgtggagtatcaactaagatgcgtgaggaaaatgacttaaacaaaaaacaaacaagcaagaagacctcagctgctttttataggaccaatttccagctgggtttataactagttttatttctgaaataggttttcaatgagcaccgcctagtggctgagtttatttttacaatatagattagaattgttaataaagggtgatggtgactttttggtatagccctttatttga

SEQ ID NO: 62598 - DNA, 600 bp, Chicken  19866894324801_1
aatagcctgttctttcctgcttctctcctccgtatgaataaaacagcaaataaatccattctctagaatggtaaaattaaagtaattttgtttgtttcctccattttccctttatgttacctccctgaaataaactgtctgtgacacacagaagtgcttgaattaatctagattaagtgatcatctttgttcaaagaaaatctagattttttcttatagtaagcagtgaagtacggatattccttgtctgttaagaggtctgtaagctacagttcttgatgaaaacactgtatcctagasagagctaagtcakctgtttaagaatgcaggtagctgctggagtgtctggatagtctgtttgtagcaatagaatcagaaaatggttggagttggaakggacatttaaaggccctctagtccaactcctctgcagtcaacagggacaccaacagctcgattaggtggctcagagcctggtgcagcctgaccttsaatctctccagggatgrggcttccaccaccactgtgggcaacccgtgccagtgcctccctaactttattgtataaaaacacckttttccttattttgaaaacatgcaa

SEQ ID NO: 62599 - DNA, 600 bp, Chicken  19866894324801_2
ttcctgcttctctcctccgtatgaataaaacagcaaataaatccattctctagaatggtaaaattaaagtaattttgtttgtttcctccattttccctttatgttacctccctgaaataaactgtctgtgacacacagaagtgcttgaattaatctagattaagtgatcatctttgttcaaagaaaatctagattttttcttatagtaagcagtgaagtacggatattccttgtctgttaagaggtctgtaagctacagttcttgatgaaaacactgtatcctagasagagctaagtcakctgtttaagaatgcaggtagctgctggagtgtctggatagtctgtttgtagcaatagaatcagaaaatggttggagttggaakggacatttaaaggccctctagtccaactcctctgcagtcaacagggacaccaacagctcgattaggtggctcagagcctggtgcagcctgaccttsaatctctccagggatgrggcttccaccaccactgtgggcaacccgtgccagtgcctccctaactttattgtataaaaacacckttttccttattttgaaaacatgcaaagaaaatgggctt

SEQ ID NO: 62600 - DNA, 600 bp, Chicken  19866894324801_3
tcctccattttccctttatgttacctccctgaaataaactgtctgtgacacacagaagtgcttgaattaatctagattaagtgatcatctttgttcaaagaaaatctagattttttcttatagtaagcagtgaagtacggatattccttgtctgttaagaggtctgtaagctacagttcttgatgaaaacactgtatcctagasagagctaagtcakctgtttaagaatgcaggtagctgctggagtgtctggatagtctgtttgtagcaatagaatcagaaaatggttggagttggaakggacatttaaaggccctctagtccaactcctctgcagtcaacagggacaccaacagctcgattaggtggctcagagcctggtgcagcctgaccttsaatctctccagggatgrggcttccaccaccactgtgggcaacccgtgccagtgcctccctaactttattgtataaaaacacckttttccttattttgaaaacatgcaaagaaaatgggctttgtgattcctaaagcacctgggccatacactgggtgagcatacctcaatcctgacttggcacatacagcgtgagatttgaagc

SEQ ID NO: 62601 - DNA, 532 bp, Chicken  19866894324801_4
aaagaaaatctagattttttcttatagtaagcagtgaagtacggatattccttgtctgttaagaggtctgtaagctacagttcttgatgaaaacactgtatcctagasagagctaagtcakctgtttaagaatgcaggtagctgctggagtgtctggatagtctgtttgtagcaatagaatcagaaaatggttggagttggaakggacatttaaaggccctctagtccaactcctctgcagtcaacagggacaccaacagctcgattaggtggctcagagcctggtgcagcctgaccttsaatctctccagggatgrggcttccaccaccactgtgggcaacccgtgccagtgcctccctaactttattgtataaaaacacckttttccttattttgaaaacatgcaaagaaaatgggctttgtgattcctaaagcacctgggccatacactgggtgagcatacctcaatcctgacttggcacatacagcgtgagatttgaagcaatactcttcagccatttttcagtaggg

SEQ ID NO: 62602 - DNA, 515 bp, Chicken  19866894324801_5
tttcttatagtaagcagtgaagtacggatattccttgtctgttaagaggtctgtaagctacagttcttgatgaaaacactgtatcctagasagagctaagtcakctgtttaagaatgcaggtagctgctggagtgtctggatagtctgtttgtagcaatagaatcagaaaatggttggagttggaakggacatttaaaggccctctagtccaactcctctgcagtcaacagggacaccaacagctcgattaggtggctcagagcctggtgcagcctgaccttsaatctctccagggatgrggcttccaccaccactgtgggcaacccgtgccagtgcctccctaactttattgtataaaaacacckttttccttattttgaaaacatgcaaagaaaatgggctttgtgattcctaaagcacctgggccatacactgggtgagcatacctcaatcctgacttggcacatacagcgtgagatttgaagcaatactcttcagccatttttcagtaggg

SEQ ID NO: 62603 - DNA, 449 bp, Chicken  19866894324801_6
ttgatgaaaacactgtatcctagasagagctaagtcakctgtttaagaatgcaggtagctgctggagtgtctggatagtctgtttgtagcaatagaatcagaaaatggttggagttggaakggacatttaaaggccctctagtccaactcctctgcagtcaacagggacaccaacagctcgattaggtggctcagagcctggtgcagcctgaccttsaatctctccagggatgrggcttccaccaccactgtgggcaacccgtgccagtgcctccctaactttattgtataaaaacacckttttccttattttgaaaacatgcaaagaaaatgggctttgtgattcctaaagcacctgggccatacactgggtgagcatacctcaatcctgacttggcacatacagcgtgagatttgaagcaatactcttcagccatttttcagtaggg

SEQ ID NO: 62604 - DNA, 600 bp, Chicken  19866894324807_1
agtgatgcttttattatgattttttcctgataaaatattcctcatttttattgtgttataaatcctagtcatactgtactcatcaaacctgttttctcacacttctaggaataggtaggcattcttccttggcttgtaccattagagtgaatgcacgatcaaactcaagaggaacgctttgttctcatcttttggtgcccctcccagagccccccctgtgacttgggcagttcctttacttctcagtgccattaatcttgaccacgcctgtgtaattcggcagcacggacctggggccamatatggctgttgagcaaacgtggccgacgcacacgagctgctggtcgcaccrcacagggcaagcagaccacacacaggcacactctggaggggctgttcccttaatatggagcagctttgtacagtcagggagaggggaaacactgcctcttggttttgcacagaaactggttacgtggtgatttattttacagggagatcttgccagatctctgttgatactgtgttccttggaatgtattttagtgtgtagcctgcttgaggttaaccacatcagtttaaccggagtttcacaaggca

SEQ ID NO: 62605 - DNA, 600 bp, Chicken  19866894324807_2
gtgttataaatcctagtcatactgtactcatcaaacctgttttctcacacttctaggaataggtaggcattcttccttggcttgtaccattagagtgaatgcacgatcaaactcaagaggaacgctttgttctcatcttttggtgcccctcccagagccccccctgtgacttgggcagttcctttacttctcagtgccattaatcttgaccacgcctgtgtaattcggcagcacggacctggggccamatatggctgttgagcaaacgtggccgacgcacacgagctgctggtcgcaccrcacagggcaagcagaccacacacaggcacactctggaggggctgttcccttaatatggagcagctttgtacagtcagggagaggggaaacactgcctcttggttttgcacagaaactggttacgtggtgatttattttacagggagatcttgccagatctctgttgatactgtgttccttggaatgtattttagtgtgtagcctgcttgaggttaaccacatcagtttaaccggagtttcacaaggcagggttttggtctcttgttctttgaataaagcgtgcttcacgtaggtgatgta

SEQ ID NO: 62606 - DNA, 531 bp, Chicken  19866894324809_1
ttgctaatgtgtaggttttgtaatactacagtcaaaagtttctggccagcagagttttatgaaagccttaaaaggcataagaacctcattgtttcccatttgaattttttttaatatattcatctaagaatgagaatatgtggatttgccatatttgactttctgcctgccagaatatgtatgctaaagcagtcttcagtcccaaaaaattcatctaagaagcactggaatgtaaaaccctgtctccggtccagctcctataggaactgatccaaagctcactttggtttttccatttamtgaagtgggattcggatcagatccggataaattggctttccttgcaggaaaaaccacaatgtgaagggtggggtattatttaagaaggctttgcgatgaattcttttcaaaggctttggttaagatatgttttcaagcaccactgctgctggtaaaaaagcttatatctacatcctggttttagtatttttactagtatagaacgtaaaaaactatttcttttttgtacat

SEQ ID NO: 62607 - DNA, 600 bp, Chicken  19866894324813_1
tttgtcagaaatctgtacttgtatggccttaaagtaggagaaatctgtcaggacttttgacctgacaaacattaaaacacagtgagcagctagcctggaaaagtttctgtgcccagatcctccacagcctgctgctggctttaacagctggggagagcttttcccagcccctgtatatcccattggtgggtgcataagcaaaatttcatgtcatgaaccatcgatcttttccattcagggatatgaagttactggttaacgaggagccgtgaagctcagaaacagttcgctctcatagawgtgttgaagccagctgtgtggcactaatgcatgcttattgccaaataacgatgcagaaggcctaaagaaatctggtctcttgctgaagcatcttttatgttccatatgattccaaggcagctcaaaagaacaagccagaactccagtgcctggtgatccagagcattcagctcctctatttgtgatttcctgaaacatgcatcaaaagttcctgaggttattatttggggaatccttaaagcaggatgtaatttgtttgtttgtaaaaaggctttgaaaagaaggaggaaaaagaaaaag

SEQ ID NO: 62608 - DNA, 600 bp, Chicken  19866894324813_2
gccgtgaagctcagaaacagttcgctctcatagawgtgttgaagccagctgtgtggcactaatgcatgcttattgccaaataacgatgcagaaggcctaaagaaatctggtctcttgctgaagcatcttttatgttccatatgattccaaggcagctcaaaagaacaagccagaactccagtgcctggtgatccagagcattcagctcctctatttgtgatttcctgaaacatgcatcaaaagttcctgaggttattatttggggaatccttaaagcaggatgtaatttgtttgtttgtwaaaaggctttgaaaagaaggaggaaaaagaaaaagccacgagcaggagccaaaaagctaaaatcctggccagaaacatcttcacaactctctcccagcctaccccgttttctttctcgtactgtagttaaagtgcaataattagcattgccatggttaccactgttcagttattttgtgaggcctgggacttaaatacagaaaaagaatatcaggtgaccgctctcctggcccagagattggctggattggaagaaaacaagagcattaaatgatttgaaaactgggcaggctcatgtcg

SEQ ID NO: 62609 - DNA, 600 bp, Chicken  19866894324821_1
ctgtgcaacaatttagtagaagagaaatacaaaattgcactgctttttcttctaaattttaaatatactctgcatcttaaacaggtacaagataaaacagtttctaaacgagtatgtaggagttcattgctttgaatagtagtcaaacagtttttccaaaatgtaatatctcaacatatggtggccaattcctatgaaagaaattagaacgagaaataaaaggataaaatatatggctgtgaataagatacagtggtgacaaatgtaatcacagcagtgtcctaagatagtgagatgtcwtttataggcttttactgccagggctactgtttcctttgaaacttcgagggttcgtttcactattttaccacacaaatataattgtttgctagaagaaagatttatgtctgcatttcaatcaaagtgttccaatctttggtgttaaaacaattgctgaaaagcttgaagaaaggtgagaaaaaaatggtcacattaagatgataaagaataataatgataatgcaaccaactttttattttttatttttaaattaatgtattagattcaagtgattaatgaatccttgtgcttttttgtag

SEQ ID NO: 62610 - DNA, 600 bp, Chicken  19866894324821_2
ctgccagggctactgtttcctttgaaacttcgagggttcgtttcactattttaccacacaaatataattgtttgctagaagaaagatttatgtctgcatttcaatcaaagtgttccaatctttggtgttaaaacaattgctgaaaagcttgaagaaaggtgagaaaaaaatggtcacattaagatgataaagaataataatgataatgcaaccaactttttattttttatttttaaattaatgtattagattcaagtgattaatgaatccttgtgcttttttgtagaaatgactgtatastgccttcctgcccagaccatcatcsctcactagaggtcattgcattcctttctgcttataaaaatttcagtattctgcagcttcattatgccatgtagtggataaagagaaacacagaagataaatttgcacataaaaacaataaggagaaaattaagagcatgtcactgtacataaaaacaagaaattaaatagtccttccttgtttctgagttaacagcaagattttctcaatttcagttattttttcttacactgtctcttgcttaaaatataagaaagataaaaatagattaacaa

SEQ ID NO: 62611 - DNA, 600 bp, Chicken  19866894324821_3
aacttcgagggttcgtttcactattttaccacacaaatataattgtttgctagaagaaagatttatgtctgcatttcaatcaaagtgttccaatctttggtgttaaaacaattgctgaaaagcttgaagaaaggtgagaaaaaaatggtcacattaagatgataaagaataataatgataatgcaaccaactttttattttttatttttaaattaatgtattagattcaagtgattaatgaatccttgtgcttttttgtagaaatgactgtatastgccttcctgcccagaccatcatcsctcactagaggtcattgcattcctttctgcttataaaaatttcagtattctgcagcttcattatgccatgtagtggataaagagaaacacagaagataaatttgcacataaaaacaataaggagaaaattaagagcatgtcactgtacataaaaacaagaaattaaatagtccttccttgtttctgagttaacagcaagattttctcaatttcagttattttttcttacactgtctcttgcttaaaatataagaaagataaaaatagattaacaagaaaaaatgtgttagtgtctttctt

SEQ ID NO: 62612 - DNA, 532 bp, Chicken  19866894324823_1
gtggagtggtgtgtctgaaatgctgctttctgctctgcctggtgggtgagcagacacatggagtgtttgctgctggagtggagggacctggtaggcagggcatgggaagagatgtaaaaagtaccctggttctcttgttggggtggtgtgttggagggtggcatggaagtgatgggcaggacctccacctcggctgtgtgcaaactagctttaattcatgtcagcaaagggatatctgtgcattgtggtgctctgctggagggcatcagggttcctgcacatctctgcaggagtcgagcmgggctctgcctgggctggagctgacaagttctgcagaaccatcccatctcacgcagcttcctgctcatctgggcatctctgcgtcacactcctccaccctgcagagctctgtctgctgattgccgtgggctggcactgcgtgtgctggatgctgcctgtggtggggttggcctgggcagccagatgtgcttgtgctgatagtaacaggagttgctgtgcgagcaaagctcca

SEQ ID NO: 62613 - DNA, 600 bp, Chicken  19866894324841_1
tcctttctttttcttccaatatgtttttaataataaagcgtgactgtgtggcattactgcaagaacaaaagaatatcttctacctacgtgtgacgttcaaataaatccatgtagaaaccttcacattatgtattatttatgataaaatatgtggagaaaatagaattttacatgttcttgctggtaatgcagaacacagcagttaagctatttctttcagtttgctttttctatactaaatttgcccagaagaggaagtcgtcagagtagatctcattttaatacctcagccataactayctttcaaggttagagtaaatccttttaatctctgtgtaacaggaatatgattctttgaattgccaagcatttcatcgtgatgtgtgacattcccttatttcattcaacaggaattaagcaaattcctaaattgatattaaataaaggaaatttggaaattttatgtgggcttaacctattcaacgccttttaaaagcatcatctgagtaataatgcaagatacagattctaaaaccaatatagcagaagaaattatagtcttcaaatacatgctttccattttttctttatcagtcttta

SEQ ID NO: 62614 - DNA, 600 bp, Chicken  19866894324843_1
tgttaacttcctcatggacttcattatattggctttccaaagagcaaaaatgggttaataaacctcagagtttcatggctgtagtatttcagcaaatttgtaataatgcatttttgtttccctttcttagacatagcattaagcttaaattaactgcaggacactgagaccaatcttgtcgaaagccacacaattacttgagggcacacgtagtactttatttgactgcttttgctcttcttagatcatctgaaggactttttaggtcctacgtttctttgattttttcacgtcagtgcrtgattgtggaagaggacacaytgggagagtgagaaatggcgatcagaggctgcttcacttcagctgtttacctgtttagtcccctggggatagtagccagctgccatgagttggagcagcccctcagtcttggactacagctactattggctctctatggtctggggcaaccatctggagtaggtgagtcagtgcttttgaggtacgtgcaggcttagacacagcccatctggtagccatgcggcagggtacccagcaatgccttttcttctctttttctgctctgctgtgagcatccag

SEQ ID NO: 62615 - DNA, 600 bp, Chicken  19866894324843_2
cattatattggctttccaaagagcaaaaatgggttaataaacctcagagtttcatggctgtagtatttcagcaaatttgtaataatgcatttttgtttccctttcttagacatagcattaagcttaaattaactgcaggacactgagaccaatcttgtcgaaagccacacaattacttgagggcacacgtagtactttatttgactgcttttgctcttcttagatcatctgaaggactttttaggtcctacgtttctttgattttttcacgtcagtgcrtgattgtggaagaggacacaytgggagagtgagaaatggcgatcagaggctgcttcacttcagctgtttacctgtttagtcccctggggatagtagccagctgccatgagttggagcagcccctcagtcttggactacagctactattggctctctatggtctggggcaaccatctggagtaggtgagtcagtgcttttgaggtacgtgcaggcttagacacagcccatctggtagccatgcggcagggtacccagcaatgccttttcttctctttttctgctctgctgtgagcatccaggggggaagctgttgaacattt

SEQ ID NO: 62616 - DNA, 600 bp, Chicken  19866894324844_1
ttatttgtatttgtattttaaaaagagagatactaaacaaatacaatgcctcagaggaaaaacctcaaattctgcttataattcactgctatccacaataaattagcttccttctttgatactctagaggactctggtccaaagtttcaagagaaagaattcaagacagagagatttcaaaaaaccttcagcatccagatgcagagagtggtcactttctgcctttactgctttcatttcatgctgatctgaaggagtttgagttcttagtgcctttaaaattctgaaggcagcataggyaaaaaaaatccatgtttttctatctttcagactacagtcctgaaggaaactggcttatcccagtaatgaatttgatggaggggcagtggacatgaattttgatgtactgggggtaggatattttccccttaaattaataactgcaatttatccttcctttctctagcagttttttttttatgtggttgctagctattttgtatcacaagcatccagaagatgaatgctctgagaatgaattgttaccttcatcccatatccatwcagcagatcatacaaaccaggttaatgttaacaaaa

SEQ ID NO: 62617 - DNA, 584 bp, Chicken  19866894324844_2
tcttagtgcctttaaaattctgaaggcagcataggaaaaaaaaatccatgtttttctatctttcagactacagtcctgaaggaaactggcttatcccagtaatgaatttgatggaggggcagtggacatgaattttgatgtactgggggtaggatattttccccttaaattaataactgcaatttatccttcctttctctagcagttttttttttatgtggttgctagctattttgtatcacaagcatccagaagatgaatgctctgagaatgaattgttaccttcatcccatatccatwcagcagatcatacaaaccaggttaatgttaacaaaataatctgtaggtatactcaaggaaacaatcagaaggaagtactttcaggtcagaaaatgataggctcaattttccttgaaatttttgtgtggtgaagcacttttagctgtgtgggatgggcacagcaatcttgtctctttcaagccacactgattactgcccaaatctgatctgccttttgccgtataaatgccctcctttgaggcaaaatctgaacaaatctgaactgctggtattgtctccagccc

SEQ ID NO: 62618 - DNA, 600 bp, Chicken  19866894324858_1
taaaagccttcagtttgtttttacttaggtgacagaataataacgtaataaaagcatctgcatggaaacatttgcctaggctcatatttaactttcaatttcatttcttttacatgatgtctaatgctcctcggggtttttgagaagtctcaaagtcacgcaatgaaatggaagagggaaattgtaattgtaactgtgccgagagatactctccagaatacgtgtgtgggggaaatatatccataaaacacaggttatgtgtattttgcttctcacacatcacatgtgaatattatagartgcatttcctacgcaacatagatctgaaatgtgaaagctgtgcaaatggttcagtaagtagacagcaatttgtacgggaactctcatacactcctggggaatggagatgaggtgcagtgctgctgtgctacagtaaatggagaagagctgaggtagatgtgctgtgctgaggagacggcagtygatgtgccaggtgcagggggcatgccttgctgatgcacaggaggagaggccgcgagccctgtcagagtcagtgtgctcctgctctytgtaaaacaaaggttgcattttcctacctac

SEQ ID NO: 62619 - DNA, 600 bp, Chicken  19866894324858_2
gtaattgtaactgtgccgagagatactctccagaatacgtgtgtgggggaaatatatccataaaacacaggttatgtgtattttgcttctcacacatcacatgtgaatattatagartgcatttcctacgcaacatagatctgaaatgtgaaagctgtgcaaatggttcagtaagtagacagcaatttgtacgggaactctcatacactcctggggaatggagatgaggtgcagtgctgctgtgctacagtaaatggagaagagctgaggtagatgtgctgtgctgaggagacggcagtygatgtgccaggtgcagggggcatgccttgctgatgcacaggaggagaggccgcgagccctgtcagagtcagtgtgctcctgctctytgtaaaacaaaggttgcattttcctacctacagaggtctaagcttagaaatgcctgtgcctgtgtatgtgtaaaacgttgctgccaaatttcttgttgaattttttttttttattattattatttccttttctttctgtaggtgtataaaatttccccaaagtttgctttcctggtgacatcaggcccttttgtttacacggcaatagctgtca

SEQ ID NO: 62620 - DNA, 600 bp, Chicken  19866894324858_3
ttctcacacatcacatgtgaatattatagartgcatttcctacgcaacatagatctgaaatgtgaaagctgtgcaaatggttcagtaagtagacagcaatttgtacgggaactctcatacactcctggggaatggagatgaggtgcagtgctgctgtgctacagtaaatggagaagagctgaggtagatgtgctgtgctgaggagacggcagtygatgtgccaggtgcagggggcatgccttgctgatgcacaggaggagaggccgcgagccctgtcagagtcagtgtgctcctgctctytgtaaaacaaaggttgcattttcctacctacagaggtctaagcttagaaatgcctgtgcctgtgtatgtgtaaaacgttgctgccaaatttcttgttgaattttttttttttattattattatttccttttctttctgtaggtgtataaaatttccccaaagtttgctttcctggtgacatcaggcccttttgtttacacggcaatagctgtcataaacgtgcttgtgaacagcagtcttctccgtggcagtgccccgccgatcctctccctgcagccttctttcactgtgccggatagc

SEQ ID NO: 62621 - DNA, 600 bp, Chicken  19866894324864_1
gtagaagccatccacaaatgcgagctttgtacaaagggagaccacttctcttatttctgctttcctttccctactgagaggggtctgcttaaggcagctgggagaggggaagaagcagcattctccatactacagtgagcttagagctaagagggggacttcatttttcttgtcttgtcagtaacttaatcctctgcggttttactgttcctgaaataataaagtcagtctggagacaaaggaaagcccttctcaattctcaggaaagcacaaggataaagcagccttggtctttcccarcctagcgagcaagctcttcctgcctgtgactttctgtgttcagcagagcagaggcatcttccacaaagaaaaacctaacctggaagttctgacagtagtactctgcaccgggctccgtaatgaagataggtggcattagtattggccaagggaggtgagcccaggagacaagccattggttttccacgtggagtttgccaaagcgaaactaaatctcatcctcctgtggaaatgtgcccttcgagaactgggatttcataacaaactctgtaaaaattatgtaagcctccttttaactcc

SEQ ID NO: 62622 - DNA, 600 bp, Chicken  19866894324866_1
cttctactgtgaagtgacatgaaaacaatgtagtttgaatatatgccaaggaatgagaggcccttataaaattctttccccagcttcaaaagacttttcaaaatgctctaagactgtctgtgttggtagagttgctcccatcatgcaatagtaatgaaatatccatgccacagccaagttacatattatttgtatgctgtaataacagggcttttaaggaagaaagtataaagatgaaaacattttgagtaaatatttatttggtgctgtttttctttctgcaaataaagaacagatttytttaacctttccttttcattcatgtatgttcactggcacaaaaaatatagccaattccaaccttgcaatagagctgttagaatactttctgtaaatcacagttgcctggagaatgggactttctgttgcagaacaaaaaatgtctgtgattaaaatcaagaggaatattttaagttggaattcaccaaagtatttcagctacaagattgcaacactattttggaaagaaattgaatccataataacagcttaaagcacttacatgtttaggtcctagttttaaagtatgagacacatgca

SEQ ID NO: 62623 - DNA, 600 bp, Chicken  19866894324870_1
tctcctagctggcttcatcaacgcccaggctgctgcactatctgatgcagctcccacctgaggtcccaaacttccactcatgctttccaaagtgcgtgggagaccaaactatgccgttgcagacaaacaacaaaaggcctttatttgcacaatgccgtatacaaaagttgcatctgacaaatttaagagttcagttctccagagcatatgcaggtcatggaccacaccacttcaaaggctcaattcctattttctcatatggcacccagaccaaaacatatcaaattttagtgcactttyacaattaatgccttctgtctgaacttagttggaagcttttccaacagcatcttggatataattggatttttcccacttgtaaagagttacctctaagagtgggtgggtatcacatatgtcttttcatttttcctgctctacttcacatacacaaactgacatctcatgctgcacacagtagaggaaaggatttgctcctagcatgttttgggtacttgcttccagatatatccagtagtagcagagctgaaactaacactctgggagggatttagctgactgattgagactgtttacaat

SEQ ID NO: 62624 - DNA, 600 bp, Chicken  19866894324871_1
gatccaaatgactgatctcgaataaacacagcaaacggtgaattactgcgatatcgggaggaacgcagagtgcaatttgaaatgcttgctcacttctagtctttaaaaacaaaccttgtagaaagcaatgcaccgaggagtgctgcagaaaggtaaagtgcgacgctccactcgctgaaaagcttattaaaaagaagtattagaatggatgggacagagagagcagaaagatataagaactccacttcatttgaagtcatgacaccaataggctgtgttcagatctagtggtaagaaacraggattcttatgaaaaaaaggcaatgcaaacagagtaaataagatcgtcctcttttgttctcttccaataagagaggraaatgataaggaaggtgattctctggttatcatcctaaactgataaayaaggagccaggaactgcaagcaagagacaggaaaccacctatcagcagcactctccctctatgcaggatggataccctcatctcccctgacttcatacaggtgctgcaaactcatcagtaataacgtgcctcccagcaagcttgcagacaatcaacaagaacraagacttgcac

SEQ ID NO: 62625 - DNA, 600 bp, Chicken  19866894324871_2
gaaatgcttgctcacttctagtctttaaaaacaaaccttgtagaaagcaatgcaccgaggagtgctgcagaaaggtaaagtgcgacgctccactcgctgaaaagcttattaaaaagaagtattagaatggatgggacagagagagcagaaagatataagaactccacttcatttgaagtcatgacaccaataggctgtgttcagatctagtggtaagaaacraggattcttatgaaaaaaaggcaatgcaaacagagtaaataagatcgtcctcttttgttctcttccaataagagaggraaatgataaggaaggtgattctctggttatcatcctaaactgataaayaaggagccaggaactgcaagcaagagacaggaaaccacctatcagcagcactctccctctatgcaggatggataccctcatctcccctgacttcatacaggtgctgcaaactcatcagtaataacgtgcctcccagcaagcttgcagacaatcaacaagaacraagacttgcactggtttgctgaatgacagggaacccggcayggcttgggttagggtggaacatgtgggatgggtactgagaaattccrt

SEQ ID NO: 62626 - DNA, 600 bp, Chicken  19866894324871_3
aatgcaccgaggagtgctgcagaaaggtaaagtgcgacgctccactcgctgaaaagcttattaaaaagaagtattagaatggatgggacagagagagcagaaagatataagaactccacttcatttgaagtcatgacaccaataggctgtgttcagatctagtggtaagaaacraggattcttatgaaaaaaaggcaatgcaaacagagtaaataagatcgtcctcttttgttctcttccaataagagaggraaatgataaggaaggtgattctctggttatcatcctaaactgataaayaaggagccaggaactgcaagcaagagacaggaaaccacctatcagcagcactctccctctatgcaggatggataccctcatctcccctgacttcatacaggtgctgcaaactcatcagtaataacgtgcctcccagcaagcttgcagacaatcaacaagaacraagacttgcactggtttgctgaatgacagggaacccggcayggcttgggttagggtggaacatgtgggatgggtactgagaaattccrttctgagtttatggtcaaacccttttcttgtgcaactgacagaacgcat

SEQ ID NO: 62627 - DNA, 600 bp, Chicken  19866894324871_4
ggtaagaaacraggattcttatgaaaaaaaggcaatgcaaacagagtaaataagatcgtcctcttttgttctcttccaataagagaggraaatgataaggaaggtgattctctggttatcatcctaaactgataaayaaggagccaggaactgcaagcaagagacaggaaaccacctatcagcagcactctccctctatgcaggatggataccctcatctcccctgacttcatacaggtgctgcaaactcatcagtaataacgtgcctcccagcaagcttgcagacaatcaacaagaacraagacttgcactggtttgctgaatgacagggaacccggcayggcttgggttagggtggaacatgtgggatgggtactgagaaattccrttctgagtttatggtcaaacccttttcttgtgcaactgacagaacgcatgagtcatttctcacccagggtgagcccacaaccccagcaatacaatgcatgcatacagatacacttaatgaaggaaaaaagtcacatattccagaatttcaaaagtagatctattaaaaagaacacttaattcgtggcagattatgttaataatacccccaga

SEQ ID NO: 62628 - DNA, 600 bp, Chicken  19866894324871_5
cagagtaaataagatcgtcctcttttgttctcttccaataagagaggraaatgataaggaaggtgattctctggttatcatcctaaactgataaayaaggagccaggaactgcaagcaagagacaggaaaccacctatcagcagcactctccctctatgcaggatggataccctcatctcccctgacttcatacaggtgctgcaaactcatcagtaataacgtgcctcccagcaagcttgcagacaatcaacaagaacraagacttgcactggtttgctgaatgacagggaacccggcayggcttgggttagggtggaacatgtgggatgggtactgagaaattccrttctgagtttatggtcaaacccttttcttgtgcaactgacagaacgcatgagtcatttctcacccagggtgagcccacaaccccagcaatacaatgcatgcatacagatacacttaatgaaggaaaaaagtcacatattccagaatttcaaaagtagatctattaaaaagaacacttaattcgtggcagattatgttaataatacccccagatctatctgttgttagagacaaagaaatgctatacaaaagaa

SEQ ID NO: 62629 - DNA, 600 bp, Chicken  19866894324871_6
raaatgataaggaaggtgattctctggttatcatcctaaactgataaayaaggagccaggaactgcaagcaagagacaggaaaccacctatcagcagcactctccctctatgcaggatggataccctcatctcccctgacttcatacaggtgctgcaaactcatcagtaataacgtgcctcccagcaagcttgcagacaatcaacaagaacraagacttgcactggtttgctgaatgacagggaacccggcayggcttgggttagggtggaacatgtgggatgggtactgagaaattccrttctgagtttatggtcaaacccttttcttgtgcaactgacagaacgcatgagtcatttctcacccagggtgagcccacaaccccagcaatacaatgcatgcatacagatacacttaatgaaggaaaaaagtcacatattccagaatttcaaaagtagatctattaaaaagaacacttaattcgtggcagattatgttaataatacccccagatctatctgttgttagagacaaagaaatgctatacaaaagaaagcacttgctttactgatctctgtgcaacactgaaaacctttttctt

SEQ ID NO: 62630 - DNA, 600 bp, Chicken  19866894324876_1
tgtgctacagctctgtcatggaaactactgtggccaagtagtattaatattctctatgtttgttattatatgtacgaagagctaacagcaaggagtttgcatttgccaggtatctactgtatcaatctgcagcccatgtttgaagtctgcgagggttgcaaatcctgctgatgtgttctcttattcttaaattatttttacttctatttttactttttccttagaaaaatacagttgttaccaaacagtttgtgacattgggctctctccatttctctgctatggtggaaaatatttagrgaatttttttagggagattttacttttcctgagaacccatttgcttttccctgaaatgaagaggaggcaccacattgctgcaacagaaattggattggttcccaagtgccattagtatatttcctgtttactgtgggggaccttccaaaccactgactgaaacagaagcaggattaagacatatcatatgcttatgagcaatctacctctcaagttatggtctaccagtgatctttatttctcttttttaaaagctgttacatcttttcttagagctgaacgctggtagtgcattctata

SEQ ID NO: 62631 - DNA, 600 bp, Chicken  19866894324883_1
agaagatgtagaaggcagactccacctcttctcctattacgtttagtttcccagttcaatatatttaaaagctagcataaaaaatttatcctataatttaatggagctgagtgtaaatgtcagaaaatgcacactttcccttaaagggtgggttgatgtgtgttctgatgatgtgtctgtctgcttgcacacttggtttattgtattagtgtcagaaacacagtggttagactttccatctggtaggatgatttcatgtttctcctggttcagacaattttttgttcaagttggatcaaygttcatgtgtcagctggtcatcagcaactttcacaaacaaggacaaatctatartattggacctttacaaacaatttttctgttttttgtcttttttgtctgtatagtatctgatttaaaaacatagaaaaaaaaccacatgtataaagaagagtacactcagatactgcattctgaatcttaaattatttgctctttcatttttaatctcactgaaagtgctagtatctgttgtgttgttagctcgagtggaagtcatacttggactcaaatcacaatgtttgaataaaggaatatcct

SEQ ID NO: 62632 - DNA, 600 bp, Chicken  19866894324883_2
ttcaatatatttaaaagctagcataaaaaatttatcctataatttaatggagctgagtgtaaatgtcagaaaatgcacactttcccttaaagggtgggttgatgtgtgttctgatgatgtgtctgtctgcttgcacacttggtttattgtattagtgtcagaaacacagtggttagactttccatctggtaggatgatttcatgtttctcctggttcagacaattttttgttcaagttggatcaaygttcatgtgtcagctggtcatcagcaactttcacaaacaaggacaaatctatartattggacctttacaaacaatttttctgttttttgtcttttttgtctgtatagtatctgatttaaaaacatagaaaaaaaaccacatgtataaagaagagtacactcagatactgcattctgaatcttaaattatttgctctttcatttttaatctcactgaaagtgctagtatctgttgtgttgttagctcgagtggaagtcatacttggactcaaatcacaatgtttgaataaaggaatatcctttataatatccttatgttttgatatcttgccctgagcgagatggagaaatagac

SEQ ID NO: 62633 - DNA, 502 bp, Chicken  19866894324885_1
gttcttctggtctgctgagcttgaacagtcaacttatgttcagtcagcaaccgattctgtctggagatgccatataagtagttcaaaatatcactttttgtttgcacagaatgaatgattctctgtttttgtacatttggcctttcttagattcccagttctgtcatggatgagaggggtgggacaggggaagttgaaatctttcagtgttttggcttcgaggttccaaggtcttcaggcatgttctactgtacattcaggcttttgatgtgtcaacatttacccctcctttcatgaaaytgcaagtgatctgttagtgctagtatctgtagagaaggcattcatgatgaaagttttgccattagtatatttgcatatcaataagcaggccggagtgactgttaaatgctaagtgcatgtttttcagacctcctaaataacatctgctgaagtgagtaatgtggagtatcactttcagaaaacggccctctctctagaggtt

SEQ ID NO: 62634 - DNA, 493 bp, Chicken  19866894324888_1
tctcagagaggtaatgcctcttttgttcatctctgatctagcagatttctctcttttttcttcttttcttctttttttatgagggaggagagaattttctttcttctttttgagacctcatttgtttcattagcaagcaacttaccctactcaccattcctgccatgacaggcctcctgttctcattctggactgcaatctctcacatactgggggaagaaatggtagatggctgggcattctctattcagagaacatcctttaaagagatacttcctggaggaattgtctgcaggtcgrgtgagtgagttgtgatgaaccacagaagagagagtgaacagtcaggttggggtcatctttttttctaccttccatgcctctcttcttcaatttcccggtctcactgatgttagacctttcacaatcttttctgagagcaaaagaaggcaaggaaaggacatctctttcatttttttcctagttgtcagccaaa

SEQ ID NO: 62635 - DNA, 600 bp, Chicken  19866894324892_1
tttcatggtaacgcacaaattatttcctgtttaatttgttagaagtcttcttcctcaggaccccatctgaaattgttcttcttcttggtcacttgatatagagggtttacaatcagactgtaattcagaatatgcattgtccaaaaccctgtgacacctaagaaagcttgtgtttcctttttgctagttgataaggacataccaggattgcttcaaaagtaatatcttctattttattatattggtctacaatgtcagaggcagatgttggtagtatggcagtagaggttgaatatttamgacagtattccattaaattttgttgctatgtgacacggcagcagaggagcagcctgacaacagagaatcatagaaaccttagagttggaagggaactttaaaggtcatctagwccaactccccttcagtgagcagggatatgctcagctgaaccaagttgtccaaggcctgatccagcctcaccttgaaagtctccagggagagggcatcaaccataattcacctgaattcacgtagataacggtggtgatcatgttgaaaagtagtttttgtagagagagaatgtgctctattcagtag

SEQ ID NO: 62636 - DNA, 600 bp, Chicken  19866894324892_2
cagactgtaattcagaatatgcattgtccaaaaccctgtgacacctaagaaagcttgtgtttcctttttgctagttgataaggacataccaggattgcttcaaaagtaatatcttctattttattatattggtctacaatgtcagaggcagatgttggtagtatggcagtagaggttgaatatttamgacagtattccattaaattttgttgctatgtgacacggcagcagaggagcagcctgacaacagagaatcatagaaaccttagagttggaagggaactttaaaggtcatctagwccaactccccttcagtgagcagggatatgctcagctgaaccaagttgtccaaggcctgatccagcctcaccttgaaagtctccagggagagggcatcaaccataattcacctgaattcacgtagataacggtggtgatcatgttgaaaagtagtttttgtagagagagaatgtgctctattcagtagggttattgtgctctttgcatctgttgtagtttccatgtaaatacacaggaggcattattttagactgacctatgtagcctatatcattttgttgatcacatccatggggatct

SEQ ID NO: 62637 - DNA, 600 bp, Chicken  19866894324893_1
tatgaaagggaaggtgctgccagtgttttaacaagggcctcccacagcattctcccccattagcctcataaacacaggctagcgcgggagcatgtgctgcggagagaagggtcaggagactatttattctctccatttaaacaaaaatgctttcttgtgagcaaggagagaagcaaacaaataaattaggctgtgccttgatggaagcatttatactgtgtccttgggaaatgtaccgagtgtggcaatagtgcaggtcagtgtttaacttggctgatttgaaatggtttgtgtgtaagyggagaccttgcagtggcacagagtgctatccgccactctttgttttttcttccttttttaatatcttgtgtctggtgcagtctggaccgtttaaaggtaaagtgcccgtggtaaaggtgcctcttcctgacagcactgtgagctggagctgcaggcctagtgcttggagagagagggcccaaytttactattttcctgagaaaatgcactgtagccaggymcggctgatcacagccttctcaaacagaaggaaaaaccccgggccagtgtctcctggctgtgtcccggccctttggtttt

SEQ ID NO: 62638 - DNA, 600 bp, Chicken  19866894324893_2
aattaggctgtgccttgatggaagcatttatactgtgtccttgggaaatgtaccgagtgtggcaatagtgcaggtcagtgtttaacttggctgatttgaaatggtttgtgtgtaagyggagaccttgcagtggcacagagtgctatccgccactctttgttttttcttccttttttaatatcttgtgtctggtgcagtctggaccgtttaaaggtaaagtgcccgtggtaaaggtgcctcttcctgacagcactgtgagctggagctgcaggcctagtgcttggagagagagggcccaaytttactattttcctgagaaaatgcactgtagccaggymcggctgatcacagccttctcaaacagaaggaaaaaccccgggccagtgtctcctggctgtgtcccggccctttggtttttcactgctgggaacctgcacgctcagtccagccaagtggaagttacacttgggaattcatcagtccaaagtagagcagggtcagaggaaaagctctttggacagcacgaattggcatagcagaaagtaatgctgacttctatccagcagtgatggggttctaagtgaccgtattcactagcat

SEQ ID NO: 62639 - DNA, 600 bp, Chicken  19866894324893_3
tccttgggaaatgtaccgagtgtggcaatagtgcaggtcagtgtttaacttggctgatttgaaatggtttgtgtgtaagyggagaccttgcagtggcacagagtgctatccgccactctttgttttttcttccttttttaatatcttgtgtctggtgcagtctggaccgtttaaaggtaaagtgcccgtggtaaaggtgcctcttcctgacagcactgtgagctggagctgcaggcctagtgcttggagagagagggcccaaytttactattttcctgagaaaatgcactgtagccaggymcggctgatcacagccttctcaaacagaaggaaaaaccccgggccagtgtctcctggctgtgtcccggccctttggtttttcactgctgggaacctgcacgctcagtccagccaagtggaagttacacttgggaattcatcagtccaaagtagagcagggtcagaggaaaagctctttggacagcacgaattggcatagcagaaagtaatgctgacttctatccagcagtgatggggttctaagtgaccgtattcactagcattttaatatgaaaagacatgtttctagaattgtgattc

SEQ ID NO: 62640 - DNA, 600 bp, Chicken  19866894324893_4
ccttgggaaatgtaccgagtgtggcaatagtgcaggtcagtgtttaacttggctgatttgaaatggtttgtgtgtaagyggagaccttgcagtggcacagagtgctatccgccactctttgttttttcttccttttttaatatcttgtgtctggtgcagtctggaccgtttaaaggtaaagtgcccgtggtaaaggtgcctcttcctgacagcactgtgagctggagctgcaggcctagtgcttggagagagagggcccaaytttactattttcctgagaaaatgcactgtagccaggymcggctgatcacagccttctcaaacagaaggaaaaaccccgggccagtgtctcctggctgtgtcccggccctttggtttttcactgctgggaacctgcacgctcagtccagccaagtggaagttacacttgggaattcatcagtccaaagtagagcagggtcagaggaaaagctctttggacagcacgaattggcatagcagaaagtaatgctgacttctatccagcagtgatggggttctaagtgaccgtattcactagcattttaatatgaaaagacatgtttctagaattgtgattca

SEQ ID NO: 62641 - DNA, 600 bp, Chicken  19866894324894_1
caaggtcatagactctgctgggcagtaggggaacaataaaaagcgggagacatgggcacaaagccatgtggaatgatgggctttaccaatgggctgcacaattcccatctatgttcagtgctattcatgtacacatccccttctacccatgcattcatacaatgatctcaagagagccatgcaattactgcgacgtatcattgcagtaactaccaccagtacaaccactttgcctcctccagatcctgacataagctacacattgaggctgtgcagtcagggaagatgtgggtcatgagytatgcccagatgtgcaygctcccaccatgctgccaggaacagagcccacatgccccaaaccttctaatgccctgctcaaaatgctctcagcatcaggcagaaagcttaaaactacacactataaggtagaacatgccaaattcccagctggtcaacccccactgaaacctggagagttatgcaatagtgcaccaggcccaaaactgaatataaattatatttctgtaaataaaggcataactttgttcccagtaatctttagtattagcagtgagtcagaaaattatatttacttgtgat

SEQ ID NO: 62642 - DNA, 600 bp, Chicken  19866894324894_2
ctgggcagtaggggaacaataaaaagcgggagacatgggcacaaagccatgtggaatgatgggctttaccaatgggctgcacaattcccatctatgttcagtgctattcatgtacacatccccttctacccatgcattcatacaatgatctcaagagagccatgcaattactgcgacgtatcattgcagtaactaccaccagtacaaccactttgcctcctccagatcctgacataagctacacattgaggctgtgcagtcagggaagatgtgggtcatgagytatgcccagatgtgcaygctcccaccatgctgccaggaacagagcccacatgccccaaaccttctaatgccctgctcaaaatgctctcagcatcaggcagaaagcttaaaactacacactataaggtagaacatgccaaattcccagctggtcaacccccactgaaacctggagagttatgcaatagtgcaccaggcccaaaactgaatataaattatatttctgtaaataaaggcataactttgttcccagtaatctttagtattagcagtgagtcagaaaattatatttacttgtgattccttcccgccctttcc

SEQ ID NO: 62643 - DNA, 600 bp, Chicken  19866894324895_1
ttatgtatgcctaaggcgtacctggagttagcaaaggaaaggcactgaccacttttaatagatattaacgcacttcttaaaactttctgtgactgggaacctggaatagcttccgattgccatcttaataaactctaagctataaaatgctatttttcaacatagtcaccaccattagctatgcattttcactagcaatgaatgagagcctgcatgctacactcataaaaatcatcagcagcagaggtgacccagtgtcgccactgctgaaatgcaccacccaccacctcactgtgctcrcatccactctttgatctccatagacactcagcaagcattggtaaatatcagtggaaattttttccacgtggaagaattcattatactcctttgcttcatttacgcttccatatcagacaccgtcttgtcagactgcctctctgctgccatctgtcacacagcaacagaatgtaatcgaattttgttgagaaggttccacctctagtgccataccaccaacatctgcgtataatgttataagcaaacagaataaaataggaggtactactttctgagcagcccttgtaattgttagattat

SEQ ID NO: 62644 - DNA, 467 bp, Chicken  19866894324898_1
ggctttcctggggatgtgctgcagccgatgacccgctaggtgagctgcgagcgagcgccccgtgggctggatcctctggtggccgggttcaggtgacgcagccaccccttcccttcaccctgctctcctgcttcggtgtagccacgccttcacacacggcgcagcaagagctcctccacgcctatcgaaagggctggaactggcagatgaacatagaaaccttcctgacacagaaactgcaacgcggcctcgtgtgggagactggcagacgcctgtgcatgaacagaggggaagggaggrggtaaatgaggcacagaggttgcacaagcttcgttttcttaggaaaccgggataagaaatgccccctaagcattgacttcagacgcttattcaagataactgtagagatctgagctgtttgcccaggagggaaatggcctttagcttttcacagcctccttcacatg

SEQ ID NO: 62645 - DNA, 600 bp, Chicken  19866894324903_1
gcgcaccaaagcagcaccatctggctttctcaggccagttctgctgcagaatggctccgtcctctaaacttacgggatgtgaagaacggcaagagagcaatcttggccaatttgttgcaaaaaagctgctttagaaatacgaggatgagccagttttccttcaataggccacattatatcttccaaatgcacaagcagtattgatgttggcacggagaccaagagcacgttggtcttccaagagtagatttccattttatatagctggaaatctaccctgccgaatcagaagtggggggraaaaaaggtacctgaatgcaggtggaaacatgcgyaatgtctctgcaatcaccatgtccaggtaagggagctcctgtacattttgataatcggtgatcatctgaaaaagcaggaagaaaggaacagttgcattttctcacactggcgtgccaaactcatcccagattagcttttaaatcatctatttttcattgggcatttttcctgtagaactcgaagtctcatctaaaagactaaacgataaaattatacaaaaatgtgggcagtaattaaatgtgtgtataacattcctttcatcat

SEQ ID NO: 62646 - DNA, 600 bp, Chicken  19866894324903_2
cagttctgctgcagaatggctccgtcctctaaacttacgggatgtgaagaacggcaagagagcaatcttggccaatttgttgcaaaaaagctgctttagaaatacgaggatgagccagttttccttcaataggccacattatatcttccaaatgcacaagcagtattgatgttggcacggagaccaagagcacgttggtcttccaagagtagatttccattttatatagctggaaatctaccctgccgaatcagaagtggggggaaaaaaaggtacctgaatgcaggtggaaacatgcgyaatgtctctgcaatcaccatgtccaggtaagggagctcctgtacattttgataatcggtgatcatctgaaaaagcaggaagaaaggaacagttgcattttctcacactggcgtgccaaactcatcccagattagcttttaaatcatctatttttcattgggcatttttcctgtagaactcgaagtctcatctaaaagactaaacgataaaattatacaaaaatgtgggcagtaattaaatgtgtgtataacattcctttcatcatcaaaacactttggtgtgcagcccagctkwagatat

SEQ ID NO: 62647 - DNA, 600 bp, Chicken  19866894324903_3
catgcgyaatgtctctgcaatcaccatgtccaggtaagggagctcctgtacattttgataatcggtgatcatctgaaaaagcaggaagaaaggaacagttgcattttctcacactggcgtgccaaactcatcccagattagcttttaaatcatctatttttcattgggcatttttcctgtagaactcgaagtctcatctaaaagactaaacgataaaattatacaaaaatgtgggcagtaattaaatgtgtgtataacattcctttcatcatcaaaacactttggtgtgcagcccagctkwagatataataataaatcaacttgctagcgagtatttaaaatagggcattgtggaaagcaataatagctccagcagtcatattgttttattcatgcactgagatccgcactggacctccattcccttccaagaccagcagtgtggcaaagcactttcttcctaagaaacaacacatcagttattttttgttgatattggagccaacgctttgccctttcccaaagtgccagagccctgaaaggtctgtggaggggtgggagatggcaccaggacaccgagcaggtgtgaaatccattcct

SEQ ID NO: 62648 - DNA, 600 bp, Chicken  19866894324903_4
atgcgyaatgtctctgcaatcaccatgtccaggtaagggagctcctgtacattttgataatcggtgatcatctgaaaaagcaggaagaaaggaacagttgcattttctcacactggcgtgccaaactcatcccagattagcttttaaatcatctatttttcattgggcatttttcctgtagaactcgaagtctcatctaaaagactaaacgataaaattatacaaaaatgtgggcagtaattaaatgtgtgtataacattcctttcatcatcaaaacactttggtgtgcagcccagctkwagatataataataaatcaacttgctagcgagtatttaaaatagggcattgtggaaagcaataatagctccagcagtcatattgttttattcatgcactgagatccgcactggacctccattcccttccaagaccagcagtgtggcaaagcactttcttcctaagaaacaacacatcagttattttttgttgatattggagccaacgctttgccctttcccaaagtgccagagccctgaaaggtctgtggaggggtgggagatggcaccaggacaccgagcaggtgtgaaatccattcctt

SEQ ID NO: 62649 - DNA, 600 bp, Chicken  19866894324905_1
gtaggactatgaatctgcggctgacacttctcttggaatcactttgacatatcacaagatacaaagcagccattgggtaaaaaggtatttgtttgtaattattgaagaaatcatgcatgaatatatatgtatgcaagggatgaaattttctaaaactggtctctggatgcagtgcaggacttcacacaccattctgcatgcataagttgtcccattaaaccaaaacattcctttctgagtgaaacaagtgcttaacgatttgctgttggtgatcttagtttcaaaagtatagagatattwaaaagtatcaaaaaggcagtggaaactaatctagcttttttggtttctgaaatccagctgttttgctaaacagtcacatcttggttcccagctttaagaatgacctttggggcacatttttcttaacatgcgtggtgagaatatttatatgccatataaaaccatgcttttactaagtatgaactcaagtactccacagtggatgactcacttttgaaagctttcactgcaaagaagggaatctcagatcaaataagagagacaaaaaattatttggcctgtggactttaattattacct

SEQ ID NO: 62650 - DNA, 600 bp, Chicken  19866894324906_1
gttaaggtcttgaaaatagcagtggaagatcacagaattatagaatatgctgagtaggaaggggtctaaaaggatcttcgagtccaactcttggctcaacacaaatcctatgtgtgagagaattgtctaaatgcttcatgaactccagcaagcctggtactgggccagcttccctagattctgttcctaagctgtcgtcttatccttgggaaagctgttgaaaaccagcgatttatttgatgtctccgtggtttgtctgtcagttcatgagctgtccttaaagacctactatcaggagcwytacatggagatgcaaatgagcgcgagaagtgtcccttctttctctgttgagtttaattctacacataagagaggtaaagcaggctctgcagagccacagaggaggctttgagccacttgcccctataagataattgcatgaaagatgcttcggtttcatctgatgcatgactggaagagccttctagtttagggacatagactagtgcacactaatactttgtttgaaagattagaaagagatgaaagagtcctcattgtgtttttcctatcattaaattagctgaggcttaacaaaat

SEQ ID NO: 62651 - DNA, 600 bp, Chicken  19866894324906_2
ttaaggtcttgaaaatagcagtggaagatcacagaattatagaatatgctgagtaggaaggggtctaaaaggatcttcgagtccaactcttggctcaacacaaatcctatgtgtgagagaattgtctaaatgcttcatgaactccagcaagcctggtactgggccagcttccctagattctgttcctaagctgtcgtcttatccttgggaaagctgttgaaaaccagcgatttatttgatgtctccgtggtttgtctgtcagttcatgagctgtccttaaagacctactatcaggagcwytacatggagatgcaaatgagcgcgagaagtgtcccttctttctctgttgagtttaattctacacataagagaggtaaagcaggctctgcagagccacagaggaggctttgagccacttgcccctataagataattgcatgaaagatgcttcggtttcatctgatgcatgactggaagagccttctagtttagggacatagactagtgcacactaatactttgtttgaaagattagaaagagatgaaagagtcctcattgtgtttttcctatcattaaattagctgaggcttaacaaaata

SEQ ID NO: 62652 - DNA, 599 bp, Chicken  19866894324910_1
  misc_feature (1)..(50): n is any nucleotide
nnnnnnnnnnnnnnnnnnnnnnnnnnnnnnnnnnnnnnnnnnnnnnnnnnccctaacttgagagaagctatatagccttcagttatcctatataatgtaagaatatgtcacattgggtagtgtggattaagagatgtatgcctcttgttttattatgttggcccacgatgttagaggcagatgttggtggtagggcagtagagactgaactttccagacagtattccattacatgttgttgtcatgtgatagatggcagcagaggggcagtctgacaaattggtgtctgacatggaagtrtggatgaaacaaaggggtggaattaaattcctccatgaagaaaaaatggcacctattgatattcatcaacacctgctgaatgtttatggagagcaaacagtggatgtgagcacactaaggcagtgggtggttcatttcagcagtggcagcagcaacatgaaactgaaatacaggcaattatcttcttagaagatagcaacttccatgagctctgacaggggtttggagttgaggtagtccacggaagagatactgactgaaaatttattagtgaggatgtgctgcagagcaagtttttt

SEQ ID NO: 62653 - DNA, 600 bp, Chicken  19866894324912_1
aatattttagtgctaatctggacaaatgattatctcttatgaaatcattttgcaaaggaattagctctggagatgtcccagtgcaaataaggaaaaaaattgctactattaaccaggactgttttgcagataaacaagcaggagatgtagatattctaagaaggaagacatacacattaacaaataattatttaaatgtcaatctctttgaatacttccttgaggacagctcttaaaaactgtgattatgagggtagatctaccttctaaaagtatgaaatattttattatcagttgtgmttccttactagcattaccatcaataattgttgtggtttaacccaggaagtggctaagcaccatacagtcttttgctcactcccctcacactcttcccagtgggactggggagagaacagaaaataaataaataaaataaagtaaaactcatgggttgagataaaactatttactaagatagagaaaaggaaaatgataatataaatgattatatatatatatgaatgtatataacaagtgatacacaagcaattcttcactatgcccaaaccaatgcccagctagtcctccaagcagtgg

SEQ ID NO: 62654 - DNA, 600 bp, Chicken  19866894324915_1
tatgaggtttgcttatatatatagaaagaacatcgcgtacctccacagctaacacctcttctacagtggggaaaggcagcgtgtcggaaggactgtttgcatcctgtcgctgttgcataatgatcccctcgaggagcactcgcaggagcacacccatgacagcaggacccggagtggcagatgtgagcagctgggtgggatgcagctccagctgcacttgcctcttgcttcagctacgtgcaggaattagagaaagccattaagtccttcattacatattttgtcctcagcaaaatgagygccgtgcagatgcagctggtgggtatcgtggcaccaaactgctgattcttactgcagctcagcagaagctctcactgtcacctcagctttccgaatgcacagtccactggctgcatctctaatttgtgttatagccaggggggacaacaactaggagaggggtggagtcccttcgtatgtcctaaagtgagaagtgggtttcactcaggcggagatgagggaaatagcaaataagcatttggatactgtgcagttcgaaccatctgttgccatctggagccattggttaggagacctctg

SEQ ID NO: 62655 - DNA, 600 bp, Chicken  19866894324917_1
cctcctctggtacaacttgtggccattttcttaggtcttctttgttgcctgcgagaagaggccaaaaccctcctcatcacgacctcccttcaaaaagttgtagagtgcaataaggtctcccctgaacttcctcttctccaggcaaaacaatcccagctccctcagctgctcctcataagacttgtgctccagaactctcaccagttctgttgcccttctctggacatgttccagggcctcgctgtctctcttgtagtgaggggcccaaaactaaacacagtacttgaggtgcggcctcaycagtgctgagtagaggggggatgattacctccccgctcctgctggccacactatttgtaatgcagtccaggatgctgttggtcctcttggccacctgggcacactgtcgactcatgctcagccaagcatcaaccaacacccccaggtccctttcctcttcacagtcatccagccactcagccccaagcctatagcactgcatggggttattgtggcaaaagtgcaggacccggcacttggccttgttgaacctcatcccattcacctcagcccagtgatccagcttatctagatccctct

SEQ ID NO: 62656 - DNA, 600 bp, Chicken  19866894324920_1
aatctcgtaaatatgaaacagcaaaaaaaattgaatttatagttaaaacatggatttgaataacaaattcatatttttgtctttgtttttggttaagaactgaaataattaatttaagaaagtcatctatttgaaactattaaaaatcttttcctttaggaatagttttcggtcttttattagagagaagcattaagggatttgtggaactaatatctgctaattcttaacaagaaaaaatatatttcacacaaatgtgacaaatcatgtgagatttatattatgtcctaattgtttggkttttttttctccccagagaccttttgggagaataccagtaagaatgcaggataaaaatgggataaatgaaaatcttcactgcctcaactgccagctacaaagagattctgaaatctatattgtcatttacattgggtgtaacaaagctatgtcaccttgcatgccgggaaataattgtagtgtcatttaatgttgccaaaggattatatatggaatacctatcatctaagggatggttatcaaaatagatttaacattatkaaagttgcacttctttatattttccacttatttggactg

SEQ ID NO: 62657 - DNA, 600 bp, Chicken  19866894324920_2
aaatcatgtgagatttatattatgtcctaattgtttggkttttttttctccccagagaccttttgggagaataccagtaagaatgcaggataaaaatgggataaatgaaaatcttcactgcctcaactgccagctacaaagagattctgaaatctatattgtcatttacattgggtgtaacaaagctatgtcaccttgcatgccgggaaataattgtagtgtcatttaatgttgccaaaggattatatatggaatacctatcatctaagggatggttatcaaaatagatttaacattatkaaagttgcacttctttatattttccacttatttggactgaaatagctccatttatatttacttatgaaattatttttctaaaaattgacttatgcacgcaaatgtttcaatcaccagttattatctaggggctggcagctgcaaatgtctgaaaagtgaatatccctgttgatacctttgttataaaaaggctaagctttaagaatattaaacaatagccttaaataaatttttttcaagcttcttttctgttgacttttcatctgtatatcccttttttctgtttccactccattttaa

SEQ ID NO: 62658 - DNA, 599 bp, Chicken  19866894324922_1
  misc_feature (1)..(54): n is any nucleotide
nnnnnnnnnnnnnnnnnnnnnnnnnnnnnnnnnnnnnnnnnnnnnnnnnnnnnntcctatctagtatttctgttttgagaaaatcttaagcaaaatccaaatttctcttttctaagctgtagatacatagcttatgttcagaacggactctgcaaggacaagagtttttcttgtttctacagcagtacaagtcaaagttgaaattgcatgagtggatcacaaactgctgtttttcttcagacacttcagctgcgtgaagtcatgcggatttatttccacggtgttgatgacatgctacartggtacagaagattatgtttgcatcttcattgtctctcttatgccacattgcagaaactsaagcaattgtttatggcaagtctgggtgtagcrtcttgaacagagcgtatagaactgatggctcycagaaatctgagtgcttgcattctgtatggaaagcttggctccatgcagaatttccaaatgggcaagagctcttccatgtgttcttcagaaagagatgtaaatagcatccctgaaaaagctaatgatgcgctaacctaacatataaagtttgtggagttgcctttaaatatgct

SEQ ID NO: 62659 - DNA, 600 bp, Chicken  19866894324922_2
ctagtatttctgttttgagaaaatcttaagcaaaatccaaatttctcttttctaagctgtagatacatagcttatgttcagaacggactctgcaaggacaagagtttttcttgtttctacagcagtacaagtcaaagttgaaattgcatgagtggatcacaaactgctgtttttcttcagacacttcagctgcgtgaagtcatgcggatttatttccacggtgttgatgacatgctacartggtacagaagattatgtttgcatcttcattgtctctcttatgccacattgcagaaactsaagcaattgtttatggcaagtctgggtgtagcrtcttgaacagagcgtatagaactgatggctcycagaaatctgagtgcttgcattctgtatggaaagcttggctccatgcagaatttccaaatgggcaagagctcttccatgtgttcttcagaaagagatgtaaatagcatccctgaaaaagctaatgatgcgctaacctaacatataaagtttgtggagttgcctttaaatatgctaaagacattatggcttgagaaagaaattagtgtctggcaaattatgggtttgcatgtaaag

SEQ ID NO: 62660 - DNA, 600 bp, Chicken  19866894324922_3
aatccaaatttctcttttctaagctgtagatacatagcttatgttcagaacggactctgcaaggacaagagtttttcttgtttctacagcagtacaagtcaaagttgaaattgcatgagtggatcacaaactgctgtttttcttcagacacttcagctgcgtgaagtcatgcggatttatttccacggtgttgatgacatgctacartggtacagaagattatgtttgcatcttcattgtctctcttatgccacattgcagaaactsaagcaattgtttatggcaagtctgggtgtagcrtcttgaacagagcgtatagaactgatggctcycagaaatctgagtgcttgcattctgtatggaaagcttggctccatgcagaatttccaaatgggcaagagctcttccatgtgttcttcagaaagagatgtaaatagcatccctgaaaaagctaatgatgcgctaacctaacatataaagtttgtggagttgcctttaaatatgctaaagacattatggcttgagaaagaaattagtgtctggcaaattatgggtttgcatgtaaagaacaacggtgtcttaaacataaagtagacttct

SEQ ID NO: 62661 - DNA, 600 bp, Chicken  19866894324922_4
catagcttatgttcagaacggactctgcaaggacaagagtttttcttgtttctacagcagtacaagtcaaagttgaaattgcatgagtggatcacaaactgctgtttttcttcagacacttcagctgcgtgaagtcatgcggatttatttccacggtgttgatgacatgctacartggtacagaagattatgtttgcatcttcattgtctctcttatgccacattgcagaaactsaagcaattgtttatggcaagtctgggtgtagcrtcttgaacagagcgtatagaactgatggctcycagaaatctgagtgcttgcattctgtatggaaagcttggctccatgcagaatttccaaatgggcaagagctcttccatgtgttcttcagaaagagatgtaaatagcatccctgaaaaagctaatgatgcgctaacctaacatataaagtttgtggagttgcctttaaatatgctaaagacattatggcttgagaaagaaattagtgtctggcaaattatgggtttgcatgtaaagaacaacggtgtcttaaacataaagtagacttctgggaaaatccaagctgtgcacatttgtacact

SEQ ID NO: 62662 - DNA, 600 bp, Chicken  19866894324922_5
tccaaatgggcaagagctcttccatgtgttcttcagaaagagatgtaaatagcatccctgaaaaagctaatgatgcgctaacctaacatataaagtttgtggagttgcctttaaatatgctaaagacattatggcttgagaaagaaattagtgtctggcaaattatgggtttgcatgtaaagaacaacggtgtcttaaacataaagtagacttctgggaaaatccaagctgtgcacatttgtacactgcaaatgctgcaatgaggggagagtgaaaatgccccggagcatatctggaaaygtcaaatgaaaagatgaggagtaagcacagaggacgatagtgcaggggagtacagtgtggagcattcttgagacttagaacaagcaaacagagagagctgtgattaatttccatcacaattattttcttgctgttacaagacagaatttagrccrcattctcgtctcagggcactgtagtgtgaatctgaaagtacaattaacccaggtttgagaatggctttctggacaaattcatagtccttccactcctatactagcatctctgtttctcagatacggagtctcagagtaagcagag

SEQ ID NO: 62663 - DNA, 600 bp, Chicken  19866894324922_6
gtctggcaaattatgggtttgcatgtaaagaacaacggtgtcttaaacataaagtagacttctgggaaaatccaagctgtgcacatttgtacactgcaaatgctgcaatgaggggagagtgaaaatgccccggagcatatctggaaaygtcaaatgaaaagatgaggagtaagcacagaggacgatagtgcaggggagtacagtgtggagcattcttgagacttagaacaagcaaacagagagagctgtgattaatttccatcacaattattttcttgctgttacaagacagaatttagrccrcattctcgtctcagggcactgtagtgtgaatctgaaagtacaattaacccaggtttgagaatggctttctggacaaattcatagtccttccactcctatactagcatctctgtttctcagatacggagtctcagagtaagcagagaggaatgcttttcttggtcaaggaaagttttcctggacagagaagagtgaaggcatcagtccagtttccatcagaattgccctttcattggtactttttatcttacttggggcatgacatattccaagaagcaattggacaaactggttaaa

SEQ ID NO: 62664 - DNA, 600 bp, Chicken  19866894324922_7
tggcaaattatgggtttgcatgtaaagaacaacggtgtcttaaacataaagtagacttctgggaaaatccaagctgtgcacatttgtacactgcaaatgctgcaatgaggggagagtgaaaatgccccggagcatatctggaaaygtcaaatgaaaagatgaggagtaagcacagaggacgatagtgcaggggagtacagtgtggagcattcttgagacttagaacaagcaaacagagagagctgtgattaatttccatcacaattattttcttgctgttacaagacagaatttagrccrcattctcgtctcagggcactgtagtgtgaatctgaaagtacaattaacccaggtttgagaatggctttctggacaaattcatagtccttccactcctatactagcatctctgtttctcagatacggagtctcagagtaagcagagaggaatgcttttcttggtcaaggaaagttttcctggacagagaagagtgaaggcatcagtccagtttccatcagaattgccctttcattggtactttttatcttacttggggcatgacatattccaagaagcaattggacaaactggttaaaaat

SEQ ID NO: 62665 - DNA, 600 bp, Chicken  19866894324922_8
ttttggtagtggaatctgattaagaattattgggcttataataaagtttactatttgagagacactattaaaggtaaaattgaattttctctgtaaggtttatatgatcgtgtttattaaagttgctttccctagggtgacttacgttttgtttaagtaaaatacataaaacgttaagtactggtctggctgggttaagccagttatacgttagggtcctttcctgtcatcattacttttttacgaagatcaaaagtttctgcattggagtgaatgcctgtgttcaagaaaactttctastcgcagtgagtcagagtggaagtggaatagttttgccactcttttaataccagcggtgcttcagaacattgtgctgtatgaatgtaaagctgagtaattttggaagaagttgcaartatgcatgctgagttccagatgaaataattttttatgttggtatcgagtaggtcttgtgcaagtataaaaatagcaaacatattaagcatttctaagttactccagcctaccacgtaaagattttctgagttctttgaaaacaagtcaagtgaacaaacacgatgtctaaattctgagctgttt

SEQ ID NO: 62666 - DNA, 600 bp, Chicken  19866894324922_9
ttaaagttgctttccctagggtgacttacgttttgtttaagtaaaatacataaaacgttaagtactggtctggctgggttaagccagttatacgttagggtcctttcctgtcatcattacttttttacgaagatcaaaagtttctgcattggagtgaatgcctgtgttcaagaaaactttctastcgcagtgagtcagagtggaagtggaatagttttgccactcttttaataccagcggtgcttcagaacattgtgctgtatgaatgtaaagctgagtaattttggaagaagttgcaartatgcatgctgagttccagatgaaataattttttatgttggtatcgagtaggtcttgtgcaagtataaaaatagcaaacatattaagcatttctaagttactccagcctaccacgtaaagattttctgagttctttgaaaacaagtcaagtgaacaaacacgatgtctaaattctgagctgtttttaagtttgtaagtttctttttttaagtccctgattgatttttctatttaagaaaaaaaggaaaccaaaatccgtgttaaattgtttgctctcctcgggcttgagctcttgaatcc

SEQ ID NO: 62667 - DNA, 599 bp, Chicken  19866894324926_1
  misc_feature (1)..(28): n is any nucleotide
nnnnnnnnnnnnnnnnnnnnnnnnnnnnacgttgatgcattttcataggaataaataataccgatttgctaggaacgactgtgttagggaaccaacacagaaatgagcagcctctggttttgcactcgtgaaatggagaaaaaagagatttaaaaatgagagattccaatctcaactagccaacaaggctctgaagaaagcaagaaaaagaatttaagaaaccgttccgaggcattcagctccctgcagccagcccgttgttttgcttgtctccagagaggggaggtgcaagtgcctccrtgcygagtaggctgagctctccccaccaccctgacaataccccacatcccacagctggccacgctgcggccttctgggtgcctccagtacttctaagtgttttcactgaaaaatcagagtaacaatgcgatgtgtgtgctgagagcttggggatggagagcggtagaaggcagaagattttttttcccttcaacttgagtgacatttcaagcatctctttgcaaccgcagagctaagctttgcttcaaagagaaaggaagcaatcgttatttaatcccctgcctccaggagccaggtac

SEQ ID NO: 62668 - DNA, 599 bp, Chicken  19866894324926_2
  misc_feature (1)..(24): n is any nucleotide
nnnnnnnnnnnnnnnnnnnnnnnnacgttgatgcattttcataggaataaataataccgatttgctaggaacgactgtgttagggaaccaacacagaaatgagcagcctctggttttgcactcgtgaaatggagaaaaaagagatttaaaaatgagagattccaatctcaactagccaacaaggctctgaagaaagcaagaaaaagaatttaagaaaccgttccgaggcattcagctccctgcagccagcccgttgttttgcttgtctccagagaggggaggtgcaagtgcctccrtgcygagtaggctgagctctccccaccaccctgacaataccccacatcccacagctggccacgctgcggccttctgggtgcctccagtacttctaagtgttttcactgaaaaatcagagtaacaatgcgatgtgtgtgctgagagcttggggatggagagcggtagaaggcagaagattttttttcccttcaacttgagtgacatttcaagcatctctttgcaaccgcagagctaagctttgcttcaaagagaaaggaagcaatcgttatttaatcccctgcctccaggagccaggtacttag

SEQ ID NO: 62669 - DNA, 583 bp, Chicken  19866894324929_1
aacgcagtgaatcccatgcttttgggacagtgtgcatttgctgtgtattcaccacacaactgcatcacacagggcaagagcagagcttcctggtcaggtttccggcacacgtgttggacaataggtcagcacaggtcttggggacgtgtccaggttttccaaacatgcagccgtcccattcaagctacagtataatcttcagaaatctatgcaagcaatttttttcatggtcagaaaaagaaaccccctagaaaacatgcatacagggtagccttgagtgagagcctcgaacacaatgtraaacatttgcccaagctgccgaggagaaatgccagcaactctcagctctgragtttttaagactggacaaacatgtatcagagtgaagagggacagcctaaaccagatccttcccagccttacattcctgtgattctctgcaaggaaggactggtatgacactgccctggcacaaggagcagcaagcacagtctgttctctgctctgcagcctgctctcctgcaccagcctcttgctgggaccagtgcaaaacccagggcagacgccatgctcagcccaacag

SEQ ID NO: 62670 - DNA, 532 bp, Chicken  19866894324929_2
ccacacaactgcatcacacagggcaagagcagagcttcctggtcaggtttccggcacacgtgttggacaataggtcagcacaggtcttggggacgtgtccaggttttccaaacatgcagccgtcccattcaagctacagtataatcttcagaaatctatgcaagcaatttttttcatggtcagaaaaagaaaccccctagaaaacatgcatacagggtagccttgagtgagagcctcgaacacaatgtraaacatttgcccaagctgccgaggagaaatgccagcaactctcagctctgragtttttaagactggacaaacatgtatcagagtgaagagggacagcctaaaccagatccttcccagccttacattcctgtgattctctgcaaggaaggactggtatgacactgccctggcacaaggagcagcaagcacagtctgttctctgctctgcagcctgctctcctgcaccagcctcttgctgggaccagtgcaaaacccagggcagacgccatgctcagcccaacag

SEQ ID NO: 62671 - DNA, 523 bp, Chicken  19866894324930_1
ggtggattcagcgtccctggaggtgttcaaaaaatgttctgatgttgtactaaggtacatggtttaatggggaaatactggtaggtggatagctggtctagatgatcttggaggtcttttccaaccttaatgattctatgattctgtgaaatctaggagagctaaacatattagcacacctgaaatactaggaaaatacatttgttaatactgttccctagatttagaactgttatttcttgcattttgttgttactgcctagcacatttttataagcattccttactcttttgccccartaaaaatgtgatcagagaaaacaccacagtttttgcatctcctttcaaagtgtagccataccatgcaagtgcagttcttacaaccatctgtccaggattcaaattctctgtatgtcatgcctttcattgtgcaggtcctttcacaatagcactgatccaacttggtcatcctctgctcagcttgcgacagctgtatttacgggtcacaaaaagattgggaatt

SEQ ID NO: 62672 - DNA, 600 bp, Chicken  19866894324931_1
ggggaccccatttttcaataatacaagcaatcccgtgatatggggatcctaggaatcccgggatgtgccctggcaaaacttcacttatggggctagcctttccccgtccaaaccatcccatgaaattgttcaaaaatgtcatggtaattattttaagaggcttataattgggtatctttaaagatatttggctgcctggctcgccaaaatgtagagcaaatgaaggtaatgacaaagcctttatttaagaaataggcacacgagggaaagatatcaaaaagaatcgactcacccctccckgtagcagcgcgcaggcagagccgagctgaggaatgtgtccctcccccgttcgtacckccgcgccgccgcactcacacactcacagagcccacccattggttcaggctgtgaccctggaattccactacatatacacattacgttcttaaacaccagaagatattcagccagtcaagttcgattatacaaccaattatgagaaagcttcctacattgccaatctactgcacaagaacacataattttatagcaaatactgttttctcatttagctatgtgcattcaccttgaatatgattc

SEQ ID NO: 62673 - DNA, 600 bp, Chicken  19866894324931_2
ccgggatgtgccctggcaaaacttcacttatggggctagcctttccccgtccaaaccatcccatgaaattgttcaaaaatgtcatggtaattattttaagaggcttataattgggtatctttaaagatatttggctgcctggctcgccaaaatgtagagcaaatgaaggtaatgacaaagcctttatttaagaaataggcacacgagggaaagatatcaaaaagaatcgactcacccctccckgtagcagcgcgcaggcagagccgagctgaggaatgtgtccctcccccgttcgtacckccgcgccgccgcactcacacactcacagagcccacccattggttcaggctgtgaccctggaattccactacatatacacattacgttcttaaacaccagaagatattcagccagtcaagttcgattatacaaccaattatgagaaagcttcctacattgccaatctactgcacaagaacacataattttatagcaaatactgttttctcatttagctatgtgcattcaccttgaatatgattctgtgatctgggattaaagattccctctcttgtaagaaagactacactacctactata

SEQ ID NO: 62674 - DNA, 600 bp, Chicken  19866894324939_1
gcagcggtgccacaacaaacaaagggccctttgatcctttccatttggagaacttaaaacaagaaagcaaaactacaataagaccaagttgggtcataaaaagggaagcggggagaaggagcaccaaagcgtgccggagtgtaattgcagaagcagcaaatgctttggcacttaattctgctttagtgtcagttcagcgtttcgtgtttaatactggagaggccatcgccaaatgctctgcacaaacaatccagtgctgctcggtgtgtttgtggtacttggagagaccctggcttgaaygcacctccctgagctctgctgccttccgctgcccatgggctgcaagtccaggttttatgagcagttccacggcagaggtgtcccttcctggctctgggctgactgctgctgctcaagccctgtgtggtacaggtacttgctgccccggtgctggcaatgctcccacgcatcccgagctgctcrcagcagtcagtcaccgacgtgctctgccgaagcctctgctgccctgcctgccttgctgcccttccactcccttctttgcaggccttgggtgatgctcgagagctgtttgcagaaggt

SEQ ID NO: 62675 - DNA, 578 bp, Chicken  19866894324939_2
tagtgtcagttcagcgtttcgtgtttaatactggagaggccatcgccaaatgctctgcacaaacaatccagtgctgctcggtgtgtttgtggtacttggagagaccctggcttgaaygcacctccctgagctctgctgccttccgctgcccatgggctgcaagtccaggttttatgagcagttccacggcagaggtgtcccttcctggctctgggctgactgctgctgctcaagccctgtgtggtacaggtacttgctgccccggtgctggcaatgctcccacgcatcccgagctgctcrcagcagtcagtcaccgacgtgctctgccgaagcctctgctgccctgcctgccttgctgcccttccactcccttctttgcaggccttgggtgatgctcgagagctgtttgcagaaggtagattgcaggttgggtattttataggttcatcacgaggctggctaacaactgccgtatctaacagctactagggatgaattaaataaaaagaaaagctctgaatggtttctctggcaagaactgaggtctcaggaaagccatttctcttctctttccggcg

SEQ ID NO: 62676 - DNA, 600 bp, Chicken  19866894324941_1
tcttctgtagagtgcagcgtgtgaatataacagtgccagcattagagggaaattctcagcagtcctttgaaataattgttgtgctcggcgggggcacctctcacctgggggtggtgtgagaacccagcacggcgctcgggaaatgcctgcctgtgtgcagaggaggagggagggatgcagaaagggcccatttgcagggtttttccctgcagaatgctgggtgcacgttgccctttggaaacctcaggcaggggggttaccccgatctcagtggtaaggctgagtcttgcccagcaggcrctcccgggccataccagaggtgctccacacggtctgttgtttgytcctmaccgcagcccatcaccgtgcatttggtcaccgcagccttatccaagagctcctgatgtcagcgtggcttggaggggaggggaagcgcttgaacataagcttagctaacagcagcttaacacagcattactggcggggcttaatttgtgccctgatctttgcaaacagagaaacctttcagctgtggaggcatctctccccgtgcagcgtcgttatccgcgccgtttgtgcgagcttattgttgctgtaaaa

SEQ ID NO: 62677 - DNA, 600 bp, Chicken  19866894324941_2
gagggaaattctcagcagtcctttgaaataattgttgtgctcggcgggggcacctctcacctgggggtggtgtgagaacccagcacggcgctcgggaaatgcctgcctgtgtgcagaggaggagggagggatgcagaaagggcccatttgcagggtttttccctgcagaatgctgggtgcacgttgccctttggaaacctcaggcaggggggttaccccgatctcagtggtaaggctgagtcttgcccagcaggcrctcccgggccataccagaggtgctccacacggtctgttgtttgytcctmaccgcagcccatcaccgtgcatttggtcaccgcagccttatccaagagctcctgatgtcagcgtggcttggaggggaggggaagcgcttgaacataagcttagctaacagcagcttaacacagcattactggcggggcttaatttgtgccctgatctttgcaaacagagaaacctttcagctgtggaggcatctctccccgtgcagcgtcgttatccgcgccgtttgtgcgagcttattgttgctgtaaaagctgaggaagtttggatttgccggtgcccactgagcaagatttg

SEQ ID NO: 62678 - DNA, 600 bp, Chicken  19866894324941_3
aaattctcagcagtcctttgaaataattgttgtgctcggcgggggcacctctcacctgggggtggtgtgagaacccagcacggcgctcgggaaatgcctgcctgtgtgcagaggaggagggagggatgcagaaagggcccatttgcagggtttttccctgcagaatgctgggtgcacgttgccctttggaaacctcaggcaggggggttaccccgatctcagtggtaaggctgagtcttgcccagcaggcrctcccgggccataccagaggtgctccacacggtctgttgtttgytcctmaccgcagcccatcaccgtgcatttggtcaccgcagccttatccaagagctcctgatgtcagcgtggcttggaggggaggggaagcgcttgaacataagcttagctaacagcagcttaacacagcattactggcggggcttaatttgtgccctgatctttgcaaacagagaaacctttcagctgtggaggcatctctccccgtgcagcgtcgttatccgcgccgtttgtgcgagcttattgttgctgtaaaagctgaggaagtttggatttgccggtgcccactgagcaagatttgtgaag

SEQ ID NO: 62679 - DNA, 600 bp, Chicken  19866894324946_1
gcttgtttagcttggagaagagaaggctctggggagacctcattgtgcccttccagtacttgaagggagcatataaacaggaaggggaacgtcggtttacgagggtggatagtgacaggacaagggggaatggttttaaactgggacaggagaggtttaggttggatattaggaggaagattttcacacagagggtggtgacgcactggaacaggttgcccaaggaggctgtggatgccccatccctggaggcattcaaggccaggctggatgtggctctgggcagcctggtctggtggytggtgaccctgcacatagcaggggggttgaaacttgatgatcattgtggtccttttcaacccaggccattctatgattctrtgaagattttattaaaaggagtctttatgaactgatgagggaatcaggggacagtttagtaattagccataactttgcttgctctgtattactgatcatttccacaaggatgaaaagtaagtaagttactaaaggttttactttttagtttttggtttttttttctctatctcatcaagtcaaaaatttttggtaaaagctacttccatcagatcaaca

SEQ ID NO: 62680 - DNA, 600 bp, Chicken  19866894324946_2
aaggggaacgtcggtttacgagggtggatagtgacaggacaagggggaatggttttaaactgggacaggagaggtttaggttggatattaggaggaagattttcacacagagggtggtgacgcactggaacaggttgcccaaggaggctgtggatgccccatccctggaggcattcaaggccaggctggatgtggctctgggcagcctggtctggtggytggtgaccctgcacatagcaggggggttgaaacttgatgatcattgtggtccttttcaacccaggccattctatgattctrtgaagattttattaaaaggagtctttatgaactgatgagggaatcaggggacagtttagtaattagccataactttgcttgctctgtattactgatcatttccacaaggatgaaaagtaagtaagttactaaaggttttactttttagtttttggtttttttttctctatctcatcaagtcaaaaatttttggtaaaagctacttccatcagatcaacaaaaaatatgtacagaaataaaagcacaagcaagtggtgtgagatcccacaaaccatcaatggctgctctcatsgtctgtgt

SEQ ID NO: 62681 - DNA, 495 bp, Chicken  19866894324946_3
tgattctrtgaagattttattaaaaggagtctttatgaactgatgagggaatcaggggacagtttagtaattagccataactttgcttgctctgtattactgatcatttccacaaggatgaaaagtaagtaagttactaaaggttttactttttagtttttggtttttttttctctatctcatcaagtcaaaaatttttggtaaaagctacttccatcagatcaacaaaaaatatgtacagaaataaaagcacaagcaagtggtgtgagatcccacaaaccatcaatggctgctctcatsgtctgtgtagagacagctcctagaaaatacgggtacaactgactctgtaggacaaacgggatacaaaggacactgcagtcagtgggaaagcaatcacacacacacgcccttgtgtgctgcacatgtgcgtctgtatgcacatctgtacttcagggatatagaaaagcatccatgtatctacaagtgccttgcatg

SEQ ID NO: 62682 - DNA, 599 bp, Chicken  19866894324951_1
  misc_feature (1)..(56): n is any nucleotide
nnnnnnnnnnnnnnnnnnnnnnnnnnnnnnnnnnnnnnnnnnnnnnnnnnnnnnnnctttatcagtcactagagaacggtctggaacaagctggggagcatgtgtttatcagactgataaggacctgctgggtgaagttacaaagcagaggggaaaacatctccctctgaggagactgattaaaaagaaaatacaaaagaatccccgtgcacctctgccccagcacaacgaacaggtcagtgccagctctgcaaagagatcctctagagagcagcgtggatgttggctcttctgaagacraaatggatgggatccagttgcagcagtgcttttaacaaagtattgtggcagataatgtacataaaggaccactaaaggctgctaatgcactcagccaaacgccagcatcccctcatgtttagattgatatgcactcacaaatacaggaacaagcccagacacacacattttatcataaatatccgccgctgtgctttggctccctgctaagaacaataccttcatttattcttttgaaaaacgtggtcaagttaaagacaatgtttttgccacggagtggtgggttttgcctttattgt

SEQ ID NO: 62683 - DNA, 600 bp, Chicken  19866894324951_2
cagtgcttttaacaaagtattgtggcagataatgtacataaaggaccactaaaggctgctaatgcactcagccaaacgccagcatcccctcatgtttagattgatatgcactcacaaatacaggaacaagcccagacacacacattttatcataaatatccgccgctgtgctttggctccctgctaagaacaataccttcatttattcttttgaaaaacgtggtcaagttaaagacaatgtttttgccacggagtggtgggttttgcctttattgtttcaataatgtgacacttgcctcrtttatcatcagcctgaaaaggttagataggattttctaccttatggcttcatctctccaaacttccttgctgctgcagcactgaagataaaccatatggaagacactacaaaggggaagggtgagctaccctgtcttagaaagaattcctggttgccttcaacattttcactcgagtcctttcagaagctactttgtggaggggcctagccccaaaccaaccaccatgcaggagccaactgggacagtgtcaacaatgagtcacaaaaaaaccaccatccagacagaggacatttcagca

SEQ ID NO: 62684 - DNA, 600 bp, Chicken  19866894324955_1
ttggtttacttcctcttcttgatcattcagtccataatagactccaaccacgatgccatctgtttccatttgtgttttgatctttagcaataagatcttaacagagccttcagctgtctgcatacattcaagccactccttcacctattgtaggtcttcctttccatcttctccagtttttctaaagtgcctgaatccagctgtgtaataccattctaccatctctttttaatattgaaagatcatagttttggagctgtgaacatactgttactttcttaggctttttatttttccgcragctgcatgcatttgcatacagacacttgtgatagtctcttagtcatgctactttcacaacagcagtaggtgaattttgcactatgctaaacacyggggagcattttctgacttgtctccacatgtgctcaggctgtcattaccatcctcagttgaacacagtttaaagccctcctcactaggttagcaagcctgttgtcaaggaagttatgtccttctttccatcttgccaccccctttttctcccctaagtctttattattaagaaatcatagaatccttagaataggaagggacttt

SEQ ID NO: 62685 - DNA, 600 bp, Chicken  19866894324955_2
tcttaacagagccttcagctgtctgcatacattcaagccactccttcacctattgtaggtcttcctttccatcttctccagtttttctaaagtgcctgaatccagctgtgtaataccattctaccatctctttttaatattgaaagatcatagttttggagctgtgaacatactgttactttcttaggctttttatttttccgcragctgcatgcatttgcatacagacacttgtgatagtctcttagtcatgctactttcacaacagcagtaggtgaattttgcactatgctaaacacyggggagcattttctgacttgtctccacatgtgctcaggctgtcattaccatcctcagttgaacacagtttaaagccctcctcactaggttagcaagcctgttgtcaaggaagttatgtccttctttccatcttgccaccccctttttctcccctaagtctttattattaagaaatcatagaatccttagaataggaagggacttttaaaggtcacctagtccaactcccctgtaatgaacagtgacgccacagttagatcaggttgcccagggcctgatccagcctcactttgaaagtct

SEQ ID NO: 62686 - DNA, 599 bp, Chicken  19866894324967_1
  misc_feature (1)..(45): n is any nucleotide
nnnnnnnnnnnnnnnnnnnnnnnnnnnnnnnnnnnnnnnnnnnnnttataatttagcaatgcattgttgtttgcccaatcttctgactgtagaaaagacaaaagaacaaatgaatgttgtcagacagactgacattttaaatagatatctttcaattttctgttcactgagacctctctccatagctatactaacttcaattagtagtagttagatgccaacaaataggacttggatctggacctagctttttcttatacttgcagagagatcagacagtacactattttattgtttccratttctgtatgccaagacaaaagaaatggaaaacaatgaaactatcaatatttggaaaggatgagttttgagcaggaaaagcaattgaacttttgactgtcactgtactttattttgcatgaaaaagcatgttgttaattagctacctgaaaataaactcagttaaaatgaaaagtaacttacagtgaactcacattctccatcaggagaaccttgattcagtggctcaaatatggagagacagcaactgaaggcattctaagatatgtgacatgttgatgtgaaactggcagaggtca

SEQ ID NO: 62687 - DNA, 600 bp, Chicken  19866894324978_1
ataattaaatcatatccctccattattacctccgggttgtaaccattcccttctgtctccattaggctagtacccaattgctcacatttttcctcactggcagtaattgtttcacgcagagagtccagctgttagaccataatatcattgtcccaatctatcatatgcaatgacttctggaaagttaaatcacttctgaagcctacaatgaggagatatctaaagataactttgcacgtactggaaaagatgctctcagtgatagaagtgctatttattctcattttcagcactcccaamagctagtttcacaaaatcctatgggggaaaaaaaaagcatcaagtttcaatttgtaaaaacatggtggttttttgttgttgttgttgttgcactcactgaaattaatatcttgctgtgttttatctgcagaaaaatattacctcttttactgcaggaggtaaaattttcagggtttgctgaagccactcagccacactgtaacttgctttatggtgcagagtcaaaatgatgcctaattttgtactttttgacttcagacatgacacgtggaaagctcttcattttgacctgctttgata

SEQ ID NO: 62688 - DNA, 600 bp, Chicken  19866894324979_1
atcagtttttcagagaacaccttgaattctctgtaagcagggagagaagatggaagctataatgacaactgtgataccgtttggcagaccatacaatttatttccttgataaccctcgcagttcttttaatatgacttgattcattgttcctctgctttccaaacaaaggagaaactaggtcagtgggctatcagacaagctgttggaagggatctgtgagagcattgtgtgcagtaaaatccctgtgcaacactaagacaatagaaggtatctgatccttcatggtacttaaaactgtrtccatacaaaccattaacatttacattgtagctgggtttgaagacttcagttctcaccttgcaaggctctaaacggttcaactgccttgatattttagtcaccctttcttttttttccttttttttttttccccagacatctgaacaagagactaaaggtcttcccagcaaaaaggggattgtgcaatctatagtaggtcaaggctaccaccgtaagatagtcctagcatcccagtcaatacagaatgtcgtttataagtaagtatgttttccatgggcctgtattttgtcatcataact

SEQ ID NO: 62689 - DNA, 582 bp, Chicken  19866894324980_1
cccaccacaagtagaggactgtgggcaacaagtgaaactgagcgtgccttgaaagctattctctcttttgcaaaagcacaccggctggatgttaagctaactgaggaaggtagcatatttctggaactctttgaggcatggaaaaaggaatataaggtacagtaaatgagatggcaaagaaacagttatattgttcattttatacaatataaacaaatttaagctgtggatggataattatctaagctgtgctcctgaaagtctttctcctcaaagcatttttgtggtgcttattatacrgtttgatttaatgatttatatatgatttaaggatttttaagagagccatactggtagctaagcaatttagtgtaagccctttcgttgtttccattaggacagtgtacacagatataataaaatgcttttttatatttagttaaatcagactgtagtgagactcacaaatcaaacgttggtcagttctttaattcagtttaacttcagtcttctgctacttacagatatcccttcactattgcttattttcctcgatgttgtttaccaaacaatattatctaa

SEQ ID NO: 62690 - DNA, 599 bp, Chicken  19866894324983_1
  misc_feature (1)..(86): n is any nucleotide
nnnnnnnnnnnnnnnnnnnnnnnnnnnnnnnnnnnnnnnnnnnnnnnnnnnnnnnnnnnnnnnnnnnnnnnnnnnnnnnnnnnnnntagaagtcggtggcttgcaatcgattagtgcattttttcctcactgggcctgaagcaacgcattgacctcaaagtgctctgacatgctaacaaaacaaatgagcagctacaactgtgaaccaaagtttctatcaattcatgtatttattttctggtatagttaaagagtatgaaaatttgattttctcaagcaagtcaggagtgcgacactcastcccaacctgaatttctgaaggtctcagcttctggagaagtgctcaaccagcctacaaaacctttacagacctgctytgtgaaagtgccacaatcctgcacacagcagaacccagaaaacacaaaaggggatcagaatctgtgtatttcaaggaaaaagaaaatgatggcagtcattccctctgcgtgaatgtgagggagctctgayagcaatgaaatgggaagttacaagaagtgcakgtagttcaggggcagcagagccctcagactgccattccaggaattttgttctccttccca

SEQ ID NO: 62691 - DNA, 599 bp, Chicken  19866894324983_2
  misc_feature (1)..(9): n is any nucleotide
nnnnnnnnntagaagtcggtggcttgcaatcgattagtgcattttttcctcactgggcctgaagcaacgcattgacctcaaagtgctctgacatgctaacaaaacaaatgagcagctacaactgtgaaccaaagtttctatcaattcatgtatttattttctggtatagttaaagagtatgaaaatttgattttctcaagcaagtcaggagtgcgacactcastcccaacctgaatttctgaaggtctcagcttctggagaagtgctcaaccagcctacaaaacctttacagacctgctytgtgaaagtgccacaatcctgcacacagcagaacccagaaaacacaaaaggggatcagaatctgtgtatttcaaggaaaaagaaaatgatggcagtcattccctctgcgtgaatgtgagggagctctgayagcaatgaaatgggaagttacaagaagtgcakgtagttcaggggcagcagagccctcagactgccattccaggaattttgttctccttcccactggcaaatatgttttgcattgaacgcgtatatggagaggaaccaggcccaaaacatttgtagggcagatgtccaga

SEQ ID NO: 62692 - DNA, 600 bp, Chicken  19866894324983_3
aaagtttctatcaattcatgtatttattttctggtatagttaaagagtatgaaaatttgattttctcaagcaagtcaggagtgcgacactcastcccaacctgaatttctgaaggtctcagcttctggagaagtgctcaaccagcctacaaaacctttacagacctgctytgtgaaagtgccacaatcctgcacacagcagaacccagaaaacacaaaaggggatcagaatctgtgtatttcaaggaaaaagaaaatgatggcagtcattccctctgcgtgaatgtgagggagctctgayagcaatgaaatgggaagttacaagaagtgcakgtagttcaggggcagcagagccctcagactgccattccaggaattttgttctccttcccactggcaaatatgttttgcattgaacgcgtatatggagaggaaccaggcccaaaacatttgtagggcagatgtccagagaccaagttacactacagcctctcagagcatacactgccttcatttctcatgtggcacacatccagtcttgcaacaggactctaaaacaggacatggaagggattctgtactaaaagtccatgagagacta

SEQ ID NO: 62693 - DNA, 600 bp, Chicken  19866894324983_4
ggtatagttaaagagtatgaaaatttgattttctcaagcaagtcaggagtgcgacactcastcccaacctgaatttctgaaggtctcagcttctggagaagtgctcaaccagcctacaaaacctttacagacctgctytgtgaaagtgccacaatcctgcacacagcagaacccagaaaacacaaaaggggatcagaatctgtgtatttcaaggaaaaagaaaatgatggcagtcattccctctgcgtgaatgtgagggagctctgayagcaatgaaatgggaagttacaagaagtgcakgtagttcaggggcagcagagccctcagactgccattccaggaattttgttctccttcccactggcaaatatgttttgcattgaacgcgtatatggagaggaaccaggcccaaaacatttgtagggcagatgtccagagaccaagttacactacagcctctcagagcatacactgccttcatttctcatgtggcacacatccagtcttgcaacaggactctaaaacaggacatggaagggattctgtactaaaagtccatgagagactagcagatgaaaatacatatacagcatgcacaat

SEQ ID NO: 62694 - DNA, 599 bp, Chicken  19866894324984_1
  misc_feature (1)..(135): n is any nucleotide
nnnnnnnnnnnnnnnnnnnnnnnnnnnnnnnnnnnnnnnnnnnnnnnnnnnnnnnnnnnnnnnnnnnnnnnnnnnnnnnnnnnnnnnnnnnnnnnnnnnnnnnnnnnnnnnnnnnnnnnnnnnnnnnnnnnnnnntgacaccttggcaggtcttcccgttccagcagcgtaatccttccacttcagcagctctgggggcacctctgggagggaatgctgcatctgcatgtcctttggtaagccctaactctgaatgagacctctttgcgtgcggaacagatctttcagaggaacaaaccratcacgcaactgaaarcccttctcataatccattaccttacctatccccatccaagttttttactggtccttttcaaagscacagaaatatagaaaatatttgcatacagatgrgaagaccccatgtgttgctccttctctttccacctacccctcaaagcaatgctttgcataaacacacacatatataaactatgacttactcctttttttcaagcccaggaccaagatcagcagctagaaacccagcatctatgctggcattaagagaacagcatgaccatatgtacacttgatac

SEQ ID NO: 62695 - DNA, 599 bp, Chicken  19866894324984_2
  misc_feature (1)..(119): n is any nucleotide
nnnnnnnnnnnnnnnnnnnnnnnnnnnnnnnnnnnnnnnnnnnnnnnnnnnnnnnnnnnnnnnnnnnnnnnnnnnnnnnnnnnnnnnnnnnnnnnnnnnnnnnnnnnnnnnnnnnnnnntgacaccttggcaggtcttcccgttccagcagcgtaatccttccacttcagcagctctgggggcacctctgggagggaatgctgcatctgcatgtcctttggtaagccctaactctgaatgagacctctttgcgtgcggaacagatctttcagaggaacaaaccratcacgcaactgaaarcccttctcataatccattaccttacctatccccatccaagttttttactggtccttttcaaagscacagaaatatagaaaatatttgcatacagatgrgaagaccccatgtgttgctccttctctttccacctacccctcaaagcaatgctttgcataaacacacacatatataaactatgacttactcctttttttcaagcccaggaccaagatcagcagctagaaacccagcatctatgctggcattaagagaacagcatgaccatatgtacacttgatacttttaaatacatatac

SEQ ID NO: 62696 - DNA, 599 bp, Chicken  19866894324984_3
  misc_feature (1)..(55): n is any nucleotide
nnnnnnnnnnnnnnnnnnnnnnnnnnnnnnnnnnnnnnnnnnnnnnnnnnnnnnntgacaccttggcaggtcttcccgttccagcagcgtaatccttccacttcagcagctctgggggcacctctgggagggaatgctgcatctgcatgtcctttggtaagccctaactctgaatgagacctctttgcgtgcggaacagatctttcagaggaacaaaccratcacgcaactgaaarcccttctcataatccattaccttacctatccccatccaagttttttactggtccttttcaaagscacagaaatatagaaaatatttgcatacagatgrgaagaccccatgtgttgctccttctctttccacctacccctcaaagcaatgctttgcataaacacacacatatataaactatgacttactcctttttttcaagcccaggaccaagatcagcagctagaaacccagcatctatgctggcattaagagaacagcatgaccatatgtacacttgatacttttaaatacatatacctgtctgtgctgttatgtcctataaaacgtacgctgcttttttgctgtggtttatgtttcactg

SEQ ID NO: 62697 - DNA, 599 bp, Chicken  19866894324984_4
  misc_feature (1)..(21): n is any nucleotide
nnnnnnnnnnnnnnnnnnnnntgacaccttggcaggtcttcccgttccagcagcgtaatccttccacttcagcagctctgggggcacctctgggagggaatgctgcatctgcatgtcctttggtaagccctaactctgaatgagacctctttgcgtgcggaacagatctttcagaggaacaaaccratcacgcaactgaaarcccttctcataatccattaccttacctatccccatccaagttttttactggtccttttcaaagscacagaaatatagaaaatatttgcatacagatgrgaagaccccatgtgttgctccttctctttccacctacccctcaaagcaatgctttgcataaacacacacatatataaactatgacttactcctttttttcaagcccaggaccaagatcagcagctagaaacccagcatctatgctggcattaagagaacagcatgaccatatgtacacttgatacttttaaatacatatacctgtctgtgctgttatgtcctataaaacgtacgctgcttttttgctgtggtttatgtttcactgtaaagttggtattgctgccttcaattaagatttt

SEQ ID NO: 62698 - DNA, 590 bp, Chicken  19866894324984_5
agtgcatgccttggtgctcatctgtaactactcaggtcattcttaaggctgctcttctcttctgcctgtgtgtctgggcaatattttcagacagagtaattcctactaaaggccattaatttcctgccttgagggccaacagtgatgatggactttgactggggatgctgtcttacccaaaactgcatcacaagagcactggggactctccagccttggaggagcacatgtgactgttcctttctatggctgagttttgagacctgtgaatgggaaagacttggagacctgctacgcacrcagggctctatctacttaaaactatagacagtgtagaaacagtggggctctgacttgtgccacagggtctgtgttatgaaaatacaagccatggctgcatcattttacacctcccatcctcacaagatggagataccagctacaatactgagcatactgggatacaaagctgacaggagatgtgcagcaggcagttaaattcaagcagccatgtgtcaagtgctgccttacccctgtgtgatgggggatgaatctggtatcaacatcctgaagagcatcagttggatctg

SEQ ID NO: 62699 - DNA, 600 bp, Chicken  19866894324985_1
cctcagttctatagtatactaacactatggtcccagtgcagtgaccacagtgaactggacttcatactttgcaataaaatggcctctacacagacctttcagtagacttaaatttggcctcttgctgttcatggagccaggcttagcatagctgagcctgtttcaaaatccttccacagctgaaactgaaggatgccttcgctaccttccaatatctctcctaatgagaaaatctgacctacagcatagccacatgaactactgaaccgctgcaggtgagaaggaagcaatccttgaagrgracaagaggggcaacaggagggtaaaggagggagataagagcctactctgaaaacagttaagccacaaaaggattgctaacagagtgccttgcattactgaatctatgctgcaaacacatactgtcaggcttcaaaaggagaatcacatatacccacaacgtgaaagcagaaacatgcaggggaacatcatagagtaactataccagtagagagtcctgccaatttccaaatcaacttgagtccctgctctcagtcttctacggatgccaaaataacattttccaatgaatttctggtt

SEQ ID NO: 62700 - DNA, 600 bp, Chicken  19866894324985_2
tcagttctatagtatactaacactatggtcccagtgcagtgaccacagtgaactggacttcatactttgcaataaaatggcctctacacagacctttcagtagacttaaatttggcctcttgctgttcatggagccaggcttagcatagctgagcctgtttcaaaatccttccacagctgaaactgaaggatgccttcgctaccttccaatatctctcctaatgagaaaatctgacctacagcatagccacatgaactactgaaccgctgcaggtgagaaggaagcaatccttgaagrgracaagaggggcaacaggagggtaaaggagggagataagagcctactctgaaaacagttaagccacaaaaggattgctaacagagtgccttgcattactgaatctatgctgcaaacacatactgtcaggcttcaaaaggagaatcacatatacccacaacgtgaaagcagaaacatgcaggggaacatcatagagtaactataccagtagagagtcctgccaatttccaaatcaacttgagtccctgctctcagtcttctacggatgccaaaataacattttccaatgaatttctggttaa

SEQ ID NO: 62701 - DNA, 600 bp, Chicken  19866894324992_1
cttttacaaacttactctatttctgatcgactgcaagttttggtcttgataaagcagtaatgctaatgtggccaaagtggagtaagctagtgtttctgcagtgtgcagtgcttgaggccaggcagcccttgtctgcagtagtccaaagatcttcacacctgagctcgtaaaacctgtaaaatcttcccactgaattctgtttttgagtgacctctaaggatgaaaatatatttattttagaatctgtagttagcctgacagagtctggcaaaacagagcccatcactgtacaacaaatgrgaagaaaaggataaaatacctcggrggggggaatatatcagataataaatcgatctttcctttcagcctgattttcttcaaatgttagagcctcaatcattcgtgttttttatgaactttcttttccctgcagagtacttgccatgactcccttttgataccaacaaagatttaatagcagtcactgttgcaagtcattactaagttctcatttgtattaccaaatatgctacaccacaattattagtaattaaaatcaaattaggtacatcaatttaattcatcatcttgtcagtgcct

SEQ ID NO: 62702 - DNA, 600 bp, Chicken  19866894324992_2
atcgactgcaagttttggtcttgataaagcagtaatgctaatgtggccaaagtggagtaagctagtgtttctgcagtgtgcagtgcttgaggccaggcagcccttgtctgcagtagtccaaagatcttcacacctgagctcgtaaaacctgtaaaatcttcccactgaattctgtttttgagtgacctctaaggatgaaaatatatttattttagaatctgtagttagcctgacagagtctggcaaaacagagcccatcactgtacaacaaatgrgaagaaaaggataaaatacctcggrggggggaatatatcagataataaatcgatctttcctttcagcctgattttcttcaaatgttagagcctcaatcattcgtgttttttatgaactttcttttccctgcagagtacttgccatgactcccttttgataccaacaaagatttaatagcagtcactgttgcaagtcattactaagttctcatttgtattaccaaatatgctacaccacaattattagtaattaaaatcaaattaggtacatcaatttaattcatcatcttgtcagtgcctgtttgcttgcttgttcaaaaatgca

SEQ ID NO: 62703 - DNA, 600 bp, Chicken  19866894324992_3
tcttgtcagtgcctgtttgcttgcttgttcaaaaatgcagtaatttttaaatggtgtctcattaattagtgtgaatttagcagctttcttctgtcttgtactttgagctaaatttttgcactgacatacatgtgtagcggcccatctggtcccagtccttcttttgtgcctgtggttcacagcacggtcattctttatgttcagtgctgtagaagattgtctctatagcaatattttcactttcccttttttccagtttttaaaaattccctgccagcctgtgcacttgttttaaaagaratactatgcagctgataaactatgtataatgttgtgaataaggcaacttcttctcagaggtatttgaaataagcttttaaggtgcaacgtagacttcaagcacttcagcagaactagacctgtggtaaatgcaagtcgtatgatagaatgctgctctgtgcaactagatgctctgacccatgaacacactcatatttggctgtggcatttgaagggatttggagatgggagctgcctgtactgctctggagttgatgccagagttggaactgaattttaagtgagggtaaggttcaaaca

SEQ ID NO: 62704 - DNA, 599 bp, Chicken  19866894324997_1
  misc_feature (1)..(87): n is any nucleotide
nnnnnnnnnnnnnnnnnnnnnnnnnnnnnnnnnnnnnnnnnnnnnnnnnnnnnnnnnnnnnnnnnnnnnnnnnnnnnnnnnnnnnnncttgttactctgttctgcagcctctatttgcacctgtattttgttatatagaggcttaaaaatgtgataccaccctgaatgaaacagacatgatcacttttgtgagtcatctcaataagaactatgtctatataactacttcttcatacatctctgtagttggtgtggggcaatggtgaggcaacgtatctgtccaggttcatttagcaggamtttatgtgaacctcacatttatttgtagtgagtcagtcatctgtacttttaagaatttattcattcagtacagtaattcatcaacactttttcctgtcactgggattttcctaatatatatttgtgtaactgccagcaccaaagattactcctgaaataaaagatcatcccatttcattgcagaaagaattaaaacatcaaagtttgctagtgggttcagtatattcgtatgttaatttttcatgcctgacagaaatgccttcgtaggtcagaattttgaatcttttccagaagggaac

SEQ ID NO: 62705 - DNA, 600 bp, Chicken  19866894324998_1
cagcccttgacagctcctcttcctcatcacttgcacctcaacccagcagcaccctttctgctcccccaagcactgctgaaccaacaggaaacaacacacacatacagcgagtacctatccccctggtgttcgcaaggacgtttagtgagcacgggaacttgttcaagacacctccccataaggggaagggacacagctctcactgcaatttacaagcaccccaaaggactccgcacagcggcaaggtgccaaaaacacaacagcgggccagacagagcaataaacacagagcagagatgygaggccctggcagccttcccgcagcacagcgcagagaggaggccaggcagggaggagggatttggtgccgggggaagcagctgccgtgctggtgccgacccttgggttgcttccaaccgccctgactcagcggtcccggccgggcacgccggtcactcacctgccacggggctggagaggttatccagggtgcactccttgtcccagccataatagagccgcttccgcacccgctcgctcagctgctggtgccggggtaggaactgcgagcagacgggaagaagttcagtgaagccctga

SEQ ID NO: 62706 - DNA, 600 bp, Chicken  19866894325000_1
tttctacatctttctttcttcctttttttttccctgtgggttttctattgtttttctcttttctcttgtcttactatttctcacgtttctttttcctaaggcttccagtactgctccatctcagttcttcccaacgtagcagtgcagatttacaactcctttcttttcccatgacactgcttacagtcacaggactttttgtgccagcctttttgtgccagattccacagccattctccccaccactcctgaatgagtctcggttgccattcccttgaggactaaactagattgggattyattaaaccctgagccctctgtttgaatgatatacagcctcaagcagtaggcaccaaggcaaatgatgctgcttctttgtaaaagcacagtaaaccatgctacagagtgcattgccccaggcattcctaaactatcttgtcctgtgtcagcaagatgctttaagaactctctatagagctttcactgctccatttttcctctgctcccaccctgtgcatttcaatacagtaaggcaaagattttgtccttaattgaaattcctttcatcagcccagatatagcctgaacaaagatactgac

SEQ ID NO: 62707 - DNA, 599 bp, Chicken  19866894325001_1
  misc_feature (1)..(41): n is any nucleotide
nnnnnnnnnnnnnnnnnnnnnnnnnnnnnnnnnnnnnnnnntatgggacagtaatagatggcagagagcacctggtggggccgggttggccagggagcccatacattgcatggggctgacagcgagccctgcagcttcaggctgcacggcagcacccgctgcttggtggccaactgctgtctgaccacagctcagctcagcgtaccggtacaagatgaagatcgctacaagaaagccagtggtaccacggggtgcatgcacggagctgctccgggccgggggcaccgctgcagtgcgggkctccgcagctccgggcggatgggaaccgctgggagagtccggaggagggagcggagatgggggggacacgtggagcaccgccctgtgggacgggctgagagccccgggctgcgcgtgtggggacagaaggccgaggggatccgtgcggcgctggtccgtatctgtagggcggggtgcggatggggccgggctccgttctgtggtgcccagcgccgggacaaggggcagcaggcgcagactggagccagagatccgtgtggccgcgaggaagagctctgcgctgtgagggtggcgctgag

SEQ ID NO: 62708 - DNA, 524 bp, Chicken  19866894325001_2
gctccgggcggatgggaaccgctgggagagtccggaggagggagcggagatgggggggacacgtggagcaccgccctgtgggacgggctgagagccccgggctgcgcgtgtggggacagaaggccgaggggatccgtgcggcgctggtccgtatctgtagggcggggtgcggatggggccgggctccgttctgtggtgcccagcgccgggacaaggggcagcaggcgcagactggagccagagatccgtgtggccgcgaggaagagctctgcgctgtgagggtggcgctgagcccagagrggtgggggagtctcctctgcacagatccaaacccgcctgcgtgctttgtgtgcagctgctgtggggaactgccctaacgtggggttggcccgggggagctccagaggtcccatccaaccccatcggttcagggattctgtctttccccccctaacggctggctggtttccaggcgggacgcaggccctgagccgcagggagctgtgggcctccaggagggtctt

SEQ ID NO: 62709 - DNA, 600 bp, Chicken  19866894325004_1
gttttgcttgcctcttgatcattcctgcatgcagaacactctgcagtgatgtcccaatctgtttcctgagtggttacattgacatgggaaagaagcaatctacctctgaccacgcattgatctgcattttcagtgcaaaaatctcaagctgttgtgctgatcacccaactggaattattaagaaccttctgaatttttcctatctaaatagtgcagtgtcttttgtacatcttgctatctcattattcattcttttttcttaacaagaatcactaatgcactttatttctgtggcactgscacaagatttatgtagactcttcagcaggattgtctccacattttgcgtgagcaggggttttcattttgttatgaattggactggtttaattcatattttgaattgttattacacaaagataaatagaacaaagtccattctgagagaaaggcaactgaagctgggattatcataccgtttcttgaccactactatgtaygagtcagagatgacctgaactttcctccctcatcttagaaaaagaaacatgaaccaaaagtcagccatgcattttaatcaaattgccctgattatctggt

SEQ ID NO: 62710 - DNA, 435 bp, Chicken  19866894325004_2
tatctaaatagtgcagtgtcttttgtacatcttgctatctcattattcattcttttttcttaacaagaatcactaatgcactttatttctgtggcactgscacaagatttatgtagactcttcagcaggattgtctccacattttgcgtgagcaggggttttcattttgttatgaattggactggtttaattcatattttgaattgttattacacaaagataaatagaacaaagtccattctgagagaaaggcaactgaagctgggattatcataccgtttcttgaccactactatgtaygagtcagagatgacctgaactttcctccctcatcttagaaaaagaaacatgaaccaaaagtcagccatgcattttaatcaaattgccctgattatctggtatggatctaaaggagggaggtttaaatagctctta

SEQ ID NO: 62711 - DNA, 599 bp, Chicken  19866894325005_1
  misc_feature (1)..(64): n is any nucleotide
nnnnnnnnnnnnnnnnnnnnnnnnnnnnnnnnnnnnnnnnnnnnnnnnnnnnnnnnnnnnnnnngtcttcagaggaaatcttgaatcaaacagattcactttttaaaaggtttttaaaagactaattatgtgtagtggggtgacaactttgtgctggtttttgttcagctgatcaaccattccccctctaacaccattcccactgttaaacctgggttgggattcttttcatattttgaatgctggcttctggagcacagctcccagttcacagcgagtgctttcagtgcacgattgacygaaaggtaaattcattttgactgcgctggatttactggcacagggtcgcttgagccatctgttttaattagtttagggggcttgggaagttattagttacctctgcrtgtagttatcatgaattaagctttcattttccaccttgctttggtctgactgtagtgtttttatgtgccaacagcataaagtttgaaatcctcatacctgctgaacacttcaaccagagttcttcctatctgactgcaaagggtagtgctgaacctggctaccaaaacccagctgctgctgtctgcataggt

SEQ ID NO: 62712 - DNA, 600 bp, Chicken  19866894325005_2
aggtttttaaaagactaattatgtgtagtggggtgacaactttgtgctggtttttgttcagctgatcaaccattccccctctaacaccattcccactgttaaacctgggttgggattcttttcatattttgaatgctggcttctggagcacagctcccagttcacagcgagtgctttcagtgcacgattgacygaaaggtaaattcattttgactgcgctggatttactggcacagggtcgcttgagccatctgttttaattagtttagggggcttgggaagttattagttacctctgcrtgtagttatcatgaattaagctttcattttccaccttgctttggtctgactgtagtgtttttatgtgccaacagcataaagtttgaaatcctcatacctgctgaacacttcaaccagagttcttcctatctgactgcaaagggtagtgctgaacctggctaccaaaacccagctgctgctgtctgcataggtgcttcttgattccaccatgctgtagctctcctctagcaataccagcgttaggaaaacctgctgttgagctttttactggtgtcgtgacaatctgctccagcacgttgg

SEQ ID NO: 62713 - DNA, 600 bp, Chicken  19866894325006_1
accaccatttacatgaccgatccttatggcccaccagacattactcactgtaagtggctactgcaattcattttcgataagagatcagttcatcatatgattgtgtttttttcatagcttgtctaaagtatcctattaatggttatgaagcagcttggaaaactacaaaaaatgaaatgtttattgctacttaagtgtgctatgtttacaaaatattgtaaatagtgcaactcaactaaagtatatttgcagcaaaagtagaagtatatataatgtattgctgtgctgactcaaataagscattgtccaagtgatcagattaatctgatcttgtgacaattgcagtgacaaatatatgcaaatgtattttgaaatatggttagatttgtagactggaatactctgtccaatgaaaaatcagtacaaacagcaaaatatccaaacaaaattagtgaaaagcttgagaaaaatgaatagatatttgcctgaaatatttatttggaatgtaaaatcatttctctatctgcataaatctgccttttttccatgtatatccacttcctatattccactttgcatcattgtcagtctgtccattaa

SEQ ID NO: 62714 - DNA, 600 bp, Chicken  19866894325010_1
tgcatgaacatcacctgtgtgaccagagtttgtcatttgtcctccaggcccagcagtggccactggtattttttcttgcacaagtacatgcctctccagtttcagattccttttctaaggacttcagaagattcttgtttatactttagattgtaacgattaattttagctctctccaactggttgctttcttttcttttttttcttttaagctgaagttttgcaactcaagcattcctctttcattaggtcgacttcacttggagctgccaaactgcagtgctagttcactgcggttcwttgtaaggagtcagccagtatgcttaagctcatcaccatcttcactggaagtcatcagcagtggtttagtgtttcttgagtggctactgctctgcactgttactgtaaactgtatcacaaggggaaattctgtttgacatctcctgaattaygtgctttttattctgaagagcttatagattgctgctggaagtgaatgcttctgatgtgggcagaatcctagaaattctcttctacatatctgttggtttacaggcaaaatattctctgattgagatacaaagaagcaaaaataccaat

SEQ ID NO: 62715 - DNA, 600 bp, Chicken  19866894325010_2
gtaacgattaattttagctctctccaactggttgctttcttttcttttttttcttttaagctgaagttttgcaactcaagcattcctctttcattaggtcgacttcacttggagctgccaaactgcagtgctagttcactgcggttcwttgtaaggagtcagccagtatgcttaagctcatcaccatcttcactggaagtcatcagcagtggtttagtgtttcttgagtggctactgctctgcactgttactgtaaactgtatcacaaggggaaattctgtttgacatctcctgaattaygtgctttttattctgaagagcttatagattgctgctggaagtgaatgcttctgatgtgggcagaatcctagaaattctcttctacatatctgttggtttacaggcaaaatattctctgattgagatacaaagaagcaaaaataccaatatactgactccatatttttcaatctttacgtaggtacttcctttccccagccaggtggtctacaacagagttggaaagtgtgggagtagaactgtggttttgcttttgagaattttatcagagaaacatggattcaacctggtaacatctga

SEQ ID NO: 62716 - DNA, 600 bp, Chicken  19866894325011_1
gtagtcaacacaaattgttctaggctacagcaccttctcacgaagcagatgcatatctgacatcaagaacagaagtagcctggaaggaaggaggaagagaaaaaaaaaaatgttgagttcacaaatgaatacacataggctttttcttttatcttcaaattttaccccccatactgaaagcaacaagacagccaaacctggcacatggggaaaatcacagcagcttcccattctgtaccacaccaggattaagaccagacctgagagtgtctcacctccccacttcaaagggagggaggyaaaaaaaagaaaaagaggaacttgctatgaaaacacaccaaaggggaaagcccagaaaagtcagagggctgacgaagcttttgttaagctggggccaggcagacaacacatgccagaggagacagcacttgaggcactgcagcattaggccagcaayatcatctcctgcccacccaagcagcttgtgaaagaagtgctcttgagagcaggccaggaatgcccctcctagcccaaagagatcgcttacgtgataatccaagtcacactcctcatgcccagagccactctggcaggcagcag

SEQ ID NO: 62717 - DNA, 600 bp, Chicken  19866894325011_2
aattttaccccccatactgaaagcaacaagacagccaaacctggcacatggggaaaatcacagcagcttcccattctgtaccacaccaggattaagaccagacctgagagtgtctcacctccccacttcaaagggagggaggaaaaaaaaagaaaaagaggaacttgctatgaaaacacaccaaaggggaaagcccagaaaagtcagagggctgacgaagcttttgttaagctggggccaggcagacaacacatgccagaggagacagcacttgaggcactgcagcattaggccagcaayatcatctcctgcccacccaagcagcttgtgaaagaagtgctcttgagagcaggccaggaatgcccctcctagcccaaagagatcgcttacgtgataatccaagtcacactcctcatgcccagagccactctggcaggcagcagtgagccagctccttgcagcactgtgcttacgttacctctgaaggcaggagctctacactgagaggcaaaatttatgtctgatatactcagagagctcagtgggcattagaactccaccgtgggacaaccttgtgcccctaactctggcgttgctaca

SEQ ID NO: 62718 - DNA, 600 bp, Chicken  19866894325013_1
gctgtggtttggtctgtaagtcagagcacagatcctgaagcatcagacaaccacagaaaactgtttatttaacaatgggacacattctgtttcccagagaaatatgttcaaatgtaatgaagaattggtttcttctactttcccttttggcaaaatacctaattaatggtccatcctagtgtgagttcactgactacgaggaatctccttccctccatgctgacatagtttagtagggatatctgagcaggagttttaagatatgtgcatctcatgtccagttccttagatgttgctttrtattctgtttcatgccaagagacaggtgctactttcaacattttgacacaggctttccaaaggggmacccaaaaacagagggtaacagattcaccaagagagacccatcagaaattccctctgatctcattcagtccttggatgctgagagaagcaggaaaatcaagctatcatttcaggtatcacaacatagctttgggagcatacattttagattccagttctaaaaacccacatccttacaatttataacttatcacttattttttcataaagatagatagtatatttggaacccaa

SEQ ID NO: 62719 - DNA, 600 bp, Chicken  19866894325013_2
atttaacaatgggacacattctgtttcccagagaaatatgttcaaatgtaatgaagaattggtttcttctactttcccttttggcaaaatacctaattaatggtccatcctagtgtgagttcactgactacgaggaatctccttccctccatgctgacatagtttagtagggatatctgagcaggagttttaagatatgtgcatctcatgtccagttccttagatgttgctttrtattctgtttcatgccaagagacaggtgctactttcaacattttgacacaggctttccaaaggggmacccaaaaacagagggtaacagattcaccaagagagacccatcagaaattccctctgatctcattcagtccttggatgctgagagaagcaggaaaatcaagctatcatttcaggtatcacaacatagctttgggagcatacattttagattccagttctaaaaacccacatccttacaatttataacttatcacttattttttcataaagatagatagtatatttggaacccaaaacctccaaatactcctacattcaaatataaaaccatttccaaatcaaagagtgcagaactgaaac

SEQ ID NO: 62720 - DNA, 599 bp, Chicken  19866894325014_1
  misc_feature (1)..(201): n is any nucleotide
nnnnnnnnnnnnnnnnnnnnnnnnnnnnnnnnnnnnnnnnnnnnnnnnnnnnnnnnnnnnnnnnnnnnnnnnnnnnnnnnnnnnnnnnnnnnnnnnnnnnnnnnnnnnnnnnnnnnnnnnnnnnnnnnnnnnnnnnnnnnnnnnnnnnnnnnnnnnnnnnnnnnnnnnnnnnnnnnnnnnnnnnnnnnnnnnnnnnnnnnnctgctgttttggcagtggagtaaaactgagaaaatacatagaaatattaaattgctttttttctttttaatatttaatggaatgatactgtcaacatcraattttgcttttaagtagagtgggaatgtttatgagaagtgcttgaagttcactttctctcaaatacaatctagaacgtttgctacactgcagctttggctgattcattcagttaatatttccttactgcttcctgattcagacaaaaatagygattattgtattttaagcgctcattttgtaagctatcacacacrgatatttttttccctttgcatttcagtttacctttttaagtccacagatcttatgcaatgattggagctcatgaaatgcatactactttgatctgtgacctt

SEQ ID NO: 62721 - DNA, 599 bp, Chicken  19866894325014_2
  misc_feature (1)..(48): n is any nucleotide
nnnnnnnnnnnnnnnnnnnnnnnnnnnnnnnnnnnnnnnnnnnnnnnnctgctgttttggcagtggagtaaaactgagaaaatacatagaaatattaaattgctttttttctttttaatatttaatggaatgatactgtcaacatcraattttgcttttaagtagagtgggaatgtttatgagaagtgcttgaagttcactttctctcaaatacaatctagaacgtttgctacactgcagctttggctgattcattcagttaatatttccttactgcttcctgattcagacaaaaatagygattattgtattttaagcgctcattttgtaagctatcacacacrgatatttttttccctttgcatttcagtttacctttttaagtccacagatcttatgcaatgattggagctcatgaaatgcatactactttgatctgtgacctttttgtggtgctaatcgggttcctgatatcattataccttgctcattaatcatatttcctgcagcccgtcagacagccagacagccccagccctgtttgcagccttgtgtkggcaggtttctgcttttccagattattacagtgtgatactttg

SEQ ID NO: 62722 - DNA, 599 bp, Chicken  19866894325014_3
  misc_feature (1)..(4): n is any nucleotide
nnnnctgctgttttggcagtggagtaaaactgagaaaatacatagaaatattaaattgctttttttctttttaatatttaatggaatgatactgtcaacatcraattttgcttttaagtagagtgggaatgtttatgagaagtgcttgaagttcactttctctcaaatacaatctagaacgtttgctacactgcagctttggctgattcattcagttaatatttccttactgcttcctgattcagacaaaaatagygattattgtattttaagcgctcattttgtaagctatcacacacrgatatttttttccctttgcatttcagtttacctttttaagtccacagatcttatgcaatgattggagctcatgaaatgcatactactttgatctgtgacctttttgtggtgctaatcgggttcctgatatcattataccttgctcattaatcatatttcctgcagcccgtcagacagccagacagccccagccctgtttgcagccttgtgtkggcaggtttctgcttttccagattattacagtgtgatactttggcttctcataaccagacccacatcaagctgtgtgctacaattaa

SEQ ID NO: 62723 - DNA, 600 bp, Chicken  19866894325014_4
cagttaatatttccttactgcttcctgattcagacaaaaatagygattattgtattttaagcgctcattttgtaagctatcacacacrgatatttttttccctttgcatttcagtttacctttttaagtccacagatcttatgcaatgattggagctcatgaaatgcatactactttgatctgtgacctttttgtggtgctaatcgggttcctgatatcattataccttgctcattaatcatatttcctgcagcccgtcagacagccagacagccccagccctgtttgcagccttgtgtkggcaggtttctgcttttccagattattacagtgtgatactttggcttctcataaccagacccacatcaagctgtgtgctacaattaaagtcagatggtcctcaggttgaacagggatatactgttgcagctgtctgtctttctggaacagaccagcaccaggaacagatgatatgtaggacagtgcataataacagcttgtacggtactgggtcagtagcaggggtctggaacattaattgacaggctgatagctgatgtaaaactgattcttaatctaatactaattctgtagtgcata

SEQ ID NO: 62724 - DNA, 599 bp, Chicken  19866894325023_1
  misc_feature (1)..(94): n is any nucleotide
nnnnnnnnnnnnnnnnnnnnnnnnnnnnnnnnnnnnnnnnnnnnnnnnnnnnnnnnnnnnnnnnnnnnnnnnnnnnnnnnnnnnnnnnnnnnnnatttttaaagcttttcccagtttataccaaacgtctccacactgattcaactgacagaggaaatttcagtctattggtaaaattagcgtagttgcaagctgtatgcaagtacatagacacacattaaacacattttggaaataagaagttgtttctagttcatcatccctctcaacatggctgtagcaatgctgccaattgtgctkcagtttaatatagatttcctttggaaattaattccacgtgctgatggcttactagttaatgcctacaagttactcatttatctgttttacatttatcaactgtcaatttcacagaataccccccaccttcccatgttatgagacagcaaatagtagttcctcatgtttcctccactcagtagtttccaataactgtcttatgcttctcaaggaaattttacagtgttctaaatctctttttatacaggcctcttaactaggatcrttacacccttacttggtctattttgtttcacaca

SEQ ID NO: 62725 - DNA, 600 bp, Chicken  19866894325023_2
tcaacatggctgtagcaatgctgccaattgtgctkcagtttaatatagatttcctttggaaattaattccacgtgctgatggcttactagttaatgcctacaagttactcatttatctgttttacatttatcaactgtcaatttcacagaataccccccaccttcccatgttatgagacagcaaatagtagttcctcatgtttcctccactcagtagtttccaataactgtcttatgcttctcaaggaaattttacagtgttctaaatctctttttatacaggcctcttaactaggatcrttacacccttacttggtctattttgtttcacacaaagtttgatgaggaatcaaataccttcagtataattgataagctccttgataayagatgatgttgtcaacaccttccttattaatctgttcctttgcagataaaaagtagttgttaggtacagacgtaaacaccgttgttaagatgacacaggacagcttgtatattcactttatctaagtgatctcatgtatttctgtagggctgactgtgttaagggctataatttgggtttggggatctagttttgcaaagaaagcattatta

SEQ ID NO: 62726 - DNA, 513 bp, Chicken  19866894325023_3
agttaatgcctacaagttactcatttatctgttttacatttatcaactgtcaatttcacagaataccccccaccttcccatgttatgagacagcaaatagtagttcctcatgtttcctccactcagtagtttccaataactgtcttatgcttctcaaggaaattttacagtgttctaaatctctttttatacaggcctcttaactaggatcrttacacccttacttggtctattttgtttcacacaaagtttgatgaggaatcaaataccttcagtataattgataagctccttgataayagatgatgttgtcaacaccttccttattaatctgttcctttgcagataaaaagtagttgttaggtacagacgtaaacaccgttgttaagatgacacaggacagcttgtatattcactttatctaagtgatctcatgtatttctgtagggctgactgtgttaagggctataatttgggtttggggatctagttttgcaaagaaagcattattaa

SEQ ID NO: 62727 - DNA, 600 bp, Chicken  19866894325024_1
ctcacagatcactgtcctgattgtacacttcataatctcaatcacattgcattggatagtaataatagccattacctgcccttacaggctgctaataaaattgaatagaaaatcaatttgaaaatgttatgatattgcaagtcgagcacatctggacctggtctacttttggtgacaagatttgggtgatatagtagatgacattatgatcctgtctgtgacataatgcagaggtaatagttttgatggcacttctgccatccaatcatttgtatcaggcaatagaatcatagttctccygcttgttagcattttcacaatgatgtagcttagtttgaatcggtgaccttacctttcttcagtcatctaagtcagcctggctacatgctaaaaaaaaaagattctttcttttccaatctcagagagaataaagatcaaatccctacagaacaaagagccttgaagcgctacagagcagtaggaagccgagtcaagccrttggacagcatgaaagctttgaaagcctgtattaaattgcaaacttactgaatgaccctcctgaagagaagagatgtcacctttcattcagaagtggaaatt

SEQ ID NO: 62728 - DNA, 600 bp, Chicken  19866894325024_2
tgacattatgatcctgtctgtgacataatgcagaggtaatagttttgatggcacttctgccatccaatcatttgtatcaggcaatagaatcatagttctccygcttgttagcattttcacaatgatgtagcttagtttgaatcggtgaccttacctttcttcagtcatctaagtcagcctggctacatgctaaaaaaaaaagattctttcttttccaatctcagagagaataaagatcaaatccctacagaacaaagagccttgaagcgctacagagcagtaggaagccgagtcaagccrttggacagcatgaaagctttgaaagcctgtattaaattgcaaacttactgaatgaccctcctgaagagaagagatgtcacctttcattcagaagtggaaatttgtcctcctaactgtttgcatgcacatgtgagaaaggcaggcaaagagacagaggaacaaggctggcttagcaccggatccctatcaggagcagaatgcagcaggttaagcaattttcagcagctgagccagtctttgctggcttatgaggtgcagaagacttctgtccaagtcctctagcaggtaaccttacccaaa

SEQ ID NO: 62729 - DNA, 600 bp, Chicken  19866894325030_1
tcgagggtatcggaagctgcttgcgtgccaagtccatcaccattaatctaaatgttgtaactagtgtattttataggctcagaattaatgaaaacatgggaaaaaatgtgttcttcaggaagttgttgtactttcaaactaaacaaagatttctaacacattgagttacgttatttatatatgaaactatgttgaatgtagcatcagaagtgtctttcctatcagtaggcagagatagccttaaattttcttctgttgtgttctgtcttgcaactgtgtacgttaaaactatgacttgtrtttgttcttctgatacaatgtaaagatgcaggtttgataaactgcattggatgctcctctgatgtaagctaaaaatttcagtgaagcttttatgccttgtatttttaatgatggtacacatgcctgagacatgacataaatgtctgctgagtttggacaagatttttttgttttgttttctttgtttygtcttaaatagtccaagataaaaaagcctttgtagaaatactgaagtctcttcccctctgtgcgccatagggaacaggcagtttacttcctcccttcctgcagtgtactgct

SEQ ID NO: 62730 - DNA, 600 bp, Chicken  19866894325030_2
atgttgaatgtagcatcagaagtgtctttcctatcagtaggcagagatagccttaaattttcttctgttgtgttctgtcttgcaactgtgtacgttaaaactatgacttgtrtttgttcttctgatacaatgtaaagatgcaggtttgataaactgcattggatgctcctctgatgtaagctaaaaatttcagtgaagcttttatgccttgtatttttaatgatggtacacatgcctgagacatgacataaatgtctgctgagtttggacaagatttttttgttttgttttctttgtttygtcttaaatagtccaagataaaaaagcctttgtagaaatactgaagtctcttcccctctgtgcgccatagggaacaggcagtttacttcctcccttcctgcagtgtactgctgcatgatggtgatgcaactgagaactctgcttttgaattgaaggaaatactgttatataaaaactcagagcataagaaattcttatttatgtagcaagtagcttttcatggaggtttgatgttggtggggcagggggagaactggcaaatattctccttagacaactattgaatacctcgaaggaggg

SEQ ID NO: 62731 - DNA, 600 bp, Chicken  19866894325031_1
agaaacaaatcaatatacatacatctgctcgggcaaactttgggatttataccatctgagattcttctgagaatatatttatctgtagtcagctacaatgttcagaacataaaataaaaaatcactgccttatgctgcttatatgttatcagaggatctgagcttcctgtttctgatcagggttctgaagcaccagtgcccatggactgatgtccatgttttgagtggcagttgatgttgaagcagtccctgcccctattttctacccctgcaatgcttttcagttgtggcaacagcacrgggtgagttgctgggtaggtgaggatgcgttcaaatcagtctcgtttactcactaccttaatggtggcctgtacaaaacaggttatcctctttgctagatgaagtcagaaagaggagagggaattagttttcacggtctgaatctctctgctgatattgttttatttggcaaaaataagtgggagaatgcagccactgggaagtcccgatgatgggcaccacaggggctgtttctctggggagcccacaggggaactgaccacacaatgtcctgccatgggaaagtcctgaggaagcttt

SEQ ID NO: 62732 - DNA, 600 bp, Chicken  19866894325032_1
gggaatgctggagaaaaaacactgccatagagaaattttcttcttaattaccaccagttgaaagtttttattgctgtgtacgtgtctgagttcacaggcagaggcacaatgggaagtgttgcaattcaatagatcatccaaacgggctttgttttagctctagaggtgctcaggaaaataaacccaacctctggggaagatgtgaggttcctgctaaaagacttcgtcaagtccccattgggagcccacatggtactgacctctgccagcatctgtaccagcacatctgtgtcagctgcygaggaacatcctgctgtaatggacagtgaatcactgtggggtgtacaattctcttgagttttatgactgataaaggaactattttcattcctttagaaatgtttttggcaatgtgcaacagcttcatacgtttgtatttatagaactgggcagtaatttctctccacagacttaaaatcttacccaaagagttcaactaaccagtgtatgtagcccatwcagcctttcttccccttcttcccrmtccccccttkcctgagagcagtgtgtggttttactgctgtggttgcagttctgagg

SEQ ID NO: 62733 - DNA, 600 bp, Chicken  19866894325032_2
gacttcgtcaagtccccattgggagcccacatggtactgacctctgccagcatctgtaccagcacatctgtgtcagctgcygaggaacatcctgctgtaatggacagtgaatcactgtggggtgtacaattctcttgagttttatgactgataaaggaactattttcattcctttagaaatgtttttggcaatgtgcaacagcttcatacgtttgtatttatagaactgggcagtaatttctctccacagacttaaaatcttacccaaagagttcaactaaccagtgtatgtagcccatwcagcctttcttccccttcttcccrmtccccccttkcctgagagcagtgtgtggttttactgctgtggttgcagttctgaggcatttgttgagtcctgaagacaagctgtggccaatctgttgtctgcagactgttttctagaagtatctctttcacactgaagagctcaatgccatgtactagctgacttcaccatgtgcttcttctcccatgagattatccacttttcaaactcactttacttccagacaatagtgtcaaactagggctatgcttgcttatccaaaatgcgtgctcaga

SEQ ID NO: 62734 - DNA, 600 bp, Chicken  19866894325032_3
gcccacatggtactgacctctgccagcatctgtaccagcacatctgtgtcagctgcygaggaacatcctgctgtaatggacagtgaatcactgtggggtgtacaattctcttgagttttatgactgataaaggaactattttcattcctttagaaatgtttttggcaatgtgcaacagcttcatacgtttgtatttatagaactgggcagtaatttctctccacagacttaaaatcttacccaaagagttcaactaaccagtgtatgtagcccatwcagcctttcttccccttcttcccrmtccccccttkcctgagagcagtgtgtggttttactgctgtggttgcagttctgaggcatttgttgagtcctgaagacaagctgtggccaatctgttgtctgcagactgttttctagaagtatctctttcacactgaagagctcaatgccatgtactagctgacttcaccatgtgcttcttctcccatgagattatccacttttcaaactcactttacttccagacaatagtgtcaaactagggctatgcttgcttatccaaaatgcgtgctcagaggtgtggacagaccatgtttggtg

SEQ ID NO: 62735 - DNA, 600 bp, Chicken  19866894325032_4
cccacatggtactgacctctgccagcatctgtaccagcacatctgtgtcagctgcygaggaacatcctgctgtaatggacagtgaatcactgtggggtgtacaattctcttgagttttatgactgataaaggaactattttcattcctttagaaatgtttttggcaatgtgcaacagcttcatacgtttgtatttatagaactgggcagtaatttctctccacagacttaaaatcttacccaaagagttcaactaaccagtgtatgtagcccatwcagcctttcttccccttcttcccrmtccccccttkcctgagagcagtgtgtggttttactgctgtggttgcagttctgaggcatttgttgagtcctgaagacaagctgtggccaatctgttgtctgcagactgttttctagaagtatctctttcacactgaagagctcaatgccatgtactagctgacttcaccatgtgcttcttctcccatgagattatccacttttcaaactcactttacttccagacaatagtgtcaaactagggctatgcttgcttatccaaaatgcgtgctcagaggtgtggacagaccatgtttggtgc

SEQ ID NO: 62736 - DNA, 600 bp, Chicken  19866894325032_5
actgacctctgccagcatctgtaccagcacatctgtgtcagctgcygaggaacatcctgctgtaatggacagtgaatcactgtggggtgtacaattctcttgagttttatgactgataaaggaactattttcattcctttagaaatgtttttggcaatgtgcaacagcttcatacgtttgtatttatagaactgggcagtaatttctctccacagacttaaaatcttacccaaagagttcaactaaccagtgtatgtagcccatwcagcctttcttccccttcttcccrmtccccccttkcctgagagcagtgtgtggttttactgctgtggttgcagttctgaggcatttgttgagtcctgaagacaagctgtggccaatctgttgtctgcagactgttttctagaagtatctctttcacactgaagagctcaatgccatgtactagctgacttcaccatgtgcttcttctcccatgagattatccacttttcaaactcactttacttccagacaatagtgtcaaactagggctatgcttgcttatccaaaatgcgtgctcagaggtgtggacagaccatgtttggtgcagaagggaca

SEQ ID NO: 62737 - DNA, 600 bp, Chicken  19866894325032_6
ccggggggcttttcagtaaaacctgtacaattcactgacgcctgaatagctctggtgctttagtactcacaacttcattttgaaatgagagcttgtgttgctgattggagctgtgaaaagaggtgttactgctgcagaacaaaactcagatggctgcagaagtgggtggggtgtgagctggggtttggagaagtatggctacagagaccagggagtaagttctgctttccatagaagtttgaagggggaggaggatgctggggttcaaggaatcatctttggatctgaagtgcattggcrgctgttcaagctggctgcttgccacctcatwctgctgctatttggtactacagagaagcttacacgcttgagagattctctgctgctgtaaacagacacaagttgactgaagttaaaggagctggtttataccaactgacaacatggtcctgagtttgctctaaaaatgaaacggtggctctgagtaacagcaaactgtttttctgcagaggtggcattgatgctgggtactggcacgtgcctccagctttctttcaatgctgtcaaaaatcttcatccaacttcataagctgtatgcaa

SEQ ID NO: 62738 - DNA, 600 bp, Chicken  19866894325032_7
tcactgacgcctgaatagctctggtgctttagtactcacaacttcattttgaaatgagagcttgtgttgctgattggagctgtgaaaagaggtgttactgctgcagaacaaaactcagatggctgcagaagtgggtggggtgtgagctggggtttggagaagtatggctacagagaccagggagtaagttctgctttccatagaagtttgaagggggaggaggatgctggggttcaaggaatcatctttggatctgaagtgcattggcrgctgttcaagctggctgcttgccacctcatwctgctgctatttggtactacagagaagcttacacgcttgagagattctctgctgctgtaaacagacacaagttgactgaagttaaaggagctggtttataccaactgacaacatggtcctgagtttgctctaaaaatgaaacggtggctctgagtaacagcaaactgtttttctgcagaggtggcattgatgctgggtactggcacgtgcctccagctttctttcaatgctgtcaaaaatcttcatccaacttcataagctgtatgcaacacttcattatcccagctacagacagaggct

SEQ ID NO: 62739 - DNA, 405 bp, Chicken  19866894325032_8
cctccagctttctttcaatgctgtcaaaaatcttcatccaacttcataagctgtatgcaacacttcattatcccagctacagacagaggctgcccacccatgtggcagtgccctgacctcctccaacctgctccatgtaactattacctttgctgactgtgtcataagaaatttacatcgccgtggttttacactggcaccactggcacacacagcctctgagaatccatcggttcatttccattcagctacaggacttcaaggtgatccccactgatcccagctgatctcaggcagtcmgttaggaactgaactgctgtaggacctctcctgtgcctgcaagggagacagggaagatgcagagctccaggataacccgtggccatagagaaggaagtacaggct

SEQ ID NO: 62740 - DNA, 600 bp, Chicken  19866894325053_1
ttgagacatgagcttgaatatttattcctgcaaaaacaagaatcccatagtgctagaacacaaggtattgctggatttcctcaaaggctactgagctggcacaatagaatcaggaagggctcagctttcttctcaatgatttgaaatttatcatccctgtgaccaactttgagtgcaataatttaatttctaatgccatcttttaataagtcacttgtgtgtatatattattttaagcatgtgaaagctgttattaatgtctatgaaaacatttgtctccataaatttgtatttctgccrcagtgcctaggagcaccaactaaactctggataatttgacacaggataggcaggaaaacataagacagacacttgacaaactattgatatgacatgcttatttgtacagcgtgtatgtaaaagcaagcaccttttctgattcattcatagactatctgttggatgaggtgaccttacttaaatttcctagctaaactttcccaaacagatctcttcaaggctgaacatcacctaaattgtcctgatcccaagtagccaractcccaggattcactaagaacgccggtctgacttttaaat

SEQ ID NO: 62741 - DNA, 600 bp, Chicken  19866894325053_2
tctatgaaaacatttgtctccataaatttgtatttctgccrcagtgcctaggagcaccaactaaactctggataatttgacacaggataggcaggaaaacataagacagacacttgacaaactattgatatgacatgcttatttgtacagcgtgtatgtaaaagcaagcaccttttctgattcattcatagactatctgttggatgaggtgaccttacttaaatttcctagctaaactttcccaaacagatctcttcaaggctgaacatcacctaaattgtcctgatcccaagtagccaractcccaggattcactaagaacgccggtctgacttttaaatgaagattaaaaaaataaataaacagtagcatcttgtttttcctgatgcaatatccattgcattgaaggcagatggataagaaaaatggaagccaaatcctgttaattaaggaaaaaatgaatgatcctaaaaatccttactcgttctgtaaaagggatctgtctctatttagattttctttaattttcaccctgtagctggactagccaatatatttatccaaggggtcctagaaagatcttcaggagtttgtaccagg

SEQ ID NO: 62742 - DNA, 600 bp, Chicken  19866894325062_1
tttagcatcaatacttgtaactatgtttcttaccatccatctattttgagttcacaaaaataggaggtacctaccaatgaaaactgaacgcaatttttgagcatttttgattgagaatattgagaataaatacttctgaaaaaccagaaatgtggggaaatcacaatgcttttttttttaatccacaaataagattgcctatatacgtcttttttcttctgtgcataattggcttctggttcattcctaaatatccttgcaagcacagcacaccacctcttaactcccacagtgaagaaytgtaatatgtgtatgttgaaatctgaagctaggaggttgctaatataaaacttaaacttcagaagacaccagattatactaccgtttatatgtattgtggcacaatgaggtctatctgtgataagctctggacgaaaattaggttcatgttatcgttgcaaggaacgaggggcacggaaaggtttgtctgaagggcatgcagctcttctgggcacccagcttggcagctgctgccttcaggagcgttggaagcatgacctctggcagacacaggcaagtcacttaccctgccttctggca

SEQ ID NO: 62743 - DNA, 600 bp, Chicken  19866894325066_1
tcaaggtttgagatccagagaaaaacaagaagggaatatttatgcttaagattgtttcttggcaaaagtagactgcattattggtatattcaaatatagaagtaaaccttaatacacaaaaattgttgtgatatttatttgtgaaaaaaaaaatggaaaaagaaaattctgtttcttaagagagattttttttattgtttgttaaaattgttactggttacttgttgtagtaggcgccttgtgggggcacgggatgtacgggacaggcctttccctaagcatagagagacagtgctatcrtgctgaccttgatgcagagaaaacaggagaagaagaaggatgagaaaagaatgtgggaacggccaaataaggcacaatgttatctggtgtgaaccaatcagagtgggacatgacagcacggttatataggtaaaaatgtatataagctgtgtttagtagtgaataaacgcattttgctgctcatcatattggtgtgcgtatgcagtcatttggccctgatcacctaattggtcagtgcgcgcagagtgctaacacaggtggctaacatcattgttgcagaaagcaacagttactaatgac

SEQ ID NO: 62744 - DNA, 600 bp, Chicken  19866894325066_2
gttatctggtgtgaaccaatcagagtgggacatgacagcacggttatataggtaaaaatgtatataagctgtgtttagtagtgaataaacgcattttgctgctcatcatattggtgtgcgtatgcagtcatttggccctgatcacctaattggtcagtgcgcgcagagtgctaacacaggtggctaacatcattgttgcagaaagcaacagttactaatgactgcgtattaaattatgataacaacataactgtgataatattactgtaaatgctgatgtaagtttgtcagaaagtattyctacagccagcaataatcatacccaaggcagtaacgaatatatataaaaaaatgtctagaagatttgtaaggtacaatatgcatgctaaagggatacacttaagctttctcagtgatatttccacaagcaatgaaactattttagcaayaaagcattagggtmgatcaagtaactgttttgattttagcagcgaagaataaacctgtgactctgtgcaagcattttagtttgactggtgagaaaggaaccgaagaaaaataagtatcaatctgatctgacagtcaacacaatatagcttt

SEQ ID NO: 62745 - DNA, 600 bp, Chicken  19866894325066_3
ttggtcagtgcgcgcagagtgctaacacaggtggctaacatcattgttgcagaaagcaacagttactaatgactgcgtattaaattatgataacaacataactgtgataatattactgtaaatgctgatgtaagtttgtcagaaagtattyctacagccagcaataatcatacccaaggcagtaacgaatatatataaaaaaatgtctagaagatttgtaaggtacaatatgcatgctaaagggatacacttaagctttctcagtgatatttccacaagcaatgaaactattttagcaayaaagcattagggtmgatcaagtaactgttttgattttagcagcgaagaataaacctgtgactctgtgcaagcattttagtttgactggtgagaaaggaaccgaagaaaaataagtatcaatctgatctgacagtcaacacaatatagctttctgattatattttgtttagatatagtttagcttctcatactaaaatccatactgaaaggtaatcacatgcatccacagctcatgaatcaggaacataagtatcttcagagcatgagggaatttggtgataattgtcacatcacattgcc

SEQ ID NO: 62746 - DNA, 600 bp, Chicken  19866894325066_4
cagagtgctaacacaggtggctaacatcattgttgcagaaagcaacagttactaatgactgcgtattaaattatgataacaacataactgtgataatattactgtaaatgctgatgtaagtttgtcagaaagtattyctacagccagcaataatcatacccaaggcagtaacgaatatatataaaaaaatgtctagaagatttgtaaggtacaatatgcatgctaaagggatacacttaagctttctcagtgatatttccacaagcaatgaaactattttagcaayaaagcattagggtmgatcaagtaactgttttgattttagcagcgaagaataaacctgtgactctgtgcaagcattttagtttgactggtgagaaaggaaccgaagaaaaataagtatcaatctgatctgacagtcaacacaatatagctttctgattatattttgtttagatatagtttagcttctcatactaaaatccatactgaaaggtaatcacatgcatccacagctcatgaatcaggaacataagtatcttcagagcatgagggaatttggtgataattgtcacatcacattgcctactctgtgggatg

SEQ ID NO: 62747 - DNA, 600 bp, Chicken  19866894325066_5
taaaagtagaaatactagtgtttaaaagaaagtagaaatactattagctaatgcataataaatctacaaactattatgttgtctcttcttcatggccatttagttttgcatgcacataaccagtgttttactaacagtaccaagggtttcatatgtaagacattattcacagtatgtttcctgttattttgcatagcattattctttgtgaaaataatgttttggcctcaggagaaatattgcaattgaatgcacagcagtacatttttgatatggggccacggtactacaatttaactmtttttttttttttttttttttaattaccttggcaatcaagacaatagagccaggatacaaaatgtaaaaaggtggtgaaataaggatgtcatttcagtttttaatttgcaaataaaatgtgctaagtgaaatgggagaggaaactacccctttctgaccagcacagttacataccacatactatgaatgcttcttgaaatgtgattgcgtagttttaatatgctcttttatttttggaaaaaggtgggttgagccaaaattattactgttaagttgattgaaatgctgaggattggtaca

SEQ ID NO: 62748 - DNA, 600 bp, Chicken  19866894325068_1
aaacagtgccaaaagaggaggaaaaggaatatggcttttccctgcaacttcactgacactgactgcttattcagaccaattcaaaaaagacagaaagtagatcagataagcgattaggccagagctttcaaggattgtaaggagagcactggtaatctactgatacaatctggcttgctattagagctggatttgttgcttatgttaagtaacatgtgacagaaaaaaaccagcactgccaaagagctacatactggcaaggtgaagagaagaaaatacattgtactgttcattcccagmgtattactcacttctttaaccttgcttctgaaaagaggtcaaagcagattacttctgaactgcttcttgcaacagaaccctctgacaaacttaagatattttgccaatccaatctactaatgctccaaataccactctcaattgctcgtaattttttgcaatttcycattcatgaaaactggtttactgctttaactacgraagcagaatcactaaataactctgccagataaccaccaattgctgccaaacaatctatttattgtacgttcccttcaaaagtctgccattcactgtcac

SEQ ID NO: 62749 - DNA, 600 bp, Chicken  19866894325068_2
aatctggcttgctattagagctggatttgttgcttatgttaagtaacatgtgacagaaaaaaaccagcactgccaaagagctacatactggcaaggtgaagagaagaaaatacattgtactgttcattcccagmgtattactcacttctttaaccttgcttctgaaaagaggtcaaagcagattacttctgaactgcttcttgcaacagaaccctctgacaaacttaagatattttgccaatccaatctactaatgctccaaataccactctcaattgctcgtaattttttgcaatttcycattcatgaaaactggtttactgctttaactacgraagcagaatcactaaataactctgccagataaccaccaattgctgccaaacaatctatttattgtacgttcccttcaaaagtctgccattcactgtcactgcttataaagctagcttgctgatctctccataaaggctacaacagtgaaacgtgagctagtaaggactgtcctgatccacatcatttatttgtggaggagctactgatctcagggaacagactcaaggaagaacttagatcagaaggaatctctgaaggtcacct

SEQ ID NO: 62750 - DNA, 587 bp, Chicken  19866894325068_3
atgttaagtaacatgtgacagaaaaaaaccagcactgccaaagagctacatactggcaaggtgaagagaagaaaatacattgtactgttcattcccagmgtattactcacttctttaaccttgcttctgaaaagaggtcaaagcagattacttctgaactgcttcttgcaacagaaccctctgacaaacttaagatattttgccaatccaatctactaatgctccaaataccactctcaattgctcgtaattttttgcaatttcycattcatgaaaactggtttactgctttaactacgraagcagaatcactaaataactctgccagataaccaccaattgctgccaaacaatctatttattgtacgttcccttcaaaagtctgccattcactgtcactgcttataaagctagcttgctgatctctccataaaggctacaacagtgaaacgtgagctagtaaggactgtcctgatccacatcatttatttgtggaggagctactgatctcagggaacagactcaaggaagaacttagatcagaaggaatctctgaaggtcacctagttcaacccagctcaaagcaa

SEQ ID NO: 62751 - DNA, 600 bp, Chicken  19866894325073_1
cttctactgcagggaattcagacttctgaatgtaaccaagtcagttcactcatacaaaaattggaatatgcctcaaagcccagtgaaaggcattactacaggtctttgaaagcagtgcagattagcaacaggtaaagatctaacctcttgtatttaaaaacagtttcacgacaggttcagtgaaaacagcaacaaaactgttacacagacataaagattgtacaaaatcttgattgtaaaagcagatgtagaattttcccatattttgagctttaagcatattctttttacctaatcccrgaggggtgacttttaggacttcactattcaaatgttaatatatgctatttaaatgtatgctcaagaacaatgggttcattgtgccaataatgagaaattattttgtgggtcactttgtaatatttgattactgttttttatatctttcttgaattcagatggtaaaaatccacctagttattgtatctaacctgcagtcgctgctgaagatggtgatggaatgccttcttgccttgtgcttctgcagcatctaccacaatgagggttcttgaaaactacwtaacaaataaggcaaaaagg

SEQ ID NO: 62752 - DNA, 600 bp, Chicken  19866894325073_2
attctttttacctaatcccrgaggggtgacttttaggacttcactattcaaatgttaatatatgctatttaaatgtatgctcaagaacaatgggttcattgtgccaataatgagaaattattttgtgggtcactttgtaatatttgattactgttttttatatctttcttgaattcagatggtaaaaatccacctagttattgtatctaacctgcagtcgctgctgaagatggtgatggaatgccttcttgccttgtgcttctgcagcatctaccacaatgagggttcttgaaaactacwtaacaaataaggcaaaaaggcacattttacctggaaaggattgggaaatgttcagtgaaacaaaaactgaaatgttcattttggacgaagctgagcaattgtagatgtcgttcatgttattttaaaaataaccttttgtttattttttgctcagattctgaagtgaaaatacaggtagaatcattttgaaaatatttttcctcatttttcatccagaattatgaattcagcttggcctgaattaacctatacttgtggtcccttcacccccctaaactctgttctttcagtatccgtacc

SEQ ID NO: 62753 - DNA, 600 bp, Chicken  19866894325078_1
agcctttcttcgtaagggaggtgctctgtgcctgcagtcatctttgtggtcttctgatggactctctctagaagttccctgtcttttttgacctggggaccccagaactggacacagtattccaaatgtggcctcaccaggacagagaggatcatctttcttgaactgctggacagatgtgctagtgcaccacaggataccgctggccttcttggccacaagggcacacttctggctcatggccaagctgtttttcaccagaacatccaggtccttctctgcagagcttctttccagccrgtcagcccttgacctgtactgatgcatgtggttattccttcttagatgtaggtctctgcacttgcccttattgaacttcataaggttgctttccacccagtatttgtacttycatttattttagccctgcagaacatttgaaaatcgtcttaagcctctgcaagacagtgtatgaagcccattgtaaagattcctgatagaagtcagacctttaggagaagttctttcacaacagatctcctctgtaccacatgtagacttgactctttaatacttctgctcagaagagatgccttgcat

SEQ ID NO: 62754 - DNA, 600 bp, Chicken  19866894325078_2
cacagtattccaaatgtggcctcaccaggacagagaggatcatctttcttgaactgctggacagatgtgctagtgcaccacaggataccgctggccttcttggccacaagggcacacttctggctcatggccaagctgtttttcaccagaacatccaggtccttctctgcagagcttctttccagccrgtcagcccttgacctgtactgatgcatgtggttattccttcttagatgtaggtctctgcacttgcccttattgaacttcataaggttgctttccacccagtatttgtacttycatttattttagccctgcagaacatttgaaaatcgtcttaagcctctgcaagacagtgtatgaagcccattgtaaagattcctgatagaagtcagacctttaggagaagttctttcacaacagatctcctctgtaccacatgtagacttgactctttaatacttctgctcagaagagatgccttgcatatctttggcagttcatagacactgcttagaaataggagatttaactcaaaggaaaatggaagagctgtaatatctgcagtgtgaatttacattcctcaaaaatatttattct

SEQ ID NO: 62755 - DNA, 600 bp, Chicken  19866894325078_3
ctctaatcctttttaaacttcaatgaagatgaggtgtttaagtaactgttaagcctgtgagtattattgtgtataggttcctgagtccgtgttttggcactatttctgaagctttctgatgctaacgtggagacttaatcaagaaaagatgcataaataaaatatatcacacactgaaatccttttttctttctttttttttttagcagctcttaatttttaagaatgcttctttattgttctaagcaattgtgtaattggctgttttctgcagctcggtagttcagctctcttgttccrtgtgcaaaagcagattctaagagcacagcactctgctgtgactacatcagcagcctcaattttcttgtttctactaaaatcagagttactacatttccatacaccaatttttgccattaaagttgttttgctgtgatgacaatgacgtttcatttcctctactcataagcatgcttttattgaccatttcctaatgttctgcagtgagataatgtcatrctagagcactgagtttgctgatgagttttcagaatgtccagtgcagctattgcgttgcaagtgcctggtgactcaatagca

SEQ ID NO: 62756 - DNA, 600 bp, Chicken  19866894325078_4
ttaagaatgcttctttattgttctaagcaattgtgtaattggctgttttctgcagctcggtagttcagctctcttgttccrtgtgcaaaagcagattctaagagcacagcactctgctgtgactacatcagcagcctcaattttcttgtttctactaaaatcagagttactacatttccatacaccaatttttgccattaaagttgttttgctgtgatgacaatgacgtttcatttcctctactcataagcatgcttttattgaccatttcctaatgttctgcagtgagataatgtcatrctagagcactgagtttgctgatgagttttcagaatgtccagtgcagctattgcgttgcaagtgcctggtgactcaatagcattcrtgttcatttcatgaatataaaagacaatagttaatgcaggatgatgttaagaaataactctgcaaaagaagaaaatcgtgaagtatagggttggtttttgccatattatgaaggcagtgttgtgtatcttctggtatacattccataaatcaaataaacaacaattttgaaagatttgatgttatgaaggacaataataattttttctgtaatag

SEQ ID NO: 62757 - DNA, 600 bp, Chicken  19866894325078_5
caaaagcagattctaagagcacagcactctgctgtgactacatcagcagcctcaattttcttgtttctactaaaatcagagttactacatttccatacaccaatttttgccattaaagttgttttgctgtgatgacaatgacgtttcatttcctctactcataagcatgcttttattgaccatttcctaatgttctgcagtgagataatgtcatrctagagcactgagtttgctgatgagttttcagaatgtccagtgcagctattgcgttgcaagtgcctggtgactcaatagcattcrtgttcatttcatgaatataaaagacaatagttaatgcaggatgatgttaagaaataactctgcaaaagaagaaaatcgtgaagtatagggttggtttttgccatattatgaaggcagtgttgtgtatcttctggtatacattccataaatcaaataaacaacaattttgaaagatttgatgttatgaaggacaataataattttttctgtaatagatctgtgtacataccctgtgagcatcagaatatcataaagaaaaggaacaaaggaatatatttccagatttacaagcttgacaaa

SEQ ID NO: 62758 - DNA, 600 bp, Chicken  19866894325084_1
gttctgggtcaaaatgcctcagctgatacagggaatgtcacaaatgcacgtcattatccaggtgaaaatcgtgcgctttgcttctaaggaccaatttctgcactctgccttcttttttataacaatctgatactgctgccggagcgccctcaccacacgccctcatgttgcctgttcacttcctggatggactgcagtggctgtgctgtgcggtgcccgcagggctcagctctgctcccatggttgcacaggggctgacgtggctttgctctcctctttgctgcaggagcaaacgaagtsctgctcgtgatcggcggctttggcagccagcagtcacccattgatgttgtggagaagtacgaccccaagactcaggagtggagtttcttgcccgtaagggaccttttctgaccatcactgtgcagaatgggcgcactgccatcaaactttgatcgcgtgccattggccatgtaaccttctccaggccgtccttgtcaatttgtttgggttgtggaggtgtatgtagttaatgctggagttgctttgcrtgtamagctttgtgggagaggttgctgccacatctgckgggctgagcctgca

SEQ ID NO: 62759 - DNA, 600 bp, Chicken  19866894325084_2
caggggctgacgtggctttgctctcctctttgctgcaggagcaaacgaagtsctgctcgtgatcggcggctttggcagccagcagtcacccattgatgttgtggagaagtacgaccccaagactcaggagtggagtttcttgcccgtaagggaccttttctgaccatcactgtgcagaatgggcgcactgccatcaaactttgatcgcgtgccattggccatgtaaccttctccaggccgtccttgtcaatttgtttgggttgtggaggtgtatgtagttaatgctggagttgctttgcrtgtamagctttgtgggagaggttgctgccacatctgckgggctgagcctgcagagaccacatctctgctgtaggagtgagagctgcagagaggcgtgctttgtgtgygaggggtttgggctgtgaagtgtggaggtggtatctgggatgtcagtgggagcactgcggttggtgctgctgtgatcacagcaggctgtgtgatccctgctcacatcgggtctgagtgcgacgggttttattaaggaagagagagctcctgcagtggggtcttaaaagcagctgtatcagtatgaagcagtgc

SEQ ID NO: 62760 - DNA, 600 bp, Chicken  19866894325084_3
gctgacgtggctttgctctcctctttgctgcaggagcaaacgaagtsctgctcgtgatcggcggctttggcagccagcagtcacccattgatgttgtggagaagtacgaccccaagactcaggagtggagtttcttgcccgtaagggaccttttctgaccatcactgtgcagaatgggcgcactgccatcaaactttgatcgcgtgccattggccatgtaaccttctccaggccgtccttgtcaatttgtttgggttgtggaggtgtatgtagttaatgctggagttgctttgcrtgtamagctttgtgggagaggttgctgccacatctgckgggctgagcctgcagagaccacatctctgctgtaggagtgagagctgcagagaggcgtgctttgtgtgygaggggtttgggctgtgaagtgtggaggtggtatctgggatgtcagtgggagcactgcggttggtgctgctgtgatcacagcaggctgtgtgatccctgctcacatcgggtctgagtgcgacgggttttattaaggaagagagagctcctgcagtggggtcttaaaagcagctgtatcagtatgaagcagtgcagagc

SEQ ID NO: 62761 - DNA, 600 bp, Chicken  19866894325084_4
gagcaaacgaagtsctgctcgtgatcggcggctttggcagccagcagtcacccattgatgttgtggagaagtacgaccccaagactcaggagtggagtttcttgcccgtaagggaccttttctgaccatcactgtgcagaatgggcgcactgccatcaaactttgatcgcgtgccattggccatgtaaccttctccaggccgtccttgtcaatttgtttgggttgtggaggtgtatgtagttaatgctggagttgctttgcrtgtamagctttgtgggagaggttgctgccacatctgckgggctgagcctgcagagaccacatctctgctgtaggagtgagagctgcagagaggcgtgctttgtgtgygaggggtttgggctgtgaagtgtggaggtggtatctgggatgtcagtgggagcactgcggttggtgctgctgtgatcacagcaggctgtgtgatccctgctcacatcgggtctgagtgcgacgggttttattaaggaagagagagctcctgcagtggggtcttaaaagcagctgtatcagtatgaagcagtgcagagcttctttgttaatcacagagaacttccgttgctt

SEQ ID NO: 62762 - DNA, 600 bp, Chicken  19866894325084_5
agtacgaccccaagactcaggagtggagtttcttgcccgtaagggaccttttctgaccatcactgtgcagaatgggcgcactgccatcaaactttgatcgcgtgccattggccatgtaaccttctccaggccgtccttgtcaatttgtttgggttgtggaggtgtatgtagttaatgctggagttgctttgcrtgtamagctttgtgggagaggttgctgccacatctgckgggctgagcctgcagagaccacatctctgctgtaggagtgagagctgcagagaggcgtgctttgtgtgygaggggtttgggctgtgaagtgtggaggtggtatctgggatgtcagtgggagcactgcggttggtgctgctgtgatcacagcaggctgtgtgatccctgctcacatcgggtctgagtgcgacgggttttattaaggaagagagagctcctgcagtggggtcttaaaagcagctgtatcagtatgaagcagtgcagagcttctttgttaatcacagagaacttccgttgctttgtctcctaaaattcagttctttttttgggaagccgaaagcttcagctgcatccatcacatctctgtag

SEQ ID NO: 62763 - DNA, 600 bp, Chicken  19866894325084_6
gtgtgatccctgctcacatcgggtctgagtgcgacgggttttattaaggaagagagagctcctgcagtggggtcttaaaagcagctgtatcagtatgaagcagtgcagagcttctttgttaatcacagagaacttccgttgctttgtctcctaaaattcagttctttttttgggaagccgaaagcttcagctgcatccatcacatctctgtagcctccacatttccccattgacagggagcagtgggaggcgtgcacagctccagggtgcgcaggcattcagcagtgacaggagataagytgacgtttaacacggaatacttttgtgccagcagacctgggcagcacgagcagaagctgtggaaagcagatgcagtcctggtgattttagccagagttggatcccagaaatccacagtgtccacctctgccctgtgtgccattttccaaaagcagcaaagatgggataggagaacagcggtcgttctgcatgcataggggttgattcctctcctcgatccttgttttttcaccatttcagagcatcacccgtaagaggcgttacgtcgcgaccgtgtccctgcacgaccggatctacgtc

SEQ ID NO: 62764 - DNA, 600 bp, Chicken  19866894325086_1
actaagaaaaaattgtagctatggatttgtgttgttatactcggaactcctccacacccacgagatgcgattccaattccgagtttaatccaaagctatcattagcccatcctgttggcatggtagtaaaggactgtcagggaacagccagtctggctgtagtacctaagtacagtgggatatattcaaggttgttccaaacatatggtttttttccaagtataatttacatctttaaatactgtcgtgtttgcacacatggctttctgtggcttgccatttaacatggctttctgcatyactcttatgatggtaagcaagcgttttattaatgtcaaagacatatgaatgaaatgttttctgcccatctggtttcccagttctggaattaatttatttttctagtgtgccttaaccaraggaagtcagaaaagttgccattacagttccatgtaatcaatagcagccctgctcggaaacattactaggtcaaaggttcaagatgggatggaaaagcagtgtgtccatcaattagggtatcttgcctcgataagataaaagaaccatcacaacaacaacatatgtggttactaatactta

SEQ ID NO: 62765 - DNA, 600 bp, Chicken  19866894325086_2
atggtagtaaaggactgtcagggaacagccagtctggctgtagtacctaagtacagtgggatatattcaaggttgttccaaacatatggtttttttccaagtataatttacatctttaaatactgtcgtgtttgcacacatggctttctgtggcttgccatttaacatggctttctgcatyactcttatgatggtaagcaagcgttttattaatgtcaaagacatatgaatgaaatgttttctgcccatctggtttcccagttctggaattaatttatttttctagtgtgccttaaccaraggaagtcagaaaagttgccattacagttccatgtaatcaatagcagccctgctcggaaacattactaggtcaaaggttcaagatgggatggaaaagcagtgtgtccatcaattagggtatcttgcctcgataagataaaagaaccatcacaacaacaacatatgtggttactaatacttaaagcgagcgttgggcaggaagcaaagcattaatcacgctacagtaaaacaaatcagatgctcttatccccttttaagcagctactttactaagaactacttatgagattcttttaaagc

SEQ ID NO: 62766 - DNA, 600 bp, Chicken  19866894325089_1
tgcttcattcaggactggactgacatcatctgtagttaagaaataccataattttttaagcatttcacttagatgtgaacagaatgaattggccccttttaaaatgtccttaaagttccccctagtaacataatctcatttgcagacattaagaaagcttcacatattggcaaatgtgtcctttgttatttcctcaccctacttcagaatccattttactttccatagaaatgtgctctgcgttgaaaagctttttctgggtaattgaaacaatctcctgacaagaaacttctactcacytccatttccaaygtaaggaggagactgaaatccctgtgcttaaacgcacttttgataattctttggaagaacaattatttgtactgtcctgtgtgcggttccacctgacagtgtgtaatactcacactcagagggcacaggctgctggcaaggggtgcagggtttcacygaagcctgttgatgtgctggtgttaatttggctgaaagggaattgtaccgtgactacctcctagattctctcctctggagcagcagtagtctgtggtcgaagcaggaaagtaacaccaactgatagtatat

SEQ ID NO: 62767 - DNA, 600 bp, Chicken  19866894325089_2
gactggactgacatcatctgtagttaagaaataccataattttttaagcatttcacttagatgtgaacagaatgaattggccccttttaaaatgtccttaaagttccccctagtaacataatctcatttgcagacattaagaaagcttcacatattggcaaatgtgtcctttgttatttcctcaccctacttcagaatccattttactttccatagaaatgtgctctgcgttgaaaagctttttctgggtaattgaaacaatctcctgacaagaaacttctactcacytccatttccaaygtaaggaggagactgaaatccctgtgcttaaacgcacttttgataattctttggaagaacaattatttgtactgtcctgtgtgcggttccacctgacagtgtgtaatactcacactcagagggcacaggctgctggcaaggggtgcagggtttcacygaagcctgttgatgtgctggtgttaatttggctgaaagggaattgtaccgtgactacctcctagattctctcctctggagcagcagtagtctgtggtcgaagcaggaaagtaacaccaactgatagtatatatgagcttttgt

SEQ ID NO: 62768 - DNA, 600 bp, Chicken  19866894325089_3
gcaaatgtgtcctttgttatttcctcaccctacttcagaatccattttactttccatagaaatgtgctctgcgttgaaaagctttttctgggtaattgaaacaatctcctgacaagaaacttctactcacytccatttccaaygtaaggaggagactgaaatccctgtgcttaaacgcacttttgataattctttggaagaacaattatttgtactgtcctgtgtgcggttccacctgacagtgtgtaatactcacactcagagggcacaggctgctggcaaggggtgcagggtttcacygaagcctgttgatgtgctggtgttaatttggctgaaagggaattgtaccgtgactacctcctagattctctcctctggagcagcagtagtctgtggtcgaagcaggaaagtaacaccaactgatagtatatatgagcttttgtcaaagcaactaatgagtaaagatgtgatacctgaagttctctgctggtagatgtttaagaggctgtttctagagaggaagagtatttcagcagtcaatgttaaaagccccaatgctgggttatatccctgacctgtgccactgtaggatggagacga

SEQ ID NO: 62769 - DNA, 600 bp, Chicken  19866894325089_4
caccaactgatagtatatatgagcttttgtcaaagcaactaatgagtaaagatgtgatacctgaagttctctgctggtagatgtttaagaggctgtttctagagaggaagagtatttcagcagtcaatgttaaaagccccaatgctgggttatatccctgacctgtgccactgtaggatggagacgatctttctgctgaatcgtgctgtagcggagcgtggtcgcacccagcacacagaggtacggtgggacggctttccgtggggtttgctgggcagtctttgtgtggccagctcctgygtccactcctcggatgaagagctctttctgataaatatttgtgttctatggagaaggtatttcttttctttgcaggcagaaaatttattccagcagcacctagctcccaaaatctaaatccagcgtgatccgttcatttatttgagaaggaattacaaaatctacatgcacacattttttccactgaaaataagtgtgacaataggatagttgtattttcaaacacttctgcatatgtcttaagacatgcataaatttacttcaggtttaaatgctgatgtgcatatttatgtctgtatg

SEQ ID NO: 62770 - DNA, 599 bp, Chicken  19866894325092_1
  misc_feature (1)..(120): n is any nucleotide
nnnnnnnnnnnnnnnnnnnnnnnnnnnnnnnnnnnnnnnnnnnnnnnnnnnnnnnnnnnnnnnnnnnnnnnnnnnnnnnnnnnnnnnnnnnnnnnnnnnnnnnnnnnnnnnnnnnnnnnnactggaacagatctgcccaagacttagcaaatgttaacagatttgaagtaccaccttctgccctgtatgtcagcagaacccccccatgaaaaatgattgtagatgcagttcacatgaaagtcctgttgggttgtggtaagtacagtgggcagtgcttccatgcagcctgcaggaatgccrtgatgggcagccatgaataattacagaataagatgcccctagcaggaagtcacactgaaatctgccattgttactgttgcattcctgctgttggaaggtggtggatactcttctttgtctttttgtttttatgtgattgtcctcatttttttttttcattaacatttcatcccttgccaagccattgaatccttatggtcagtgataactttagtcagtaaattcyatgggttagttgcatattgagtggggagaggttgtgttttttgttttactgtctgcatttgggtttcaactgt

SEQ ID NO: 62771 - DNA, 600 bp, Chicken  19866894325092_2
agttcacatgaaagtcctgttgggttgtggtaagtacagtgggcagtgcttccatgcagcctgcaggaatgccrtgatgggcagccatgaataattacagaataagatgcccctagcaggaagtcacactgaaatctgccattgttactgttgcattcctgctgttggaaggtggtggatactcttctttgtctttttgtttttatgtgattgtcctcatttttttttttcattaacatttcatcccttgccaagccattgaatccttatggtcagtgataactttagtcagtaaattcyatgggttagttgcatattgagtggggagaggttgtgttttttgttttactgtctgcatttgggtttcaactgttgtttcatgcttgtgctattaaaggagtatatacttctaccttattgttttttttcccgggtgttgttctggttatttttttattttctcttaaagccagagactattcacgtcttaatctttcaggaaactcatactcattccagacccatttttatggtctctttcaactttaattttttwatttttattttttgagagagtgattggtgactgtatggctagat

SEQ ID NO: 62772 - DNA, 584 bp, Chicken  19866894325092_3
cattgaatccttatggtcagtgataactttagtcagtaaattcyatgggttagttgcatattgagtggggagaggttgtgttttttgttttactgtctgcatttgggtttcaactgttgtttcatgcttgtgctattaaaggagtatatacttctaccttattgttttttttcccgggtgttgttctggttatttttttattttctcttaaagccagagactattcacgtcttaatctttcaggaaactcatactcattccagacccatttttatggtctctttcaactttaattttttwatttttattttttgagagagtgattggtgactgtatggctagatctacagaagctttgaagttgctaactttggtagtktaggtgcctacagaagtgttagacatcttgagaacccttgtgcctctgccgctatagacctaggactggggacgctgctgaagggaataaagacattatgttatcagacttctcagtatcttagtggtggatttctaagattatttttgcatgtgtctgcttgtaatgcgcactgagaaggaattttgctgaggtatgtgtgata

SEQ ID NO: 62773 - DNA, 505 bp, Chicken  19866894325092_4
gttttttgttttactgtctgcatttgggtttcaactgttgtttcatgcttgtgctattaaaggagtatatacttctaccttattgttttttttcccgggtgttgttctggttatttttttattttctcttaaagccagagactattcacgtcttaatctttcaggaaactcatactcattccagacccatttttatggtctctttcaactttaattttttwatttttattttttgagagagtgattggtgactgtatggctagatctacagaagctttgaagttgctaactttggtagtktaggtgcctacagaagtgttagacatcttgagaacccttgtgcctctgccgctatagacctaggactggggacgctgctgaagggaataaagacattatgttatcagacttctcagtatcttagtggtggatttctaagattatttttgcatgtgtctgcttgtaatgcgcactgagaaggaattttgctgaggtatgtgtgata

SEQ ID NO: 62774 - DNA, 600 bp, Chicken  19866894325096_1
tctgtctgagattaatttgcatggccattataaagaggccaaatcccggtctgaattatataaagatgaactgagttgaaatgattgctacctgcagaatccaagtgccattattcccattctgcaaataatgtattgtggcatagaaaactgaagtgactagttcagaattatccagaaacactgaagggtccattgaagcatcagacatagctatttccttgttctacagtgagctagcaaccacatttgaatcacctatggtcactgtaggttcttgtttgcttgttttggttttgytttttttttccatttccaactcaattaagggtcatttaaaccagattaagcctatatatgtaagccatatttgaagacccactcttgctgtggartgtgacagattagggtggctagtgggcatggtgggagtgggttgactgttggactggatgaccttaaaggtcttttccaaccttagtgattctgtgattctatgattctaagcctgttgtcttttaaatacatgaggtaacaaacatataagctgtcttcttcttgtctttgatgaatatgttgcttatgaaaacacttctagct

SEQ ID NO: 62775 - DNA, 600 bp, Chicken  19866894325096_2
ctgtctgagattaatttgcatggccattataaagaggccaaatcccggtctgaattatataaagatgaactgagttgaaatgattgctacctgcagaatccaagtgccattattcccattctgcaaataatgtattgtggcatagaaaactgaagtgactagttcagaattatccagaaacactgaagggtccattgaagcatcagacatagctatttccttgttctacagtgagctagcaaccacatttgaatcacctatggtcactgtaggttcttgtttgcttgttttggttttgyyttttttttccatttccaactcaattaagggtcatttaaaccagattaagcctatatatgtaagccatatttgaagacccactcttgctgtggartgtgacagattagggtggctagtgggcatggtgggagtgggttgactgttggactggatgaccttaaaggtcttttccaaccttagtgattctgtgattctatgattctaagcctgttgtcttttaaatacatgaggtaacaaacatataagctgtcttcttcttgtctttgatgaatatgttgcttatgaaaacacttctagctt

SEQ ID NO: 62776 - DNA, 600 bp, Chicken  19866894325096_3
agaatccaagtgccattattcccattctgcaaataatgtattgtggcatagaaaactgaagtgactagttcagaattatccagaaacactgaagggtccattgaagcatcagacatagctatttccttgttctacagtgagctagcaaccacatttgaatcacctatggtcactgtaggttcttgtttgcttgttttggttttgytttttttttccatttccaactcaattaagggtcatttaaaccagattaagcctatatatgtaagccatatttgaagacccactcttgctgtggartgtgacagattagggtggctagtgggcatggtgggagtgggttgactgttggactggatgaccttaaaggtcttttccaaccttagtgattctgtgattctatgattctaagcctgttgtcttttaaatacatgaggtaacaaacatataagctgtcttcttcttgtctttgatgaatatgttgcttatgaaaacacttctagcttctgagtatttgctaaacacctttctaatgtgtagggcacgtagatatatgatcatcccttattcagaaagatagaaaaggaaaaattaggattt

SEQ ID NO: 62777 - DNA, 600 bp, Chicken  19866894325104_1
atttcttttgtctgatacaagattcctttttactatttcatgcgactgaattcctctgcaaaattaagtgaatattaacagaagcagaggggaaattatcatattggctatccaaagtaaacaaaattagtgggcataggagagaaagagagagagaaatagtgcagacgtgaaaaataggaatcttcactaagagagctccagaaagagaaacaccaccaccaatgtattttgctactggtacaaggatatagattctaacacactagaactgaccgctacacattaattgctgttaaygagctcccaaaactgtcctagaggatgacaacaataacaagtagggggaaaaaaaaaagtcgttgttgtggcctgaagaattttagaactgaatgttcgggctttctgaggtgctctgcatcctctgtactcataaataccagagggaaataaagaacggaagacacccactgtcaattctaaactgtaatcatgcagaaatctataaataaaatggacatcaaggagagattagggttttcaaaagcacctttataattgaggtgcacagctcccgggagactgacactccaaaatcac

SEQ ID NO: 62778 - DNA, 600 bp, Chicken  19866894325106_1
tgaatttcttacatcgtagcaaaggttttgtgaataagtgtaaccaaaagcaagctactatgatggaagaggtcagtccaagattaaacgaatgggaatcaagtttcaagatatctctgtgctgtgggattaaatgaatggttatcaagtttcaggataccaagttgggaccatctctgagcagtaatattagggccaacattcactgtttgaggaactgttggaacatattgatgactttctagtcaaagccactagaacaacagtccttaaggcattggtaagtaaaaataatcactkatatttcaagaytcaatcactggatttaacctgcacgtatagaataatcttggaactgttctcgaaagttgtgctgtttctgtgtgatcttatgttagaggaatcagatcatgcaagtatggttgtagagttgagaaatagctgcaaaaatcattggagagtttcaactttcagcccctaatataggattgcatacaaacatattggtccacctacaaaatgaacgtagttaggcacactagcatgcattcaggcttggtctgaaggtggatgtcaggatacaggtggcactaattggta

SEQ ID NO: 62779 - DNA, 600 bp, Chicken  19866894325106_2
atcgtagcaaaggttttgtgaataagtgtaaccaaaagcaagctactatgatggaagaggtcagtccaagattaaacgaatgggaatcaagtttcaagatatctctgtgctgtgggattaaatgaatggttatcaagtttcaggataccaagttgggaccatctctgagcagtaatattagggccaacattcactgtttgaggaactgttggaacatattgatgactttctagtcaaagccactagaacaacagtccttaaggcattggtaagtaaaaataatcactkatatttcaagaytcaatcactggatttaacctgcacgtatagaataatcttggaactgttctcgaaagttgtgctgtttctgtgtgatcttatgttagaggaatcagatcatgcaagtatggttgtagagttgagaaatagctgcaaaaatcattggagagtttcaactttcagcccctaatataggattgcatacaaacatattggtccacctacaaaatgaacgtagttaggcacactagcatgcattcaggcttggtctgaaggtggatgtcaggatacaggtggcactaattggtattaatagccctg

SEQ ID NO: 62780 - DNA, 600 bp, Chicken  19866894325111_1
ttattctcagaaaaagtactttacacttttctccttgatgtactacacttctatatgcaattatctatcgtattttgggctaacatgagtataaatatacgtgcagaaacctagttttatccaaaagaaataagccatggaatggacttatgtgacactgcagcttactgccgtattaacagtatgtatatttaaaagggcagaatttgctacttgcaggggctcggtagcattctctaggacctagttaaaaatcctgaagaaagatgtatttacttcatggtaaaaaaaacaacaacyaacaaacaaacaaacaaacaaaactttcccaatccagtttagtgtcagagagttaagatatcttttgcaaacttttgtcatctcacaaaatattttcattttcttacccattatttcaacaggtttactaagagacaaatattgagcccccmaaaaatccattataaataaggaaagacaaaaataagagaaatcatattttcrgtttttcatcttctagaatagatttaatattcaccctcctttttttaacacaacatgatatcataattaattatggtgaactggttactaaaatgg

SEQ ID NO: 62781 - DNA, 600 bp, Chicken  19866894325111_2
tgacactgcagcttactgccgtattaacagtatgtatatttaaaagggcagaatttgctacttgcaggggctcggtagcattctctaggacctagttaaaaatcctgaagaaagatgtatttacttcatggtaaaaaaaacaacaacaaacaaacaaacaaacaaacaaaactttcccaatccagtttagtgtcagagagttaagatatcttttgcaaacttttgtcatctcacaaaatattttcattttcttacccattatttcaacaggtttactaagagacaaatattgagcccccmaaaaatccattataaataaggaaagacaaaaataagagaaatcatattttcrgtttttcatcttctagaatagatttaatattcaccctcctttttttaacacaacatgatatcataattaattatggtgaactggttactaaaatggtttcatgttgttactcccatgatataatacaggttgctatagtgatgaggtaggttttttgttaatcatttatgagattggttaactcatgtttttcagagaatttaaacagaaatggaaaaaggaaagaaagttgactttagagtactgca

SEQ ID NO: 62782 - DNA, 600 bp, Chicken  19866894325111_3
atttgctacttgcaggggctcggtagcattctctaggacctagttaaaaatcctgaagaaagatgtatttacttcatggtaaaaaaaacaacaacaaacaaacaaacaaacaaacaaaactttcccaatccagtttagtgtcagagagttaagatatcttttgcaaacttttgtcatctcacaaaatattttcattttcttacccattatttcaacaggtttactaagagacaaatattgagcccccmaaaaatccattataaataaggaaagacaaaaataagagaaatcatattttcrgtttttcatcttctagaatagatttaatattcaccctcctttttttaacacaacatgatatcataattaattatggtgaactggttactaaaatggtttcatgttgttactcccatgatataatacaggttgctatagtgatgaggtaggttttttgttaatcatttatgagattggttaactcatgtttttcagagaatttaaacagaaatggaaaaaggaaagaaagttgactttagagtactgcaaaacatatgaggcttcattttgctattaagataactctatttgttctagtgt

SEQ ID NO: 62783 - DNA, 600 bp, Chicken  19866894325111_4
tagttaaaaatcctgaagaaagatgtatttacttcatggtaaaaaaaacaacaacaaacaaacaaacaaacaaacaaaactttcccaatccagtttagtgtcagagagttaagatatcttttgcaaacttttgtcatctcacaaaatattttcattttcttacccattatttcaacaggtttactaagagacaaatattgagcccccmaaaaatccattataaataaggaaagacaaaaataagagaaatcatattttcrgtttttcatcttctagaatagatttaatattcaccctccrttttttaacacaacatgatatcataattaattatggtgaactggttactaaaatggtttcatgttgttactcccatgatataatacaggttgctatagtgatgaggtaggttttttgttaatcatttatgagattggttaactcatgtttttcagagaatttaaacagaaatggaaaaaggaaagaaagttgactttagagtactgcaaaacatatgaggcttcattttgctattaagataactctatttgttctagtgtatttctagaaatacatgctatgagtaaaaacttactattc

SEQ ID NO: 62784 - DNA, 600 bp, Chicken  19866894325122_1
acctggatggacaaaaaacacttaggttcagatgttacaaactactataaagtttcaaactgactttcggtctttagaagagtttcagttttgtagacttacaagacttacgctaatgcagaggaaaatgctatttaagcatcacagaaaactatagattgcagttctcaaaaacataataaaattgtggttttcctcagtaactggagaagctgtagttgaaaacatcaacatcagctgctttttagttcttgtttgtttagaataaccttgtttggtgaagacagagtgtgggtgcaraattctagaatcttgatttcattaagcagaaagatattaaggaaatgggaactggagtcgccaggctcagccaaggttgtcacttacaaatagattggtatgactaagatcattcaggtaacttttccactggcttaatgccttcatgttgctagcagtattttaaaaccaaatgaaattccaaatgagatgcagaaaattgagtcagcaataaatcacaccgyagacgcttgcttttccacttactaaattaatttagcaaccctgaaacaagacagaaagcatgctaagtgtagtaaa

SEQ ID NO: 62785 - DNA, 600 bp, Chicken  19866894325122_2
acatcaacatcagctgctttttagttcttgtttgtttagaataaccttgtttggtgaagacagagtgtgggtgcaraattctagaatcttgatttcattaagcagaaagatattaaggaaatgggaactggagtcgccaggctcagccaaggttgtcacttacaaatagattggtatgactaagatcattcaggtaacttttccactggcttaatgccttcatgttgctagcagtattttaaaaccaaatgaaattccaaatgagatgcagaaaattgagtcagcaataaatcacaccgyagacgcttgcttttccacttactaaattaatttagcaaccctgaaacaagacagaaagcatgctaagtgtagtaaaaataggtataaatataacacaggctatttaaaaattaatgcctgttatattttgaatgcataatgaccgcaaaaaatgacttacatttcaaggtgtgtctgtattatatatctaagttgatcaattgtttcctttttggtctagcatattcagtaatatagcatgaataaaaggtaaaattttgtgccaataccttcagaarccttccaatgagtacactcatt

SEQ ID NO: 62786 - DNA, 600 bp, Chicken  19866894325122_3
agtcagcaataaatcacaccgyagacgcttgcttttccacttactaaattaatttagcaaccctgaaacaagacagaaagcatgctaagtgtagtaaaaataggtataaatataacacaggctatttaaaaattaatgcctgttatattttgaatgcataatgaccgcaaaaaatgacttacatttcaaggtgtgtctgtattatatatctaagttgatcaattgtttcctttttggtctagcatattcagtaatatagcatgaataaaaggtaaaattttgtgccaataccttcagaarccttccaatgagtacactcatttgtcatgcaagagttaatgttaaatgcgattgatttagttgcaattacgaaatatcactggagtttgtaaatgtttttacattggccaaaagaaccctgaagtttatatttttccaggaactttcatattttcagtttacaagcaaaatagcagatgtaggggcaaagctcaaacagtcaaattcaaaacaagcaacagctcctgtagcagactgtaggctgcagaacaggtcttgctgttagatgttgtggatgcaaaagtttagtgttaatgggag

SEQ ID NO: 62787 - DNA, 600 bp, Chicken  19866894325122_4
ttttcagtttacaagcaaaatagcagatgtaggggcaaagctcaaacagtcaaattcaaaacaagcaacagctcctgtagcagactgtaggctgcagaacaggtcttgctgttagatgttgtggatgcaaaagtttagtgttaatgggagaaatatactgggtttatgaactaaaagactccatcagaagaatacagtttgatcatcacctaatgaacaaggaggttctaggtaaggcaaactggacaccttgcatccagcacactggaaatcatatatgagctcaatttacactgagtytgattgttccagtctgtttttaatttatgaagaaacaaatgagtatccattttatctttcattattttttaaaactttcttagtaagtgaccagaatctgtatatgaatttatgtaggtgttttattattctctttctgtgaggttgatatgcctcctaatgttttttgtcacagaaccacagaatccttagaattggcaggaacctttaaaggccatctaatccaactcccctgcaatgaacagggacacctatagctacatcaggttgctcagaaccctgtccagcctaaccttgaat

SEQ ID NO: 62788 - DNA, 600 bp, Chicken  19866894325127_1
aactcaaattctttgattattttggtgctggcatttgttcctttcctttttttcaattcaagactagatcagttctagaattctcacctccttagaaatttttatagaatatacattatataagaaataggaatataagaaagaaaataattttcctcagaaagctttctcatacaacagcttcccaggttagtactacactgaggattgtattgtacagagtattacaacatgtacagagttcatattattttgttcttaaaaaaataacaattccaaagttaaggcccaacttggtcyaatttgccaatgtgtgagctgaagagctcaaccaactatttaactgttcctaaggaatataaacaccatccagaattgagataattttctacttggaggtcgaacataacagccttgatataagtagaaggaagaggacatactgttctgttactactaagagtttaatggaagtctttgtttcaaagtctaaactgcctccattttcttctgcaatccatcaaagattaaagaggctccctttcatacttgtcaccagatcctatttctcgtactagaggttagaagagcctgaaaaaa

SEQ ID NO: 62789 - DNA, 600 bp, Chicken  19866894325132_1
tgacctttggccagctggggtaggagagatgcttggttgttctcagtgaaacatgatcacagtgtactcagggaagaaccttttgtaaagtggctctggtcatcattcagtggctgcaatgataatttcagtggaagagcgtgtatgagtcttgttgtttctctttgtcctaagaagacctctctgtggctgaggtctcaaagctgcattcaggctgggtgctgaggataccacgacgtggtggtaccgtgcacaccacggcctggctgctcaccccacctccagtcccatggtagcccygcatgggtcacaagcctgctgctgctgagcagccaaggagcagccgtaggctatgaactgtgttcaggcaccattcttcaggggatgttatggctgtggttacatttgctatagctttagtgaagatgcagactatgccacagggagcctgatcagtgactccactgtccagtgaccagtcctaccaaatggtgcaatcactgaaagaggagtgactgtagaaaatccttcttytaaagaagtctgtcatcctarccaccaaatacaagagactgctttagatctyagaaacattgtttc

SEQ ID NO: 62790 - DNA, 600 bp, Chicken  19866894325132_2
gacgtggtggtaccgtgcacaccacggcctggctgctcaccccacctccagtcccatggtagcccygcatgggtcacaagcctgctgctgctgagcagccaaggagcagccgtaggctatgaactgtgttcaggcaccattcttcaggggatgttatggctgtggttacatttgctatagctttagtgaagatgcagactatgccacagggagcctgatcagtgactccactgtccagtgaccagtcctaccaaatggtgcaatcactgaaagaggagtgactgtagaaaatccttcttytaaagaagtctgtcatcctarccaccaaatacaagagactgctttagatctyagaaacattgtttctgtcttgaagctgactatactccaagtgcatctgaacgtcttcattagaaactgccagtcacttggaggctcctgtccttggttctatctggtagcagtaaggttcatgatagatggctttccttcattagtttaaaatgtactgccttccagctccactgcaggaagcactgaaattatactactgttagtgtgtgtggaaatgactcatggccagtgttgatgtgtggtcca

SEQ ID NO: 62791 - DNA, 600 bp, Chicken  19866894325132_3
ccacggcctggctgctcaccccacctccagtcccatggtagcccygcatgggtcacaagcctgctgctgctgagcagccaaggagcagccgtaggctatgaactgtgttcaggcaccattcttcaggggatgttatggctgtggttacatttgctatagctttagtgaagatgcagactatgccacagggagcctgatcagtgactccactgtccagtgaccagtcctaccaaatggtgcaatcactgaaagaggagtgactgtagaaaatccttcttytaaagaagtctgtcatcctarccaccaaatacaagagactgctttagatctyagaaacattgtttctgtcttgaagctgactatactccaagtgcatctgaacgtcttcattagaaactgccagtcacttggaggctcctgtccttggttctatctggtagcagtaaggttcatgatagatggctttccttcattagtttaaaatgtactgccttccagctccactgcaggaagcactgaaattatactactgttagtgtgtgtggaaatgactcatggccagtgttgatgtgtggtccagctcacctctgcagtgtgaag

SEQ ID NO: 62792 - DNA, 600 bp, Chicken  19866894325132_4
cccatggtagcccygcatgggtcacaagcctgctgctgctgagcagccaaggagcagccgtaggctatgaactgtgttcaggcaccattcttcaggggatgttatggctgtggttacatttgctatagctttagtgaagatgcagactatgccacagggagcctgatcagtgactccactgtccagtgaccagtcctaccaaatggtgcaatcactgaaagaggagtgactgtagaaaatccttcttytaaagaagtctgtcatcctarccaccaaatacaagagactgctttagatctyagaaacattgtttctgtcttgaagctgactatactccaagtgcatctgaacgtcttcattagaaactgccagtcacttggaggctcctgtccttggttctatctggtagcagtaaggttcatgatagatggctttccttcattagtttaaaatgtactgccttccagctccactgcaggaagcactgaaattatactactgttagtgtgtgtggaaatgactcatggccagtgttgatgtgtggtccagctcacctctgcagtgtgaagggctaaccttttccagagcatcatgcttttt

SEQ ID NO: 62793 - DNA, 600 bp, Chicken  19866894325133_1
gatctgtatttttgcatcccaccaagtgactgattttgagtcaaggaaaagagatttcactcatgatcaacttgttatctgtttgataggatcgagtagctaagcagaaaaggtgaacccaaccaccacaggagaagctgtagtttgagctcaggtcatgctatgcagagaaaacccagtatgatctgcactgccctgactgtcacctgtcacttcccaggtagaagcatacagcaatgagcagtgccccactgacctgacttccatattcaggtctcagggaatcccacaccaactaakgagccatcctacaccagagtttggccttgctctgcctcccaagtatcaaaacacctttcctagttcagccccctccttccaattgtggaaatcaatctccaaatccacttctcttgggtggggagcagcatcctaggggttatctgtaaaataaatattgatcaaattcagtctgtcccacacccaaccagatggtgcagctgtcaaacagctctgtcagtgtgtaagaagaattaattgtgccctaccagtcctaccttaagctcccagcacagttacattttaatagtcaaattaatt

SEQ ID NO: 62794 - DNA, 491 bp, Chicken  19866894325133_2
ccataaaaaaaagatacaatatttctggaacataataaaacactttcccgtgatcgccagcatggttctattaatatacatcactcagcttttacagtttctcccagcaagcctcacgtgacagccatgcaataattcaggagaggtttgcatttgtcctcatacatacctgagacacttctccactgcattttaatcaaatctataggctgcataaaactaacaaggtattactttacacagtacactgctgctcaagattcacctactaaaaaatgaaagaaaaaaaagcttaccaarcagtgtgtttataatgtcattctctaagtgtttaaaatattcatataaaagcatgtaatacattggaaagtaaagagctactgtaaaatacagtaacagcctggacaggcaaaatctccaggccacttcakaaarctgctgtcaacatcctcaaataacacaaccaatggagaaccgtcacaggaaggaag

SEQ ID NO: 62795 - DNA, 360 bp, Chicken  19866894325133_3
ataattcaggagaggtttgcatttgtcctcatacatacctgagacacttctccactgcattttaatcaaatctataggctgcataaaactaacaaggtattactttacacagtacactgctgctcaagattcacctactaaaaaatgaaagaaaaaaaagcttaccaarcagtgtgtttataatgtcattctctaagtgtttaaaatattcatataaaagcatgtaatacattggaaagtaaagagctactgtaaaatacagtaacagcctggacaggcaaaatctccaggccacttcakaaarctgctgtcaacatcctcaaataacacaaccaatggagaaccgtcacaggaaggaag

SEQ ID NO: 62796 - DNA, 356 bp, Chicken  19866894325133_4
ttcaggagaggtttgcatttgtcctcatacatacctgagacacttctccactgcattttaatcaaatctataggctgcataaaactaacaaggtattactttacacagtacactgctgctcaagattcacctactaaaaaatgaaagaaaaaaaagcttaccaarcagtgtgtttataatgtcattctctaagtgtttaaaatattcatataaaagcatgtaatacattggaaagtaaagagctactgtaaaatacagtaacagcctggacaggcaaaatctccaggccacttcakaaarctgctgtcaacatcctcaaataacacaaccaatggagaaccgtcacaggaaggaag

SEQ ID NO: 62797 - DNA, 501 bp, Chicken  19866894325137_1
ggtgttaagggcaaatgtgggagaagattatcaacccaaggggtttaacagttgctggactgccctcagccctcagggcaatgatgcacttgagaggtcactgtatcaaatgagggaaaagattcagcttgtgctgctggaagaaatgcagcaggagctgtactttagccgagactacaggcatcaacaaaacagtaactactgccattcgcttttccactcttctttccttcgaccactgcctaccttgtgttgcatctctaattaaaagccataacatcagtgatccagtaatgaacwgcaaagagctgctccaaattattgagatttaaacatgcacatgggcaaagtgggcacctcagcaccatcatcagcacaaggggcatgcacaaacccaaggagagtgacatgtggcattgcagagttctcccgcacctggagcctgtttattacctggggggtcacaccactacttgatgtgaatttgcttgatatttcatt

SEQ ID NO: 62798 - DNA, 600 bp, Chicken  19866894325142_1
gctcactggaaagaatctttacagcttgaagtgatgtgtctgaaagtccattggggcacatattggtgaggttggggctatgatgagagtggagttgaaagcagctttcctccacctgtcagacaaaacctttcacaataagtgatggtttgcaggatttggttgtgatcaaatcagtgtcttgtgtgcttgaaattttacctgctcaatgttcacattgttcgctatcttcccaatatatggactcttatttttccactgttgctcagtttggcagggtagagtactgctaagttggaygcatttgacagatagtagtctttacttyttgagaattagaaatgtcaagtcctgtaatccttatacagaagccctttgtctctagtgygtgyattccttggtagaagaaaataaagatcagtgtaagccttgtgactaaatctactaatttaggacacttaaatgcagtaacaggaagccctcaagtttgttaattttgccatgtttctgaggagcaccaagggcctgataggaagcatgctttgacagaaaaaataagatgtttaacatgtcttttaaatggtaattgtaagatatttt

SEQ ID NO: 62799 - DNA, 600 bp, Chicken  19866894325142_2
aagtgatgtgtctgaaagtccattggggcacatattggtgaggttggggctatgatgagagtggagttgaaagcagctttcctccacctgtcagacaaaacctttcacaataagtgatggtttgcaggatttggttgtgatcaaatcagtgtcttgtgtgcttgaaattttacctgctcaatgttcacattgttcgctatcttcccaatatatggactcttatttttccactgttgctcagtttggcagggtagagtactgctaagttggaygcatttgacagatagtagtctttacttyttgagaattagaaatgtcaagtcctgtaatccttatacagaagccctttgtctctagtgygtgyattccttggtagaagaaaataaagatcagtgtaagccttgtgactaaatctactaatttaggacacttaaatgcagtaacaggaagccctcaagtttgttaattttgccatgtttctgaggagcaccaagggcctgataggaagcatgctttgacagaaaaaataagatgtttaacatgtcttttaaatggtaattgtaagatattttttactctaagtgctacaaatgggcactc

SEQ ID NO: 62800 - DNA, 600 bp, Chicken  19866894325142_3
gtggagttgaaagcagctttcctccacctgtcagacaaaacctttcacaataagtgatggtttgcaggatttggttgtgatcaaatcagtgtcttgtgtgcttgaaattttacctgctcaatgttcacattgttcgctatcttcccaatatatggactcttatttttccactgttgctcagtttggcagggtagagtactgctaagttggaygcatttgacagatagtagtctttacttyttgagaattagaaatgtcaagtcctgtaatccttatacagaagccctttgtctctagtgygtgyattccttggtagaagaaaataaagatcagtgtaagccttgtgactaaatctactaatttaggacacttaaatgcagtaacaggaagccctcaagtttgttaattttgccatgtttctgaggagcaccaagggcctgataggaagcatgctttgacagaaaaaataagatgtttaacatgtcttttaaatggtaattgtaagatattttttactctaagtgctacaaatgggcactcagttaaatgtttacttaactgagagttctgaactcatccctgtgcacattcatggatttt

SEQ ID NO: 62801 - DNA, 597 bp, Chicken  19866894325142_4
agttgaaagcagctttcctccacctgtcagacaaaacctttcacaataagtgatggtttgcaggatttggttgtgatcaaatcagtgtcttgtgtgcttgaaattttacctgctcaatgttcacattgttcgctatcttcccaatatatggactcttatttttccactgttgctcagtttggcagggtagagtactgctaagttggaygcatttgacagatagtagtctttacttyttgagaattagaaatgtcaagtcctgtaatccttatacagaagccctttgtctctagtgygtgyattccttggtagaagaaaataaagatcagtgtaagccttgtgactaaatctactaatttaggacacttaaatgcagtaacaggaagccctcaagtttgttaattttgccatgtttctgaggagcaccaagggcctgataggaagcatgctttgacagaaaaaataagatgtttaacatgtcttttaaatggtaattgtaagatattttttactctaagtgctacaaatgggcactcagttaaatgtttacttaactgagagttctgaactcatccctgtgcacattcatggattttg

SEQ ID NO: 62802 - DNA, 599 bp, Chicken  19866894325143_1
  misc_feature (1)..(132): n is any nucleotide
nnnnnnnnnnnnnnnnnnnnnnnnnnnnnnnnnnnnnnnnnnnnnnnnnnnnnnnnnnnnnnnnnnnnnnnnnnnnnnnnnnnnnnnnnnnnnnnnnnnnnnnnnnnnnnnnnnnnnnnnnnnnnnnnnnnntaacatagatatctatatattatgatggcctaataaatcctctctgggacccctgaatccaggcaaaatgcagagcaaatggaaagaataacatttggacctgacaaaaagtggttttaataaaccgcttttctggcaaatgaaagaatacatagttttctttcctgwtgctggtcatacaaaatactattattctgagtgctaattgaagtgttgtacttttcctctttcygcactgacagaaaaaattcttcagttagaagaagtacctaggtttattatttcatctgttgaaagcaataaaaatgcatacataaagcagcgtgttattggtagacatacaccatacatctgtatgcacacataggtatacagaacataagtatttacttagtaacagcagatacagagtccacagtatttagtgccgattataaatattctttataattatatttagaatatct

SEQ ID NO: 62803 - DNA, 599 bp, Chicken  19866894325143_2
  misc_feature (1)..(68): n is any nucleotide
nnnnnnnnnnnnnnnnnnnnnnnnnnnnnnnnnnnnnnnnnnnnnnnnnnnnnnnnnnnnnnnnnnnntaacatagatatctatatattatgatggcctaataaatcctctctgggacccctgaatccaggcaaaatgcagagcaaatggaaagaataacatttggacctgacaaaaagtggttttaataaaccgcttttctggcaaatgaaagaatacatagttttctttcctgwtgctggtcatacaaaatactattattctgagtgctaattgaagtgttgtacttttcctctttcygcactgacagaaaaaattcttcagttagaagaagtacctaggtttattatttcatctgttgaaagcaataaaaatgcatacataaagcagcgtgttattggtagacatacaccatacatctgtatgcacacataggtatacagaacataagtatttacttagtaacagcagatacagagtccacagtatttagtgccgattataaatattctttataattatatttagaatatctttgtgtagtaaggaatggcaagagacaaaaaagataaattctcctgttatttatgctagagttt

SEQ ID NO: 62804 - DNA, 600 bp, Chicken  19866894325145_1
tctggaaaacatcaactcatctgttgcacagaaaacagacttgcagtctctgcatttgatttcacttccttaaatgtagctgctttcatttcataaatttgtttgatctttattccacgttttccccaaaaagagattaaatcctaatcccacttaagtgtttatcctcccaaaacattatctcagagtttaatagaaaccttgttatttcattatccaagcagctaaaggaaactacaaaataaaacttgattaatgaatggcttccacagtgcctcagatgaggtgcattctgcttgrctgtgaactgctggcattttaaacatatgttcaggtcattgtgccttctgttccatagtgatatcatctaggctgtgtttcgttacttagcttacttgaggaaactgctgcataagaggaagcatcattaacgccacagctcagagcagaaagcttttctatgttgttttctgagcgataatatcattttaacctaggccacagccatttwgcaagtggccagctccacaaataggaaaaacaccttcttttgtgtaattcagaaaggaagaactcccgcacattctgctacaaccttca

SEQ ID NO: 62805 - DNA, 600 bp, Chicken  19866894325145_2
attatccaagcagctaaaggaaactacaaaataaaacttgattaatgaatggcttccacagtgcctcagatgaggtgcattctgcttgrctgtgaactgctggcattttaaacatatgttcaggtcattgtgccttctgttccatagtgatatcatctaggctgtgtttcgttacttagcttacttgaggaaactgctgcataagaggaagcatcattaacgccacagctcagagcagaaagcttttctatgttgttttctgagcgataatatcattttaacctaggccacagccatttwgcaagtggccagctccacaaataggaaaaacaccttcttttgtgtaattcagaaaggaagaactcccgcacattctgctacaaccttcagttgtaatactgaaggtgtgaactgagtacctaacattatctttaacttctcattgcgtctgtacaatttgctttgcagcagaagattctggtgggtttattgttagaataatcagggtcagatgtcagaagccagaatgtacgtctttaaggcagaaaactgttgaactcaagtttgcatctccactccataataatcctccattgcatc

SEQ ID NO: 62806 - DNA, 472 bp, Chicken  19866894325173_1
ctattaaatctaccatgactgatgcggtcctcatttttcaaggatgcattaagggaacagcgattgaaagatgacacagaaattatgtggtgttactgcagagatggctctgattacagcctccttgtacgtcccctgcaaattcctttacttgccgtgttatttccctgcaagtgtttgtaagtattaaattaatttggcagcgtgaggttgtaagaaagaggatatttgcatgccaggaggagctgtgagcatcaccttgtttgggcttcatctgcccctcagaaaccttgttcctgyactgggagatccatgagcagctcaagggaaggacctacctcaggatgcagccatggggctatggctcacggtgaggggaggtgtcagggcaggcatggatctgagttagttaagctttccttgtgtggcttccctgaaaatgtaggcagttttccatagggcactgcaggtg

SEQ ID NO: 62807 - DNA, 600 bp, Chicken  19866894325174_1
gtggaatggagagctcttttctcattgccttatgtgtcagttgcaggtgatctttctgggtcatcatattccactataattttctccggggatgctaattttatttaaataaattgatttaaaatgtcttctgtgtacaacagctgtttagaggagatgcttactaagatgcactctggagacagggacttcaaaggtttttaagatcaagtgatattactaagtcttccatacctccctctaattttgggatgctgaacccttttgaatacacctctggtatcttctctgtatggtacyccccctaccacctcctcatccttccttcacactttgattttaatgcttgggttgtttttttctttttgtctgtttgcttttttcccttttgcttcttttcttttatgataacaccaccagcagaattaacttaaatttacggtgcagcttttcttggctgggaggtatggtacaattgcagtgcaaattgtaattaaaattttaagttctggggtcagagcgtacttggtgataattccttcgatgcagagttctatgttcaatttagatcaatccttatgtagtcattacaaattttaa

SEQ ID NO: 62808 - DNA, 599 bp, Chicken  19866894325185_1
  misc_feature (1)..(108): n is any nucleotide
nnnnnnnnnnnnnnnnnnnnnnnnnnnnnnnnnnnnnnnnnnnnnnnnnnnnnnnnnnnnnnnnnnnnnnnnnnnnnnnnnnnnnnnnnnnnnnnnnnnnnnnnnnnnatcccttctgttgtctgtagtgcataaattacaatgactaatctgacagaacagattcacagtaataccagagaaataaccatttttccccccaaagttttctgttttactgaatttcatctgtttttaggaattcttgataagtaccttggagttacagattagaaaacgacaattttttttccaaattcsyatttcccccccccctcaactttatttttctgcagagaagctactcagagtgtatccattcgtattctataggccacgcagtgccaaaaacagttgaagtatccatttggaattccttacttctccatacagatgaaaatcatcccattctggattacagttatcagtttagcattcatataaagtaaagccatagcaaagactaccttataaagagagactgaagagtataattatgtgtgcgtacttcagttatacttgttgcctctcttagactgttggaaggagaactcctattt

SEQ ID NO: 62809 - DNA, 599 bp, Chicken  19866894325185_2
  misc_feature (1)..(107): n is any nucleotide
nnnnnnnnnnnnnnnnnnnnnnnnnnnnnnnnnnnnnnnnnnnnnnnnnnnnnnnnnnnnnnnnnnnnnnnnnnnnnnnnnnnnnnnnnnnnnnnnnnnnnnnnnnnatcccttctgttgtctgtagtgcataaattacaatgactaatctgacagaacagattcacagtaataccagagaaataaccatttttccccccaaagttttctgttttactgaatttcatctgtttttaggaattcttgataagtaccttggagttacagattagaaaacgacaattttttttccaaattcsyatttcccccccccctcaactttatttttctgcagagaagctactcagagtgtatccattcgtattctataggccacgcagtgccaaaaacagttgaagtatccatttggaattccttacttctccatacagatgaaaatcatcccattctggattacagttatcagtttagcattcatataaagtaaagccatagcaaagactaccttataaagagagactgaagagtataattatgtgtgcgtacttcagttatacttgttgcctctcttagactgttggaaggagaactcctatttt

SEQ ID NO: 62810 - DNA, 600 bp, Chicken  19866894325187_1
aaaaaacaagtaacattagaaatgtcaaagaacaaaagtataatgcatttcttcataggctaaaaaaatgtcacagcatgttacaattgggtatggaatttattcaaaccagaaacatccaacacacactcataaacaaaatcaaaccaattacatccatacatatctatcaaaattttgccatcaacacacttactcttccatcacagtctgaataatgataactccttgttctgtcctgtcctcagcaaacattgagaatacattgcaaaggcaagatatgactgtttttgtacaaaygttagaaaagcagagcaagaaaatggaaacaaagctcttcagcarttcacttgaaaacatttttttctgcaaatactaattcaaaatttaaacaaaagtastattttggaagagcatttaaagattttaagtctaaaggtgagcattttaaaggtattcaggtatttctctgttcagtgaaacattaccttactaatttataagtcaataaaactaagacttctagatatatttcaatgttacttacaacaaagaaacagacgcataagtatgagaatgagaattattcatatgagaaaa

SEQ ID NO: 62811 - DNA, 600 bp, Chicken  19866894325187_2
catttcttcataggctaaaaaaatgtcacagcatgttacaattgggtatggaatttattcaaaccagaaacatccaacacacactcataaacaaaatcaaaccaattacatccatacatatctatcaaaattttgccatcaacacacttactcttccatcacagtctgaataatgataactccttgttctgtcctgtcctcagcaaacattgagaatacattgcaaaggcaagatatgactgtttttgtacaaaygttagaaaagcagagcaagaaaatggaaacaaagctcttcagcarttcacttgaaaacatttttttctgcaaatactaattcaaaatttaaacaaaagtastattttggaagagcatttaaagattttaagtctaaaggtgagcattttaaaggtattcaggtatttctctgttcagtgaaacattaccttactaatttataagtcaataaaactaagacttctagatatatttcaatgttacttacaacaaagaaacagacgcataagtatgagaatgagaattattcatatgagaaaatatgagaattaagaatgtaatagttcccaatcaacaggtcttaaa

SEQ ID NO: 62812 - DNA, 600 bp, Chicken  19866894325187_3
attcaaaccagaaacatccaacacacactcataaacaaaatcaaaccaattacatccatacatatctatcaaaattttgccatcaacacacttactcttccatcacagtctgaataatgataactccttgttctgtcctgtcctcagcaaacattgagaatacattgcaaaggcaagatatgactgtttttgtacaaaygttagaaaagcagagcaagaaaatggaaacaaagctcttcagcarttcacttgaaaacatttttttctgcaaatactaattcaaaatttaaacaaaagtastattttggaagagcatttaaagattttaagtctaaaggtgagcattttaaaggtattcaggtatttctctgttcagtgaaacattaccttactaatttataagtcaataaaactaagacttctagatatatttcaatgttacttacaacaaagaaacagacgcataagtatgagaatgagaattattcatatgagaaaatatgagaattaagaatgtaatagttcccaatcaacaggtcttaaatttattttttaagttctgcattttaaatttctgatgcatatgatttaacaaaacca

SEQ ID NO: 62813 - DNA, 599 bp, Chicken  19866894325190_1
  misc_feature (1)..(177): n is any nucleotide
nnnnnnnnnnnnnnnnnnnnnnnnnnnnnnnnnnnnnnnnnnnnnnnnnnnnnnnnnnnnnnnnnnnnnnnnnnnnnnnnnnnnnnnnnnnnnnnnnnnnnnnnnnnnnnnnnnnnnnnnnnnnnnnnnnnnnnnnnnnnnnnnnnnnnnnnnnnnnnnnnnnnnnnnnnnnnnnnnattaagagcacaccccactagaatcagtatgtgaaagcagttggtaccatacccacacagccttgtacttatggaggattgctgtcagcaattattttgcttaaaatctcccacacatttgarctcattttcccatttgttcttttactgtgtctaacactttttatttgttcatcgacattacatgttaagagttcttttggtatgtctacaagtaactttcagtgccttctactgcagcaactagcggttcaaaagtttaagttccagtgtagtgccacagcacaataactattcaactatttatttaaaacagacaagtttaagacaattccttctcggcttgccaaagagttaccagcatcggttttctaactctgactctgttcctctagttccatctgtctgtatgttctgaaagc

SEQ ID NO: 62814 - DNA, 503 bp, Chicken  19866894325190_2
attttcccatttgttcttttactgtgtctaacactttttatttgttcatcgacattacatgttaagagttcttttggtatgtctacaagtaactttcagtgccttctactgcagcaactagcggttcaaaagtttaagttccagtgtagtgccacagcacaataactattcaactatttatttaaaacagacaagtttaagacaattccttctcggcttgccaaagagttaccagcatcggttttctaactctgactctgttcctctagttccatctgtctgtatgttctgaaagcctaraagtttaagttgttgaacttaagataggagctctactacacaacgatattcctgatgttccactcatttttaaaaagctgcaaaaattatacaagtatagagctaaagaatgtttttatttatctttcaactctagatataaaataatacacaaatgtgaacatactgaacgtcttcagagaaataattacatgctctgagaa

SEQ ID NO: 62815 - DNA, 600 bp, Chicken  19866894325191_1
gcaacagaagaaataacaagaagtaacaagaaagttatggtacaagctaccaaaaaaatattccttaaaaataagaatttatcatctgaagtgtcataagatcccagaacacatgtcgaccgcccttcccaatcctcccctaaaggctaatgctctaaaactctattagctgaacgtagtttaaaaaacaaagtcgaagcatgcaagcccatctaatttaggacactcttaatttcccctgtctaaacagaggagctgaagggctgcttcagctgaggagcccttcatcttgatgacagragaagagcagattttcattagccagcaaagcagcagcaccgtgggccaaacggaacagttcccgcaagtatttatgggcactcctcgggcaaatgttgaagatgactgaaaacagacaaccayggcacaagcaaacacrgcagcatcaccccacatcattcacctccactctgctcacrctcggccctccggagctgcaccgctccctcctatgggctgctccgccttttacctcggtgcagtcagcagtgatgctcacaagcaccccagtgacaaaacctgcagaatctcacgtcaacg

SEQ ID NO: 62816 - DNA, 582 bp, Chicken  19866894325191_2
ccttcccaatcctcccctaaaggctaatgctctaaaactctattagctgaacgtagtttaaaaaacaaagtcgaagcatgcaagcccatctaatttaggacactcttaatttcccctgtctaaacagaggagctgaagggctgcttcagctgaggagcccttcatcttgatgacagragaagagcagattttcattagccagcaaagcagcagcaccgtgggccaaacggaacagttcccgcaagtatttatgggcactcctcgggcaaatgttgaagatgactgaaaacagacaaccayggcacaagcaaacacrgcagcatcaccccacatcattcacctccactctgctcacrctcggccctccggagctgcaccgctccctcctatgggctgctccgccttttacctcggtgcagtcagcagtgatgctcacaagcaccccagtgacaaaacctgcagaatctcacgtcaacgccgtgtaaacatcgctgcctgaacataagcacccacatcatcaaagcctttcggggacagtcagcacttgggttgaattcgacagaaactgcacagttacgtgct

SEQ ID NO: 62817 - DNA, 566 bp, Chicken  19866894325191_3
ctaaaggctaatgctctaaaactctattagctgaacgtagtttaaaaaacaaagtcgaagcatgcaagcccatctaatttaggacactcttaatttcccctgtctaaacagaggagctgaagggctgcttcagctgaggagcccttcatcttgatgacagragaagagcagattttcattagccagcaaagcagcagcaccgtgggccaaacggaacagttcccgcaagtatttatgggcactcctcgggcaaatgttgaagatgactgaaaacagacaaccayggcacaagcaaacacrgcagcatcaccccacatcattcacctccactctgctcacrctcggccctccggagctgcaccgctccctcctatgggctgctccgccttttacctcggtgcagtcagcagtgatgctcacaagcaccccagtgacaaaacctgcagaatctcacgtcaacgccgtgtaaacatcgctgcctgaacataagcacccacatcatcaaagcctttcggggacagtcagcacttgggttgaattcgacagaaactgcacagttacgtgct

SEQ ID NO: 62818 - DNA, 526 bp, Chicken  19866894325191_4
tttaaaaaacaaagtcgaagcatgcaagcccatctaatttaggacactcttaatttcccctgtctaaacagaggagctgaagggctgcttcagctgaggagcccttcatcttgatgacagragaagagcagattttcattagccagcaaagcagcagcaccgtgggccaaacggaacagttcccgcaagtatttatgggcactcctcgggcaaatgttgaagatgactgaaaacagacaaccayggcacaagcaaacacrgcagcatcaccccacatcattcacctccactctgctcacrctcggccctccggagctgcaccgctccctcctatgggctgctccgccttttacctcggtgcagtcagcagtgatgctcacaagcaccccagtgacaaaacctgcagaatctcacgtcaacgccgtgtaaacatcgctgcctgaacataagcacccacatcatcaaagcctttcggggacagtcagcacttgggttgaattcgacagaaactgcacagttacgtgct

SEQ ID NO: 62819 - DNA, 600 bp, Chicken  19866894325202_1
tcgctattgtcatcttcagcacatccaaaggttcagctttactgcttactctccccatggaatgagatgggcaccaagagcaatctcacagatcagaggatttgctgggtttaatctgaaaggcagcagttcaggttggaggattctgcctccctttaaacctttcgaaaagttaaatttaagtcaatatcaaagtaaaatatcatttcagcatgccaaggcaaagtgttcattttgtcagtgtagaaactgtcttaaaatttttatgtattattttctcttttttacctcactctctcyctcatgcttgaaagcatttgtcaaaatttgttctgattcataaataataattttaacctggccagaaaatggaaagagccttccaacctgcttgcrgcaaggaatctcagaggcacggatgtctgtgctttgaaacaaacacagtacagataaaggacggttgatattttccccagttttcccttctgcaggggttataggtccaggcacacccctcagtgatcgaatgggtggcaaccctgcccatggcaggctggctggagctggatggtcctggaggtcctttccacaccaagccat

SEQ ID NO: 62820 - DNA, 600 bp, Chicken  19866894325202_2
aggatttgctgggtttaatctgaaaggcagcagttcaggttggaggattctgcctccctttaaacctttcgaaaagttaaatttaagtcaatatcaaagtaaaatatcatttcagcatgccaaggcaaagtgttcattttgtcagtgtagaaactgtcttaaaatttttatgtattattttctcttttttacctcactctctcyctcatgcttgaaagcatttgtcaaaatttgttctgattcataaataataattttaacctggccagaaaatggaaagagccttccaacctgcttgcrgcaaggaatctcagaggcacggatgtctgtgctttgaaacaaacacagtacagataaaggacggttgatattttccccagttttcccttctgcaggggttataggtccaggcacacccctcagtgatcgaatgggtggcaaccctgcccatggcaggctggctggagctggatggtcctggaggtcctttccacaccaagccattctctgatgatatgtgatgaaggtcccttccaatccaagcccttctatgattcattctgtgattctcagtgaaaggtgatgatcagatcacagcag

SEQ ID NO: 62821 - DNA, 600 bp, Chicken  19866894325207_1
tatacaattgttaagctacattttgatgagtattttctcattcaggtcaaattctgccttctctcatgccaccctgcaaagctagaattgaaaatgaatctcaactcttctttctatgattgagcacaagtattggaacagtatgatgggaagctgcgggaagagcaaaaaaaaaaatagacctgtgggagctaagaagatgtgaaaggcttcaagcattcccttttaattgaaatgctctgtaattaaatccaattttgatcatggaaagcattatgtgttttacttagattgtattcrttccttctacatcacttacatagatgaaggccactattcctcagtgctgcaagaaatcccagataaaaactctaacttctgcctacaaacgttcaaaacttggcaagtgttacccatgatagcttacctataagggaaatcttaagaaatgaagtgaaagttttcatggcctcctatttgtaatcttcaacccacttaagtctgatttatttatcagaaggaagtaaacaagacgacatttcttacagtctctgcagcactcatccttcttgacctccagcaagacatatttacgtttcc

SEQ ID NO: 62822 - DNA, 600 bp, Chicken  19866894325208_1
tgaaggagaatattaagctcgtacagctaatgcttcagcttaggctcttgtcatctcaaaaagcaattttgttctccccaaaatgtttaaacaaggaaacttgagaagtttaagcagaaggtatttgtggtagccgctgggcctaagttgataggaccctgcctacaggtgcctagcaacataccctggtttctgctagtgctctcatggagcttgtcatcagtttaattgcaccctcaaagcaaagtagcattgttttcttatatcctaaggctcaggattcaagcttttcccaacagytacaggtaattaacttgtcagcagtgaagtgaattctaccatgtatacatagttattttgaatgtttggaagaacattaagtagattagagttttttctaattccagttcattaggtttatgaagattatatgacaaacagatgttagattcgtggtccatgtccaccaggtagcaacacctaggttggcatgttgctgttgtgatgtaaaacaaatggagagcttctgggtagtgaaggtccatataattatacacatctgcagaaatcacagcatggtacatggtgttacgaatttga

SEQ ID NO: 62823 - DNA, 599 bp, Chicken  19866894325218_1
  misc_feature (1)..(216): n is any nucleotide
nnnnnnnnnnnnnnnnnnnnnnnnnnnnnnnnnnnnnnnnnnnnnnnnnnnnnnnnnnnnnnnnnnnnnnnnnnnnnnnnnnnnnnnnnnnnnnnnnnnnnnnnnnnnnnnnnnnnnnnnnnnnnnnnnnnnnnnnnnnnnnnnnnnnnnnnnnnnnnnnnnnnnnnnnnnnnnnnnnnnnnnnnnnnnnnnnnnnnnnnnnnnnnnnnnnnnnnntcctgaacacaaaccagcaagagaaaaaacaattgtgaatcaaagaacacacaaactatcgagaagggagcaaaaggaagaacrcatctcacaacttcatccacctgcaaggttaggagcacagtataaggagctggttaaggcccttctcaagtcagtggatacagaaaatgcccctgtgtctcactctgctctcatacacgacctgagcaaggcctggaaaaagcaagacaactgtcctaacccagcaaaggctcagtgcagctggtgtgtgctctatcctgtgtgcatccctgggatgctctcagccctgggctagatctttcactggggcaacttccccatggcgatgccttacacgcctgcgcagggctcagtaccag

SEQ ID NO: 62824 - DNA, 600 bp, Chicken  19866894325218_2
aggttaggagcacagtataaggagctggttaaggcccttctcaagtcagtggatacagaaaatgcccctgtgtctcactctgctctcatacacgacctgagcaaggcctggaaaaagcaagacaactgtcctaacccagcaaaggctcagtgcagctggtgtgtgctctatcctgtgtgcatccctgggatgctctcagccctgggctagatctttcactggggcaacttccccatggcgatgccttacacgcctgcgcagggctcagtaccagaagtgctctggctccaccagcagttytgcaggaacacctgggtgaggctttacagcctgtatcacgtacagtgatccctctgatcttaactgcacgctaacaacctctacagtcagatctagggtaatgaactgcgcacattaaaaacaatctcgaattcaattgtcccatcacatgaaagactgcaagcaaaaatgagggtgggggagaaatccaaataaatgtcagtgtagctcctacacacaacaacatgaaacaatcttttctgatgatagagaaagcaatcaggtctgatggactcacttataatggttattacatccttg

SEQ ID NO: 62825 - DNA, 600 bp, Chicken  19866894325220_1
gcatacacatggagttaattaatgcagcccacattgctgttaatgacagccaagcacctaatccaccatatgcagcacgccgaatacattaccctatgaaattgcagtttcacagttattgtactttggtttatgcagtttcccttatgctgagctgaatggattttcattctgtgtccaggagcattccagtccctccagtagcaaacaataaatgaatcttaggaggctctggtgtacttaggaggctctggtgaacctatcaaaagaggcaatttatttctgaacttggcactaggyacagcatgccttgtaaatgtcaatttgtgtatgtgtgagcatctgacactactcagcagcacatggctggggccaagaatttgactgattctggctgatttgcaagcctaaaaatattttcttttatcaatatccattttttgtgcttatttgcatgctaagacaattctaagtgagcaatggcttcatgaattcatccacaacagytctgtggagatcaagtacacagtgacctgccataaactgcatgatgacacagtcagaagcattgcataagaaatggcccatatataggcatac

SEQ ID NO: 62826 - DNA, 600 bp, Chicken  19866894325220_2
acaataaatgaatcttaggaggctctggtgtacttaggaggctctggtgaacctatcaaaagaggcaatttatttctgaacttggcactaggyacagcatgccttgtaaatgtcaatttgtgtatgtgtgagcatctgacactactcagcagcacatggctggggccaagaatttgactgattctggctgatttgcaagcctaaaaatattttcttttatcaatatccattttttgtgcttatttgcatgctaagacaattctaagtgagcaatggcttcatgaattcatccacaacagytctgtggagatcaagtacacagtgacctgccataaactgcatgatgacacagtcagaagcattgcataagaaatggcccatatataggcatactttgattttcactgtttgtctgttctaatcctgcaggaatcagagacattttaatcttttttattgttttgtattcatttacatgcagtactcacaggcctctggcaggcagagagagctatataagtcaaatgcattgttgttactacctgtagttcctatcatgggcccaattctcttcccatttgacgtcaatggcaattcttc

SEQ ID NO: 62827 - DNA, 600 bp, Chicken  19866894325222_1
ttagatatgacacgtgctagacaccacagccatgagcttaattctcagagcctgcaaagcctatctgaaaatcttcacgaggctctgagagtgagcatttgccaaattcagatttctcgggctttgttctcttccttggacagtattgcctcctggagaaggtacaagcgctgactttgctgacaggaccagatctcagtagcactgttttttttcatagataattacaatatgagtctggaaatttaaaaatgttgacctctgccacatgatgctgtgatatttatcaaaggagctgargaagaaaaagttttaccacagagtggcaaagattggggtgatggtgagagttctgttctctgttacagtaatggaacagactgtgagaaacagatgagacagaaaactttttcagagtaattgttgcaaaaaaaagaacttgtgtgtcttccagcttctctgttgtttcagacccaaagaaggtcttgtgttgctgtggtgctgctgctagcagtaatcatgttgctgtgatggtctctcataaatgagaacatatttctcgggaggagtatggtgctctagcttgtatagataggaaaa

SEQ ID NO: 62828 - DNA, 600 bp, Chicken  19866894325223_1
agagggcttggaggcgatagcaggactgcctctcctgcttctattttctcgctgagctgtgatctcgactggaacgagcgactaattccttcccctcagctgtggggtccgtctgtagcacgtggggcttctgtgctttgccacttcccttcccagcgtacagctgagcaggagaatggtgcgaatcaaccttttcagagctgcattcatctttcctcggcgcttttcaatcgcggagctttgcagccggcacagagctgaggctgccctcgctttgcaagggatgctcaggggctgcakccccaaatccatgggcagggaaaagccgagcacagaaatactcacgccgtgctcagctgaaagcagagcaaatcctgccctcgtggccaaaccagctcagatttctcagatttccaaaattgtctgcactgaaatctgctcctgtgccccaaagcaggcctgctgggtctgcctgcctgtttgttctgaaagagctgcattgggaaacgctaaagaatcaaaacatcagctctgcacaggtcaggattcagtttctgcagtgcaacatcaggcgtgcaacaggagcacagcccacagatc

SEQ ID NO: 62829 - DNA, 600 bp, Chicken  19866894325226_1
tgggccactctcatctcctgcagctgaggatcagccttctgctaacctccagccctgtgtcatgcagcaacctgctgcctctgctccaaccttctggggaaagcacatccctcccagcaccccttgccttgtaacttgctgttcctactcagcgttagcgaactattccaatgttataaaagagcaaataggcttacagctcctgcatgtatgagctgctgctaacatttgctatttttaacctccttatggctccttacacccaaacgaagcggcagcatcaacagagactacacagcyattactgatcccaggtattcgtagacatatttctcagcattttaaagcaatttgttcatgcaccctagaagccagaatggggctcrttatagctacagcagctgtcattaaaattcattgttttccggtgaaactatatattcatcacatttgttccacacttcaaacacgaggggatgaggacatygttatagggcagaaaggaccagagcaacacattggagcctgagctgtccaacagccaggtttataacattcatgtcagcatttttggatctctggtatggcacctcattacag

SEQ ID NO: 62830 - DNA, 558 bp, Chicken  19866894325226_2
caaccttctggggaaagcacatccctcccagcaccccttgccttgtaacttgctgttcctactcagcgttagcgaactattccaatgttataaaagagcaaataggcttacagctcctgcatgtatgagctgctgctaacatttgctatttttaacctccttatggctccttacacccaaacgaagcggcagcatcaacagagactacacagcyattactgatcccaggtattcgtagacatatttctcagcattttaaagcaatttgttcatgcaccctagaagccagaatggggctcrttatagctacagcagctgtcattaaaattcattgttttccggtgaaactatatattcatcacatttgttccacacttcaaacacgaggggatgaggacatygttatagggcagaaaggaccagagcaacacattggagcctgagctgtccaacagccaggtttataacattcatgtcagcatttttggatctctggtatggcacctcattacagtcaaaatgatctcagcagcaaactaaggcatcacttcaacacat

SEQ ID NO: 62831 - DNA, 457 bp, Chicken  19866894325226_3
ataggcttacagctcctgcatgtatgagctgctgctaacatttgctatttttaacctccttatggctccttacacccaaacgaagcggcagcatcaacagagactacacagcyattactgatcccaggtattcgtagacatatttctcagcattttaaagcaatttgttcatgcaccctagaagccagaatggggctcrttatagctacagcagctgtcattaaaattcattgttttccggtgaaactatatattcatcacatttgttccacacttcaaacacgaggggatgaggacatygttatagggcagaaaggaccagagcaacacattggagcctgagctgtccaacagccaggtttataacattcatgtcagcatttttggatctctggtatggcacctcattacagtcaaaatgatctcagcagcaaactaaggcatcacttcaacacat

SEQ ID NO: 62832 - DNA, 599 bp, Chicken  19866894325227_1
  misc_feature (1)..(113): n is any nucleotide
nnnnnnnnnnnnnnnnnnnnnnnnnnnnnnnnnnnnnnnnnnnnnnnnnnnnnnnnnnnnnnnnnnnnnnnnnnnnnnnnnnnnnnnnnnnnnnnnnnnnnnnnnnnnnnnnnccagggaaaaggactggatagatcatagagctcattccaaagcagaacgcaggtgctcataacaccctctggtggtgctcaagttcactccatacctgggcagcaaaggttcctgttggatcttggaagttaagcagccagtccccccttcacaccaagtcatggcagcatggcttcacaacagaaytgcaatggtgactgtatggcacagctgtttgcacttgcattttctgtacataacaattactcccaccaaagaatacagacaaatgctctaaaatatctttctgtattaaagagggcttttcattgctakctaaaattaacagtatttggtgaaagcatgaaacttgtttgcatttgaattgttactatgtgagcatgattaagcaggagaataagtatctaccaaaatgttaaaaataacaagtactgagatgctagtaattgatcagaaaatgatgacacatgaatatgaactaaatc

SEQ ID NO: 62833 - DNA, 600 bp, Chicken  19866894325227_2
gatagatcatagagctcattccaaagcagaacgcaggtgctcataacaccctctggtggtgctcaagttcactccatacctgggcagcaaaggttcctgttggatcttggaagttaagcagccagtccccccttcacaccaagtcatggcagcatggcttcacaacagaaytgcaatggtgactgtatggcacagctgtttgcacttgcattttctgtacataacaattactcccaccaaagaatacagacaaatgctctaaaatatctttctgtattaaagagggcttttcattgctakctaaaattaacagtatttggtgaaagcatgaaacttgtttgcatttgaattgttactatgtgagcatgattaagcaggagaataagtatctaccaaaatgttaaaaataacaagtactgagatgctagtaattgatcagaaaatgatgacacatgaatatgaactaaatcatctcgtttgtttgactcatcattctttgtccactcttgccaccttggtcttgagtggtgtgaaaaatcttagwagcagtggaaagtggaaactcctgaccagcaaatctgaagaagcaaagaacacagt

SEQ ID NO: 62834 - DNA, 600 bp, Chicken  19866894325227_3
tacagacaaatgctctaaaatatctttctgtattaaagagggcttttcattgctakctaaaattaacagtatttggtgaaagcatgaaacttgtttgcatttgaattgttactatgtgagcatgattaagcaggagaataagtatctaccaaaatgttaaaaataacaagtactgagatgctagtaattgatcagaaaatgatgacacatgaatatgaactaaatcatctcgtttgtttgactcatcattctttgtccactcttgccaccttggtcttgagtggtgtgaaaaatcttagwagcagtggaaagtggaaactcctgaccagcaaatctgaagaagcaaagaacacagttaattaactgacaacacrggaagagatttcccattatttaaatcagaatgtagcattggtttggtttatcttaattgaagggaatttagtatttattattccagttacagccgaatagtaaaccaaacagtgtatgcgtaatgcccccccttcagcagatgtgagctgattgcagtctgactctggagatgccacatcctgggctgcagaaactaagggatgttcaactaggaagaaaggggta

SEQ ID NO: 62835 - DNA, 600 bp, Chicken  19866894325227_4
ggtgaaagcatgaaacttgtttgcatttgaattgttactatgtgagcatgattaagcaggagaataagtatctaccaaaatgttaaaaataacaagtactgagatgctagtaattgatcagaaaatgatgacacatgaatatgaactaaatcatctcgtttgtttgactcatcattctttgtccactcttgccaccttggtcttgagtggtgtgaaaaatcttagwagcagtggaaagtggaaactcctgaccagcaaatctgaagaagcaaagaacacagttaattaactgacaacacrggaagagatttcccattatttaaatcagaatgtagcattggtttggtttatcttaattgaagggaatttagtatttattattccagttacagccgaatagtaaaccaaacagtgtatgcgtaatgcccccccttcagcagatgtgagctgattgcagtctgactctggagatgccacatcctgggctgcagaaactaagggatgttcaactaggaagaaaggggtacttttaatgtagtatttcgagattaaaaaggcatggaacactgtctttatgctctagccttttctgaatcctaa

SEQ ID NO: 62836 - DNA, 600 bp, Chicken  19866894325228_1
cacatcagtgagaaggccatgtagaagtttcccaaaaaaaagagaggtaaaggtttgggatgcatgaaggaaatgtgtatcacacaaacagcctgggacatggaaataccaggtgggccctgatgtattttgttagggataagagaaagggaaggagagcaaacacctcagaaatgtatttcccatacaactgggcccacaaggcatttggacaaaatgaacagccaaggtgactgcagcatcaggaactctcccagaacatcaagttcacttccaaaatgaatgcagtcctgtaccacwgagacttttttgcaaacaaacagaagagaaaccgytacttttctctttaaaattagtactaatgcaaatcagaaaggagacctctcaaatttaaataaatgcactggaaagaatatctcacttaagcccagccccactttcagaagcctcacacwatgtatgaatctactaaaaatactttatagcaggggtcacaagaaaagactatctgatcatcaaaacatgagctctatggtgaccactggtcaaagatttcatacaacatctctcagagtagcttcatcacatctgattattgaa

SEQ ID NO: 62837 - DNA, 600 bp, Chicken  19866894325228_2
aaaaaagagaggtaaaggtttgggatgcatgaaggaaatgtgtatcacacaaacagcctgggacatggaaataccaggtgggccctgatgtattttgttagggataagagaaagggaaggagagcaaacacctcagaaatgtatttcccatacaactgggcccacaaggcatttggacaaaatgaacagccaaggtgactgcagcatcaggaactctcccagaacatcaagttcacttccaaaatgaatgcagtcctgtaccacwgagacttttttgcaaacaaacagaagagaaaccgytacttttctctttaaaattagtactaatgcaaatcagaaaggagacctctcaaatttaaataaatgcactggaaagaatatctcacttaagcccagccccactttcagaagcctcacacwatgtatgaatctactaaaaatactttatagcaggggtcacaagaaaagactatctgatcatcaaaacatgagctctatggtgaccactggtcaaagatttcatacaacatctctcagagtagcttcatcacatctgattattgaaaacatcactatacttattttccttgatcactgtat

SEQ ID NO: 62838 - DNA, 600 bp, Chicken  19866894325228_3
agagcaaacacctcagaaatgtatttcccatacaactgggcccacaaggcatttggacaaaatgaacagccaaggtgactgcagcatcaggaactctcccagaacatcaagttcacttccaaaatgaatgcagtcctgtaccacwgagacttttttgcaaacaaacagaagagaaaccgytacttttctctttaaaattagtactaatgcaaatcagaaaggagacctctcaaatttaaataaatgcactggaaagaatatctcacttaagcccagccccactttcagaagcctcacacwatgtatgaatctactaaaaatactttatagcaggggtcacaagaaaagactatctgatcatcaaaacatgagctctatggtgaccactggtcaaagatttcatacaacatctctcagagtagcttcatcacatctgattattgaaaacatcactatacttattttccttgatcactgtatttatttccytcagatgaaattgctcttctttatataagcaaacagaaacttgttttttttttcaaaaagtgtacattttttattttaaaaggttattgttttcttttaaaaaatacaaaa

SEQ ID NO: 62839 - DNA, 524 bp, Chicken  19866894325228_4
ctttaaaattagtactaatgcaaatcagaaaggagacctctcaaatttaaataaatgcactggaaagaatatctcacttaagcccagccccactttcagaagcctcacacwatgtatgaatctactaaaaatactttatagcaggggtcacaagaaaagactatctgatcatcaaaacatgagctctatggtgaccactggtcaaagatttcatacaacatctctcagagtagcttcatcacatctgattattgaaaacatcactatacttattttccttgatcactgtatttatttccytcagatgaaattgctcttctttatataagcaaacagaaacttgttttttttttcaaaaagtgtacattttttattttaaaaggttattgttttcttttaaaaaatacaaaagactaccagaacactacaacagaaacaaaagagaaaaaaaaaatcaacaacaacaaccaaaccttacaaatatttccaactctactttatagtacatgaaacaaacaaaaaag

SEQ ID NO: 62840 - DNA, 600 bp, Chicken  19866894325231_1
catgacatttgtcataagagatataagcctcttcagataatcagaaatctcactgtacttcagtaaaataagagcattaactcagttaatgtcctggccaaattccagctctgataattacattctgaatacttaaatctctactgtcatttactggctgaaatacactatgtctatctatttaagtatcatcgcattatctgagcaccttccaaatgcccttaaacttgtgtgaagacacaggccctcctaggaggcaccagatactgtcttgcacactgaattggaatttggaagagytactcaagatatgttactgtcagactcactgtctgcatttaaacatgcgtgaaagctctgtggatagttctcttytaaaagacaatgccattattagatgagattggtttcggacattcatgatctcaagtctctaaatcagttaatgaataaagctttcctctccttcatgaagaaacaaaaatgaaaagaacacttatgtctctttaaccagtgttagcctcagtcatccagctgaaataatacagtcactagacagtggagggttcactgctccccacatatcatttttatttctta

SEQ ID NO: 62841 - DNA, 600 bp, Chicken  19866894325231_2
attaactcagttaatgtcctggccaaattccagctctgataattacattctgaatacttaaatctctactgtcatttactggctgaaatacactatgtctatctatttaagtatcatcgcattatctgagcaccttccaaatgcccttaaacttgtgtgaagacacaggccctcctaggaggcaccagatactgtcttgcacactgaattggaatttggaagagytactcaagatatgttactgtcagactcactgtctgcatttaaacatgcgtgaaagctctgtggatagttctcttytaaaagacaatgccattattagatgagattggtttcggacattcatgatctcaagtctctaaatcagttaatgaataaagctttcctctccttcatgaagaaacaaaaatgaaaagaacacttatgtctctttaaccagtgttagcctcagtcatccagctgaaataatacagtcactagacagtggagggttcactgctccccacatatcatttttatttcttatagcatacactgtggctgaaagacgtatcaagattgttcactatatgttagccctaaaggaatgatgatggttca

SEQ ID NO: 62842 - DNA, 600 bp, Chicken  19866894325231_3
taaatcagttaatgaataaagctttcctctccttcatgaagaaacaaaaatgaaaagaacacttatgtctctttaaccagtgttagcctcagtcatccagctgaaataatacagtcactagacagtggagggttcactgctccccacatatcatttttatttcttatagcatacactgtggctgaaagacgtatcaagattgttcactatatgttagccctaaaggaatgatgatggttcaaaagcaacattcctgtgaccacatggtgccacactggagctcatacagcaacaattttyctgcttccacatcacatctgctatttgtttgtgccctttcactgtgtactctagaccaactggcataggtcaacactaayttagagatcatgatttgctttctttagctagtgtgctgcatgcagtggacaagtgattgcttctagttcactacgttaggttttgattaggtttgattttgttttgtttctgtccagagaaaaagactagaaaatagaatattgtaaatggcattcagtcgtcgtactatggctttcccattcacacagttttgaggtcttcatagtaagataacaaatt

SEQ ID NO: 62843 - DNA, 600 bp, Chicken  19866894325231_4
tgttagcctcagtcatccagctgaaataatacagtcactagacagtggagggttcactgctccccacatatcatttttatttcttatagcatacactgtggctgaaagacgtatcaagattgttcactatatgttagccctaaaggaatgatgatggttcaaaagcaacattcctgtgaccacatggtgccacactggagctcatacagcaacaattttyctgcttccacatcacatctgctatttgtttgtgccctttcactgtgtactctagaccaactggcataggtcaacactaayttagagatcatgatttgctttctttagctagtgtgctgcatgcagtggacaagtgattgcttctagttcactacgttaggttttgattaggtttgattttgttttgtttctgtccagagaaaaagactagaaaatagaatattgtaaatggcattcagtcgtcgtactatggctttcccattcacacagttttgaggtcttcatagtaagataacaaattcatattgatccctagtcttgtcagatattcagaaactcagataaacctctatagacatttctttcatcacaaagatgtac

SEQ ID NO: 62844 - DNA, 600 bp, Chicken  19866894325231_5
ttagctagtgtgctgcatgcagtggacaagtgattgcttctagttcactacgttaggttttgattaggtttgattttgttttgtttctgtccagagaaaaagactagaaaatagaatattgtaaatggcattcagtcgtcgtactatggctttcccattcacacagttttgaggtcttcatagtaagataacaaattcatattgatccctagtcttgtcagatattcagaaactcagataaacctctatagacatttctttcatcacaaagatgtactgtggccatcagaatagttaacrgtgttctaatgacaaacggactggaagcaccacatcagaaaagcataaagtgcaaaaacccagaaataaagtcatctagcataactggtagaggagaaaagtttataagtctcatttgttaagagtttgaccctgtgtcctgaagcatgaagacatattttccaaaaagactctttcaaaaatagtttatatgcataacaatattcatggctgaaagaaaaaaaagttaatggcattcttagctgtattacgccaagggttgccagcagcatgagtggtcatccttctctgttaaacact

SEQ ID NO: 62845 - DNA, 599 bp, Chicken  19866894325235_1
  misc_feature (1)..(35): n is any nucleotide
nnnnnnnnnnnnnnnnnnnnnnnnnnnnnnnnnnnaaaaagcaccccagcagcaaacccagtaagctctgaagagagtgggtggcgtggtgggtgctctggaggaggccgatccttatccctgccctcttcttcctccatcttttccatagagacgttaaggattgggctcgtggctttaaaaaaaagaacaaaacaaaacaatacgaatggaaaaacgactgagaaagttgtgcgtctccttttaatattgttggaataaataactaatttcgagaactttaccgtctctgtaaaatayggtgttggtttctgcctttaaaacttactgcttgggtatggacaactccgattccagggctgaactggacaagattaacccggcaaagccacgagtccatcacgccgggaaactggaaagtctgatttatgcaaaactgctgcacaagggagagaatagagctctgtgagagccgacatggttcacagaagcccagacgtttctagggagcggcgcttgcaggatgatttctaaagcttttccctgccccagctgacgctgcagtgtggaggtataggttaaaagttgggacaggagat

SEQ ID NO: 62846 - DNA, 600 bp, Chicken  19866894325236_1
gtttggtcagactatgacttgaattgtagaacacagtctgaaaatattaatcattaattaagaatgtatttcatagcaaaatctatagggttgactaagatcaattaaagagcaaaatgtctaaagtcttaacatttttttctattacatcattctgctttaagataacatacagcaaaaaacaagaatggttaattactagcaatgtaccatgtatcacacacctgttttatatagacacatattagcaacctagctgggacagaataacatagctttttttttccagttgaaagatayggatatgtaaatagaaaacattcagaatacagacaaaatgaacagtaatctaaacaaatgcggggtttaaaaccaaaaatatcccactatcagttttttaaaatatattattaaatgcccctaatatatttctgtagctaatatctaaaataaataaacgattgcattcaattttttttcatgagttttgagaagagaggataaaagtataaagtatcttccaattccctttgcaaatccacaaagcagtaaagcacaactactgcttaagcaccatttaaggcacaagaattgcagtca

SEQ ID NO: 62847 - DNA, 600 bp, Chicken  19866894325238_1
gagaagaaagaggttttgcaggtgcctccaattattcctatgaaacaagcagctggatagctttggctggttgaaccaataccatattgagctcttttggagtttggagagtgaatcagttcttcctatagaagacaacttgcagctgatcagctcaagactttgttttacttctgtggctatgatcgggtcttttgcagtgggagtgaatgctggacactggagcgggatgccaagagaggttgtggagtctgcatccttgaggatattcagtacttgactgggcatgctcctgagcarcttgctgtggctgacttaagctgtggcattcaaagtaattgatgtccagaggagccatctgtgaatctaatccactttgtcatttccccgttttccactgagaamttttaagtttagactttcactgcaactgggtcaatatgtgaaaaaacagaactggggcagaattttaaagggttttccccaagatgctggcccatggtgccaacatgattccagaccggcatctggaaacagttcagaccaacacrtcttcccagctggctgaggagaaccctcagtgattcagcaggctgttca

SEQ ID NO: 62848 - DNA, 600 bp, Chicken  19866894325238_2
ggagagtgaatcagttcttcctatagaagacaacttgcagctgatcagctcaagactttgttttacttctgtggctatgatcgggtcttttgcagtgggagtgaatgctggacactggagcgggatgccaagagaggttgtggagtctgcatccttgaggatattcagtacttgactgggcatgctcctgagcarcttgctgtggctgacttaagctgtggcattcaaagtaattgatgtccagaggagccatctgtgaatctaatccactttgtcatttccccgttttccactgagaamttttaagtttagactttcactgcaactgggtcaatatgtgaaaaaacagaactggggcagaattttaaagggttttccccaagatgctggcccatggtgccaacatgattccagaccggcatctggaaacagttcagaccaacacrtcttcccagctggctgaggagaaccctcagtgattcagcaggctgttcaaggctttctataattgtttttcatccttacacacagcaccagagttcatttggcaccacattaaaaatgatttttcttttgcagattcctttttggattttcctt

SEQ ID NO: 62849 - DNA, 600 bp, Chicken  19866894325238_3
ctgcatccttgaggatattcagtacttgactgggcatgctcctgagcarcttgctgtggctgacttaagctgtggcattcaaagtaattgatgtccagaggagccatctgtgaatctaatccactttgtcatttccccgttttccactgagaamttttaagtttagactttcactgcaactgggtcaatatgtgaaaaaacagaactggggcagaattttaaagggttttccccaagatgctggcccatggtgccaacatgattccagaccggcatctggaaacagttcagaccaacacrtcttcccagctggctgaggagaaccctcagtgattcagcaggctgttcaaggctttctataattgtttttcatccttacacacagcaccagagttcatttggcaccacattaaaaatgatttttcttttgcagattcctttttggattttccttggttcttttttgattgcttgtttgtttttctccagaggataytctgtaaatggccagaccagctgggaccagccattactgcctctctgccagatgtgcttcctgaagttttcaacaggcagatgaaatttctgtgcttttctagc

SEQ ID NO: 62850 - DNA, 600 bp, Chicken  19866894325238_4
aaaacagaactggggcagaattttaaagggttttccccaagatgctggcccatggtgccaacatgattccagaccggcatctggaaacagttcagaccaacacrtcttcccagctggctgaggagaaccctcagtgattcagcaggctgttcaaggctttctataattgtttttcatccttacacacagcaccagagttcatttggcaccacattaaaaatgatttttcttttgcagattcctttttggattttccttggttcttttttgattgcttgtttgtttttctccagaggataytctgtaaatggccagaccagctgggaccagccattactgcctctctgccagatgtgcttcctgaagttttcaacaggcagatgaaatttctgtgcttttctagcttttgcagcaacaataagtgaaggatctgcagctgaagagatggttcctrtagaaaaaatgttttctgaagagtccttgcaactgcacctagtatgggaaaactgtgtttgtaaaaaccaaatccagatgggaaagtggtactcctaaataaggacttctgatcagaatttgaagttttaggctgagcaaccttag

SEQ ID NO: 62851 - DNA, 600 bp, Chicken  19866894325238_5
ggctttctataattgtttttcatccttacacacagcaccagagttcatttggcaccacattaaaaatgatttttcttttgcagattcctttttggattttccttggttcttttttgattgcttgtttgtttttctccagaggataytctgtaaatggccagaccagctgggaccagccattactgcctctctgccagatgtgcttcctgaagttttcaacaggcagatgaaatttctgtgcttttctagcttttgcagcaacaataagtgaaggatctgcagctgaagagatggttcctrtagaaaaaatgttttctgaagagtccttgcaactgcacctagtatgggaaaactgtgtttgtaaaaaccaaatccagatgggaaagtggtactcctaaataaggacttctgatcagaatttgaagttttaggctgagcaaccttaggcactgaaaagacctcaagattacatgaagtgcagtggcacaggctgcccagagaagctgtggatgccccattgctggagacattcactgctagttgtatgtggctctgagtagtctgatctggtggtttgtaaccctcttcatagcaggaggt

SEQ ID NO: 62852 - DNA, 600 bp, Chicken  19866894325245_1
gagattgtgaatagcttagcagtttaagttttaaaagtgctcactttgtgtatattatcttcatttcttaaaaaaaaatttatctcagattctggatgaaattgaagagcatggcatcaagatttatcacctgcctgatgctgaatctgatgaggatgaagattttaaagagcaaaccagactgctgaaggtatgaatatactgtgtcttttcagactgctcaggtggcatttaatgaaaatacataagtgacctttgtgctcaggcttctctattggaaagatggtggtgataataackatttcttttcctgtaagattttttttacaacttcaatttaaaagcattacaaattcactaccataatatgcagtgctgagtagaacaagagttgttcttgtgttgtttgtcctagktcattgttagtagttyttgaattttccattttcaggccagcattccattttgtgtagtgggatccaatcaactcattgaagccaaaggtaaaaaagttcgaggtcgactgtacccatggggtgttgttgaagtggagaatccagaacataatgacttcctgaaattgaggaccatgttaatgta

SEQ ID NO: 62853 - DNA, 600 bp, Chicken  19866894325245_2
tcaagatttatcacctgcctgatgctgaatctgatgaggatgaagattttaaagagcaaaccagactgctgaaggtatgaatatactgtgtcttttcagactgctcaggtggcatttaatgaaaatacataagtgacctttgtgctcaggcttctctattggaaagatggtggtgataataackatttcttttcctgtaagattttttttacaacttcaatttaaaagcattacaaattcactaccataatatgcagtgctgagtagaacaagagttgttcttgtgttgtttgtcctagktcattgttagtagttyttgaattttccattttcaggccagcattccattttgtgtagtgggatccaatcaactcattgaagccaaaggtaaaaaagttcgaggtcgactgtacccatggggtgttgttgaagtggagaatccagaacataatgacttcctgaaattgaggaccatgttaatgtaagttaaaaaaagttccaattaaataatagtttaaaaaaaaaaaggaagatgctcaggcactgaaagggggacttctgggagattatggaatccttaaagacatggaatttgtctgg

SEQ ID NO: 62854 - DNA, 600 bp, Chicken  19866894325245_3
gcctgatgctgaatctgatgaggatgaagattttaaagagcaaaccagactgctgaaggtatgaatatactgtgtcttttcagactgctcaggtggcatttaatgaaaatacataagtgacctttgtgctcaggcttctctattggaaagatggtggtgataataackatttcttttcctgtaagattttttttacaacttcaatttaaaagcattacaaattcactaccataatatgcagtgctgagtagaacaagagttgttcttgtgttgtttgtcctagktcattgttagtagttyttgaattttccattttcaggccagcattccattttgtgtagtgggatccaatcaactcattgaagccaaaggtaaaaaagttcgaggtcgactgtacccatggggtgttgttgaagtggagaatccagaacataatgacttcctgaaattgaggaccatgttaatgtaagttaaaaaaagttccaattaaataatagtttaaaaaaaaaaaggaagatgctcaggcactgaaagggggacttctgggagattatggaatccttaaagacatggaatttgtctggagaaggctgtgagcaa

SEQ ID NO: 62855 - DNA, 599 bp, Chicken  19866894325248_1
  misc_feature (1)..(2): n is any nucleotide
nntgtgtagcagcaagagtacctgtttttgataaaaaccaagaaaatgcacgaatggttacttgtttcctaaaacattagctcttatgagaagacataactaacgttttggagttcagcctcaagcttacaggtagccaacctctatccatctagtactgaaaggtttgctcttcatgtactcagccactcttacatttgagtgaaattagctggaggcatgagtagctccagaagtccaaatgcccagtccttgccacagcaaaataaaatgaaggactcctgaaaagcaacacaatgrcaatgaaattcaagattcaatccacatatcatggaagatttttttctgtctacctttatttttacaggctattctactgatagataaccatcaaaatgccatggattttttcagtgcagaataaagcatcaaataataggaagcaaattggtattattattggtaaatgacattctagtttttgtttcaacaaaggtttagagaattactcacttattggcctggtgttacacaaatttgtactatgcaaatagttcatcaggatgatcactgcatctttgtgatgtagttacttaggc

SEQ ID NO: 62856 - DNA, 599 bp, Chicken  19866894325250_1
  misc_feature (1)..(44): n is any nucleotide
nnnnnnnnnnnnnnnnnnnnnnnnnnnnnnnnnnnnnnnnnnnnaaaatgagactatacctcgcagacacagcagtaacaccacagaaaataattactttttatgatagtgacaaaaatataagttaacatagaagtagcaatatttagcactaaaaattcatccttaaaaataatttcttaatattgtcatttttaaatataaaatgggaagaccatgggaatataataccacaattacacatttcttctgagatttggctgaaaaatcagatctacatctgaagaagcacgtaagtamaaattaacaatcacagaaactcaatattctgaacaactatcatttaattaaattatttcgcttgcaaatgaactatttcaatatttttgtcatagtttttaaggagtgcaatacatttggtacctaatacctacagtttatctccttgactacctaaacaatgaatgctagctagtcrccaaagcttttcccacaatcaattgcaaggaaactgcaagtccctcaagagtactataagcctatccattaagatattccattaagaataggaaagattgcctctacaagggaggaaatta

SEQ ID NO: 62857 - DNA, 600 bp, Chicken  19866894325250_2
cttaatattgtcatttttaaatataaaatgggaagaccatgggaatataataccacaattacacatttcttctgagatttggctgaaaaatcagatctacatctgaagaagcacgtaagtamaaattaacaatcacagaaactcaatattctgaacaactatcatttaattaaattatttcgcttgcaaatgaactatttcaatatttttgtcatagtttttaaggagtgcaatacatttggtacctaatacctacagtttatctccttgactacctaaacaatgaatgctagctagtcrccaaagcttttcccacaatcaattgcaaggaaactgcaagtccctcaagagtactataagcctatccattaagatattccattaagaataggaaagattgcctctacaagggaggaaattattttgggctgtaatcaagtgcagcattagtactgctctccacaaatttaatttctagtgcacagcttatgctacatatttgaagcatatttcttccagtttttctgcagtacttacactctaatggtcacttccacatgaatcacgttgtagacttcaattwaaaaaaaaaggaaataa

SEQ ID NO: 62858 - DNA, 600 bp, Chicken  19866894325250_3
tgaatgctagctagtcrccaaagcttttcccacaatcaattgcaaggaaactgcaagtccctcaagagtactataagcctatccattaagatattccattaagaataggaaagattgcctctacaagggaggaaattattttgggctgtaatcaagtgcagcattagtactgctctccacaaatttaatttctagtgcacagcttatgctacatatttgaagcatatttcttccagtttttctgcagtacttacactctaatggtcacttccacatgaatcacgttgtagacttcaattwaaaaaaaaaggaaataaaaagcaagaaacaacaagccttaaaagtcatagctccrtgtaaagaagatgcttagaaaattttaaagacaggatttaggagacaaacactcagaagtatattaacatctcacttacatcagataaatacaccttattgcttgatttatcatatacttcaattgtaatttcataaaatctgcctgtttctaggacccatctgtcacctggatgaactgcaaatcctgaaaaacaggaaatattgagtagcacagaccaccatccaccttacgtactgaataca

SEQ ID NO: 62859 - DNA, 600 bp, Chicken  19866894325250_4
agtccctcaagagtactataagcctatccattaagatattccattaagaataggaaagattgcctctacaagggaggaaattattttgggctgtaatcaagtgcagcattagtactgctctccacaaatttaatttctagtgcacagcttatgctacatatttgaagcatatttcttccagtttttctgcagtacttacactctaatggtcacttccacatgaatcacgttgtagacttcaattwaaaaaaaaaggaaataaaaagcaagaaacaacaagccttaaaagtcatagctccrtgtaaagaagatgcttagaaaattttaaagacaggatttaggagacaaacactcagaagtatattaacatctcacttacatcagataaatacaccttattgcttgatttatcatatacttcaattgtaatttcataaaatctgcctgtttctaggacccatctgtcacctggatgaactgcaaatcctgaaaaacaggaaatattgagtagcacagaccaccatccaccttacgtactgaatacaaacactaaaattctagttcccacattttaagatgtcctttaattgtttgaagctg

SEQ ID NO: 62860 - DNA, 600 bp, Chicken  19866894325252_1
tgcagcttgcctgatctgctatgtggagagctgcattttagtatgcctttttgaacatgtacttgcagcctgctaatgaagctctgcctgcatcttttaagttaggttaatttaaagtaagaaaaatgtaggttttcagtgtaataggatgttttacggtaatgtagaatgactccctctctctctgtgggattaaagcagtatgagaaaatacagaattctaacatctttgctctttcttcacatacaaggagaaaattacttcctttaggaccacaaaagcactgtagagatctttgkcttcaggaaaaaatgagaatgctgaagccatagaaacttgactcttacaaacgtaattggcaaactacagtattactggttgtgagatcctgcacagagtggcagtcagtggctcagtgtctggatagagagatcagtgacaagtggtgtccttctggggttggtgctgggactgatactcttcagtatcttcaccagtggcattaacagtgggatcaagtgcattgttagcaggtttgtagatgacgccatgctgagtgggtgcagttgacacatctaggggatgggatgccatccaga

SEQ ID NO: 62861 - DNA, 600 bp, Chicken  19866894325253_1
ttgaaggcattggggtccatcagtgccagtcttttattttttttaaagtaccacctcctgaaagtacaagggcaggcaattccaaagtatcagaagccaggcacatggggcaggaggctggcttggctgaatagggatctctgagaccttaggtggaaaaccaaagtgctggcagtaacggcaggcaacatgggaaaactacagaaatggtctttgcctttgtagagagaaaagtcatgtggccaaagcacagttagagttgaagctggccaacacaatggagaacaataaagatttttkttattttaattttttttwaaatatgctaacaacaaaaggagggccagagagaacattggttcattacttggtgaaaatggtcaccttacaaacaggggcatacactaacgaaagacttycaagactttctttgcctctgtcttcaacactgattataggttctaacaccccyagtgccccaagtcagaagactatggctgcagtaacaaccaactcccagacagccctgagcttatgcaggatttgctgctacacctggatgaatataagtccaaagggcccaatggggttcattcctgg

SEQ ID NO: 62862 - DNA, 600 bp, Chicken  19866894325253_2
atcagtgccagtcttttattttttttaaagtaccacctcctgaaagtacaagggcaggcaattccaaagtatcagaagccaggcacatggggcaggaggctggcttggctgaatagggatctctgagaccttaggtggaaaaccaaagtgctggcagtaacggcaggcaacatgggaaaactacagaaatggtctttgcctttgtagagagaaaagtcatgtggccaaagcacagttagagttgaagctggccaacacaatggagaacaataaagatttttkttattttaattttttttwaaatatgctaacaacaaaaggagggccagagagaacattggttcattacttggtgaaaatggtcaccttacaaacaggggcatacactaacgaaagacttycaagactttctttgcctctgtcttcaacactgattataggttctaacaccccyagtgccccaagtcagaagactatggctgcagtaacaaccaactcccagacagccctgagcttatgcaggatttgctgctacacctggatgaatataagtccaaagggcccaatggggttcattcctgggtcctcaagagggatggc

SEQ ID NO: 62863 - DNA, 600 bp, Chicken  19866894325253_3
ggcttggctgaatagggatctctgagaccttaggtggaaaaccaaagtgctggcagtaacggcaggcaacatgggaaaactacagaaatggtctttgcctttgtagagagaaaagtcatgtggccaaagcacagttagagttgaagctggccaacacaatggagaacaataaagatttttkttattttaattttttttwaaatatgctaacaacaaaaggagggccagagagaacattggttcattacttggtgaaaatggtcaccttacaaacaggggcatacactaacgaaagacttycaagactttctttgcctctgtcttcaacactgattataggttctaacaccccyagtgccccaagtcagaagactatggctgcagtaacaaccaactcccagacagccctgagcttatgcaggatttgctgctacacctggatgaatataagtccaaagggcccaatggggttcattcctgggtcctcaagagggatggctgatgtcatcacaagaactgtcttaattattttttcaatagtcttgggaatgtgggagaggtcccacttgactggaagctacaaacgtttgtcagtctcac

SEQ ID NO: 62864 - DNA, 600 bp, Chicken  19866894325253_4
cagtaacggcaggcaacatgggaaaactacagaaatggtctttgcctttgtagagagaaaagtcatgtggccaaagcacagttagagttgaagctggccaacacaatggagaacaataaagatttttkttattttaattttttttwaaatatgctaacaacaaaaggagggccagagagaacattggttcattacttggtgaaaatggtcaccttacaaacaggggcatacactaacgaaagacttycaagactttctttgcctctgtcttcaacactgattataggttctaacaccccyagtgccccaagtcagaagactatggctgcagtaacaaccaactcccagacagccctgagcttatgcaggatttgctgctacacctggatgaatataagtccaaagggcccaatggggttcattcctgggtcctcaagagggatggctgatgtcatcacaagaactgtcttaattattttttcaatagtcttgggaatgtgggagaggtcccacttgactggaagctacaaacgtttgtcagtctcacttcagtgcctgggaaaattatggaaaaaaatgtgctagagctgttgaagaaca

SEQ ID NO: 62865 - DNA, 600 bp, Chicken  19866894325254_1
ttattgttttcctgccgttcgccaattcatattattttaatcccttgacttccttgaaagctccatctgtcattgttttcctaaaggttttaatttttaaacaaaaccagcaacaacaaaacagtaaaagctcaggtacaattaattgaaatggttgatttctcttatgtttaattagtggagcatgatttcttctctgaatcctgaagtgttagcacatcttcctccagaggctttctgtcctgcagtgattcacctcccatgttcactatgccacagagaattatcattatcactgaraaatcatttctttacatctcaaaagcaccatttctacagtgggttgcatcatgtgaggttagaactttaaagaaaacaatttcttagtgggaaaaatagagaaaccaccaaagagcacagggcggcttcatttgaaatcaacagagatttggacacagagttaaatgggaacagaattaggtcccaagacacgtggggctgaattacacaaacacttctcactaaaagaaataaattctttgaagcactaagaagaccttgtaaatactgaagtgtttccctctgtgccaccagtacttt

SEQ ID NO: 62866 - DNA, 393 bp, Chicken  19866894325254_2
tagtgggaaaaatagagaaaccaccaaagagcacagggcggcttcatttgaaatcaacagagatttggacacagagttaaatgggaacagaattaggtcccaagacacgtggggctgaattacacaaacacttctcactaaaagaaataaattctttgaagcactaagaagaccttgtaaatactgaagtgtttccctctgtgccaccagtacttttatgccatgttgcccccacttagtcttttacatttatggtcctgaatgagaaaaggaaagatttcagttcccagaaaattttcyctctgtaagaagaggtgttttcagatgggttactgggagagtgatgacaaggaaggatcatatagcagagggtgggctcatgggggaagcaaa

SEQ ID NO: 62867 - DNA, 600 bp, Chicken  19866894325266_1
gaaatatttaagtaatctgacatactattttcagcacatgatagaattcgaggctgaatgcagaggcaaagctaggcataacatacccaacaatttttaatatactctaattgaaactgtcatctgttgaaatcaatctaatgcattttttttaacaatacctatagacatattgcttttacttacactccacagcatatcctaacaaggacctcgtttaaattcagtggtactagttataggatgaagttctgcttgggtaaaaaggtgtaagatttgggtttgttccctctaaagacytgtttcacctcacaggccagggataaggatgaggcatgcagcccttttygcaggtcctatgtgtatcaagatttcagctcacttctgatgtctgtgcctctgagattgtctgcrctctgcaaactccctgtggacaaacagggggctgtggtggcatggagtgtgcacgtatggtcggagcmagagcagatacgtgggttgtcagtgctgatatggggtgtcaaggtaaagctactcccatctacattgttagtcactctgttactgcttctgttactcttattataaagttggcagata

SEQ ID NO: 62868 - DNA, 600 bp, Chicken  19866894325266_2
gaggctgaatgcagaggcaaagctaggcataacatacccaacaatttttaatatactctaattgaaactgtcatctgttgaaatcaatctaatgcattttttttaacaatacctatagacatattgcttttacttacactccacagcatatcctaacaaggacctcgtttaaattcagtggtactagttataggatgaagttctgcttgggtaaaaaggtgtaagatttgggtttgttccctctaaagacytgtttcacctcacaggccagggataaggatgaggcatgcagcccttttygcaggtcctatgtgtatcaagatttcagctcacttctgatgtctgtgcctctgagattgtctgcrctctgcaaactccctgtggacaaacagggggctgtggtggcatggagtgtgcacgtatggtcggagcmagagcagatacgtgggttgtcagtgctgatatggggtgtcaaggtaaagctactcccatctacattgttagtcactctgttactgcttctgttactcttattataaagttggcagataacttactctttagtacagttctactacaaagatgtctaaatacaagtgt

SEQ ID NO: 62869 - DNA, 600 bp, Chicken  19866894325266_3
aactgtcatctgttgaaatcaatctaatgcattttttttaacaatacctatagacatattgcttttacttacactccacagcatatcctaacaaggacctcgtttaaattcagtggtactagttataggatgaagttctgcttgggtaaaaaggtgtaagatttgggtttgttccctctaaagacytgtttcacctcacaggccagggataaggatgaggcatgcagcccttttygcaggtcctatgtgtatcaagatttcagctcacttctgatgtctgtgcctctgagattgtctgcrctctgcaaactccctgtggacaaacagggggctgtggtggcatggagtgtgcacgtatggtcggagcmagagcagatacgtgggttgtcagtgctgatatggggtgtcaaggtaaagctactcccatctacattgttagtcactctgttactgcttctgttactcttattataaagttggcagataacttactctttagtacagttctactacaaagatgtctaaatacaagtgtttaatattgctgttcacactcctttacacagagagtcccatgcctcttcttcccatccatttgca

SEQ ID NO: 62870 - DNA, 600 bp, Chicken  19866894325266_4
ttacactccacagcatatcctaacaaggacctcgtttaaattcagtggtactagttataggatgaagttctgcttgggtaaaaaggtgtaagatttgggtttgttccctctaaagacytgtttcacctcacaggccagggataaggatgaggcatgcagcccttttygcaggtcctatgtgtatcaagatttcagctcacttctgatgtctgtgcctctgagattgtctgcrctctgcaaactccctgtggacaaacagggggctgtggtggcatggagtgtgcacgtatggtcggagcmagagcagatacgtgggttgtcagtgctgatatggggtgtcaaggtaaagctactcccatctacattgttagtcactctgttactgcttctgttactcttattataaagttggcagataacttactctttagtacagttctactacaaagatgtctaaatacaagtgtttaatattgctgttcacactcctttacacagagagtcccatgcctcttcttcccatccatttgcatccacacaactggtgggagcctctaagactagggctctgctacgttaaagaaagtatcaaccatgaag

SEQ ID NO: 62871 - DNA, 600 bp, Chicken  19866894325269_1
tttgctttcgataattccctttagtttctaatgttcccagtgttaaaggctctaacaaaagctttgttacacttgcagatcaaaatatgtaagcagttgtatctgagtgtatgcatttaaaactctgcgagtcttcgcattgaatcgctgtttcgaatcatgcagcttagtggctttatggtaaagcttctcctgtgataaaatgatagcatcgcttttttttgtagttctcttcattcatagctactagtgcttgacaaaaacggatgggcgttattattcccaatgtaagggagaaayggagtcttatttcatgcaatagcttggtgtctgagcaggcagagctcagattgccaggcttgtgcgttgtctgctgcactgaccacggtgcctgcttacaccacctgtgctgtgtattgtctaataatgagcatataatggaaaatgaaaaactaatcttttctttactgatcttttgttaaggaaaatacttgtatctccctccctgtcctgctagcttttaaatgaagacttggaaaaagtccttttaagttagaagcctgggctctattggctttatttcttgtgtgagtaggagtc

SEQ ID NO: 62872 - DNA, 600 bp, Chicken  19866894325276_1
tttacttgctttaggaaaaccattatgggaaaagtttattcaagattaaaggaattccaaccacattttcattatcaaattattgtcatacaatgggaagaggttagaaactggggcatattcctcaatggtgtgcctgtatccactctccctgccaaggcttacttgaatgaaacaaacagtgctattctgcagatgccctccagacctctaccaccatggtactggtcgtgataccagaccatgatgaacataccagagatggtacattcagtgatgcctgtgcattcacaaaggagrgaagaaaatctttcaccactctgacctggaatactattctcaaccttgccttggtgagaacattactgtaggcatggatagcagaattcttatggtcttgtgttctcctaaattcctccaagcaatgctatacaaaatgaaaatgatcttggcaaggggcaaataaggccacccattccctccatgaactgtctggaaatcaagaacacaagtatttttggcacagctcctgacattctgtaaaacagcatttttataattagatttttataatttctagctcttagaagttttatgcct

SEQ ID NO: 62873 - DNA, 599 bp, Chicken  19866894325278_1
  misc_feature (1)..(66): n is any nucleotide
nnnnnnnnnnnnnnnnnnnnnnnnnnnnnnnnnnnnnnnnnnnnnnnnnnnnnnnnnnnnnnnnnntttaatactacataaatcaactcagctaatagtgtagatagcacatatatgcaaaagaataaagcagcacatgtacttcagagctgttaagctcttcttaaacatagctgtcaactccgaattattcagtaggaatgtatttatagaagggtttcttatggatcacacgaagtcacataccatttaccccatcaaggtgtagatgcagctggcaaaaatgtcactttgtgacaygagcagatgacacaaactggcagaggagtaagttataaggatacagtatttctgcaaactgacctgcacaacctaattctaacatgttttcstaacggctgacacaatgttacaggagcaaaaagagtaagactgtactgcagacaggtgcaatataagaagtcatcmatctcagcataggccacttaactcaggctttcaacaattyacagtgagaaaaaaaacgttcatcagatgtcaaaatgaggctgcagaaaacactgtcctttgtggctgtctttgcctgagcctacacagaa

SEQ ID NO: 62874 - DNA, 600 bp, Chicken  19866894325278_2
taatagtgtagatagcacatatatgcaaaagaataaagcagcacatgtacttcagagctgttaagctcttcttaaacatagctgtcaactccgaattattcagtaggaatgtatttatagaagggtttcttatggatcacacgaagtcacataccatttaccccatcaaggtgtagatgcagctggcaaaaatgtcactttgtgacaygagcagatgacacaaactggcagaggagtaagttataaggatacagtatttctgcaaactgacctgcacaacctaattctaacatgttttcstaacggctgacacaatgttacaggagcaaaaagagtaagactgtactgcagacaggtgcaatataagaagtcatcmatctcagcataggccacttaactcaggctttcaacaattyacagtgagaaaaaaaacgttcatcagatgtcaaaatgaggctgcagaaaacactgtcctttgtggctgtctttgcctgagcctacacagaaaggtgcatgcagctctcacattgccatttacattttcagctccttatcaaaccaaaaccaggaaaaacccagcaagtgcagctcagactttgc

SEQ ID NO: 62875 - DNA, 600 bp, Chicken  19866894325278_3
catagctgtcaactccgaattattcagtaggaatgtatttatagaagggtttcttatggatcacacgaagtcacataccatttaccccatcaaggtgtagatgcagctggcaaaaatgtcactttgtgacaygagcagatgacacaaactggcagaggagtaagttataaggatacagtatttctgcaaactgacctgcacaacctaattctaacatgttttcstaacggctgacacaatgttacaggagcaaaaagagtaagactgtactgcagacaggtgcaatataagaagtcatcmatctcagcataggccacttaactcaggctttcaacaattyacagtgagaaaaaaaacgttcatcagatgtcaaaatgaggctgcagaaaacactgtcctttgtggctgtctttgcctgagcctacacagaaaggtgcatgcagctctcacattgccatttacattttcagctccttatcaaaccaaaaccaggaaaaacccagcaagtgcagctcagactttgcatacgagccacgctaacaacgaatgaagttctctatggctacttttacacgcagcagtaaaaagacggcaataagc

SEQ ID NO: 62876 - DNA, 600 bp, Chicken  19866894325278_4
atagaagggtttcttatggatcacacgaagtcacataccatttaccccatcaaggtgtagatgcagctggcaaaaatgtcactttgtgacaygagcagatgacacaaactggcagaggagtaagttataaggatacagtatttctgcaaactgacctgcacaacctaattctaacatgttttcstaacggctgacacaatgttacaggagcaaaaagagtaagactgtactgcagacaggtgcaatataagaagtcatcmatctcagcataggccacttaactcaggctttcaacaattyacagtgagaaaaaaaacgttcatcagatgtcaaaatgaggctgcagaaaacactgtcctttgtggctgtctttgcctgagcctacacagaaaggtgcatgcagctctcacattgccatttacattttcagctccttatcaaaccaaaaccaggaaaaacccagcaagtgcagctcagactttgcatacgagccacgctaacaacgaatgaagttctctatggctacttttacacgcagcagtaaaaagacggcaataagcaagcagtgcatttcaatttggatatttgataaattctacc

SEQ ID NO: 62877 - DNA, 600 bp, Chicken  19866894325279_1
atccactatttatataataaagattatttaaggggaatttactaaactaggtttgtcaaataaactaaaatgagaaactcataacagcttgataaactcacagctgcttcctctagattattttgccttttagaggtacttgggggaaagcactgtctgaaatgttcactgatctctcttctgatcttaacttcggcaaaacaaagtttgttacgacccctacgctgaaatagctgctcagtccatcaactctcatctgtgtacgggttatgcaggctgaactgagcttttccaaaagasatttttaagggcaagtgcaaaaatgtgactgctactctgagggttgttttggtgtgtttagagcggaggcttttgttcttgcagcttcggaaactagtctcaatttatcatacagatatgccatagggtgtagacttagtgaattttcttcaggtttggctgtccagcatcaaaatggcattaataatagtggcaactcccttccagaatgccaagtcaactaggtctgaagtactctggagttcttagattggaatatacttttcctgtgttgtgctaagtgtcactgaaatatttata

SEQ ID NO: 62878 - DNA, 599 bp, Chicken  19866894325284_1
  misc_feature (1)..(203): n is any nucleotide
nnnnnnnnnnnnnnnnnnnnnnnnnnnnnnnnnnnnnnnnnnnnnnnnnnnnnnnnnnnnnnnnnnnnnnnnnnnnnnnnnnnnnnnnnnnnnnnnnnnnnnnnnnnnnnnnnnnnnnnnnnnnnnnnnnnnnnnnnnnnnnnnnnnnnnnnnnnnnnnnnnnnnnnnnnnnnnnnnnnnnnnnnnnnnnnnnnnnnnnnnnnttccccttgttctactgttatctaccctttcaagagttgacttccctcctgtttgtaggctccctttaggtactgaaaggctgcaattaggtcaccytgcagccttcttttctccaggctgaacaagcccagctccctcagcattttttattcttttatccagctattgtgacaattcttktttccaccctaagacagaaaagtttcagtaaggaagcaggttcatgcctgagtaatagtatgtgcatttgagatttagagtacttttttcttccaccttgtgtctctttctacatctgccagaccttgaagattttgccagaactactggaaaatgtagatgttcctatgtcctgcttttctgtggataaattacaagtccttcatgttcttcca

SEQ ID NO: 62879 - DNA, 599 bp, Chicken  19866894325284_2
  misc_feature (1)..(119): n is any nucleotide
nnnnnnnnnnnnnnnnnnnnnnnnnnnnnnnnnnnnnnnnnnnnnnnnnnnnnnnnnnnnnnnnnnnnnnnnnnnnnnnnnnnnnnnnnnnnnnnnnnnnnnnnnnnnnnnnnnnnnnnttccccttgttctactgttatctaccctttcaagagttgacttccctcctgtttgtaggctccctttaggtactgaaaggctgcaattaggtcaccytgcagccttcttttctccaggctgaacaagcccagctccctcagcattttttattcttttatccagctattgtgacaattcttktttccaccctaagacagaaaagtttcagtaaggaagcaggttcatgcctgagtaatagtatgtgcatttgagatttagagtacttttttcttccaccttgtgtctctttctacatctgccagaccttgaagattttgccagaactactggaaaatgtagatgttcctatgtcctgcttttctgtggataaattacaagtccttcatgttcttccagccttccctaacactgatctttartaagagagcaaatgcagatcagcatcccagtgagcaatgctttcttcaataagtatctaa

SEQ ID NO: 62880 - DNA, 600 bp, Chicken  19866894325284_3
gaacaagcccagctccctcagcattttttattcttttatccagctattgtgacaattcttktttccaccctaagacagaaaagtttcagtaaggaagcaggttcatgcctgagtaatagtatgtgcatttgagatttagagtacttttttcttccaccttgtgtctctttctacatctgccagaccttgaagattttgccagaactactggaaaatgtagatgttcctatgtcctgcttttctgtggataaattacaagtccttcatgttcttccagccttccctaacactgatctttartaagagagcaaatgcagatcagcatcccagtgagcaatgctttcttcaataagtatctaataagtttttaactaagttgctgaattgggaataataggaactcaatctccataaactgaccttttagattgagtggagatgctagcagctgaatagtaattatgaacaaaaaaataccaataagggaaaagcaaagcaagcaacaacaaaaagccacaacaaacagcagcccaaccttgctgctcccttacttctatatgwggaaaatcacatgccagaaccacygaggcacaaagaacc

SEQ ID NO: 62881 - DNA, 600 bp, Chicken  19866894325284_4
cttcatgttcttccagccttccctaacactgatctttartaagagagcaaatgcagatcagcatcccagtgagcaatgctttcttcaataagtatctaataagtttttaactaagttgctgaattgggaataataggaactcaatctccataaactgaccttttagattgagtggagatgctagcagctgaatagtaattatgaacaaaaaaataccaataagggaaaagcaaagcaagcaacaacaaaaagccacaacaaacagcagcccaaccttgctgctcccttacttctatatgwggaaaatcacatgccagaaccacygaggcacaaagaaccaacgtcctgaccagccactgtgcagtctgtcagtacttggaccatgggaacaggaccagtgacagaagccaggtttgggcaacagcccatggtggccaatcaagtctgcagtgacaaagtaggtcctagtctgaaagttacaaggcaagggtcagcaagattgggtagcaaagcacaggaatagcaatggtgtagtgcagagcgggaacaaggctgcagattcactcggtgtatgcaagactcaaaatccatattcagata

SEQ ID NO: 62882 - DNA, 600 bp, Chicken  19866894325284_5
aacactgatctttartaagagagcaaatgcagatcagcatcccagtgagcaatgctttcttcaataagtatctaataagtttttaactaagttgctgaattgggaataataggaactcaatctccataaactgaccttttagattgagtggagatgctagcagctgaatagtaattatgaacaaaaaaataccaataagggaaaagcaaagcaagcaacaacaaaaagccacaacaaacagcagcccaaccttgctgctcccttacttctatatgwggaaaatcacatgccagaaccacygaggcacaaagaaccaacgtcctgaccagccactgtgcagtctgtcagtacttggaccatgggaacaggaccagtgacagaagccaggtttgggcaacagcccatggtggccaatcaagtctgcagtgacaaagtaggtcctagtctgaaagttacaaggcaagggtcagcaagattgggtagcaaagcacaggaatagcaatggtgtagtgcagagcgggaacaaggctgcagattcactcggtgtatgcaagactcaaaatccatattcagatattccaatcagatgcagaattgggg

SEQ ID NO: 62883 - DNA, 600 bp, Chicken  19866894325288_1
ttttggcaaccttatagttcaatatgcattgtacaagtgagaaagccttagtttctctctggttaagcactgaaaaacatggctttggaatttgtccatacatttgcattgatgcccagttgttgatactgcactccctgggataaccaacaacagtatgtcactgacactgctctgccttccattgaaatccattcatttggatgttattagaatggtactgagaacaggagagtagtttagttttaggagatttagtgcctgaatttttagccctggaagtgatattagctctaatgrgaattgcaaatcccttgcatgttgtcacaaatactatttcgtgattcccagtgactgctactcatgttttatatttaatgtttaattttcagattagaatggtttgtggtctgatggtgatatacagccagtgaacacactctgcaatcagcaaacatgctcagattcacgagagctctgtcatgagcattaaccctactccatcctcagctgggctagatgcacaggactgttcatcacattcattatctgacaacatgcaggagactccaacaggttttgggaacacagatcacttga

SEQ ID NO: 62884 - DNA, 600 bp, Chicken  19866894325289_1
agattcctgatggacagaaaatcaacagcaggaaagtaatgagaaggacggttatgacattaaacaaaactctgatttgctcatctttataggagaccacatcaaagccaagttcacatgaaggccagatgcagtcaaaaaccaaccttgtttcaatgactttgcagatgctgacatcaaaggtaccgctctttggcagcagttcaataggacccattccccatgcagcattacgagagcagaccgtggggcagtacgttctcctgcctgcaggaccaacgcacgtcccttccccagccwgcttgccactacttctgcacctccataagcccgtgctgtgggcatgctgtgctcctggcctgatggccacaggccgtccatcacctctatccaggaatggccagcgctgtgtttcagcattcccgctcagagcagtgccacaaatgctgtgcctctrttgtttcagagattcaacctgacaggtgtgacacaatgggatggcccagctgcccctccttaaggatgcgccttcacatagtgtttgtcaggcacactgcttgaagtacccgggtaagaatgggctaaccaacaaaaatgttt

SEQ ID NO: 62885 - DNA, 600 bp, Chicken  19866894325289_2
gactttgcagatgctgacatcaaaggtaccgctctttggcagcagttcaataggacccattccccatgcagcattacgagagcagaccgtggggcagtacgttctcctgcctgcaggaccaacgcacgtcccttccccagccwgcttgccactacttctgcacctccataagcccgtgctgtgggcatgctgtgctcctggcctgatggccacaggccgtccatcacctctatccaggaatggccagcgctgtgtttcagcattcccgctcagagcagtgccacaaatgctgtgcctctrttgtttcagagattcaacctgacaggtgtgacacaatgggatggcccagctgcccctccttaaggatgcgccttcacatagtgtttgtcaggcacactgcttgaagtacccgggtaagaatgggctaaccaacaaaaatgtttcttacccataagagctgtgtacttcctcgatgtgaccctccccctgcagaagctccggggctccgagaagctgaaggtgttgggcacacagtgtaacgcaggcaagtctcacacagagcttctatgtgggttttaaagagttccactactaaaagca

SEQ ID NO: 62886 - DNA, 515 bp, Chicken  19866894325291_1
cactgggactttcttcacattgggaagcagagacaaactgctgaaataaaattggccaagtaataagaaaacaattctgagaaggaagaaaaaatcccccctggaagcgtgactcattcgcaccactttaacatcctcacagcattttgtggtattttgccataagcagtcagcaggagtcgcaggtaggattaaggagaaatgcatgtgctgtgcagtctgtgctcgctgtgctccctgcggcctccctttgcacatcagcaatttaatcaggctcctgtggcacagcaggtaaaaacycagagcttttctctgcacatctcattgctgattcttaaaggcttttcagaaggggttgcaaccacctccgagcctttaggaagtggggaaactgaggaagagatgatgctctctctccaggtcagctcaaacactcagctttccagcagatacctgagcaacccctgtgccctccatcacagacccccaaaataaaggcacagaaacccctccca

SEQ ID NO: 62887 - DNA, 600 bp, Chicken  19866894325304_1
cattagtagacaggtttctcttcttgcactgctttggtgtttcagatttttttcaagagcatcttagactgctggtctgtcagtgtggagaaataaatgttttcaagtattctagtgatacttagatttttatgttccttgtactatgtgaagtgtggaaaaagcgtgcttagcatttgcttgctgtttgttgaaagaagctctgcaaagtatttcagaggaaagtgatgtcttacacttggtctctaggagaatatacacaggatcctcaggtaatactcagcggggcttctgaactcmytgacaattattttgaaaaagaattttgaggtgagctgagtttgtatgctgrtgtaccagtcagcacatgagaaaagcagaactgtgagtctcctttgcttctccctctctcatttgtgattctggacctcttgagcactggcatgagtgtaaccacagctataaaaacatgttagctgtgtgcttaagtagacctttaggacactttgctacccatctcatcagattttgtggagtctgttctaaatactagccccaggaatgtagaaatcccacactggcacaagtgaactggccaga

SEQ ID NO: 62888 - DNA, 600 bp, Chicken  19866894325304_2
attagtagacaggtttctcttcttgcactgctttggtgtttcagatttttttcaagagcatcttagactgctggtctgtcagtgtggagaaataaatgttttcaagtattctagtgatacttagatttttatgttccttgtactatgtgaagtgtggaaaaagcgtgcttagcatttgcttgctgtttgttgaaagaagctctgcaaagtatttcagaggaaagtgatgtcttacacttggtctctaggagaatatacacaggatcctcaggtaatactcagcggggcttctgaactcmytgacaattattttgaaaaagaattttgaggtgagctgagtttgtatgctgrtgtaccagtcagcacatgagaaaagcagaactgtgagtctcctttgcttctccctctctcatttgtgattctggacctcttgagcactggcatgagtgtaaccacagctataaaaacatgttagctgtgtgcttaagtagacctttaggacactttgctacccatctcatcagattttgtggagtctgttctaaatactagccccaggaatgtagaaatcccacactggcacaagtgaactggccagat

SEQ ID NO: 62889 - DNA, 600 bp, Chicken  19866894325304_3
tcaagagcatcttagactgctggtctgtcagtgtggagaaataaatgttttcaagtattctagtgatacttagatttttatgttccttgtactatgtgaagtgtggaaaaagcgtgcttagcatttgcttgctgtttgttgaaagaagctctgcaaagtatttcagaggaaagtgatgtcttacacttggtctctaggagaatatacacaggatcctcaggtaatactcagcggggcttctgaactcmytgacaattattttgaaaaagaattttgaggtgagctgagtttgtatgctgrtgtaccagtcagcacatgagaaaagcagaactgtgagtctcctttgcttctccctctctcatttgtgattctggacctcttgagcactggcatgagtgtaaccacagctataaaaacatgttagctgtgtgcttaagtagacctttaggacactttgctacccatctcatcagattttgtggagtctgttctaaatactagccccaggaatgtagaaatcccacactggcacaagtgaactggccagatctctgatactgtcagtgattattgtagtcgccagtgacctgcacagcattc

SEQ ID NO: 62890 - DNA, 600 bp, Chicken  19866894325315_1
tgcataaaatttgatcaaacctgattaaccgctggcaacttcaggaatgtacaaaaactggagttatgtagtgatctatggtaaaaataactgcacaactgttatcctaatctttctcttttggaaaaaaaagaccccaaaacatttatgatatttattttcaaaggcattctattttaatttttttctaacattaatacataaaaaaattaagacataactttctaatatttaggtgttatgaaagcattttgactgtatttggaaaaaaaatcagttttctattaagataaatcactmtatatatgctagcaaacaaaaaatgtcagtattactattgtaagtttaagtacaactggcattcatgcatacacaaaaatagacagtttttccagttcttgcaggcactgaaattttccatgttttcacatgaagtaaaatggtcctgcatgaaattatccttaattatgagtaggaggagcatatgcttatattaatgagacacagcaagtagtgtcttgttaactgacaggatcctcctcaaagtgactgaatagtttagatgtctaatgtcagggaaaaaatgttaattatgcttcc

SEQ ID NO: 62891 - DNA, 600 bp, Chicken  19866894325330_1
ttgtgcaatttttttttcgcacgtaggaattcacttccacagctttgcttcacacgcacttccatgtcagacatcactctgtcagcctgcccctctgctgccatctggcacatgacaacaaaatctaagagagtactggtgggaaggttcaacctctactgccataccaccaccatctgcctctgatgtcataggctatcatcataaaataggaggcattactttcagagcagccttcatgaattaaagatgctagtctatgattccagatgtattattagtagatgatgaaatagtgtytctgctgtgttcagtctatattatgtaaataaaaaccttgacactacactgtgacaaacaaacagaccctgaagtcctgtgatcaggcttctttatcttcctaagaatcttgctcttttgtggtttcgtaactcaaattctagtgctcttgtcataatacagcatgaaacagatttcacagctttaacataaggcttcaggcttccagtatgtttagagctatttgctaaagcagattactttatgcattatatgggcatctgttctgcagtgaaaaacaaccagaggactgtgcctaca

SEQ ID NO: 62892 - DNA, 600 bp, Chicken  19866894325336_1
gtgcggcggtgccgagccccgtgtgaggggcggcgggaggaaacgttccaggtcgtgggaacaatgcggcttcctgtgttccctgcactgcaggaaatgatcccgggggggacggggcctcgggggtggggcagtgtggccacggggcacgctgtacagggaccctcgcgtccctgtggggtggcacgctgggtggcgcccggcattgctggtgggtcagcatcccattcggccccactgtgcatgtgcacagctgcccgcagctgcgtgtgcgcacgtgtgcgtgtgtgcaagagatcrcacgccgtgtgtgcgtgcatttatgctgttagcgtctgagcgctgggggcagcagaggcayggtgcctttggcacgctgtcaccgtgggtggatgggtcacgcatgtggtgttcgtgcatctggctgtgtgtgcgcacgtgtgcaakgtgtgtgcatctgtgcgcccgcagtgtgcatctctgtgctctgtgcccagtaccgttgctgcctgtgtccccccatgggtgccgccctgtccagcccccctgggcagccccgtggccgtatccccactgtccctttctcccctcccgcaggct

SEQ ID NO: 62893 - DNA, 600 bp, Chicken  19866894325336_2
caatgcggcttcctgtgttccctgcactgcaggaaatgatcccgggggggacggggcctcgggggtggggcagtgtggccacggggcacgctgtacagggaccctcgcgtccctgtggggtggcacgctgggtggcgcccggcattgctggtgggtcagcatcccattcggccccactgtgcatgtgcacagctgcccgcagctgcgtgtgcgcacgtgtgcgtgtgtgcaagagatcrcacgccgtgtgtgcgtgcatttatgctgttagcgtctgagcgctgggggcagcagaggcayggtgcctttggcacgctgtcaccgtgggtggatgggtcacgcatgtggtgttcgtgcatctggctgtgtgtgcgcacgtgtgcaakgtgtgtgcatctgtgcgcccgcagtgtgcatctctgtgctctgtgcccagtaccgttgctgcctgtgtccccccatgggtgccgccctgtccagcccccctgggcagccccgtggccgtatccccactgtccctttctcccctcccgcaggctgcaagctctcctgccacaccaagtgccaaagcaaggtaaggccggcacctcgtggcatgtc

SEQ ID NO: 62894 - DNA, 600 bp, Chicken  19866894325336_3
cacgctgtacagggaccctcgcgtccctgtggggtggcacgctgggtggcgcccggcattgctggtgggtcagcatcccattcggccccactgtgcatgtgcacagctgcccgcagctgcgtgtgcgcacgtgtgcgtgtgtgcaagagatcrcacgccgtgtgtgcgtgcatttatgctgttagcgtctgagcgctgggggcagcagaggcayggtgcctttggcacgctgtcaccgtgggtggatgggtcacgcatgtggtgttcgtgcatctggctgtgtgtgcgcacgtgtgcaakgtgtgtgcatctgtgcgcccgcagtgtgcatctctgtgctctgtgcccagtaccgttgctgcctgtgtccccccatgggtgccgccctgtccagcccccctgggcagccccgtggccgtatccccactgtccctttctcccctcccgcaggctgcaagctctcctgccacaccaagtgccaaagcaaggtaaggccggcacctcgtggcatgtcccactttgcatgggaggggctatggaggtctgggggagtactggggtccatatcccattcgtgtcacctacatgtgtgtgtgatga

SEQ ID NO: 62895 - DNA, 600 bp, Chicken  19866894325338_1
catagcaaaatatttttaattgatgtgagtaatacatttgtcctcacttcaggtagctttcttgacctttttacaaactgaataattaccaagcaccagggcctggccctacctgacgtcatcattaatctaatgacctactgtgtttactagagctattttataattcacaattgtaatcaaaatcaacgtgctgtcctgaagttgtttggtttccatcccacttgggtgctgtgacgtggaggcctgggctcattttacctctcctgacttacacttccacagaaacctttctcctayacaaatcttaatcaggagggccgtccaaacgcrgtaacccattctcttaaactggtgataaaagaccatggcagacgtccacttacaaagtgttctctatttaaagagcagaatctgacctctaatgtaaactataacttaactcttaataggtccgtgcactcactgtgagctcttttcagagcatgaaagaggaggcgaggcagtgagtcggcacacccggtgcctctgcattgctggtagcagcaaagagatcccagcacaaaacgggttttgtctgacgtgcagggcacagggagc

SEQ ID NO: 62896 - DNA, 600 bp, Chicken  19866894325338_2
acatttgtcctcacttcaggtagctttcttgacctttttacaaactgaataattaccaagcaccagggcctggccctacctgacgtcatcattaatctaatgacctactgtgtttactagagctattttataattcacaattgtaatcaaaatcaacgtgctgtcctgaagttgtttggtttccatcccacttgggtgctgtgacgtggaggcctgggctcattttacctctcctgacttacacttccacagaaacctttctcctayacaaatcttaatcaggagggccgtccaaacgcrgtaacccattctcttaaactggtgataaaagaccatggcagacgtccacttacaaagtgttctctatttaaagagcagaatctgacctctaatgtaaactataacttaactcttaataggtccgtgcactcactgtgagctcttttcagagcatgaaagaggaggcgaggcagtgagtcggcacacccggtgcctctgcattgctggtagcagcaaagagatcccagcacaaaacgggttttgtctgacgtgcagggcacagggagcctctggtgaggggggaaagaggatgcaatgaga

SEQ ID NO: 62897 - DNA, 600 bp, Chicken  19866894325339_1
ctcgcgccggctgccaggaccagagttgctcaccactttctcctcccgctgtggatttaggattcccctccgcccctcctttctgcagtcacactcattggcagccaggtgactcacttgcctcctggttttcacccctccctgccttattttggaaggcggagggcacccagccgcccctgggcacccacccgggggttggcagcttttgccccctcccctcgctctgcacagagctgatgcaatctaggcccatcgcttcccctgcacatcaccaagcgctcccccggctgcagcacrcrcagggcacggctcaagcagcataaaacctttgcaggagcagagggcagccccagggctctccttgccctgctctccccctcctattccgccgaacaactttgccagcgcatgcaaaactttgcggcaacttttccaggcttccaaccatcctctccctccttttcctctctcctcctcgcgccgtcacagccggagcaaactctgcaggctgcgtccccccgcccaccccagcgcatcgctcccacctcccgctcacctccacagcttgcccagcgtcttgctgagctcggcgttgtg

SEQ ID NO: 62898 - DNA, 600 bp, Chicken  19866894325339_2
cgcgccggctgccaggaccagagttgctcaccactttctcctcccgctgtggatttaggattcccctccgcccctcctttctgcagtcacactcattggcagccaggtgactcacttgcctcctggttttcacccctccctgccttattttggaaggcggagggcacccagccgcccctgggcacccacccgggggttggcagcttttgccccctcccctcgctctgcacagagctgatgcaatctaggcccatcgcttcccctgcacatcaccaagcgctcccccggctgcagcacrcrcagggcacggctcaagcagcataaaacctttgcaggagcagagggcagccccagggctctccttgccctgctctccccctcctattccgccgaacaactttgccagcgcatgcaaaactttgcggcaacttttccaggcttccaaccatcctctccctccttttcctctctcctcctcgcgccgtcacagccggagcaaactctgcaggctgcgtccccccgcccaccccagcgcatcgctcccacctcccgctcacctccacagcttgcccagcgtcttgctgagctcggcgttgtgca

SEQ ID NO: 62899 - DNA, 600 bp, Chicken  19866894325345_1
tagctttgcagcaagacaggagctgctgattatgagaaaggacacatggtataccaattataagactgctacatctgaacatactaagatgcaagtagcagtgattaccaggagattaattgagggaaatatgctagcctctaaaaagtgtacagtgtttcacttgcaaaaatatgccagtgaaaaaattgtactactcaaggtaatccaacagtgattttgtgtatttgatttcttaaaataaaataaaattttatagatgaaagaaaatatgtatctattttctaaaatgtacgtccmcaaartaatgctgctatggccaaagaaaatagttcatatttggcaaaatatattttctgactatgtagattatacttatctcaggacaccttgcaagctttatgtttaaagataacttagatacattaagtccagttattcaatgaagtgtccacaaagttattacttttatcagtaaatgagaaatgaataaaagcaaaatgattccttttaaattaaaaararagagagagagagagagttacaaaaaaaatgtgctgagtatcaaagattttcacaaaaaaaacttccaagcaacaa

SEQ ID NO: 62900 - DNA, 600 bp, Chicken  19866894325345_2
ttgcagcaagacaggagctgctgattatgagaaaggacacatggtataccaattataagactgctacatctgaacatactaagatgcaagtagcagtgattaccaggagattaattgagggaaatatgctagcctctaaaaagtgtacagtgtttcacttgcaaaaatatgccagtgaaaaaattgtactactcaaggtaatccaacagtgattttgtgtatttgatttcttaaaataaaataaaattttatagatgaaagaaaatatgtatctattttctaaaatgtacgtccmcaaartaatgctgctatggccaaagaaaatagttcatatttggcaaaatatattttctgactatgtagattatacttatctcaggacaccttgcaagctttatgtttaaagataacttagatacattaagtccagttattcaatgaagtgtccacaaagttattacttttatcagtaaatgagaaatgaataaaagcaaaatgattccttttaaattaaaaararagagagagagagagagttacaaaaaaaatgtgctgagtatcaaagattttcacaaaaaaaacttccaagcaacaaggaaa

SEQ ID NO: 62901 - DNA, 562 bp, Chicken  19866894325345_3
gtatttgatttcttaaaataaaataaaattttatagatgaaagaaaatatgtatctattttctaaaatgtacgtccmcaaartaatgctgctatggccaaagaaaatagttcatatttggcaaaatatattttctgactatgtagattatacttatctcaggacaccttgcaagctttatgtttaaagataacttagatacattaagtccagttattcaatgaagtgtccacaaagttattacttttatcagtaaatgagaaatgaataaaagcaaaatgattccttttaaattaaaaararagagagagagagagagttacaaaaaaaatgtgctgagtatcaaagattttcacaaaaaaaacttccaagcaacaaggaaaaggaagaattttttataacgatgcataattacaagcagatttattagggtgttgcaagggttcttttcatctccaggaaaaaagatgactcctttcccacatcactattgcctctcttctctgctctcatgagaccacacctggagtactgcatccagttctggggcccccaacacaaga

SEQ ID NO: 62902 - DNA, 560 bp, Chicken  19866894325345_4
atttgatttcttaaaataaaataaaattttatagatgaaagaaaatatgtatctattttctaaaatgtacgtccmcaaartaatgctgctatggccaaagaaaatagttcatatttggcaaaatatattttctgactatgtagattatacttatctcaggacaccttgcaagctttatgtttaaagataacttagatacattaagtccagttattcaatgaagtgtccacaaagttattacttttatcagtaaatgagaaatgaataaaagcaaaatgattccttttaaattaaaaararagagagagagagagagttacaaaaaaaatgtgctgagtatcaaagattttcacaaaaaaaacttccaagcaacaaggaaaaggaagaattttttataacgatgcataattacaagcagatttattagggtgttgcaagggttcttttcatctccaggaaaaaagatgactcctttcccacatcactattgcctctcttctctgctctcatgagaccacacctggagtactgcatccagttctggggcccccaacacaaga

SEQ ID NO: 62903 - DNA, 600 bp, Chicken  19866894325346_1
ttagagtacaattcatgctgaagcaagcttccttgtacgagtctaagtatattgctacacatgtttatcagccaaatttctcaaactaaattaatattactttaaaaataagaatataatatctttcataaatcttggttatgcaaaactaagcttattagcttcctttatttcataatggaaagctgtaccagttcttccaatatttggagactaacaggacagccattgcaggcacctgaagcacagagcgtccattgagctcccatccaaatctgaagcaaggcattgctgagaggygaggggcaacacaactcacattacctgtggtccccgcacccgggatcccacttcccagtgttgccaaagcctctggttgcatcctgcagtcccagggccttttcaggggcagccattctggccagatcactgatcagcctggtggtgcagctggccatggccatcaaggccatgttcccttccctctgacatccctctgtacaccggtctcygttcaagctatgcccacactttatcatagaatggacccctagcttcccatatgcccctgcaagcatacacccctctccagccatatcc

SEQ ID NO: 62904 - DNA, 583 bp, Chicken  19866894325346_2
actaacaggacagccattgcaggcacctgaagcacagagcgtccattgagctcccatccaaatctgaagcaaggcattgctgagaggygaggggcaacacaactcacattacctgtggtccccgcacccgggatcccacttcccagtgttgccaaagcctctggttgcatcctgcagtcccagggccttttcaggggcagccattctggccagatcactgatcagcctggtggtgcagctggccatggccatcaaggccatgttcccttccctctgacatccctctgtacaccggtctcygttcaagctatgcccacactttatcatagaatggacccctagcttcccatatgcccctgcaagcatacacccctctccagccatatcctggtggcctccccactctgtgagcacctcgctcccacagaaggattggggcaggattacagaaacatgcacgcagaacaagagctggctgccattgtcacacctgaggtggggaacagcatgggcaacagcaagggcagtgccccatatctgcttgggtgcattcacaaggagcagggaaaacagtagtttgatg

SEQ ID NO: 62905 - DNA, 600 bp, Chicken  19866894325352_1
ttccccttaatggatagtcttaaggatatgaatttatatatagtgaagggagacagtggtatctctcaaccttttatagtctgcagagtctacatgaagggacagattttatgtgaaacaataatctgattctcactcactggattcacaaagtgaaacagtcatacccactttctgcttctgatagtgcagaatatcatcatatctgtaaactagctaagaaaaataaaagacaatttaatttggcactgcagtgaagattcaagtctcaggtaggtaaaaaaagcagccatatgtctsggtcctgaattgcatccatacacttagcaacctcttccaccctcctggtcttgggatgtggactgtagggatggctctgaagctgtctggtggtgacctgggctgaggtctggaagcagtctccagaagcaggggcctctcctcctcccatgaagactgcattgaagttcaggtcctcaccggggctgcactgtagaagtgcctgtgccatactatcttcctgttggcccagaccctaaacttgttgccttgcatatgtctgcctctgtaacctgcccacatggccctgcccatccattc

SEQ ID NO: 62906 - DNA, 599 bp, Chicken  19866894325362_1
  misc_feature (1)..(28): n is any nucleotide
nnnnnnnnnnnnnnnnnnnnnnnnnnnncctgttattgataatagaagacctctgcacccatgtaattatatattaaatatatatttctttttcatttgttatgttgtggcttttttactatattagttcctgtattgaagttattaattagtagcaccacaggtgcttatgggactcagcaaaagtcaagtgtttttgatgccacttgggggtgcactgtgggcttcagtccaatgcagcggctgtgtgggatgactttgatgcaaagggaatctccagcctgaaggaatggacccacktgcactttcttttcacagcacttaaggtagcagacaaagagaaataacaccggtcattctcgttcctattggactttcttcctcttcttctttcttcctttctttttttctttcttcctttctttctctctgtgtctcatattctctttttttccatcctcccaatttttctcttgctccttctttcttttataactattttatgactctttcaatctctctttcccatgtttatctctgcttttccttctatctctatatatgtgtgccttaatcccctccctccttctctctttcaa

SEQ ID NO: 62907 - DNA, 600 bp, Chicken  19866894325371_1
tcagtggaatagctatcgttgttcctgatggctttctgtgttctacaccctaaaggtataaaatctgcatttgatttgtaattattttcatttgtgtaattaaataccatcactgtgtcgggatccaatatggaattttctaggatgacgtatagaagttctggttttgtagttttatttcttctttttgggataattgattgcaattatgcaattttgcttgagtgtgtcacttttgaggtgtctaacatcataagcaataacatggtatcttagaaacatggctacgagttaagttcytttacttgtactcctttaattgaggagtatagttttgtactctccattgaatagaagtccttgttcaataagtgctacttgagaaataactttttttactgctagtaaattactgtagtaatttctttattctggtaaataatatcttctcaatgggcagaggtataacaactgatatcacagttttctctctgcaaagaactttgggaactggtaaaattaaattagaattcaatctctgtcaccaaatagaaatatggaaatggtcatgtacactggatctgttccctgggacagata

SEQ ID NO: 62908 - DNA, 600 bp, Chicken  19866894325374_1
tctaaaagtatgtacgttactaaatgtagggcaatcaaaccatggttcattcaatatgctcagtagctatttttgcatggcctgtttaacagttacttatttttgttgttgtagagggaaagaagtgggttaagagtaaggaactcaatggaatatgtgactgggaaatccccataccgactccctgtcattaacaactatctgataccagtgccacctcctaccctgcaaaaaggagacaggagtgtaaaggcagtgagaaatgggatgtccaggagacgatttcgtcccaccactgcmccaaatggcttggagcaacttgtatccaaggtaggttatttcagtctactyttctgtttatgtgcaagtatattgccttcccagctgatgtactcagaacttaagggaaattcaggagtgtatgaaagttacatattttacattggatcttcagccagctatggctcctggaagtaaagctgtaggaatacaggattggaacaaactcagtggatcattaaatttgattccttcaacctcagacaattcagtacaaaggattctcagtccaaaatcctttattgcctttctgcaataaaa

SEQ ID NO: 62909 - DNA, 600 bp, Chicken  19866894325374_2
caatatgctcagtagctatttttgcatggcctgtttaacagttacttatttttgttgttgtagagggaaagaagtgggttaagagtaaggaactcaatggaatatgtgactgggaaatccccataccgactccctgtcattaacaactatctgataccagtgccacctcctaccctgcaaaaaggagacaggagtgtaaaggcagtgagaaatgggatgtccaggagacgatttcgtcccaccactgcmccaaatggcttggagcaacttgtatccaaggtaggttatttcagtctactyttctgtttatgtgcaagtatattgccttcccagctgatgtactcagaacttaagggaaattcaggagtgtatgaaagttacatattttacattggatcttcagccagctatggctcctggaagtaaagctgtaggaatacaggattggaacaaactcagtggatcattaaatttgattccttcaacctcagacaattcagtacaaaggattctcagtccaaaatcctttattgcctttctgcaataaaactacaaaacacttttcatcttaagcagctcagggccagtctcaaaacactg

SEQ ID NO: 62910 - DNA, 525 bp, Chicken  19866894325375_1
agtcagggatgtcgactctcacaggctgtgagtgggaggcagcccagagctggcgtatttaacagctttgagggatcccagtccatccagcacattccagtgctcctcactaatggggcaggatccgtcaggctgtgcagcgcgctcccgggctgcggagcttgcagacatctggctgcaggagctcatagcctggcctggagaagcgaggttgctggagaggagaggattcattgtgtggtggctgtgcatctggagcccctggtgctttggtgcccagctgtggctgccccgtcccaygttgctcccacagtgactgctacttcccctcccattgcaagccgccagggtgcccccgccgcagtctccatgttgaacacagccattacacaacggagacgtgcaaattgcacctgccctgggggggaacaggagagaggtgctgcatttgatgtttgtcgtctcctgcgcaggttgtgaacgcatacacaccgggcaagaagatctggctggaaggcgttggtg

SEQ ID NO: 62911 - DNA, 600 bp, Chicken  19866894325377_1
tgcttcctggaagggaacagaataaatgtatgttgtgtggtttttgatttccaaatttaaatagattcagtgttgtgcctgctcatgattcataatgtcttgcctagctgcaagtagtttcctaaaagcatgattctgttgatggagaaccatatgtgtatgcagatgctgtatgtctatgtaacctgctgatatcaactatttcttcatattgatgttttattttcttcactataaaaattgttacttattttgtataggtaagaccctcataccaaaaggggtacattttgtgtctgwttgtgattgcctayactttcaaaggaagagtagaaatctgcccttcatcttgtctcctgccttgaaccagaaagagtttcatcgtggtgcatgaatgcagaacagaatgcyagaggaatggtgtgtcagtaggtgagggttgtagaaacagtggatgaaactgtagccaacaggtgtaacgtatttatgaccacagcagaagagaagggtgaataatggatggagggtatttgctagctctttcataatataaaggaaggtgcttgtcagaagcatagggtatatcagccaatgctaaag

SEQ ID NO: 62912 - DNA, 600 bp, Chicken  19866894325377_2
gaacagaataaatgtatgttgtgtggtttttgatttccaaatttaaatagattcagtgttgtgcctgctcatgattcataatgtcttgcctagctgcaagtagtttcctaaaagcatgattctgttgatggagaaccatatgtgtatgcagatgctgtatgtctatgtaacctgctgatatcaactatttcttcatattgatgttttattttcttcactataaaaattgttacttattttgtataggtaagaccctcataccaaaaggggtacattttgtgtctgwttgtgattgcctayactttcaaaggaagagtagaaatctgcccttcatcttgtctcctgccttgaaccagaaagagtttcatcgtggtgcatgaatgcagaacagaatgcyagaggaatggtgtgtcagtaggtgagggttgtagaaacagtggatgaaactgtagccaacaggtgtaacgtatttatgaccacagcagaagagaagggtgaataatggatggagggtatttgctagctctttcataatataaaggaaggtgcttgtcagaagcatagggtatatcagccaatgctaaagtttattcatgatca

SEQ ID NO: 62913 - DNA, 600 bp, Chicken  19866894325377_3
aagtagtttcctaaaagcatgattctgttgatggagaaccatatgtgtatgcagatgctgtatgtctatgtaacctgctgatatcaactatttcttcatattgatgttttattttcttcactataaaaattgttacttattttgtataggtaagaccctcataccaaaaggggtacattttgtgtctgwttgtgattgcctayactttcaaaggaagagtagaaatctgcccttcatcttgtctcctgccttgaaccagaaagagtttcatcgtggtgcatgaatgcagaacagaatgcyagaggaatggtgtgtcagtaggtgagggttgtagaaacagtggatgaaactgtagccaacaggtgtaacgtatttatgaccacagcagaagagaagggtgaataatggatggagggtatttgctagctctttcataatataaaggaaggtgcttgtcagaagcatagggtatatcagccaatgctaaagtttattcatgatcatttgtgccgaccaaatactccttcctctaggaatgacacgtgtcggcaggaaatgtttggtggtctggctagatgttgagcaactcctggcttctct

SEQ ID NO: 62914 - DNA, 599 bp, Chicken  19866894325389_1
  misc_feature (1)..(182): n is any nucleotide
nnnnnnnnnnnnnnnnnnnnnnnnnnnnnnnnnnnnnnnnnnnnnnnnnnnnnnnnnnnnnnnnnnnnnnnnnnnnnnnnnnnnnnnnnnnnnnnnnnnnnnnnnnnnnnnnnnnnnnnnnnnnnnnnnnnnnnnnnnnnnnnnnnnnnnnnnnnnnnnnnnnnnnnnnnnnnnnnnnnnnntgtgttttttcttttttcttttttttttaaatgaatgtttatatttaaaataatttcacctgactttcttggcacctaaaataaggaaattcatgcatttatttggggaaaggagggraaaatacttaattggttttatatgcctgataagttccatccaatcctagaactgattactgccctattaccaatacttctataatgcaccatgaattagcctttgttatacccctacagcggagtaagaacctcatttcgtgcaagagaatagcgaggaacacagagaaaaaaataatttggcttgaaaactgtcatcgactgcagacacctgagtttcaagatcctggctttcaaaagtgccagggaataataaagctcccattgattgcatctgggcagaaggtaatcagcttgtca

SEQ ID NO: 62915 - DNA, 600 bp, Chicken  19866894325390_1
gctgtgagatgcctcctttggcattctacagagaagttctaatgaatttgggccgtgtcttaagagtgtattatgaagacggtttcaaagcatcctctgaactacttgttgctaatgtgttattttaaagtatctagatttaatgtagcagaggagtcatcttccttctatgaagagaagaaaatccccaaaagaaaagctgtgtgggaggtagagcactgcacagaatgctcccctctaagttttgaaggcttgtcatcagtgtacaatgctgtacttaggtagtctaaatcaatagtygtgccctgactgacaaaaccatgcctgtacaacccattatgactgggaatagtattttcttttactttcttttttttttttttttttttggtttggaatgacatctaatgtactgataagacagatacagttgctggagcttatgttctgttattgttgctgaagactaatagtgtagcagcagcatgcagtgttagacaagtcataaggacgcttctcataagcaagtcttacttaggtgtgtatctctagtgacttcctagtatgttgccatagcttgttctgtgtttttccagataa

SEQ ID NO: 62916 - DNA, 600 bp, Chicken  19866894325390_2
ttatgaagacggtttcaaagcatcctctgaactacttgttgctaatgtgttattttaaagtatctagatttaatgtagcagaggagtcatcttccttctatgaagagaagaaaatccccaaaagaaaagctgtgtgggaggtagagcactgcacagaatgctcccctctaagttttgaaggcttgtcatcagtgtacaatgctgtacttaggtagtctaaatcaatagtygtgccctgactgacaaaaccatgcctgtacaacccattatgactgggaatagtattttcttttactttcytttttttttttttttttttggtttggaatgacatctaatgtactgataagacagatacagttgctggagcttatgttctgttattgttgctgaagactaatagtgtagcagcagcatgcagtgttagacaagtcataaggacgcttctcataagcaagtcttacttaggtgtgtatctctagtgacttcctagtatgttgccatagcttgttctgtgtttttccagataagccttctgattttgcgtttgtgtacttcattaaagttgctaatttttctttgtgtggtgtggaatgcggt

SEQ ID NO: 62917 - DNA, 600 bp, Chicken  19866894325390_3; identical to SEQ ID NO: 62916

SEQ ID NO: 62918 - DNA, 600 bp, Chicken  19866894325391_1
gggtcctgtccttcctagatacgtccttcctagatatttccacagcatccactgttgtttccaaggtgttggtaaacttcctgtcagagggcaggagaatgtcctatgtgggctgtgccgcacagctctactttgtcacttccttgggggccaccgaatgctacgtttcggcagctatgactgctgcgtggccctacgcaaccccctgagatactccatcgttgtgaatgacaaagccaggctttccctagtggtaatgtagtgtctgtggtgccggcagcttgggtgttccccttgggrytctgtgggcccaacaaggctacctacttcttctgtgacattcctccacttgttatgctctcctgcactgacacctccttgtacgaaaagcagacacttaaccactgcagtgctggtcatctttgcaccattctgtctcatcctggtatcctatgcctgcatcatctccaacatcctgaagatgtcctctgcggagggcaggcgcgacaccttccccacctgttcttcatatcttattgttgtaactctttttattatggcagcgggagcttgacttacttacagcccaaagtcaattac

SEQ ID NO: 62919 - DNA, 600 bp, Chicken  19866894325391_2
ggtcctgtccttcctagatacgtccttcctagatatttccacagcatccactgttgtttccaaggtgttggtaaacttcctgtcagagggcaggagaatgtcctatgtgggctgtgccgcacagctctactttgtcacttccttgggggccaccgaatgctacgtttcggcagctatgactgctgcgtggccctacgcaaccccctgagatactccatcgttgtgaatgacaaagccaggctttccctagtggtaatgtagtgtctgtggtgccggcagcttgggtgttccccttgggrytctgtgggcccaacaaggctacctacttcttctgtgacattcctccacttgttatgctctcctgcactgacacctccttgtacgaaaagcagacacttaaccactgcagtgctggtcatctttgcaccattctgtctcatcctggtatcctatgcctgcatcatctccaacatcctgaagatgtcctctgcggagggcaggcgcgacaccttccccacctgttcttcatatcttattgttgtaactctttttattatggcagcgggagcttgacttacttacagcccaaagtcaattact

SEQ ID NO: 62920 - DNA, 600 bp, Chicken  19866894325391_3
ttgtaactctttttattatggcagcgggagcttgacttacttacagcccaaagtcaattactctcaagaagaatttttttttttcctctcatacacagctataattccagctctaaatcccctgatctacagcctgaggaataaagaagtgaaaggagtactaattaaaacgatagctctgccctgctccttctgctctatgacagtctttccaaccagccagtccaaacacagggcagaggaaacctccctgagaatctctctctccctgctcttggcaggacaaggactataccagtrccmctggggactattagaaaacagacaaggcagaacawccttctctgtgctgcatggaacatgaagaagactgccctgttgtagcagaagttgtctgaaggctgtttctgactatgtttaagcgctcacctggtagtttaccttccaagcaggactcatggaggtccaggacaagtaggcaacagtactagaggagaacctagctctctagtcagacacatctaatcacatgcacgcatttggaggagacccaggagcctccaccttcacagcctcagcatcttccctgaccccacagcc

SEQ ID NO: 62921 - DNA, 600 bp, Chicken  19866894325391_4
taactctttttattatggcagcgggagcttgacttacttacagcccaaagtcaattactctcaagaagaatttttttttttcctctcatacacagctataattccagctctaaatcccctgatctacagcctgaggaataaagaagtgaaaggagtactaattaaaacgatagctctgccctgctccttctgctctatgacagtctttccaaccagccagtccaaacacagggcagaggaaacctccctgagaatctctctctccctgctcttggcaggacaaggactataccagtrccmctggggactattagaaaacagacaaggcagaacawccttctctgtgctgcatggaacatgaagaagactgccctgttgtagcagaagttgtctgaaggctgtttctgactatgtttaagcgctcacctggtagtttaccttccaagcaggactcatggaggtccaggacaagtaggcaacagtactagaggagaacctagctctctagtcagacacatctaatcacatgcacgcatttggaggagacccaggagcctccaccttcacagcctcagcatcttccctgaccccacagccaag

SEQ ID NO: 62922 - DNA, 600 bp, Chicken  19866894325391_5
acttacagcccaaagtcaattactctcaagaagaatttttttttttcctctcatacacagctataattccagctctaaatcccctgatctacagcctgaggaataaagaagtgaaaggagtactaattaaaacgatagctctgccctgctccttctgctctatgacagtctttccaaccagccagtccaaacacagggcagaggaaacctccctgagaatctctctctccctgctcttggcaggacaaggactataccagtrccmctggggactattagaaaacagacaaggcagaacawccttctctgtgctgcatggaacatgaagaagactgccctgttgtagcagaagttgtctgaaggctgtttctgactatgtttaagcgctcacctggtagtttaccttccaagcaggactcatggaggtccaggacaagtaggcaacagtactagaggagaacctagctctctagtcagacacatctaatcacatgcacgcatttggaggagacccaggagcctccaccttcacagcctcagcatcttccctgaccccacagccaagggctcctgtcctgccctggctgcagcaccccaacc

SEQ ID NO: 62923 - DNA, 600 bp, Chicken  19866894325392_1
tttcagtgaaggtattccatagctatgctgatgcaaataagacatagctaggaaaatggaaactcctcacccagaactaaaaattatcaacaaatatcaacagaaaggtttattcatttgaatctagatggaatgacacaaaccatcaatgcctaaaaatctcactgctggtaaaattttcttaatcagcagaatgatgatttagaaatagtctaggtgtttaagaaggctttgtagttaattctcaaaatctttaaaaggtgctaatgtgagagaataaaactgtgaagtaacacaacrctgagtagacaaatacagatttgtcatgaacaggaatttaagacaaacctgatttcattgaattcccacatcacctttcagggaaaacatggcatctagctgctgaataagaccagctagagcctttatttagctctgttcaactggacatcactcatctgaaactcagaattttttaccccctcccttgtctacaaacaagcaattggacatccagttacctacatccaccaaagattaagaaaaacagttttcctgcaaaatatgaggctagatgaggataaaatagatctcactgtg

SEQ ID NO: 62924 - DNA, 600 bp, Chicken  19866894325393_1
ccactacagtgggacaaaacccactccccacaccttcacctagaggctcatggtcctggcagacatgggaagcttgtccacctgtgaagactgaggcaaagcactcaatgagtacctcagctttttctatgtctgaggaagccagctccccactgcctttcaccagagggggaacactctccttggcccatctcctcctgcctatgtacctgtagaaccccttcttgttatctttcacatcccttgccaagttcagccccatctgtgccttggctttcctaatcctatctctacacacayggacaacagccctgtattccttccaggatacacaaccctgcttccactttctatacatttcccccttttctctcagtttaagttgcaagtccttgcacagcaaagacggttgcctgccttgcctgctcgacttctgctgggagatggagagccgttgtgctctcagaagggtgtccttaaagagctgccagctctgttctgtacccatgcccttaaggacagtttcccagggtatcccacttcagcagttccttgagcagccggaagtttgctttcccaaagcacagggtcccatctctg

SEQ ID NO: 62925 - DNA, 600 bp, Chicken  19866894325393_2
gagaacacaacttgtgctcctgatccctttagaagtcttcccagagccctgaagtctcttttgatcgcctgagaacttcttttgcctacctcttcatttccaatgttgaaaacgagtaatggataataatcagagggcttaaccaggcaactgatgttcctagcaacatctcttacctgcgcaccaggcaggcaacacatctccccgtgggacagatccgagcagcatatcaggcccttggttcctctcagaagggagttccctatgacaacagcccttctttttttcctgactgacatygtagcaaaatggggagcagactgactagccttaggcaacctctccggcacagatggcctttcaccaacatccacagcccccagcccctccagctccagagtcacatacctgttatgtaagggcacctgggaaggtgggacaggctgagtggcagtccgtttgttgccccaaacagggacttcttcccatccctcactgtctttgaggtcgccccttcccacctgactgtaagacagcagatgattcccccactgcttgaggagcatctcccccacaaccttcctgtagggatggcagagt

SEQ ID NO: 62926 - DNA, 570 bp, Chicken  19866894325400_1
cagctcagaaggcagagagtgggccccatgcccaaggaaagatatcaacactgcacatttttggaaacatcatttccatgctgtgaaattgcccatgtgctagacttgtatggatttcaatgggaatgcacaccgtcaaactgcatggcaacaagcccataaagagctttgaagtggataccagagatagtatcaaaatcacagtgaaaatgggaccagtggctaatggtacagcctaaattggtcctgtcattcatttacaatactgtcaaaataaggctacagctacagctgaagggwtctcaagtgtcattgtcagctgcacagttttcttctaagaaggaaatacaatggaaaaaaatgtgccttgtggacaatccagtgctgaggggaaaagacacacaaaaaattgcttcattaaagttttgaagctgacacctcatgcaacagaagtccatacaaaacacacagctctctcttttgaaaggcacagcatccatatgcagcgacgacatattcatcaaaactccctcaacaactctattttctccagcactgaacgccatctgt

SEQ ID NO: 62927 - DNA, 600 bp, Chicken  19866894325401_1
attattcataaatgccaggtatcaaattcctccttcctgtaatatccctgattttcatggaatttgaccagtaagtttgcctctgtgctaaatacattatacattccacccatatatgtaaaagcaactttatttatatttttttcatagttgtagcagttaatctaactacactttcacagtctatatgtgacactactatcatctgctttccctagtaacaatagtagaaggttcatgaatatacaggtaaataaactgctgttcccgtaggattgtaaatgctcatataagtctagwtggctatattcaaacacacatgcagtcacaggatacaaaatcaatactagaaaattcaacttgttttaaaataacaaatgactaatattcataactgcaaccactcatagttagtctaccaagttaaaaaaaatatccagtaaatcaattgaaataatgaataaattcagaaaatcattgccaagtcactgatgtactgcaaatagtaaaataaatttcatttgttgaataagtaattcattcagggttatttattaaattctacaaagcagcatgttggatgcaatcagactgaactct

SEQ ID NO: 62928 - DNA, 600 bp, Chicken  19866894325406_1
accaggaaagaaatgggtatgccattcgttctttagccactggtgagaattaagaaatcctgtctccttcccatctgaccagtaacaagttgagtttcagcatgttgttatgaatatggggaagatggaactgtagttcagccttctgtatgccagttatgctcaggtcttcagagcaaagtgaccactagagcacaagaaaaagaacctgtcccttccatgtttgagttgcaatatccaaactcccagcaaagcagaagatatggcagcctaacatcctcagtggggtcttcctgttgmgtggctgttgtcactgttattctcccctttttctgttttggtgaagttctgaacagttctgtcttgaaggttggtgaggtagcaacatgatgcacccaaatgaggtttgtagcgaacaggtcagcctgacaagtatatcctggttaacagggtgcttgtgcacccgagcagtgtaaacacagaaggaggtaatcagaggcagaggattacttgcttttttatgtttcacctcagtgtaaagaaaataggttttcctctctcctaatagagtaatatcatcctcaaaatgagatagcatcc

SEQ ID NO: 62929 - DNA, 599 bp, Chicken  19866894325411_1
  misc_feature (1)..(24): n is any nucleotide
nnnnnnnnnnnnnnnnnnnnnnnntgagatttcctcttaaaatattaataaaggaaaaaaacatattccaagagaaggtgctgctaacattacatcactttccttatggaaaaatttaaaatggaagctatcaaatccatcgatgactgagaatgacctaaagcaaagctcatttattgatttagtggggaattatatgctcttcattgttaaagtttacaatagctgaaaacactgctttagctaggacaggatgaacctgactaaaaaacactttgaaacaaaatgtaacaaaaacasggaagagtaattgaaaacaatcattgtttcattttattggaaatatgtttttttgactaagagaaagtccgaataaaaaaaaaaaatctaacctttaaaagtccctttcccaaaggcaagtttggatttctcagttgatcacattgcatcaggcttggcagaagatctgtttgtactggaagaattagtggtattttttgctaacttttgtttgagctagtttagaacaactggttccttgctgtcaaggaactgacagcaagtcaagaattgccaamactacagctttacagaaaggt

SEQ ID NO: 62930 - DNA, 600 bp, Chicken  19866894325411_2
aaacaaaatgtaacaaaaacasggaagagtaattgaaaacaatcattgtttcattttattggaaatatgtttttttgactaagagaaagtccgaataaaaaaaaaaaatctaacctttaaaagtccctttcccaaaggcaagtttggatttctcagttgatcacattgcatcaggcttggcagaagatctgtttgtactggaagaattagtggtattttttgctaacttttgtttgagctagtttagaacaactggttccttgctgtcaaggaactgacagcaagtcaagaattgccaamactacagctttacagaaaggtgatgatacttttatactgagagaatattaaagtgaaaacttkgttactgcactgcaacagtatgtgtgcacttttaacctcraaggagatgtgagtgagacaagatgcaagcaatcattcagaagacaagtagtgtataatagctttttaaatcagtgctcttattacagcttagcttaagctaagaaataatgtttcttatcctatgttgttgttgttgttgttgttgaggtgtttgattgattgactgattttcatagaatcatagaatggcctggg

SEQ ID NO: 62931 - DNA, 600 bp, Chicken  19866894325411_3
aatatgtttttttgactaagagaaagtccgaataaaaaaaaaaaatctaacctttaaaagtccctttcccaaaggcaagtttggatttctcagttgatcacattgcatcaggcttggcagaagatctgtttgtactggaagaattagtggtattttttgctaacttttgtttgagctagtttagaacaactggttccttgctgtcaaggaactgacagcaagtcaagaattgccaamactacagctttacagaaaggtgatgatacttttatactgagagaatattaaagtgaaaacttkgttactgcactgcaacagtatgtgtgcacttttaacctcraaggagatgtgagtgagacaagatgcaagcaatcattcagaagacaagtagtgtataatagctttttaaatcagtgctcttattacagcttagcttaagctaagaaataatgtttcttatcctatgttgttgttgttgttgttgttgaggtgtttgattgattgactgattttcatagaatcatagaatggcctgggttgaaaaggaccataatagtcatctcgtttcaacccccctgctattcagggctgccaaccact

SEQ ID NO: 62932 - DNA, 600 bp, Chicken  19866894325411_4
aaaaatctaacctttaaaagtccctttcccaaaggcaagtttggatttctcagttgatcacattgcatcaggcttggcagaagatctgtttgtactggaagaattagtggtattttttgctaacttttgtttgagctagtttagaacaactggttccttgctgtcaaggaactgacagcaagtcaagaattgccaamactacagctttacagaaaggtgatgatacttttatactgagagaatattaaagtgaaaacttkgttactgcactgcaacagtatgtgtgcacttttaacctcraaggagatgtgagtgagacaagatgcaagcaatcattcagaagacaagtagtgtataatagctttttaaatcagtgctcttattacagcttagcttaagctaagaaataatgtttcttatcctatgttgttgttgttgttgttgttgaggtgtttgattgattgactgattttcatagaatcatagaatggcctgggttgaaaaggaccataatagtcatctcgtttcaacccccctgctattcagggctgccaaccactagaccaggctgcccagagccacatccagcctggctttgaa

SEQ ID NO: 62933 - DNA, 600 bp, Chicken  19866894325414_1
gcgggtgttcatagaatcgcagaatggtttggtttggaagggctttcaaagcccatccggttcgatccctccccttgtgtgggcagggctgcccccccagctcaggctacccagggctccatccagcctggccccgagaacctcccgtgcagctgtgccagggcctcaccaccctctcagtggataacttcccccttgacatctcatctaaatcacactttcagtttaaaaccattcccccttgctctgtcactgatgggccatgtaaaaagttggttccccttctgctggtgagctccyttcaggtactggaacaccayactgaggtctccctgaagcattcttcaggctgagcaagcccggctccagtctgtmtttgtaggagagtccttctgattatctctatggccctcctctggacccgcacatctttcttgagtttggggtcccaggcctggatgcagtactccacctggggccttgggagggcagagtaggttgggacagtcacgtctcttttgctgcagctctggatactgttggtcttccaggatgcaagtgcatactgctggttcagtaccatttaacttctttctttct

SEQ ID NO: 62934 - DNA, 600 bp, Chicken  19866894325414_2
agaatggtttggtttggaagggctttcaaagcccatccggttcgatccctccccttgtgtgggcagggctgcccccccagctcaggctacccagggctccatccagcctggccccgagaacctcccgtgcagctgtgccagggcctcaccaccctctcagtggataacttcccccttgacatctcatctaaatcacactttcagtttaaaaccattcccccttgctctgtcactgatgggccatgtaaaaagttggttccccttctgctggtgagctccyttcaggtactggaacaccayactgaggtctccctgaagcattcttcaggctgagcaagcccggctccagtctgtmtttgtaggagagtccttctgattatctctatggccctcctctggacccgcacatctttcttgagtttggggtcccaggcctggatgcagtactccacctggggccttgggagggcagagtaggttgggacagtcacgtctcttttgctgcagctctggatactgttggtcttccaggatgcaagtgcatactgctggttcagtaccatttaacttctttctttcttcttccttaggcagagagta

SEQ ID NO: 62935 - DNA, 600 bp, Chicken  19866894325414_3
tgtgtgggcagggctgcccccccagctcaggctacccagggctccatccagcctggccccgagaacctcccgtgcagctgtgccagggcctcaccaccctctcagtggataacttcccccttgacatctcatctaaatcacactttcagtttaaaaccattcccccttgctctgtcactgatgggccatgtaaaaagttggttccccttctgctggtgagctccyttcaggtactggaacaccayactgaggtctccctgaagcattcttcaggctgagcaagcccggctccagtctgtmtttgtaggagagtccttctgattatctctatggccctcctctggacccgcacatctttcttgagtttggggtcccaggcctggatgcagtactccacctggggccttgggagggcagagtaggttgggacagtcacgtctcttttgctgcagctctggatactgttggtcttccaggatgcaagtgcatactgctggttcagtaccatttaacttctttctttcttcttccttaggcagagagtagaaactaacctagaactgaactgatggtatatttttttttctgtgtgcaatggtg

SEQ ID NO: 62936 - DNA, 599 bp, Chicken  19866894325416_1
  misc_feature (1)..(61): n is any nucleotide
nnnnnnnnnnnnnnnnnnnnnnnnnnnnnnnnnnnnnnnnnnnnnnnnnnnnnnnnnnnnnttatgaaagcctagatttccttgtacaatcggttacttcccccagatttcggtatattgacattcctattaatgattcaacaagttattaacccacatagagtggaagaaacatttgcataggtagctaaatctaaataaattgaggctgtaaaatggttacagactgcagtgaaaattaaaaccaaagttaattgttttttttaatcttccagaaaaattgagtagaattctccagakcttctaatctaaatctcttcgtaagctgatttttcacattcatctttgaaacaaaattctgaattcctatttgaatctaccaaaatgaagacagcagtgtgaacgtgaccatactgacagtgtacttgttcaaaaccaattcacaagaattcatatttcaggcttctgacacattgtaaaagcacttactgtaaaatgctgttgcccattacaggtgaatcttgcatcaaacagttactatgaagaacatacttttttctagtactggttttgcatgtcagatgccgaagttgacaggt

SEQ ID NO: 62937 - DNA, 600 bp, Chicken  19866894325416_2
aaaaccaattcacaagaattcatatttcaggcttctgacacattgtaaaagcacttactgtaaaatgctgttgcccattacaggtgaatcttgcatcaaacagttactatgaagaacatacttttttctagtactggttttgcatgtcagatgccgaagttgacaggttctgtcaagtttggagggatgactcctgttgttacagtctcccgggctttgttactgatataggaactggtggattaagaaattgcatcctgactagccattctaattgctgttacggaatttcctctgatraatttatttgattaccttctcagaatacttttgattttcatccctaaagatggtccccaaaaccacattttaaatcccttggaatgcttcatctctgacgctatattaaacagcctcatattcttaggaaatctacatcatcttgggaaatcctccgtttcaattcaaatcattcacatatcttattttaatctttttaactgtgtactgttcttttttttccacacagagatactagcttgtgatacttgtgtttcctcctggtctattattcacctagcacatctttaatgatctgag

SEQ ID NO: 62938 - DNA, 599 bp, Chicken  19866894325423_1
  misc_feature (1)..(20): n is any nucleotide
nnnnnnnnnnnnnnnnnnnnccgtgacaaggggatagtcctttgttagggcctttcctggagggttggctccctgggctcagggccagagcagctgtaggctgtctctttcctttgttctgtgtctggggacagtggtagaactacagtgaggttgacttctgcccatgggagccacatttgagcttagcctctgttctgtggctcctacctgagctacagcttctgccatgttgtaggccatgacccacctgtgcctggccatagcccccactcagatgggcccagtctcaagcccacrccatggcctggactcagcccagctgcagtggcagggaggtgcccccagtgccctgctcctggtgaggacaggcaggtagggcccatcactacccaccccaccaagggagccctttggtgccctgatacaccatggaaagaaatcagcattcataattttctagtgctaatgaacacattacattttactccgcagctgcgcattaatattttcacttattatgcaatgtgaagcaaataaatgactctctatggaagctatgctgcagcagcttttttactgagtgagaacaaggtgcc

SEQ ID NO: 62939 - DNA, 600 bp, Chicken  19866894325424_1
tgcagcaactgtgacattctttcagtttcgctattagatctctaaatggacacaaaaaagtcccttctacagagaaactaaggattagacctatgcagttcctactgaataaaggacttctattagtttaagggttttttccccccgtttatttcaagtcatttagtttgcgcccctgtatttcataaaagacttttgattaaagttaccaaatcagtttgacagtacaatttcccatgctgaatacgctgccgatctatctggaccattacaacaaaaagcctgagctgctgtactacwkttggcccttgggctgctcttcacagagcatgtgggatctttgccatctttggtttcacgtccatgcgacatcccagaagttttctcagaattttaaggattatggtttgcttcttcctttgtttgtttaagcragacttccaaaaaaacaaatatatgggggcgtattttagaggaggcgtactcaaaaacaaataaggaggagaagaaaagtgtgtttacactgttgcttcctacattggcagttattttcttaggtcactcctagaaaactttcaaaaccaattgcagttactgtac

SEQ ID NO: 62940 - DNA, 600 bp, Chicken  19866894325424_2
gcagcaactgtgacattctttcagtttcgctattagatctctaaatggacacaaaaaagtcccttctacagagaaactaaggattagacctatgcagttcctactgaataaaggacttctattagtttaagggttttttccccccgtttatttcaagtcatttagtttgcgcccctgtatttcataaaagacttttgattaaagttaccaaatcagtttgacagtacaatttcccatgctgaatacgctgccgatctatctggaccattacaacaaaaagcctgagctgctgtactacwkttggcccttgggctgctcttcacagagcatgtgggatctttgccatctttggtttcacgtccatgcgacatcccagaagttttctcagaattttaaggattatggtttgcttcttcctttgtttgtttaagcragacttccaaaaaaacaaatatatgggggcgtattttagaggaggcgtactcaaaaacaaataaggaggagaagaaaagtgtgtttacactgttgcttcctacattggcagttattttcttaggtcactcctagaaaactttcaaaaccaattgcagttactgtact

SEQ ID NO: 62941 - DNA, 598 bp, Chicken  19866894325424_3
ttttttccccccgtttatttcaagtcatttagtttgcgcccctgtatttcataaaagacttttgattaaagttaccaaatcagtttgacagtacaatttcccatgctgaatacgctgccgatctatctggaccattacaacaaaaagcctgagctgctgtactacwkttggcccttgggctgctcttcacagagcatgtgggatctttgccatctttggtttcacgtccatgcgacatcccagaagttttctcagaattttaaggattatggtttgcttcttcctttgtttgtttaagcragacttccaaaaaaacaaatatatgggggcgtattttagaggaggcgtactcaaaaacaaataaggaggagaagaaaagtgtgtttacactgttgcttcctacattggcagttattttcttaggtcactcctagaaaactttcaaaaccaattgcagttactgtacttcctagtggtatcgccgtggaacttccacaaagttaacgcagtggactgtcacaaattaacatcaatgtaataactcgagagattctgccacagctgttatccgagatatggtctgatacacttgtaatta

SEQ ID NO: 62942 - DNA, 600 bp, Chicken  19866894325426_1
ttacctgcccggaggactggtggtctcttagttggagtatctccctttcctgcagctttctgttcagcacgagccaacagcctctgcttcttctcttgcttagtttctggcctgtatttgtgtgccagcttcagaagctgcgtggctagaagtgaaatgaactgattagtaaaataacttggaaatctcagtgttgccttttaaaggactcaactgcatcaagaagcagctgctgaggaattctgggtttgcatccttaaggaggacctctgatacttcctatctctcttttcaaaacastaatttaggccagcaaactcaaaaagcttgctgttcccatcatcagkcactattaaagcctccctaaagaactcccagagacactgcagcttacttctttttttaataaagtcttattttggtttctctcctaacacgcacgcatcagccatcaaagacagaagtctaaagtgatcttgtaggccacgtccttacctgtttggcgatccaaagcctgactgaactggttgattgcagggggcaccttcaagcgcttgtacagaatggagcgctggcgctgcagcctgatgtagcggggcc

SEQ ID NO: 62943 - DNA, 600 bp, Chicken  19866894325426_2
tcctgcagctttctgttcagcacgagccaacagcctctgcttcttctcttgcttagtttctggcctgtatttgtgtgccagcttcagaagctgcgtggctagaagtgaaatgaactgattagtaaaataacttggaaatctcagtgttgccttttaaaggactcaactgcatcaagaagcagctgctgaggaattctgggtttgcatccttaaggaggacctctgatacttcctatctctcttttcaaaacastaatttaggccagcaaactcaaaaagcttgctgttcccatcatcagkcactattaaagcctccctaaagaactcccagagacactgcagcttacttctttttttaataaagtcttattttggtttctctcctaacacgcacgcatcagccatcaaagacagaagtctaaagtgatcttgtaggccacgtccttacctgtttggcgatccaaagcctgactgaactggttgattgcagggggcaccttcaagcgcttgtacagaatggagcgctggcgctgcagcctgatgtagcggggccatttcacaaagcgggtgagatcacgcttgggctggatatcctgtcct

SEQ ID NO: 62944 - DNA, 600 bp, Chicken  19866894325427_1
ctggaaaaatggaagcattaattctgttgtagctgcagtagctttgggaggcgttcttactctcagtagcccatttaagattaatgacttgctctagtatttctccactgatacttctggttctcagatatcttcactttgtttaaaacacataatgaacatctgccacgtattgctgcagtcatgaggaaagccctgaaactgcagagtgtgcccatgtttgccaagctgttgagtgctgaaatgggtctattggagtgtgtgtcttcagtgtggtgctcacctgtctgatggggctckaaaggccaacagcatgagaagttttcctcagccctgtgatgtgtgtccacacactgaggatgaggatggtgctgagaaaaggggaggtgatgtctgtgcttgcagaacacytggggctgctgtggcaagatatggagaccatcatctgccttgggctgctgtgagacatggttagcttctttcccatgaaggcaagcatgccggttcttggaggagtacggtctggaaagagcttttagatggttttgtatcggcacattcatgttgaaaaagtactttcctctgctttgatttacctat

SEQ ID NO: 62945 - DNA, 600 bp, Chicken  19866894325427_2
tacttctggttctcagatatcttcactttgtttaaaacacataatgaacatctgccacgtattgctgcagtcatgaggaaagccctgaaactgcagagtgtgcccatgtttgccaagctgttgagtgctgaaatgggtctattggagtgtgtgtcttcagtgtggtgctcacctgtctgatggggctckaaaggccaacagcatgagaagttttcctcagccctgtgatgtgtgtccacacactgaggatgaggatggtgctgagaaaaggggaggtgatgtctgtgcttgcagaacacytggggctgctgtggcaagatatggagaccatcatctgccttgggctgctgtgagacatggttagcttctttcccatgaaggcaagcatgccggttcttggaggagtacggtctggaaagagcttttagatggttttgtatcggcacattcatgttgaaaaagtactttcctctgctttgatttacctatgcagtattgttttgttgagacccagccttttaaaagagatgaatccaatccctgtccaggagcggtcaggctccaattgtagttaactataattaacagagatctagtcga

SEQ ID NO: 62946 - DNA, 599 bp, Chicken  19866894325428_1
  misc_feature (1)..(80): n is any nucleotide
nnnnnnnnnnnnnnnnnnnnnnnnnnnnnnnnnnnnnnnnnnnnnnnnnnnnnnnnnnnnnnnnnnnnnnnnnnnnnnnntgctagaacacttattgatatgggttttttgctcctaaaactaggtcatttgcaattaaaataagtcagagctaaggcaaaaaagagttaaatcttttaggatcatacgagtttctcaaattttatttgcttttttcagagaaatcagtgctggagctgtaaggccaggaacttgcaaggctgtgtgctgtagaacagctggggccatgtgctgccctgygccgtgagtaagcctttctttgctgatccagcagctcactgacaacttgtgaacatgcagtaccaaatactactctcagttcattaattggattctttcaacacttcttcyatcagttttgtacctctagaacrcgtagtctccctggcaygtcatgtttttcaatgctttaccaacatgcttcaagccttagtcagtgatttatgaaaccgtcctctatttaaagttgagtaagtgaccaaaatataaagcaggaagcatctcagttgacatggaaacttgctctggatataaactag

SEQ ID NO: 62947 - DNA, 600 bp, Chicken  19866894325428_2
ctcctaaaactaggtcatttgcaattaaaataagtcagagctaaggcaaaaaagagttaaatcttttaggatcatacgagtttctcaaattttatttgcttttttcagagaaatcagtgctggagctgtaaggccaggaacttgcaaggctgtgtgctgtagaacagctggggccatgtgctgccctgygccgtgagtaagcctttctttgctgatccagcagctcactgacaacttgtgaacatgcagtaccaaatactactctcagttcattaattggattctttcaacacttcttcyatcagttttgtacctctagaacrcgtagtctccctggcaygtcatgtttttcaatgctttaccaacatgcttcaagccttagtcagtgatttatgaaaccgtcctctatttaaagttgagtaagtgaccaaaatataaagcaggaagcatctcagttgacatggaaacttgctctggatataaactagtattttccaccatatctctcaaaaatcataaatatctagtgtcataagcagtaaatactcaaatactgctcttgagaaagcatccggcatttttctttctaatgaagagctt

SEQ ID NO: 62948 - DNA, 600 bp, Chicken  19866894325428_3
attaaaataagtcagagctaaggcaaaaaagagttaaatcttttaggatcatacgagtttctcaaattttatttgcttttttcagagaaatcagtgctggagctgtaaggccaggaacttgcaaggctgtgtgctgtagaacagctggggccatgtgctgccctgygccgtgagtaagcctttctttgctgatccagcagctcactgacaacttgtgaacatgcagtaccaaatactactctcagttcattaattggattctttcaacacttcttcyatcagttttgtacctctagaacrcgtagtctccctggcaygtcatgtttttcaatgctttaccaacatgcttcaagccttagtcagtgatttatgaaaccgtcctctatttaaagttgagtaagtgaccaaaatataaagcaggaagcatctcagttgacatggaaacttgctctggatataaactagtattttccaccatatctctcaaaaatcataaatatctagtgtcataagcagtaaatactcaaatactgctcttgagaaagcatccggcatttttctttctaatgaagagctttgtgaacgtgtggagctcagtcc

SEQ ID NO: 62949 - DNA, 600 bp, Chicken  19866894325428_4
ctaaggcaaaaaagagttaaatcttttaggatcatacgagtttctcaaattttatttgcttttttcagagaaatcagtgctggagctgtaaggccaggaacttgcaaggctgtgtgctgtagaacagctggggccatgtgctgccctgygccgtgagtaagcctttctttgctgatccagcagctcactgacaacttgtgaacatgcagtaccaaatactactctcagttcattaattggattctttcaacacttcttcyatcagttttgtacctctagaacrcgtagtctccctggcaygtcatgtttttcaatgctttaccaacatgcttcaagccttagtcagtgatttatgaaaccgtcctctatttaaagttgagtaagtgaccaaaatataaagcaggaagcatctcagttgacatggaaacttgctctggatataaactagtattttccaccatatctctcaaaaatcataaatatctagtgtcataagcagtaaatactcaaatactgctcttgagaaagcatccggcatttttctttctaatgaagagctttgtgaacgtgtggagctcagtcctcccttggtggctggga

SEQ ID NO: 62950 - DNA, 600 bp, Chicken  19866894325434_1
aaacccaacagataagagaattgcaaagatctataaaaaacctgactcctatgtcctgattgctgagagagcaacatcacagctgtcccccttcattcagtattgcatttaaaatacagtaagaatatcaggctgacaggcttcatcccagagaagtggatacagtacaaaaaagatgtaggaactgttccctgtcttctgcttatttaagcacaccagtaagtccataaattgcagtctactgttagtagacgaaacatacgtcatttgatcagttataaaatttaactcaatagaacrgcttatatttcaccttccaggagaactatcaataaagtaagaagaaaacaagtagttgtaaaaataggtatttaagaattcttgtggcttagcccrgaacacaaatgaaaaggaaaactgataccatacctttgaagratttgktctgttgcaagcaaaataatttttaagagatacaagaaaaaattaaaataaaagtacttggcatcacaaaaagtttggatttttaaaattaaatggaacttttcagttaataaaccataatgtatctgtcaacaatgcatcacatggcatagtaag

SEQ ID NO: 62951 - DNA, 600 bp, Chicken  19866894325434_2
tcagtattgcatttaaaatacagtaagaatatcaggctgacaggcttcatcccagagaagtggatacagtacaaaaaagatgtaggaactgttccctgtcttctgcttatttaagcacaccagtaagtccataaattgcagtctactgttagtagacgaaacatacgtcatttgatcagttataaaatttaactcaatagaacrgcttatatttcaccttccaggagaactatcaataaagtaagaagaaaacaagtagttgtaaaaataggtatttaagaattcttgtggcttagcccrgaacacaaatgaaaaggaaaactgataccatacctttgaagratttgktctgttgcaagcaaaataatttttaagagatacaagaaaaaattaaaataaaagtacttggcatcacaaaaagtttggatttttaaaattaaatggaacttttcagttaataaaccataatgtatctgtcaacaatgcatcacatggcatagtaagtttgtcttccttttgtaagcttttctgcatcaacgttaaaattctcattaagttgcctttacttgaggagtgataagaaattaaggtttttatttt

SEQ ID NO: 62952 - DNA, 600 bp, Chicken  19866894325434_3
ggcttcatcccagagaagtggatacagtacaaaaaagatgtaggaactgttccctgtcttctgcttatttaagcacaccagtaagtccataaattgcagtctactgttagtagacgaaacatacgtcatttgatcagttataaaatttaactcaatagaacrgcttatatttcaccttccaggagaactatcaataaagtaagaagaaaacaagtagttgtaaaaataggtatttaagaattcttgtggcttagcccrgaacacaaatgaaaaggaaaactgataccatacctttgaagratttgktctgttgcaagcaaaataatttttaagagatacaagaaaaaattaaaataaaagtacttggcatcacaaaaagtttggatttttaaaattaaatggaacttttcagttaataaaccataatgtatctgtcaacaatgcatcacatggcatagtaagtttgtcttccttttgtaagcttttctgcatcaacgttaaaattctcattaagttgcctttacttgaggagtgataagaaattaaggtttttatttttgtgagtaggcactacataaaagtaaatgagcataagaaata

SEQ ID NO: 62953 - DNA, 600 bp, Chicken  19866894325434_4
atcccagagaagtggatacagtacaaaaaagatgtaggaactgttccctgtcttctgcttatttaagcacaccagtaagtccataaattgcagtctactgttagtagacgaaacatacgtcatttgatcagttataaaatttaactcaatagaacrgcttatatttcaccttccaggagaactatcaataaagtaagaagaaaacaagtagttgtaaaaataggtatttaagaattcttgtggcttagcccrgaacacaaatgaaaaggaaaactgataccatacctttgaagratttgktctgttgcaagcaaaataatttttaagagatacaagaaaaaattaaaataaaagtacttggcatcacaaaaagtttggatttttaaaattaaatggaacttttcagttaataaaccataatgtatctgtcaacaatgcatcacatggcatagtaagtttgtcttccttttgtaagcttttctgcatcaacgttaaaattctcattaagttgcctttacttgaggagtgataagaaattaaggtttttatttttgtgagtaggcactacataaaagtaaatgagcataagaaatatacata

SEQ ID NO: 62954 - DNA, 600 bp, Chicken  19866894325436_1
ctgccaagttgctcctggtgctctctgcccagcactgggtgccatgggctggtaggagtttgctggcatgaaatctgcaggcatccctctgccatggacaaccattggcagagactgtttccatatctgttcatgctgcagcctggggacgttcttcagagtgtcagctccagggagaaaatactacagcctatgctcttctcccagtataagaagtgcagggcattgcatccatccttctcctccatatccttcctattcttctactaccctcaaggaataacctctgatctgggcaawayagaaccaaggaggtatctgctctcatcctcattagggaagatgagagcgcttacatcagaacagagcaccctttcccccccacacacagttccagtgcagaaaaattttgctctgacatgagtagatggaggctttttctagctaggctctgtacaaacacagactcccagctctgcagaaacatatataccaactaaacttcaaaccccacaagttcctggacccactcacagttataaagcraaacagctgcctgagtatttgcaggatcaagggctggccatctcaccctgcact

SEQ ID NO: 62955 - DNA, 600 bp, Chicken  19866894325436_2
gccaagttgctcctggtgctctctgcccagcactgggtgccatgggctggtaggagtttgctggcatgaaatctgcaggcatccctctgccatggacaaccattggcagagactgtttccatatctgttcatgctgcagcctggggacgttcttcagagtgtcagctccagggagaaaatactacagcctatgctcttctcccagtataagaagtgcagggcattgcatccatccttctcctccatatccttcctattcttctactaccctcaaggaataacctctgatctgggcaawayagaaccaaggaggtatctgctctcatcctcattagggaagatgagagcgcttacatcagaacagagcaccctttcccccccacacacagttccagtgcagaaaaattttgctctgacatgagtagatggaggctttttctagctaggctctgtacaaacacagactcccagctctgcagaaacatatataccaactaaacttcaaaccccacaagttcctggacccactcacagttataaagcraaacagctgcctgagtatttgcaggatcaagggctggccatctcaccctgcactca

SEQ ID NO: 62956 - DNA, 600 bp, Chicken  19866894325436_3
atatccttcctattcttctactaccctcaaggaataacctctgatctgggcaawayagaaccaaggaggtatctgctctcatcctcattagggaagatgagagcgcttacatcagaacagagcaccctttcccccccacacacagttccagtgcagaaaaattttgctctgacatgagtagatggaggctttttctagctaggctctgtacaaacacagactcccagctctgcagaaacatatataccaactaaacttcaaaccccacaagttcctggacccactcacagttataaagcraaacagctgcctgagtatttgcaggatcaagggctggccatctcaccctgcactcagaacaagcagctgtggctcattttgaggttacctcttccagctgcgtgctagtgctcctctgctgctagctggagtcctccagcagtgctggagtggttcctgaagtgaattcatgccagctcccaagcctgtggctctgctcaaactcatcctcacaaatggctgaagaaacctgtgtctcactcagccccatcatttggcctttggctcaacaccttctgggcaggggcagaggaggcagca

SEQ ID NO: 62957 - DNA, 600 bp, Chicken  19866894325436_4
aggatcaagggctggccatctcaccctgcactcagaacaagcagctgtggctcattttgaggttacctcttccagctgcgtgctagtgctcctctgctgctagctggagtcctccagcagtgctggagtggttcctgaagtgaattcatgccagctcccaagcctgtggctctgctcaaactcatcctcacaaatggctgaagaaacctgtgtctcactcagccccatcatttggcctttggctcaacaccttctgggcaggggcagaggaggcagcagagagggcaagggatgggacarggacrtctgcaacaaccgcagcaaagttggccagagccatgattaggacttggcaccccacttcttctgagccctaggagggctccatgaaacactaaagcagagtgatatccattgggccagaagttgaacgcattctagctcttctggggatactcaccatagattaccttaaataaggactttttcaattaaaagttttcctctactccctagatattttggttgcagggttattttcctgagaggatttaagrctcttcttctttttcaagagtaaaatggaatatttcttttaag

SEQ ID NO: 62958 - DNA, 600 bp, Chicken  19866894325436_5
caagggctggccatctcaccctgcactcagaacaagcagctgtggctcattttgaggttacctcttccagctgcgtgctagtgctcctctgctgctagctggagtcctccagcagtgctggagtggttcctgaagtgaattcatgccagctcccaagcctgtggctctgctcaaactcatcctcacaaatggctgaagaaacctgtgtctcactcagccccatcatttggcctttggctcaacaccttctgggcaggggcagaggaggcagcagagagggcaagggatgggacarggacrtctgcaacaaccgcagcaaagttggccagagccatgattaggacttggcaccccacttcttctgagccctaggagggctccatgaaacactaaagcagagtgatatccattgggccagaagttgaacgcattctagctcttctggggatactcaccatagattaccttaaataaggactttttcaattaaaagttttcctctactccctagatattttggttgcagggttattttcctgagaggatttaagrctcttcttctttttcaagagtaaaatggaatatttcttttaagcttcc

SEQ ID NO: 62959 - DNA, 600 bp, Chicken  19866894325436_6
gcaggggcagaggaggcagcagagagggcaagggatgggacarggacrtctgcaacaaccgcagcaaagttggccagagccatgattaggacttggcaccccacttcttctgagccctaggagggctccatgaaacactaaagcagagtgatatccattgggccagaagttgaacgcattctagctcttctggggatactcaccatagattaccttaaataaggactttttcaattaaaagttttcctctactccctagatattttggttgcagggttattttcctgagaggatttaagrctcttcttctttttcaagagtaaaatggaatatttcttttaagcttccctgtctctcagactgaaaggagccatgcttgctcctggagagatgccaagcctggaaaattgaagtctgagagacttctgagagagtttggggaatttacaaatcagcctagtctctgctatggtgcaacacgaaggaaagtgcagcagtgacagcagagcagcaagctcctaggttgcagcaagggaaggcttgttcaaatgcaacagccatggtcacagaaataaaagaaagaaactgcttaccttcaga

SEQ ID NO: 62960 - DNA, 600 bp, Chicken  19866894325444_1
cccttgtaaacatgtctgtttacttgcaggaaaccagaaagaacccacattgggtgctgctgattttatctagcgttacttaaatgcttttggcttccagtagtcaccccagagagagcgcaggagtgacggctgcaccctggaaaactccactgtactttaaaatctgtgcccaacacttcaggtggagagagctgcatgggaaatagtgatcatagcattttgtggcaatcctgaaccttggcgtgaaagctcattaatagtggctgtaggcattaatccttcgcaaaggagctctarttttcagtgtacctcattgagggaatgttatgcctgtagaaatgcagcgatagcccagatcctgcaccaggaggtttccctaggctacccccagcaattccttgttctaagactgtcggtgctcctgaggcacacagatttggttctgatggaaaatgctgtaattgtttgtgggacactttgtttttatttaaagatttggtcaagtgtgagagcgcagtcaggcggcgctgaagtctgtgggaaatggcccatagccttcagtatggctgtaagtcatggtgggcagatatggacttt

SEQ ID NO: 62961 - DNA, 600 bp, Chicken  19866894325444_2
gagggaatgttatgcctgtagaaatgcagcgatagcccagatcctgcaccaggaggtttccctaggctacccccagcaattccttgttctaagactgtcggtgctcctgaggcacacagatttggttctgatggaaaatgctgtaattgtttgtgggacactttgtttttatttaaagatttggtcaagtgtgagagcgcagtcaggcggcgctgaagtctgtgggaaatggcccatagccttcagtatggctgtaagtcatggtgggcagatatggactttataaaacagtcctaatgrgttctgtttaggtataaaaatgtttatagacckagtttagatacgaacaaaactgagcttaaagctgtagctctgtagggaaagtccaaagcctgaatagtggctctcagatgtctaccaggctcaaaagccacaacagccattcctggttcccttcagggtcagatgtgaaattctggcactgctgaagtggaagatgagtggaaatgagcagtgatctgaaagtaaaaggggaatttgagctaaatacggggaaaattactcacaccacaattaatatagacagatggacacagaagc

SEQ ID NO: 62962 - DNA, 600 bp, Chicken  19866894325444_3
agcccagatcctgcaccaggaggtttccctaggctacccccagcaattccttgttctaagactgtcggtgctcctgaggcacacagatttggttctgatggaaaatgctgtaattgtttgtgggacactttgtttttatttaaagatttggtcaagtgtgagagcgcagtcaggcggcgctgaagtctgtgggaaatggcccatagccttcagtatggctgtaagtcatggtgggcagatatggactttataaaacagtcctaatgrgttctgtttaggtataaaaatgtttatagacckagtttagatacgaacaaaactgagcttaaagctgtagctctgtagggaaagtccaaagcctgaatagtggctctcagatgtctaccaggctcaaaagccacaacagccattcctggttcccttcagggtcagatgtgaaattctggcactgctgaagtggaagatgagtggaaatgagcagtgatctgaaagtaaaaggggaatttgagctaaatacggggaaaattactcacaccacaattaatatagacagatggacacagaagctgattagctagctgtctagagactcacagtgat

SEQ ID NO: 62963 - DNA, 600 bp, Chicken  19866894325446_1
ggatgatctggagaacgtggaggaggtgggtgccctgcagggcccggctggctggcctgctgttgggcttgcagtcgatctataacgatgctgtgcttttcccaggagggacaggagaatgtggagatcctcccctctggagagcgacaggcagcgaaccagaaacgtatcaccacccccctacatgaccaagtacgaacgagccagagttctgggcacgcgtgccctccagatagcgtgagtattcttatctgtatccttgcacatccctactgtaggaccgcgttcttctaatgtctyrccctgttaaagctccttcctttcttcctaaaacctcatgtgaacctttgcctggcagttgaggttgggaatcaccgtctccatcaacagtgaaaagcagtgctgtgagctgtcagtcacacatgaattctgaatctcactctagctgatgctgtgggttttgtgcctgtaagtgagattattggsctgtgctgaaattgrtctgaaaggaattttctgagtaccatcttagctacatccaccctgaaaattatgctgatctgattactgccgatgagcttttaaacgatctttgcttaa

SEQ ID NO: 62964 - DNA, 600 bp, Chicken  19866894325446_2
gatgatctggagaacgtggaggaggtgggtgccctgcagggcccggctggctggcctgctgttgggcttgcagtcgatctataacgatgctgtgcttttcccaggagggacaggagaatgtggagatcctcccctctggagagcgacaggcagcgaaccagaaacgtatcaccacccccctacatgaccaagtacgaacgagccagagttctgggcacgcgtgccctccagatagcgtgagtattcttatctgtatccttgcacatccctactgtaggaccgcgttcttctaatgtctyrccctgttaaagctccttcctttcttcctaaaacctcatgtgaacctttgcctggcagttgaggttgggaatcaccgtctccatcaacagtgaaaagcagtgctgtgagctgtcagtcacacatgaattctgaatctcactctagctgatgctgtgggttttgtgcctgtaagtgagattattggsctgtgctgaaattgrtctgaaaggaattttctgagtaccatcttagctacatccaccctgaaaattatgctgatctgattactgccgatgagcttttaaacgatctttgcttaat

SEQ ID NO: 62965 - DNA, 600 bp, Chicken  19866894325446_3
gaccaagtacgaacgagccagagttctgggcacgcgtgccctccagatagcgtgagtattcttatctgtatccttgcacatccctactgtaggaccgcgttcttctaatgtctyrccctgttaaagctccttcctttcttcctaaaacctcatgtgaacctttgcctggcagttgaggttgggaatcaccgtctccatcaacagtgaaaagcagtgctgtgagctgtcagtcacacatgaattctgaatctcactctagctgatgctgtgggttttgtgcctgtaagtgagattattggsctgtgctgaaattgrtctgaaaggaattttctgagtaccatcttagctacatccaccctgaaaattatgctgatctgattactgccgatgagcttttaaacgatctttgcttaatcgtcactttgctgagctattctttgcccagttatcactccaggaaggaattctgtgcgtgttctttcaactggtggcaggccagaagaatggaagagatggggtgggccagtgccagacctgtaatccagaacactgatgcctggtctgtttcacctccatattctgcctctggtgttgactcta

SEQ ID NO: 62966 - DNA, 600 bp, Chicken  19866894325446_4
agccagagttctgggcacgcgtgccctccagatagcgtgagtattcttatctgtatccttgcacatccctactgtaggaccgcgttcttctaatgtctyrccctgttaaagctccttcctttcttcctaaaacctcatgtgaacctttgcctggcagttgaggttgggaatcaccgtctccatcaacagtgaaaagcagtgctgtgagctgtcagtcacacatgaattctgaatctcactctagctgatgctgtgggttttgtgcctgtaagtgagattattggsctgtgctgaaattgrtctgaaaggaattttctgagtaccatcttagctacatccaccctgaaaattatgctgatctgattactgccgatgagcttttaaacgatctttgcttaatcgtcactttgctgagctattctttgcccagttatcactccaggaaggaattctgtgcgtgttctttcaactggtggcaggccagaagaatggaagagatggggtgggccagtgccagacctgtaatccagaacactgatgcctggtctgtttcacctccatattctgcctctggtgttgactctaagccagtagcagccc

SEQ ID NO: 62967 - DNA, 600 bp, Chicken  19866894325450_1
aactatttttgttatcaaaagacaggtaaataagaagagttcattaactctgtaaacataactgattactcttgggatatttgattagctcagtttttaattcgcgtacagataaagggtcacatttctatagtggtttatattacctatagaaataatgtgattcagtgttcttctcacagtaaaaataatgcacagggagtcttttaaatggatccagttcatcaaagctcttaaacaaatatttacactgtggtgatgccatgtacaaaacaacagcatacattacctatatttctraagtgattattgaaatatccacttaaacaggaacatttccaagaaaaaaaaatgcattacaaaaaaaaaaaaacagggagtgggctggagaggaattattgtttttcttttcctgatgatgaacaatcacactggcaaacaaactgattgtgcttttgttctgcactcctctatctgtgtagaacatgtcatgttagactggagctctacaatgttacagcaattattagtaatagtagtagtactaacaatggtctgagccccactctcaaagatttctcctttcacataccgtgacag

SEQ ID NO: 62968 - DNA, 599 bp, Chicken  19866894325451_1
  misc_feature (1)..(121): n is any nucleotide
nnnnnnnnnnnnnnnnnnnnnnnnnnnnnnnnnnnnnnnnnnnnnnnnnnnnnnnnnnnnnnnnnnnnnnnnnnnnnnnnnnnnnnnnnnnnnnnnnnnnnnnnnnnnnnnnnnnnnnnnnatgaagacatgctggttacccccatacccacttcttcttccatatgccttagcatagcttctaggaggatctgctccatgatcttaccaagcacaaaattgacagtaacaggctttcctttccacccttcttaaaaatgggtgtgatgttgccttttccagtcaccagggatttcaccygactgctacaacttttcaaacatcattgataatggcttggtgactatgttagtcaaatccctcagggctctgggacacatctcttgtagactaagacctagtaattagttgttagatttttcctataaaaaatatatataatcttctggagcaaatgtattttatagacccaggttgccctggacaaacaagtttgataaatgtgtatttagtacttaaaggcctacattttattaaatgtcacaataagcatcacacaaggatgcaatgtgatcaagctgtgtctgaatatcacatcc

SEQ ID NO: 62969 - DNA, 600 bp, Chicken  19866894325452_1
atggctgcgctgatacaatcccaaataacagctcataagggaacccagaggagtgaagtgatcccagtttcccagcagcactataggcacacacgggtgccaacttacggaaatgcagagtaggttttctatctctggccataatctgctacaacgcagccctaagaaattaatccctgcttggctttccactaaaaaaaaaggggggtgaaatggaacctctgacccacagggctgaaagctgaaagttcttcacctgaaataagcccaaagctgatgaaaaaaaaaattacctccagyacagcctctgtttttccactcctcaaacctttctctgaacttctggaagactcatttccaattttctcattcttggagttggcaatattgaaaaccatgaggaaatacaaaagcaaaacagcattttggaactcttttattatttgggtggttttgaccattcttgtcatgtggtttgcctaaaataataataaaaaaatccttgtttggagctgggaaaggaagagcggtgtgtttatttcatgtctgactcatcagctcggtgttggtacactgaacgcttcagaagctaacactcca

SEQ ID NO: 62970 - DNA, 599 bp, Chicken  19866894325453_1
  misc_feature (1)..(138): n is any nucleotide
nnnnnnnnnnnnnnnnnnnnnnnnnnnnnnnnnnnnnnnnnnnnnnnnnnnnnnnnnnnnnnnnnnnnnnnnnnnnnnnnnnnnnnnnnnnnnnnnnnnnnnnnnnnnnnnnnnnnnnnnnnnnnnnnnnnnnnnnnngattttctcatcaggttgaagtccctaatgagtacattttgagctcatcaaggctcaagatctccacccccatggagggccctgcccctcacagccgaggctgcctgcaccccatgagtacctggggaatacttggcttttgcacagttgatgactggatgyttcaggggtgtaacaatgccctggtcgggtttctggaaagctgaaatgaggttgtgcattttccggaagagccgccggtgaaccccaggtgccgtctgtgaattcaaaggtgagaggtgaggggaggccaggcagtcagtgccctggtgctgagtccttgtcctcagaaaggcagccacgtgtcggkatggagccagcccttccctcagcccctccatgtgtgagcctacaacaaggtatgagccattcctgctctccttcatccaagtatgattccaacattgcctcaacaaatgaaa

SEQ ID NO: 62971 - DNA, 600 bp, Chicken  19866894325453_2
aaggctcaagatctccacccccatggagggccctgcccctcacagccgaggctgcctgcaccccatgagtacctggggaatacttggcttttgcacagttgatgactggatgyttcaggggtgtaacaatgccctggtcgggtttctggaaagctgaaatgaggttgtgcattttccggaagagccgccggtgaaccccaggtgccgtctgtgaattcaaaggtgagaggtgaggggaggccaggcagtcagtgccctggtgctgagtccttgtcctcagaaaggcagccacgtgtcggkatggagccagcccttccctcagcccctccatgtgtgagcctacaacaaggtatgagccattcctgctctccttcatccaagtatgattccaacattgcctcaacaaatgaaactcrgagcctgtggttcttgctaagcacattctcaagtggtcttttgctatttatggccccgagtcaaggcagcctgcagtgcgcctgggaaacaccagtaagatgaccatgagagctgcttggcactgaccatccacctcacaccactaatcccaggcacagatactgcccaattgcaagccttcct

SEQ ID NO: 62972 - DNA, 600 bp, Chicken  19866894325453_3
aggggtgtaacaatgccctggtcgggtttctggaaagctgaaatgaggttgtgcattttccggaagagccgccggtgaaccccaggtgccgtctgtgaattcaaaggtgagaggtgaggggaggccaggcagtcagtgccctggtgctgagtccttgtcctcagaaaggcagccacgtgtcggkatggagccagcccttccctcagcccctccatgtgtgagcctacaacaaggtatgagccattcctgctctccttcatccaagtatgattccaacattgcctcaacaaatgaaactcrgagcctgtggttcttgctaagcacattctcaagtggtcttttgctatttatggccccgagtcaaggcagcctgcagtgcgcctgggaaacaccagtaagatgaccatgagagctgcttggcactgaccatccacctcacaccactaatcccaggcacagatactgcccaattgcaagccttccttcaagccttcagtgcttttcagtgtgttcactgagcattcccacctatctttttggtgcaaaggaagcagtcagacattacctagtttatcaaaaatgggattttttcaatttttt

SEQ ID NO: 62973 - DNA, 600 bp, Chicken  19866894325486_1
gaggccacataaaagtagacccacgctctgttgcaaacagagaatggatgtaagagcattcatcagggttggggattttagtaattcttccctgtggcctgagttctagaaatggccttatcttctgagaacatgagcagcctgcacctcgctcagggcagaccatgtggcacagtttggggtgacatcctgtgctctaccaagccacttccctaaggaacggcctttcccttacactcatcagcacaaatatgttttttttacactctcaaacacagaaaagcagttggcaccttcttkttgagtgacactcatctgtagggaaattgatttaataggttgttagagtgccaattagaaccaacaataactcaattgacctataactgccttggcaccaacagagctttcaaaagtaagagaaaggatgaaatctgtgctccggcacagatgagtgctcagatagttggtttcaagagcaaactgaattcatgggcttgctaatgagatgctcataacgcagcagaaacaaagacaaatttcaatggtttcaagctaaaatgacactatgttatctccagacagagatcactcttttat

SEQ ID NO: 62974 - DNA, 600 bp, Chicken  19866894325486_2
tgccaattagaaccaacaataactcaattgacctataactgccttggcaccaacagagctttcaaaagtaagagaaaggatgaaatctgtgctccggcacagatgagtgctcagatagttggtttcaagagcaaactgaattcatgggcttgctaatgagatgctcataacgcagcagaaacaaagacaaatttcaatggtttcaagctaaaatgacactatgttatctccagacagagatcactcttttatctgtataataaatggatttcagtgcagcagcagtgacgttagagcagraaaaaactgagtgcaacagaaagcactagcacagttacctaaccagaacaacactgtactggaacctcaagtttacctgcttataataggactgaaatgtcctacactgattctgtatgtgcctaccaataagcacttttggaaaacacattattccctcaaataaaatctgtttcacacttaacgcagcgaagtctgtgcctctatgcaaattcatcatttgaaatgcttggctttaaggatggatgtatttgaagcttggaaaacaaaaactgggtagagtttgtcgaaacactgtta

SEQ ID NO: 62975 - DNA, 600 bp, Chicken  19866894325488_1
gtttggggaaaaggagactatgaggttatctcattgctctctacaacttcctgagcaggggatatggtaaagaataagagaagttgtgagaatggcacaacactgtgccaggggaggttctgacttgaccttagggaaaatgtatttatgatgagggtgctcaaacactggaataggctttctagagaagaagtgattgatgacccatgcctgtcagagttcaagagacgtttgtataatacaaataacatgctttaactttgctagcccagaaggggtaaggcagttggacttgatgawctttgcaggtcctccccaactattctcttctattccattccattccttcaaagatctgaaaaataataaagcatgcgtagtgcataacagctcccgaggatccaaatgtcctaaagattcatccctataaaacactgaacatttcaaggagtagatacaacagaagaagattctgactacataacatagtcagctcttgcccagcatcttcttctgtagaagactgcaaaggtaagctgttttggttagaaaatctgtaattcaaaaaagagtacaccttactgacaatatttacaggct

SEQ ID NO: 62976 - DNA, 599 bp, Chicken  19866894325491_1
  misc_feature (1)..(101): n is any nucleotide
nnnnnnnnnnnnnnnnnnnnnnnnnnnnnnnnnnnnnnnnnnnnnnnnnnnnnnnnnnnnnnnnnnnnnnnnnnnnnnnnnnnnnnnnnnnnnnnnnnnnnccagaaaagtagaggcaggaaaagattacctgctgcccctgaagcctctgctggagctgcatgcggagctgctttggtgtattggtccgaggtctcattgcatttgctctaggatgcatactttgaagtggaaaattgttttgttggctcatctgattcatcacggaattaaaggatggctgctgtccctggatgttaytaaagcctcctggcaaggctgtgccctgcccttggtagggctgaccatataacgaaggcttttggtccatcatcactgyggattcctgaccttgaaatgaatcttgtttgggttccaaagtttgcccctttaagagatatagaacatatattgctattgaaagcaccgtcaaagtatgaattgttaaaaaaaacygacataactaatgtatcatacaaagaccagttgtttcttgagtagaaaatagcatgactagattactatcaaatttgtctctgaacaagwgaaatagcacaagc

SEQ ID NO: 62977 - DNA, 599 bp, Chicken  19866894325491_2
  misc_feature (1)..(22): n is any nucleotide
nnnnnnnnnnnnnnnnnnnnnnccagaaaagtagaggcaggaaaagattacctgctgcccctgaagcctctgctggagctgcatgcggagctgctttggtgtattggtccgaggtctcattgcatttgctctaggatgcatactttgaagtggaaaattgttttgttggctcatctgattcatcacggaattaaaggatggctgctgtccctggatgttaytaaagcctcctggcaaggctgtgccctgcccttggtagggctgaccatataacgaaggcttttggtccatcatcactgyggattcctgaccttgaaatgaatcttgtttgggttccaaagtttgcccctttaagagatatagaacatatattgctattgaaagcaccgtcaaagtatgaattgttaaaaaaaacygacataactaatgtatcatacaaagaccagttgtttcttgagtagaaaatagcatgactagattactatcaaatttgtctctgaacaagwgaaatagcacaagcgactattagtaatttacttgaaaatcacttctgctgatcagtgcttgcataagcagattggtatcattataaaagccct

SEQ ID NO: 62978 - DNA, 600 bp, Chicken  19866894325491_3
tcattgcatttgctctaggatgcatactttgaagtggaaaattgttttgttggctcatctgattcatcacggaattaaaggatggctgctgtccctggatgttaytaaagcctcctggcaaggctgtgccctgcccttggtagggctgaccatataacgaaggcttttggtccatcatcactgyggattcctgaccttgaaatgaatcttgtttgggttccaaagtttgcccctttaagagatatagaacatatattgctattgaaagcaccgtcaaagtatgaattgttaaaaaaaacygacataactaatgtatcatacaaagaccagttgtttcttgagtagaaaatagcatgactagattactatcaaatttgtctctgaacaagwgaaatagcacaagcgactattagtaatttacttgaaaatcacttctgctgatcagtgcttgcataagcagattggtatcattataaaagcccttctgctcttttcaactgcagtttgtacaaatgacagcatgattttgtgttttccagtgaattccaaagtattgaacagaatttcttttttcctatttgctagtcatgaaaattcaag

SEQ ID NO: 62979 - DNA, 600 bp, Chicken  19866894325491_4
gtccctggatgttaytaaagcctcctggcaaggctgtgccctgcccttggtagggctgaccatataacgaaggcttttggtccatcatcactgyggattcctgaccttgaaatgaatcttgtttgggttccaaagtttgcccctttaagagatatagaacatatattgctattgaaagcaccgtcaaagtatgaattgttaaaaaaaacygacataactaatgtatcatacaaagaccagttgtttcttgagtagaaaatagcatgactagattactatcaaatttgtctctgaacaagwgaaatagcacaagcgactattagtaatttacttgaaaatcacttctgctgatcagtgcttgcataagcagattggtatcattataaaagcccttctgctcttttcaactgcagtttgtacaaatgacagcatgattttgtgttttccagtgaattccaaagtattgaacagaatttcttttttcctatttgctagtcatgaaaattcaagctgaaattgaaagagatgaaaatatcctattcattaactgccagtaaaacatttcagtcccagctcagttgactacagttatattaaaga

SEQ ID NO: 62980 - DNA, 600 bp, Chicken  19866894325491_5
ccagacatgtaaatgaggaggctctcttcacttttttttttttttccccccagtaccaaaataacacaggcttttggaaaagaaaaaagtgaccagaatctcttccttcttacttggtttacaagatcgggaattcctagagctctgtcaatttcttccaggcttgtgacatccgtattactcagcaatgtgtgcagctgatccaaaagagccctttcatcattctggccttccacacttggtgctgcacttaagaggtcatccaaagagtttctcactaattgtctataaatatttttwaaaaaaacgcaaccattatcgactgcaaaggcatgcgcttagctttcatacagtacattatttacttggcaataagaaagtactataatcacccggaagactgaagaacttaagggccaaatttaggtcctgaaatgcccaggcaacyrtcatctagccttgaatagacataaattttgttttctcctcacatctaaatattagcttctgcatgtgcaaggaagacatagtttaagattttcccaactcttttctctgtgcctctcaactcaaggattgaccgattttgttaggaatgcc

SEQ ID NO: 62981 - DNA, 600 bp, Chicken  19866894325491_6
caatttcttccaggcttgtgacatccgtattactcagcaatgtgtgcagctgatccaaaagagccctttcatcattctggccttccacacttggtgctgcacttaagaggtcatccaaagagtttctcactaattgtctataaatatttttwaaaaaaacgcaaccattatcgactgcaaaggcatgcgcttagctttcatacagtacattatttacttggcaataagaaagtactataatcacccggaagactgaagaacttaagggccaaatttaggtcctgaaatgcccaggcaacyrtcatctagccttgaatagacataaattttgttttctcctcacatctaaatattagcttctgcatgtgcaaggaagacatagtttaagattttcccaactcttttctctgtgcctctcaactcaaggattgaccgattttgttaggaatgccatttgtggagctgggttaaacaataaccatccatccagtgacagagcagcagcagagttggatagagattttgactttctttatcccctatgtatatgtcgtactgatttttttccaggtcttaagtgctcttgattagcagtgagca

SEQ ID NO: 62982 - DNA, 600 bp, Chicken  19866894325491_7
aatttcttccaggcttgtgacatccgtattactcagcaatgtgtgcagctgatccaaaagagccctttcatcattctggccttccacacttggtgctgcacttaagaggtcatccaaagagtttctcactaattgtctataaatatttttwaaaaaaacgcaaccattatcgactgcaaaggcatgcgcttagctttcatacagtacattatttacttggcaataagaaagtactataatcacccggaagactgaagaacttaagggccaaatttaggtcctgaaatgcccaggcaacyrtcatctagccttgaatagacataaattttgttttctcctcacatctaaatattagcttctgcatgtgcaaggaagacatagtttaagattttcccaactcttttctctgtgcctctcaactcaaggattgaccgattttgttaggaatgccatttgtggagctgggttaaacaataaccatccatccagtgacagagcagcagcagagttggatagagattttgactttctttatcccctatgtatatgtcgtactgatttttttccaggtcttaagtgctcttgattagcagtgagcag

SEQ ID NO: 62983 - DNA, 600 bp, Chicken  19866894325493_1
gcatctgcagaagttgcagtgggagtcactgagctgcagcaggaaggtgtctgtgcaaacccctcctgacagctccaagctccacaatgccaccctcaggcttcagagttcaaccaggagggccttatgtcaacgagactgcaactggcaaaaggcaaacacatctcaccgtgtgaggagagatgaggcaccgaatccctgcgtgtgtttgcagttggtgctaatacaggatcacaagcactaagatgtgaaaaaaaccatgagactgaagagcacgcagacccagctccaaagaatcayagaatagcctgggttgaaaaggaccacaatgatcatcgagtttcaacccccctgctatgtgcagggttgccaaccaccacaccaggctgcccagagccacatccagcctggccttgaatgcctccagtgatggggcatccacagcctccttaggcaacctgttccagtgtgtcaccaccctttgtgtgaaaaacttcctcctaatatccaacctaaacctcccctgtctcagttgaaaaccattcccccttgtcctatcactatccaccctcgtaaacaaccgttccccctcctgtttat

SEQ ID NO: 62984 - DNA, 599 bp, Chicken  19866894325506_1
  misc_feature (1)..(104): n is any nucleotide
nnnnnnnnnnnnnnnnnnnnnnnnnnnnnnnnnnnnnnnnnnnnnnnnnnnnnnnnnnnnnnnnnnnnnnnnnnnnnnnnnnnnnnnnnnnnnnnnnnnnnnnncacctccctcgggagcctattccagtgtttaaccaccctttctgtaaataagtgtttcctaacgtctaatctaaacttaccttgccgcaacttgagaccatttccccttgtcttatcacctgtcaccagtgagaagagacctaccccgctctcactgtaagcacctttcaggcactggaagagagtaatgtctccmctcagcctcttcttccccagactaaacagccccagttccttcagtctctcttcgtagggctgattttccaagcccttcattagcctcgttacccttctctggacctgctccagtacctccatgtccttcttgtactgagatgcccaaaactgaacacagtactcgaggtgaggcctcagcagtgccgagtacaggggcaggatgacttcccttgtcctactcaacacaccattcctgatacaagccaggatgccgttggccttcttggccacctgggcacactgctggctcatattcag

SEQ ID NO: 62985 - DNA, 600 bp, Chicken  19866894325507_1
aaaatcaaactaaaaatgtatacccaaaatatagaaaatatgcatttgtaaataaaatattcattatgaaagcatacacgtttctaattacaatactttctgttaaccaaagtagcatcgtttctgtgctgataacacaattggctactaagccacaagtccctaccctgcttataaatcaatccacattatagcatgtggtacttctacctgagtcttcaagtataatatgtgagctgaggggcaaaagaaatactgttgttttgcagtttgtatccctcagccttttcatgcccttcrcttatctgttacctctttttcttgaaagttaaccttagatttcccttttaaaccaatctctaaacaacttttccagtgctgataatctggacgaagtacatagagattgaagagtaaatgtgttagatatggtatatatttagcaacaggaaaaaaaagtgttatatgcaccaagctatgcattttaaaaatctttctccacagtgacaaaatacagtgttgtttatatagaagaaaaatagggaaagatttatcccttctcccattaacaaaaagatgtattcaacagactgtatgcac

SEQ ID NO: 62986 - DNA, 600 bp, Chicken  19866894325520_1
ttttcatcatgagatcactcgttattattctttgaactctgctctggacctttctaagtgctatgcctcagcctggttcttccattctagttgagactgaatagaaaaattgcataattatgttgcacactccactgcctttcccaatactttcttaccattttgcaacagaacagtgctaatgcaggaagtctaccatatacggtattatttcattcatatactaaacatgctctgcttacttgtgaggtctagaaaataagaataggaaatatctgagtgctgaacttctgtcactcrtaatttaatttgaagatgcagtttccagggtctgaagttcctgatctcaaaccagttgctgtgcaaatcttgaatcttcagctgtatactttccacccttgcttrggctacactagtatccttacccatccttgtataaagaacattctgtgtgtaggataaagattgaagaaattgcttctaaaggtggtaggactggtttgtgtttttgagagtacccaactggcagaggcagctctgaaaagcccacttcactaccgccaggcccttcttcaatgccattggatcaggttgcttttc

SEQ ID NO: 62987 - DNA, 600 bp, Chicken  19866894325520_2
aaaattgcataattatgttgcacactccactgcctttcccaatactttcttaccattttgcaacagaacagtgctaatgcaggaagtctaccatatacggtattatttcattcatatactaaacatgctctgcttacttgtgaggtctagaaaataagaataggaaatatctgagtgctgaacttctgtcactcrtaatttaatttgaagatgcagtttccagggtctgaagttcctgatctcaaaccagttgctgtgcaaatcttgaatcttcagctgtatactttccacccttgcttrggctacactagtatccttacccatccttgtataaagaacattctgtgtgtaggataaagattgaagaaattgcttctaaaggtggtaggactggtttgtgtttttgagagtacccaactggcagaggcagctctgaaaagcccacttcactaccgccaggcccttcttcaatgccattggatcaggttgcttttctttgacttgaagaacagagcagcttttcctgccacacacatcaccaaagtcataaattttctttgcactttgcaatagggattaatctagcttacagggtataca

SEQ ID NO: 62988 - DNA, 600 bp, Chicken  19866894325520_3
gactgggtactggcaggagccaaatgtggaattcctttttgccttctcaacttggatttcttgttgcaacagaaacagtccaaagatcactgtagtgtgaacctataagctctgtctggctttgaatcaggcatggttagtggtattttaagtgtatgctatagttttcaaacaaaaaccaatcacttattttcagacggtggcctagaactattgacaaagttgtcatttgctttaatgcaaacattgaattattgatgtaaatgctaaagagtacatgtgcatttaacaaaactccaraacttccagtctagaggtacagagtcagacttctttccatgctttaccacctgttttaagtgattcctaatatgtagcaagtaacaagttcagtgaatctgtcccagcgctgctgatgttttggagcactttctttaaaatgatacattttctcaagataacaatttggaaaatgattgcaggaaggaaacatattagcaattaaattagcatggtttagcacaacaagtaataaactgcttaacactgagcccctgtgaattaaaagccggaacagcattggacaaaagtcaaggttat

SEQ ID NO: 62989 - DNA, 480 bp, Chicken  19866894325520_4
gtcaaaaaagaagttaaatgaggccttcgttttctgtcgcgtgtagtaactaacatgaaacaaagtacaggatttaccatgaccctctgatgctaccaggatgtaaaccatctgccgtgtagaaacttgctggcatttataaatgcacaccttcattttctaactagaaacctagttcaggtcttgcgtaggtctgctggagaccctctactggcatttcataggttgaatcagctacactgtgaatccatcacggtagtcattaacatctcagaacatgggccatcatgctctttagarcatgtgctggtgttgttgctcacagtattaagtacaaaggtatgaggtgcaggttgtccccaaagagttctcaaagtggtctattctaacacagaattgatggatttacaaaatctgtatcttgcagaagggcacatgtttttcaaagtatgtctgcagacccagctgtctgtaaagtca

SEQ ID NO: 62990 - DNA, 546 bp, Chicken  19866894325522_1
tcttgtgatgaatgtaagctgcaagttccattcactgcagtgtgtggggatcagctgcattcggaagcttaaaaaaacccaactacatggggaaaaacaaaacaaataaaccttcttgaggtttcaacaagacagtcttaggcctttgcttcagttggaatgttgcagagtgggggctattgtgaatgagtaaggatattaaagcatagttgcattcacacttacaggagttctgcatgttttagaggcagaggatgtttctatttctcttcaaaatactgcagtagcagaaacagaacyctttgaagaaacactgaattggagttccaaggaagcattgtcatacacatccccatcccgtttatacacatttagatcctggtactaataagaggagtgtgctatttattgtatgctctcattatataactgactggggtgtggtccgtactattttactgtgtctgtgtaatagcaatccccttataacacagcaggagactgggaagataaatacctttgaggtccaatcttgcatttcattca

SEQ ID NO: 62991 - DNA, 600 bp, Chicken  19866894325525_1
ttctaaatcctgtaagtctcatagtaccttatagatgctatttaaatcgagacagctagtcaaaaaattcttttcatgctctgagtttgtaagatctgaaattgaacactccaaaaatatgctgagggaagtatcttcttcactctgcattaaatgtctttaattctattcaattaaaactatttttggtacaaaacagcacaggaatgagaatcaatacagattacttttatccttagaaattggaatggtaacgaagctacacattcgaaagttttcctggaaatttctgtccctcasatattttctctctcccagtttgccaaaccctgtcacaatttaagagactgactgcatataattgctttttaaactaatcatatgactcagcaagaattgttaacctgaaatccagataaagggtgttaagacatgtttagaaatatgtaagtgtagccaaaatgaatcagtattttggacttattctgtggctcccytgattttctgttggttgcacaagaacactaagggggaataacaaagccagcgagaaggcaataataaaagagctgtgatacctatttcacagtagaagctatg

SEQ ID NO: 62992 - DNA, 600 bp, Chicken  19866894325525_2
agcacaggaatgagaatcaatacagattacttttatccttagaaattggaatggtaacgaagctacacattcgaaagttttcctggaaatttctgtccctcasatattttctctctcccagtttgccaaaccctgtcacaatttaagagactgactgcatataattgctttttaaactaatcatatgactcagcaagaattgttaacctgaaatccagataaagggtgttaagacatgtttagaaatatgtaagtgtagccaaaatgaatcagtattttggacttattctgtggctcccytgattttctgttggttgcacaagaacactaagggggaataacaaagccagcgagaaggcaataataaaagagctgtgatacctatttcacagtagaagctatgacaatagcatgtttaatgaaactgcttcatatttctgaccttatttcttttgttacttttctattgcgctgttccagaagaatgcactttttttttttctttttcaggaaagtttactttgattctcccctccaatcatttcttttaatgtgtttggagaatgttcatgagaaattctctgatgtcagtatctcttc

SEQ ID NO: 62993 - DNA, 600 bp, Chicken  19866894325532_1
caacgcccctgtgtgacaccaggttcattagtaagcagcatttctgtccccatgaaggtcaaggctgctacttatcatcacccagatgcaatgaaacgcactgtcagccctgtataatctcactgctggtttcagtgactgcctgacggctgtcttcaatgtaaatcacatagcttctaactcctgactggaaaacatagagctgtgtaaggaaattgaggagttatgcatattttcagaaggccaaacccggagtacctcactcttatcacaactgatgttcactatgaattagaatgygttctagagcacgagttgctgaactgctgcttttcaggggcagattcaaagcaggagctgttcaaagcactacacaacctgacagacytggcactgcctaccttactactatgtacttcactcctgctgaagagtttgccattgccgcatctgacggtgacaaaaaagccaccagattcaaatccttttgaggatttttccccctcaaccttagaaattctaagcaccattttgcagcatttagtgcatcttatcacaagaacacattatacacaaggcgaaaggaatgataatcccaag

SEQ ID NO: 62994 - DNA, 600 bp, Chicken  19866894325532_2
caatgaaacgcactgtcagccctgtataatctcactgctggtttcagtgactgcctgacggctgtcttcaatgtaaatcacatagcttctaactcctgactggaaaacatagagctgtgtaaggaaattgaggagttatgcatattttcagaaggccaaacccggagtacctcactcttatcacaactgatgttcactatgaattagaatgygttctagagcacgagttgctgaactgctgcttttcaggggcagattcaaagcaggagctgttcaaagcactacacaacctgacagacytggcactgcctaccttactactatgtacttcactcctgctgaagagtttgccattgccgcatctgacggtgacaaaaaagccaccagattcaaatccttttgaggatttttccccctcaaccttagaaattctaagcaccattttgcagcatttagtgcatcttatcacaagaacacattatacacaaggcgaaaggaatgataatcccaagaagagaaacagcatcacgcaagccagagatgaccttgcccaaacctttacagacaaagcactgtaagttctgaagacgataaaagaag

SEQ ID NO: 62995 - DNA, 600 bp, Chicken  19866894325534_1
tggagatcacagaatcatagaatggtttgtgttggaagggacttttaagatcatttagttccaaccccccctgcctattttttaggacatctttatacttgaatgaacatagcaacctgtctttgctttatctaccttagccatgcatggtagaaatgaccagtagaaatcaccagttattcttagttaccctaaatgaagccattcatggctcacgagtgcatgctgcttaagactggagcctcccatcttttggtattatgagactggcaaatgttctaggtcttccattccccattytttcttgtacactgattactgcytgggcagactcaagaaaccaggttcactgaacacaactaaaaagttggaaataatgctgtgttacactgtgaaagaaagcttgagtacatttttaagtgcagtgagtgattacagaagacttttcctattattctgatctaacaagttgcaattgataatgtcactcagcaacagttgttaggtagggaagaaaggcatgaggcattttctcaacttgcattccacagagatcacagttctattaataaaagccatataagacctctacttgcttcc

SEQ ID NO: 62996 - DNA, 600 bp, Chicken  19866894325534_2
ggtttgtgttggaagggacttttaagatcatttagttccaaccccccctgcctattttttaggacatctttatacttgaatgaacatagcaacctgtctttgctttatctaccttagccatgcatggtagaaatgaccagtagaaatcaccagttattcttagttaccctaaatgaagccattcatggctcacgagtgcatgctgcttaagactggagcctcccatcttttggtattatgagactggcaaatgttctaggtcttccattccccattytttcttgtacactgattactgcytgggcagactcaagaaaccaggttcactgaacacaactaaaaagttggaaataatgctgtgttacactgtgaaagaaagcttgagtacatttttaagtgcagtgagtgattacagaagacttttcctattattctgatctaacaagttgcaattgataatgtcactcagcaacagttgttaggtagggaagaaaggcatgaggcattttctcaacttgcattccacagagatcacagttctattaataaaagccatataagacctctacttgcttcctggatacaatagagattcattta

SEQ ID NO: 62997 - DNA, 600 bp, Chicken  19866894325538_1
gtgtatcagctccaggaatttctcacccctttgctgtgagtttggatgctggaattcagttggaaaacagaaacagatggacttgtagggggaggacagaagaaagaaaaacttcagtgaattaaagcatcattacttgcacacacaaaaaagccacaggaggtccacaagttaagcatggagacataaaatacttaagtgccagtaatccagaagttcttccagccaaagctattctatcactggaatgtttggacctgctttaaggagaatctaaaataagatcagatattcagaggstgcattcacgctccttctttgcagagggagaacaggctcaattttctttttgctgtaccctagacataaggctagcgctaaaatacgcgtgccaggattagctttaaggtagccatcttcgataccaataacaacatagctgtgtggccacagcccccctcctcagccctatatccttggtaaattcaaaacttcacagacaagtttacctgtgtcgcactcatttttaatacctaaggtagtcagagggttgtgtctgctgctggactgcagggcagccataccagcaagtctcctctc

SEQ ID NO: 62998 - DNA, 600 bp, Chicken  19866894325556_1
ttactgagatatttttgtctgaatgtgtgtatgtgtgcttctctatttcctcgtgttctgaaatggtgtgacaaggagacacagagctttcctgggcatctgtgctaaatgaacactgtagaagaggtttccctggcaacgcaaaccatatgtaatagctcaaaatagcttttctccggctcctaggatttcttagtggtttgcttatgatttccatttaaatcaaggtatgttttcactgttcaaaaaggttcattttctcaacttctattaaaatgaacaggctttgaaaatgcttgycttgcaagagtgcctcccttcctcttgacttctaattaattaggtaaactcaagcatagcaaatggtgacagcggctctccactttgtcaaatgtattccttttgtgtttgctgttcaaaacattctattataactatgctggtggtcactatcgctggttgcaacaggaaacgtctagttaaagtagtagcttgacttttgtgatattataatcatgggagctatatatgttatgtggtattatcatgagaattacatagtgtaatgcatcagttgtaatgtacacatttaaagtttgc

SEQ ID NO: 62999 - DNA, 600 bp, Chicken  19866894325557_1
ggtatacactctagaacaggaggtggtcatccagcactggataaattgtacaaaattgaatgaagtagttggagtgtcctcttttgagctgtgtctactgaacacagagaaatatctgtgttggaagcagccatagcatgtaaaagagatttaccaggaaactcttttttttttttttccataataaaagcctaaggacactgttgtactttgctgaatctgggagctctttttgtcaggcagggaggttgtgcaaaagtggtatgaatttcaacctgatgagtcttctgtagcttttcytactatcactgctgctctactgttaacaatgaatttttgccaatgaccttgcaaaaaaattcatcagaaaatgattatctatgaactccgagtctgtgttggagggtgttagagaggtggaataaaatgcaaattattcatacacttggcatctaaatccaggttttgctcattgccaatagctacagctgttggcttaccttcataaccagacatcagccaagggcaaagaggaggcaagttaagaacacagggaaaagccagtgacaaacaggtctgtaactctgaaagtaatttgtc

SEQ ID NO: 63000 - DNA, 600 bp, Chicken  19866894325564_1
actgtccgacaggatgccagcctgcgccgaacttgtctcatggctttgctaagctgtcatgagagggacagaaggacagacacaacatcaggtcaacagatgctttccagaagtgccacaccaagaaattcgttgacataaaagaggtgtcccagtgggccctgctcaactccagctcctagataaacacacattataaagtaacaaacgcaccataaccatcactactgaaaacacttaagacagtccctacagcacctttaccaagatttcaggatcccgcacacttggtctgcaggwcacacgctcaatgaggtggcaccatctagtgcctcctctccaacatgacatcccagtacagcaataggtcacagctgagtatttccagcaggttttaacaaaaattcactgtatctacaagcagtgaggcaagtacaagtgtcctatgggagtggtacaccaatatttcttaaaaacaagtaaaatgtaagccaacgctttgatcagcataaaaaaaatatactaggggaagtgctgtaaaaaagggtagaaaacaaaatattgcccatcttccatcttaacactgaagcactcagcatg

SEQ ID NO: 63001 - DNA, 599 bp, Chicken  19866894325565_1
  misc_feature (1)..(24): n is any nucleotide
nnnnnnnnnnnnnnnnnnnnnnnnccttaagtgtttggtatcacagaggagaatgttgcgatgtattatagtgtagtattgtgtattacgtattaaaatgtgtttgtgtttccaacctcatggtgtattttggagaacagaagagctagtcataatccacaacatatacttagggtcagatcagagaataatgtggactagaagggacagctagagattagaaccagtccaatctttagagccttctgtgctgaatttttctcagtctagcacatagttttgattactatcttatctaartaagatatctagtgaatagaatgaaaccgttcttgatatttgtttttggcagatactgagaaagagttaaggtctcagagttacctgaattatcttagctgacatctccatttcacttcacagcctagtgtacaggtctcatcctgtgctggctttcccattctttgcagacagtgctcatggaccagagccgctttcaggaaatacagctggaactggagcagctcctcgtggctgggactgtccttttggtcacgttcagcgcagcaggcgcagctctcatcgatgtgcctggattt

SEQ ID NO: 63002 - DNA, 599 bp, Chicken  19866894325593_1
  misc_feature (1)..(47): n is any nucleotide
nnnnnnnnnnnnnnnnnnnnnnnnnnnnnnnnnnnnnnnnnnnnnnntggtttggattggaagggacctttaagttcatctacttccaaccccctgctataggcagggacacctccctctagaccaggttgctcaaagccccatccagcttggccttgaatgccttcagggagggggcatttagcaacctaactgggcagcctgttccagtgtctcaccacccccacagtgaagaatttcttcctgatatctaatctaaatctactctcttccagtttaaaaccatatcccctcatcctkctgctacctgcccctataaaaagtctgtccatttcagtcgtttaagactccttggagtcttctcttctccaggatgaagagccccagttctctcagcctgtcctagaaggggaggtactccggccctctgataatatttgtgaccctcctctggatctgctccaacaactccacgtccttcttgtgttgagggccccagaactgggtgcagtactccaggtggggtctcacaagagcagagtagaggggcagaatcacctccctcaacccgctgatcacacttctcttgatgaaattca

SEQ ID NO: 63003 - DNA, 600 bp, Chicken  19866894325594_1
ttgctttaaattgaaaattccaaacttgtggtcagtaaaagattactgtgatgcatgaaatcaaacagctgtgaaaactttaggagggaaagatctacagaaagatcacggcacacacctgaaggttttcctgaaagcagcatggtttgctagcgagatgtctggtggttttaagagactgtagcccctaatgcaattcaaggagctgatgcaaacagtatttgcaggatcaaaatttggagggtactgaatgggatgtctgtgtctctttactgctctctagtgactgcgttaagtaaygtattccactttttggttgttttttggcttttttttttttttggctgtatgatcctcctctggatacactgtgtaacagagtaggatggcattatttccccctctaggtctaggtgactttccattccactcagatacaagcataagagaacattaaaagctaaaatacataggcaacggagaggttggggagaaaaggtaaacttgcaaggttagtcaaaacagagactgccatctctgaccatgatatatattcagatttctgttttactcaatacagttcaaacataaagctgcttc

SEQ ID NO: 63004 - DNA, 600 bp, Chicken  19866894325599_1
accaccacttagacaaaaaccaccatttcccattttagatgtataggactgaacgctcaatcccaaatagtttctttacacttttcaaaaccacgcccctgttcaggctcagaacgtgtcggccttgatcacacatttcacattaaggcagtgttctgggacatggaggaagcatggcatgtacaggaagagaaacacctggagcaccaggctttgcagaatgtcaccagcaaagaagtttctaggaagccatgtaaacacccctacatcagagcaggccctgtgctcccacctttcacyagaagtatttaatcctttcaaaaggttaaagagagaagtcacttttgccctcaaggtttataccacctcaccaaaactcttctgcacagcttcaggatatcaggagaacttctttaagaaagggctgtaaagcactggaataggctccctagggagatggttgagtcaccacccctggatgtgtttaaaaaccatttggatgtgatgctcagggacatgatttagcggagggttgttagggtagtatggttaggttgtggttggacttgatgatctttgaggtcttttccaacctgagtg

SEQ ID NO: 63005 - DNA, 486 bp, Chicken  19866894325607_1
ttttcctaacagtgggtgttcacggtttatcaagatgtcaataaacactggaagacatccctacagttaacgacaacttcacagacttactgggaagaaagaggctgttttccagcctgttccagccggccttacccagctgtgcactcctctctatgagctgcacttctgacacttctcagccttctgaggccacctctgtgctgtgaagcagtgatcctcacggcgcgatgctgctgttccctcacggccgcctctgtgctgtgcggggttctggggctgagcaccacaggcacagcrgagatgtgtctctgtggaaggaacccggcggcgtttcgctcagctctcacttgtggcccagcggtttcagtcacacactggtttgggcctcgcaaagcaggggctgccagaatgtcaactgcagcagcacttcagaagcaaaaggcgacacgaaaggaagagctctacagacgtgctaacaagttt

SEQ ID NO: 63006 - DNA, 600 bp, Chicken  19866894325608_1
ttatttactatcattacgcacacacctgctagacagacacatccaataaagcatcagtgtcctcatcactgcttgtggtagcagttcatcaattgcccagatgaagctgtggcatgccaaactcagtctgcatagcactcacttgctactcaagggatgtgatgcagaaatgagccttggcatcccttggctggcacaatgggtgtatgacgctggggcgagggggaggctgtccccagctcctaagttcatgacaagacagaaacagtgataattacacacgcccaagtgggtgctcartctgcctcctaaaggcaaatgaaagatgccccaagtcttatagatagatgaaggcaaaagaaaacaaacaaacaacaacaacaaaaaacagatgaatacttgcattactcctgatgcagaattctgttaaggctaggagaaaccacagttgttgttcactataaatctaaggctacacactgcgagctgcctgcatgccaagtccaaaaattttgcctggaaagtgaataccggagtaatcacttaaattagctggtgtaactcactgctcttcatttctttgcagatggttgtcccagt

SEQ ID NO: 63007 - DNA, 600 bp, Chicken  19866894325612_1
tttgagaagaataatatgcagcaggtgaactatggcattgaggtcgcaagggcatagtatgatgaaaacagtactttgacacagtgtatgttttcatcaagctaccactagtcttaaaaataaacaccaaaaattctttattgattatcagagaacaaactgaaaaactaactataaagtaaaactataaagtaaaaacgggcataatgtctgtacagtgcaaaaaggggagaaacaagtagagcaaataaattttagaaactgttgaaaaacatgcatttaaaatgacttcacctttgwttctttgctataaattctgaagaatttagtacgttttgattgatttgctgtggctataaagcttgtaggtatttgcctcagtgtttgagagtgtaaaagggtacctgtggacaactgtaggattttagatcaatgttatgttcattttatttgtttaaagagcgatgtcccttgtataagagcaacaggttacctccttgtacgttaatatatcgtttgcagccacttcctataaaagcatggccagtgcatgaactggttgtttgggacatgcaatattcaatggaatattcaaagaaa

SEQ ID NO: 63008 - DNA, 599 bp, Chicken  19866894325616_1
  misc_feature (1)..(20): n is any nucleotide
nnnnnnnnnnnnnnnnnnnnaggtctctcgtactcctgcttcctacccattctgtttgctggttttgaacctggtaggtgagctctctatgttaactgctgtcagtccagcccaaaatgttgcctctgccacagaaatcagtccaaagctctgaagagctaaaactttccatttttttacagccagcagcgttcatcaggctgcctgcaatatcagtattttcttgccccattcttgatatatgggactctacaagccagaagatttcccctcaggtcactgagtcatcgttagctgttkctgtttgttttttaattttccacaacttgctcctccctgcctactggagacagacagtactccttcgttctctgggtttttttgtttgtttgtttgtttgtttgttttcatcatagtgggcttaatttttgctcaagaggcctgcaactttatgtaatatttcatcctggtcayatctgccttgctgagcctcgagtcgtaaccaatacattccttcagttctcccatttgagacttggtgctgacagggacatcrtgaggctgctctgctttctttcccccgattttctgcttagtga

SEQ ID NO: 63009 - DNA, 565 bp, Chicken  19866894325616_2
ttttacagccagcagcgttcatcaggctgcctgcaatatcagtattttcttgccccattcttgatatatgggactctacaagccagaagatttcccctcaggtcactgagtcatcgttagctgttkctgtttgttttttaattttccacaacttgctcctccctgcctactggagacagacagtactccttcgttctctgggtttttttgtttgtttgtttgtttgtttgttttcatcatagtgggcttaatttttgctcaagaggcctgcaactttatgtaatatttcatcctggtcayatctgccttgctgagcctcgagtcgtaaccaatacattccttcagttctcccatttgagacttggtgctgacagggacatcrtgaggctgctctgctttctttcccccgattttctgcttagtgagataacatcttgcagttttctttctcactatgccatattttggttttcctccttctctttcgtactggagatctgtacggtgctctgcctttctctctttgccctccccatatgatgttctaccgctagcagcagcgttt

SEQ ID NO: 63010 - DNA, 483 bp, Chicken  19866894325616_3
ccagaagatttcccctcaggtcactgagtcatcgttagctgttkctgtttgttttttaattttccacaacttgctcctccctgcctactggagacagacagtactccttcgttctctgggtttttttgtttgtttgtttgtttgtttgttttcatcatagtgggcttaatttttgctcaagaggcctgcaactttatgtaatatttcatcctggtcayatctgccttgctgagcctcgagtcgtaaccaatacattccttcagttctcccatttgagacttggtgctgacagggacatcrtgaggctgctctgctttctttcccccgattttctgcttagtgagataacatcttgcagttttctttctcactatgccatattttggttttcctccttctctttcgtactggagatctgtacggtgctctgcctttctctctttgccctccccatatgatgttctaccgctagcagcagcgttt

SEQ ID NO: 63011 - DNA, 600 bp, Chicken  19866894325622_1
tactgcattctgatctttcggcatcttgattgtttgatcctccgcacgacagagaagcgcggcgctggcgagccatgctgctgagcacatacactgctgaggaatccagcggtgtgaagtcgtaactagaagaaaaagacatatcaggaaatgatcaaatatttcacacgtaccatcctgaggcagctcttgtctctccatccctgctagctttctagtattctgctacctcctgggtcaatgtgtgctttcagtttgtgcctgacgcagacgtcagtgggtaaaaagggtctgagagayygaccacaattctgtaatatctgctgcgtaccatcagccccccagctgtacgtcagtgcatcacacaccatcttccaatgtcacaccatttgaaatgctctctttctgcatttgtcctgcctgtaacgcacagctggtcagtgcatgaaagctactgaagtgacacctgagctggggaggagcgctgagttcccttgcaaagacatggtaataacaaatatgaaaccgctgcattaaaataaacagcagtgtgtagtatatgctctttcacgaataactgttctgaatagttaggccgga

SEQ ID NO: 63012 - DNA, 600 bp, Chicken  19866894325622_2
actgcattctgatctttcggcatcttgattgtttgatcctccgcacgacagagaagcgcggcgctggcgagccatgctgctgagcacatacactgctgaggaatccagcggtgtgaagtcgtaactagaagaaaaagacatatcaggaaatgatcaaatatttcacacgtaccatcctgaggcagctcttgtctctccatccctgctagctttctagtattctgctacctcctgggtcaatgtgtgctttcagtttgtgcctgacgcagacgtcagtgggtaaaaagggtctgagagayygaccacaattctgtaatatctgctgcgtaccatcagccccccagctgtacgtcagtgcatcacacaccatcttccaatgtcacaccatttgaaatgctctctttctgcatttgtcctgcctgtaacgcacagctggtcagtgcatgaaagctactgaagtgacacctgagctggggaggagcgctgagttcccttgcaaagacatggtaataacaaatatgaaaccgctgcattaaaataaacagcagtgtgtagtatatgctctttcacgaataactgttctgaatagttaggccggaa

SEQ ID NO: 63013 - DNA, 600 bp, Chicken  19866894325625_1
gtgagaagtggaaaaagagggatgaaactcattcttttaaaacttgttccttcaactaactgtggccctacgcagcctatgcctgttcagcagcatgtggtttgtggccaatgcagtgctgttgtgatgctgtgcttccacgtttgtatcttcctgttcccgatacaactgcatagtgggatcttatggaggctgtaacttacgccacttgagtgcagatgtcccttgacccagggctatgtaatacagagcatatctttaccacgtgaagacattttttgctacgtggcaagtcaatgmgagcatggttgtatcctatccmaaataaaacaagagagccacaactttgaatcatgccttttagtgagggcttgttaattagtcttctgcctcttcagtctgggagcagatctcacaagcatgtccaaactgctgatgcatctcagcaggaaaggggatatgcaagcaattatcaatctatttaagcttctgtatctcaaaactgattcctttagctgtgactagggcgcaatggaaagcaagagcagatcattactttgttatattatttagttctctcttaaagggcctcgggatgct

SEQ ID NO: 63014 - DNA, 600 bp, Chicken  19866894325625_2
tgaaactcattcttttaaaacttgttccttcaactaactgtggccctacgcagcctatgcctgttcagcagcatgtggtttgtggccaatgcagtgctgttgtgatgctgtgcttccacgtttgtatcttcctgttcccgatacaactgcatagtgggatcttatggaggctgtaacttacgccacttgagtgcagatgtcccttgacccagggctatgtaatacagagcatatctttaccacgtgaagacattttttgctacgtggcaagtcaatgmgagcatggttgtatcctatccmaaataaaacaagagagccacaactttgaatcatgccttttagtgagggcttgttaattagtcttctgcctcttcagtctgggagcagatctcacaagcatgtccaaactgctgatgcatctcagcaggaaaggggatatgcaagcaattatcaatctatttaagcttctgtatctcaaaactgattcctttagctgtgactagggcgcaatggaaagcaagagcagatcattactttgttatattatttagttctctcttaaagggcctcgggatgctaatcatacaaatttcaaatctt

SEQ ID NO: 63015 - DNA, 600 bp, Chicken  19866894325628_1
cattatttaccaagggtcaaatgtggtcaaatttgttttgcatacaggaatctgagcacacgtctgagtccttattacggctcttgagcaattaactcagttcaaggactgtatcaagacagttccctgcctcagctgcagaaaatgacctgctcctggctcctcacaaggtgggatctacggctcagcagggctgttaaagctccagtagctcttctgcttgaaatgaacccagaacttctcacatgctaagagaactgtcaaagacctcccttcagtactcaaactgcaacatacctmaattctataacaatcttgctgaaagacagaattactcaatattttaagatttcgaagggtcaggatgaaaagaggactaaacaccttgcaagaattctttcctctcaaagaaagttggataaagtaagtgttttcagatgcctacgctttttacaatacagttcaaatagtatcaaatgaagacttcaataataattaaagggatcttacgtggaatcagattctgcattgcactggaggaagaatcctacgcttttttggtgaggtctgtcygggtagagtcgtggcatgaccatgatc

SEQ ID NO: 63016 - DNA, 600 bp, Chicken  19866894325628_2
ttcagtactcaaactgcaacatacctmaattctataacaatcttgctgaaagacagaattactcaatattttaagatttcgaagggtcaggatgaaaagaggactaaacaccttgcaagaattctttcctctcaaagaaagttggataaagtaagtgttttcagatgcctacgctttttacaatacagttcaaatagtatcaaatgaagacttcaataataattaaagggatcttacgtggaatcagattctgcattgcactggaggaagaatcctacgcttttttggtgaggtctgtcygggtagagtcgtggcatgaccatgatcttccatggcaaattccgtacaaagcagggagggctgagaactgactcactcaatctgttgaagcgttcgactgtgaactgaaaggtagcctctgaccgccaacttgtatctgtaaaatatatatgtacatgcagagagcatttgacaaatctgatatattgctctccaaaacaattcctgcaatatcagtgtgtttgacatagagaggtgctggaagcaaccaaaacaaaacgaaatcgacagtgtcatttacctcccacacaactgaagttt

SEQ ID NO: 63017 - DNA, 600 bp, Chicken  19866894325629_1
attattatagtatatacataattcttatatttataaaattatcctgcatttcagcagtgttgtaacattggaattagagttatggtaatgtttagtgcttgtctaacatgccaatctctattcttcaagtttaattaaaagcgccttttaaaaaacatttaaaatgatttatgcattttattcaatgctttcttggtgttgcaacacccaaccaagatattccacttccacgaaaattcccatctaaattgaagccagaatcaggattgtttttactttattgttttctaactttggtgkgcagaggcacagctttaagtagatgacagaaaattgcwctttcttggctttatatctagccaagtgatcaaggcrttgtctggggtgaaggtgcaggttctacgtcctttgggatttggaaaatggaaagaatccttttctgttcagctaaggcaatcagtgctttggatactctggcatcatagcactgtttgtgtaagtagaactggggcttgattggattactggcatgcagccatccctattctgtcccacgtatcatactccataaccaaggttaggtgtgtaagaataagcaca

SEQ ID NO: 63018 - DNA, 600 bp, Chicken  19866894325629_2
ttatcctgcatttcagcagtgttgtaacattggaattagagttatggtaatgtttagtgcttgtctaacatgccaatctctattcttcaagtttaattaaaagcgccttttaaaaaacatttaaaatgatttatgcattttattcaatgctttcttggtgttgcaacacccaaccaagatattccacttccacgaaaattcccatctaaattgaagccagaatcaggattgtttttactttattgttttctaactttggtgkgcagaggcacagctttaagtagatgacagaaaattgcwctttcttggctttatatctagccaagtgatcaaggcrttgtctggggtgaaggtgcaggttctacgtcctttgggatttggaaaatggaaagaatccttttctgttcagctaaggcaatcagtgctttggatactctggcatcatagcactgtttgtgtaagtagaactggggcttgattggattactggcatgcagccatccctattctgtcccacgtatcatactccataaccaaggttaggtgtgtaagaataagcacagtcccagcaaaagcttggtttggggacacagtcccaag

SEQ ID NO: 63019 - DNA, 600 bp, Chicken  19866894325629_3
agagttatggtaatgtttagtgcttgtctaacatgccaatctctattcttcaagtttaattaaaagcgccttttaaaaaacatttaaaatgatttatgcattttattcaatgctttcttggtgttgcaacacccaaccaagatattccacttccacgaaaattcccatctaaattgaagccagaatcaggattgtttttactttattgttttctaactttggtgkgcagaggcacagctttaagtagatgacagaaaattgcwctttcttggctttatatctagccaagtgatcaaggcrttgtctggggtgaaggtgcaggttctacgtcctttgggatttggaaaatggaaagaatccttttctgttcagctaaggcaatcagtgctttggatactctggcatcatagcactgtttgtgtaagtagaactggggcttgattggattactggcatgcagccatccctattctgtcccacgtatcatactccataaccaaggttaggtgtgtaagaataagcacagtcccagcaaaagcttggtttggggacacagtcccaagcataagccagagactttcccctgtagttagtcaagat

SEQ ID NO: 63020 - DNA, 528 bp, Chicken  19866894325629_4
aggtgcaggttctacgtcctttgggatttggaaaatggaaagaatccttttctgttcagctaaggcaatcagtgctttggatactctggcatcatagcactgtttgtgtaagtagaactggggcttgattggattactggcatgcagccatccctattctgtcccacgtatcatactccataaccaaggttaggtgtgtaagaataagcacagtcccagcaaaagcttggtttggggacacagtcccaagcataagccagagactttcccctgtagttagtcaagatgagattagccatmctagtaggctcaatctagacccgatagagaaatatctctagagtaaagttgttgktgctgaagacctgccgtgaactgggtatatgttttggggattttccataaaattattgagctttaagaggtggagaacacaaatgttcttctggagcataccaggcttactgtgacccaaaaagcatgttgggagtgctccatgtcaggaaacaaagctcagtaaatgagtat

SEQ ID NO: 63021 - DNA, 473 bp, Chicken  19866894325629_5
tcagctaaggcaatcagtgctttggatactctggcatcatagcactgtttgtgtaagtagaactggggcttgattggattactggcatgcagccatccctattctgtcccacgtatcatactccataaccaaggttaggtgtgtaagaataagcacagtcccagcaaaagcttggtttggggacacagtcccaagcataagccagagactttcccctgtagttagtcaagatgagattagccatmctagtaggctcaatctagacccgatagagaaatatctctagagtaaagttgttgktgctgaagacctgccgtgaactgggtatatgttttggggattttccataaaattattgagctttaagaggtggagaacacaaatgttcttctggagcataccaggcttactgtgacccaaaaagcatgttgggagtgctccatgtcaggaaacaaagctcagtaaatgagtat

SEQ ID NO: 63022 - DNA, 599 bp, Chicken  19866894325637_1
  misc_feature (1)..(50): n is any nucleotide
nnnnnnnnnnnnnnnnnnnnnnnnnnnnnnnnnnnnnnnnnnnnnnnnnntttagctcagctttctggattgtctcctcagcatgtcactgttattgctttgttgctatgatacagcacttactcatgcaatctgctgcagaatattagaagatctgagctgaaatgttatgtaacttacaaatgtttttacagctgatgctcattattttgcacagaggaacgattcacgtctttgctatcgtgtgatttgtggatatctgagagcaacaagcatcttctgcaattttttcttcaaaakaaatggttcaagtatsagaattgccataaaatagtacggattgttctttacaagggaataataaccaccagctttcttacaagatccctgaagctgttgtgctcagttaataggactgtcgctatcagatgacaaagggraagatggtacagtgttctgatgttggaacttttgggatgcagcaagcacttgcgatttggcrtttagtccattctagcaataacttctttgcttgcatggaaatgaaaggattctatcagattattagtgaatgttgaaaccgttgttgactgttggaa

SEQ ID NO: 63023 - DNA, 599 bp, Chicken  19866894325637_2
  misc_feature (1)..(34): n is any nucleotide
nnnnnnnnnnnnnnnnnnnnnnnnnnnnnnnnnntttagctcagctttctggattgtctcctcagcatgtcactgttattgctttgttgctatgatacagcacttactcatgcaatctgctgcagaatattagaagatctgagctgaaatgttatgtaacttacaaatgtttttacagctgatgctcattattttgcacagaggaacgattcacgtctttgctatcgtgtgatttgtggatatctgagagcaacaagcatcttctgcaattttttcttcaaaakaaatggttcaagtatsagaattgccataaaatagtacggattgttctttacaagggaataataaccaccagctttcttacaagatccctgaagctgttgtgctcagttaataggactgtcgctatcagatgacaaagggraagatggtacagtgttctgatgttggaacttttgggatgcagcaagcacttgcgatttggcrtttagtccattctagcaataacttctttgcttgcatggaaatgaaaggattctatcagattattagtgaatgttgaaaccgttgttgactgttggaaatggaaggtgttttgc

SEQ ID NO: 63024 - DNA, 600 bp, Chicken  19866894325637_3
gaatattagaagatctgagctgaaatgttatgtaacttacaaatgtttttacagctgatgctcattattttgcacagaggaacgattcacgtctttgctatcgtgtgatttgtggatatctgagagcaacaagcatcttctgcaattttttcttcaaaakaaatggttcaagtatsagaattgccataaaatagtacggattgttctttacaagggaataataaccaccagctttcttacaagatccctgaagctgttgtgctcagttaataggactgtcgctatcagatgacaaagggraagatggtacagtgttctgatgttggaacttttgggatgcagcaagcacttgcgatttggcrtttagtccattctagcaataacttctttgcttgcatggaaatgaaaggattctatcagattattagtgaatgttgaaaccgttgttgactgttggaaatggaaggtgttttgctgagaaacctgaggaactggmatcatcaaaacgtgtttgagtcactaaacttacaaatttaaagcttgctaatttagaataatcccgaaaygataaagagaagcatgagatctttctgtgttttg

SEQ ID NO: 63025 - DNA, 600 bp, Chicken  19866894325637_4
cattattttgcacagaggaacgattcacgtctttgctatcgtgtgatttgtggatatctgagagcaacaagcatcttctgcaattttttcttcaaaakaaatggttcaagtatsagaattgccataaaatagtacggattgttctttacaagggaataataaccaccagctttcttacaagatccctgaagctgttgtgctcagttaataggactgtcgctatcagatgacaaagggraagatggtacagtgttctgatgttggaacttttgggatgcagcaagcacttgcgatttggcrtttagtccattctagcaataacttctttgcttgcatggaaatgaaaggattctatcagattattagtgaatgttgaaaccgttgttgactgttggaaatggaaggtgttttgctgagaaacctgaggaactggmatcatcaaaacgtgtttgagtcactaaacttacaaatttaaagcttgctaatttagaataatcccgaaaygataaagagaagcatgagatctttctgtgttttgttcaacctttaaactgaggcttaggatttgcagtggtgttacgaggctgttgtcttttcctc

SEQ ID NO: 63026 - DNA, 600 bp, Chicken  19866894325637_5
cggattgttctttacaagggaataataaccaccagctttcttacaagatccctgaagctgttgtgctcagttaataggactgtcgctatcagatgacaaagggraagatggtacagtgttctgatgttggaacttttgggatgcagcaagcacttgcgatttggcrtttagtccattctagcaataacttctttgcttgcatggaaatgaaaggattctatcagattattagtgaatgttgaaaccgttgttgactgttggaaatggaaggtgttttgctgagaaacctgaggaactggmatcatcaaaacgtgtttgagtcactaaacttacaaatttaaagcttgctaatttagaataatcccgaaaygataaagagaagcatgagatctttctgtgttttgttcaacctttaaactgaggcttaggatttgcagtggtgttacgaggctgttgtcttttcctcgtcttcttaatttccttctgatgaggtggcagtgctaaaacaaatactacaggggatgaatgaaactaagggattaggttgtctgcctgtagatggctcttggaagttttacaggggaaaagcattccttactc

SEQ ID NO: 63027 - DNA, 600 bp, Chicken  19866894325637_6
ttaataggactgtcgctatcagatgacaaagggraagatggtacagtgttctgatgttggaacttttgggatgcagcaagcacttgcgatttggcrtttagtccattctagcaataacttctttgcttgcatggaaatgaaaggattctatcagattattagtgaatgttgaaaccgttgttgactgttggaaatggaaggtgttttgctgagaaacctgaggaactggmatcatcaaaacgtgtttgagtcactaaacttacaaatttaaagcttgctaatttagaataatcccgaaaygataaagagaagcatgagatctttctgtgttttgttcaacctttaaactgaggcttaggatttgcagtggtgttacgaggctgttgtcttttcctcgtcttcttaatttccttctgatgaggtggcagtgctaaaacaaatactacaggggatgaatgaaactaagggattaggttgtctgcctgtagatggctcttggaagttttacaggggaaaagcattccttactcccagataaaatagcaaatacattttttttcagcagaacaagtgaaatcccaagcgactgatagatgaggt

SEQ ID NO: 63028 - DNA, 599 bp, Chicken  19866894325639_1
  misc_feature (1)..(137): n is any nucleotide
nnnnnnnnnnnnnnnnnnnnnnnnnnnnnnnnnnnnnnnnnnnnnnnnnnnnnnnnnnnnnnnnnnnnnnnnnnnnnnnnnnnnnnnnnnnnnnnnnnnnnnnnnnnnnnnnnnnnnnnnnnnnnnnnnnnnnnnnncataaagaattgtttcttggtgttcaaacggaacaccctgtgttccagtttgtgcatattgccccttgtcataacactgggtaccactggaaagagcctggctccatctcctttttactctttcttaaggtatttatataaattgaatgaactttctctaagytgaacagtacaagctctattagcctatctttataaggtaagtgcttcagtctcttggttgtctttatgacccttcactggaatctctccagtatgaccatgtctcttgtactgggagcccccgtactggacatggtccacgtgtggccccaccagcactgaggagaggggaaggattacgaaggattactcctttgacctgctgggcatgctttgtttcctagttgttggttttttggttttgttttgttcaatttcttatttatttatttttcccccatgcaggaggtgggctgggaa

SEQ ID NO: 63029 - DNA, 600 bp, Chicken  19866894325644_1
cagtctcatttctgtaggtgtaccatacttccactgtgcagcagggaagtacgtgctgttggtataactgacaaatcctgaagtttcaccaaaatcagtttttctgacaaaggattgtaagttgtaccacgagtacggaagggaatctttttctttgaggaattatttgtaagtaaaactttagattgatgtgttctcgtgagtactcgcatataaagtaactcttttgcctaacctggttatttggtttgttacattggagaatgcctggaggcctttgttcttcattattttatataygtaggctgtacaaagagaggagggaaatgaaatgtacttaatgctgtatggtgtaagaataaagaccttagagttaacattaccagtggatcctctttgttatattacaaattgaaaaaaaaattctttcctagggaatgagttttagtaactgcctgtatttattgttgagttgattatgcatgtatggagtaaacaaatctgtggtagtatagggtacaaccttgttgtttgttatgattcatttgctttgctcattgaagagagcaagctatcaatacatccaacatggtataaagt

SEQ ID NO: 63030 - DNA, 508 bp, Chicken  19866894325656_1
ggtaagaagagaggcatgaggaagacagaagggaacatgcagtgcagtgttctgagatggctgggaacaagacgagagcacatcagtacatgaagtacggggggctctgagatagccccaagcagccccaccatctctgccagcaactcacatcacaccctcactttgagctctgaccaagcaggacagatccctccgacacatctttctgtcatcaaaagtgcttgggtgctcggcagcctctaaacccactgtcacttccaaaagcaaggagtcctggtgacattgcagctttctaastggtacctatgaacaacaaagtaaattgtgaaactaaaataccattaacactctcaacttgtgctttctttgccttatgtctttacttcacatattttccctttaaaaatatgaaaggatattgattggaactttgcaatcctactacagagcagtttttcattcattttaatcctataatccgattccagacctgaagtcatattta

SEQ ID NO: 63031 - DNA, 600 bp, Chicken  19866894325665_1
acaagaagccatatttacagaagagaacattctatatttgcaatcatcagtaagttgcttaaaattcagttaaacatggatgaatattgaatgaataaacagaaagacacaaatcagagatgtctgaaagattgagctgagatgtaatatcaacagttctagaaatatgttgataagttaggaaaaatactccttgaacctccatgtatgaatgattagagaaataaaaatcacgctatcaatgtggcaagggattctaaaaatatattactaaatatatttaacttgacaaaaggacarttaagtcattacttgatcaaagtctgtaaatactcacttagggaacagaaaaactatgacaaacagttcttcatcatagcaggtaaaagaataacattgaaaggccaaagaaatttcagggtagcaataaaactgagatttttatcagtgagtaaaattaagcagaggaacaattgacacttgtgaattttccatcagttgtacttcaaggaaatttgacataagaaaattctctagtctttactatgcagaaacttcaattaaaatcaccatgatgctctctaagtcagcacagtatac

SEQ ID NO: 63032 - DNA, 600 bp, Chicken  19866894325669_1
tgcgtctgctgcacggggtgccggcgtgggctggggctgctgctgctgggggggccctccagccggggccatctgcagggaggaggcggcgccgttaggcggtggccgtgcctaaacccccaccgccctgcaggcagcactcacctgctggtacaggggctgctgcccaggcaggtaggactgctgtgcgggcaggctgctcagtgctgcttcttggcctggcagtgccgacatgaggccctagcaggagcaagggaaaggaggttagactggcttctagactcaacagcactcagcgcygtggaggagaaagcaagccctgcgcatgggcaagcctgctgtctcctcacctccaagcctcycccttcctgaccccagcagcataggctcaggaaggctccagtagctggagcctccctcgcccagcaccccagacgctcacctgcatgccatagggctggtaccccatggagaccgactggcttcccatgtagcccacagcccctgactgaggagcctgcgagatggcagggatgctctgtgactgtgatgctgcattctgtggaggagatgctgccagtgagaggttgtgcaagcaac

SEQ ID NO: 63033 - DNA, 600 bp, Chicken  19866894325669_2
ccggggccatctgcagggaggaggcggcgccgttaggcggtggccgtgcctaaacccccaccgccctgcaggcagcactcacctgctggtacaggggctgctgcccaggcaggtaggactgctgtgcgggcaggctgctcagtgctgcttcttggcctggcagtgccgacatgaggccctagcaggagcaagggaaaggaggttagactggcttctagactcaacagcactcagcgcygtggaggagaaagcaagccctgcgcatgggcaagcctgctgtctcctcacctccaagcctcycccttcctgaccccagcagcataggctcaggaaggctccagtagctggagcctccctcgcccagcaccccagacgctcacctgcatgccatagggctggtaccccatggagaccgactggcttcccatgtagcccacagcccctgactgaggagcctgcgagatggcagggatgctctgtgactgtgatgctgcattctgtggaggagatgctgccagtgagaggttgtgcaagcaactggatcccacatcaaacctatgttgcaagagctctaggaccagcggggctytcctctggaag

SEQ ID NO: 63034 - DNA, 600 bp, Chicken  19866894325669_3
tccaagcctcycccttcctgaccccagcagcataggctcaggaaggctccagtagctggagcctccctcgcccagcaccccagacgctcacctgcatgccatagggctggtaccccatggagaccgactggcttcccatgtagcccacagcccctgactgaggagcctgcgagatggcagggatgctctgtgactgtgatgctgcattctgtggaggagatgctgccagtgagaggttgtgcaagcaactggatcccacatcaaacctatgttgcaagagctctaggaccagcggggctytcctctggaagcaggtaggacatgactttcctctgcacaatagggagcccagggctgggcctaatccttgcccacacccacaaggaaagcagcacagcagctctagatctgagaccaaccagctcctcctcccgctggttcaaggttcaagaaccactgctggggttggagtacagacaccagctccacagaacaccccagccctgccccagctggccaccagctgctctgcagcagctgctttcacttgcctggtagccctgtgttgcagctggctgataggacgagtatgctggggtt

SEQ ID NO: 63035 - DNA, 600 bp, Chicken  19866894325671_1
tgcttgatgatattcagaatgccttattgctcagaaaatgtttttgttctggtggaaattagtaattattctctagattcttgttccttttctttctcttttccttgtcaatctcttttccaggaaatcataggaatatgattttaaaaaaggtttctctttcattggcaatcaccaacattgtattggcattcataaatttccaccagtttagaaactggagctctccacaggcttgtagaaattcatacctcctaacttagcatatttatccacctctccccttccaccccccccccyyttttttttaaggtagtcctggccagatctattttgattagtccagtattgggatttaaatcttacatctgaaaacttttattaaatcgagctaagagctttttgaccagtcagagctgattgtttaagctgtctcttttaggcagtggtaagaaatggacattcctgtttataagtactttgataatttagaggatgtagagaggcttgctaagggagtacttcyrtgttttgttcaggtgtacaagactgaatcgtggagaatatacaaggcatcgccgtctgattgaccaagcgtgg

SEQ ID NO: 63036 - DNA, 600 bp, Chicken  19866894325671_2
gcttgatgatattcagaatgccttattgctcagaaaatgtttttgttctggtggaaattagtaattattctctagattcttgttccttttctttctcttttccttgtcaatctcttttccaggaaatcataggaatatgattttaaaaaaggtttctctttcattggcaatcaccaacattgtattggcattcataaatttccaccagtttagaaactggagctctccacaggcttgtagaaattcatacctcctaacttagcatatttatccacctctccccttccaccccccccccyyttttttttaaggtagtcctggccagatctattttgattagtccagtattgggatttaaatcttacatctgaaaacttttattaaatcgagctaagagctttttgaccagtcagagctgattgtttaagctgtctcttttaggcagtggtaagaaatggacattcctgtttataagtactttgataatttagaggatgtagagaggcttgctaagggagtacttcyrtgttttgttcaggtgtacaagactgaatcgtggagaatatacaaggcatcgccgtctgattgaccaagcgtggt

SEQ ID NO: 63037 - DNA, 600 bp, Chicken  19866894325671_3
tccacaggcttgtagaaattcatacctcctaacttagcatatttatccacctctccccttccaccccccccccyyttttttttaaggtagtcctggccagatctattttgattagtccagtattgggatttaaatcttacatctgaaaacttttattaaatcgagctaagagctttttgaccagtcagagctgattgtttaagctgtctcttttaggcagtggtaagaaatggacattcctgtttataagtactttgataatttagaggatgtagagaggcttgctaagggagtacttcyrtgttttgttcaggtgtacaagactgaatcgtggagaatatacaaggcatcgccgtctgattgaccaagcgtggtatattttgttgcttcagtagaggaagggacatagctacatgtagattaattgattaatatatgtagttttgaaagcaatctgataaatatgctgcccaaagtttgcatttttaaattgtatctacctgcagcctttttccactctgcttttaaatgacatgatctgtagcatgatatgtaacttggggttggtagtaactatgggcagtggctgcagcatttact

SEQ ID NO: 63038 - DNA, 600 bp, Chicken  19866894325671_4
ccacaggcttgtagaaattcatacctcctaacttagcatatttatccacctctccccttccaccccccccccyyttttttttaaggtagtcctggccagatctattttgattagtccagtattgggatttaaatcttacatctgaaaacttttattaaatcgagctaagagctttttgaccagtcagagctgattgtttaagctgtctcttttaggcagtggtaagaaatggacattcctgtttataagtactttgataatttagaggatgtagagaggcttgctaagggagtacttcyrtgttttgttcaggtgtacaagactgaatcgtggagaatatacaaggcatcgccgtctgattgaccaagcgtggtatattttgttgcttcagtagaggaagggacatagctacatgtagattaattgattaatatatgtagttttgaaagcaatctgataaatatgctgcccaaagtttgcatttttaaattgtatctacctgcagcctttttccactctgcttttaaatgacatgatctgtagcatgatatgtaacttggggttggtagtaactatgggcagtggctgcagcatttactg

SEQ ID NO: 63039 - DNA, 599 bp, Chicken  19866894325676_1
  misc_feature (1)..(34): n is any nucleotide
nnnnnnnnnnnnnnnnnnnnnnnnnnnnnnnnnntctggaatacagtgcaaccagcaagtgtttttccaccactgaaggttctcaccatccattaaaaaaattaatcagtatttaaggactctctctctgccctttgccttccaagatagagaggccaaattaatttacaaaaatgctgaagtcctaaaaattaatgatatcattactattcaattgcagtggattgttgggcagaaaatcatgttatgaataaagttcttttatcccatcttgaaccagtctagtactttaaatactcractagttcttcaacatgagtaaacatggcctgtattcgagaggagcacttaaattgctttcagaaattcatattgagatgaactgcttttaaggtaaaattagtcacaatttaactgcttatctgaatcttaaaatttaaacacaagcttaaatgcatttgacgaagtcaaaattactggggccctgagggcacttctggcccttactgtacctgcccacctcccttgggcaccctacttctggccaagtgactttatttcagcccaatcgaggccaccartccctccccctacaacac

SEQ ID NO: 63040 - DNA, 600 bp, Chicken  19866894325676_2
ctagtactttaaatactcractagttcttcaacatgagtaaacatggcctgtattcgagaggagcacttaaattgctttcagaaattcatattgagatgaactgcttttaaggtaaaattagtcacaatttaactgcttatctgaatcttaaaatttaaacacaagcttaaatgcatttgacgaagtcaaaattactggggccctgagggcacttctggcccttactgtacctgcccacctcccttgggcaccctacttctggccaagtgactttatttcagcccaatcgaggccaccartccctccccctacaacactgcaagatgcacttcctcaacacatggactgacagggtagtcactccttgtttgggctcaatctcatggcctgctgtgaaaagagactgcagttttcagtagaacttctttcactgctagctttgtaatctattcacatggaagctgcacgcctcttctcaattttttatattacgcatttgaaatagctttttttttcttaaaggctagaccaagtgatttacaacactttgtaattagatatagcaataagaataatgtctcacattatactggaatgtt

SEQ ID NO: 63041 - DNA, 599 bp, Chicken  19866894325677_1
  misc_feature (1)..(247): n is any nucleotide
nnnnnnnnnnnnnnnnnnnnnnnnnnnnnnnnnnnnnnnnnnnnnnnnnnnnnnnnnnnnnnnnnnnnnnnnnnnnnnnnnnnnnnnnnnnnnnnnnnnnnnnnnnnnnnnnnnnnnnnnnnnnnnnnnnnnnnnnnnnnnnnnnnnnnnnnnnnnnnnnnnnnnnnnnnnnnnnnnnnnnnnnnnnnnnnnnnnnnnnnnnnnnnnnnnnnnnnnnnnnnnnnnnnnnnnnnnnnnnnnnnnnnnnagacacatagagacccatagcgtgacccatagggacccatacagacccatagkgacccatacagacacataggaatccattgtgccccatggcgtgacccatagagacccttagagacccatagagtgacccataggaacccatagagacctttagggacccatagggacccatagggacccatacagatacatagggatccactgtgccccatagcgtgacccatagggacccatacagacccatagggactcatagagacacatacagacccatagagtgacccataggaacccatacagacacataggaatccgctgcaccccatagcatgacccacagagacccatag

SEQ ID NO: 63042 - DNA, 600 bp, Chicken  19866894325680_1
tcctccctgttcatgatttcttcccttaaaactctggtacagctgctgaacataaagtgggggattccgagggttttctcagtacagattccacactaccattctcttttctaggctaaggctcgtaaacaagttgttactaagaaagagcagacatgaatgtgtatttcacatgcagccttattcagtcacttttaagatcaaagctggatatccatgcagtggtttggcaaagactttgtggacgtcttgctcacaaggaattgatttctctgctcattcatccctaaagccagaatsctcctggcgttccaataaagaaatgtgtggattagacwtaaaaattcatccatatgttgggraaayaccaacttcrggttacttaaggctgttgaggaattttggttgttcttcccctcttggtaaaagtgtttctccaccgatcttcggaccttttttctcctagaaatacaaatcacagagaaaagttaaaacatgtcaagacgttccccagctttatgacagagttgggtctaatttagccaattaaatgttgtcagacactccagaaatatttacattctgactggttacagatac

SEQ ID NO: 63043 - DNA, 581 bp, Chicken  19866894325680_2
acagctgctgaacataaagtgggggattccgagggttttctcagtacagattccacactaccattctcttttctaggctaaggctcgtaaacaagttgttactaagaaagagcagacatgaatgtgtatttcacatgcagccttattcagtcacttttaagatcaaagctggatatccatgcagtggtttggcaaagactttgtggacgtcttgctcacaaggaattgatttctctgctcattcatccctaaagccagaatsctcctggcgttccaataaagaaatgtgtggattagacwtaaaaattcatccatatgttgggraaayaccaacttcrggttacttaaggctgttgaggaattttggttgttcttcccctcttggtaaaagtgtttctccaccgatcttcggaccttttttctcctagaaatacaaatcacagagaaaagttaaaacatgtcaagacgttccccagctttatgacagagttgggtctaatttagccaattaaatgttgtcagacactccagaaatatttacattctgactggttacagatacggagaaaggaaattctcca

SEQ ID NO: 63044 - DNA, 557 bp, Chicken  19866894325680_3
gattccgagggttttctcagtacagattccacactaccattctcttttctaggctaaggctcgtaaacaagttgttactaagaaagagcagacatgaatgtgtatttcacatgcagccttattcagtcacttttaagatcaaagctggatatccatgcagtggtttggcaaagactttgtggacgtcttgctcacaaggaattgatttctctgctcattcatccctaaagccagaatsctcctggcgttccaataaagaaatgtgtggattagacwtaaaaattcatccatatgttgggraaayaccaacttcrggttacttaaggctgttgaggaattttggttgttcttcccctcttggtaaaagtgtttctccaccgatcttcggaccttttttctcctagaaatacaaatcacagagaaaagttaaaacatgtcaagacgttccccagctttatgacagagttgggtctaatttagccaattaaatgttgtcagacactccagaaatatttacattctgactggttacagatacggagaaaggaaattctcca

SEQ ID NO: 63045 - DNA, 553 bp, Chicken  19866894325680_4
ccgagggttttctcagtacagattccacactaccattctcttttctaggctaaggctcgtaaacaagttgttactaagaaagagcagacatgaatgtgtatttcacatgcagccttattcagtcacttttaagatcaaagctggatatccatgcagtggtttggcaaagactttgtggacgtcttgctcacaaggaattgatttctctgctcattcatccctaaagccagaatsctcctggcgttccaataaagaaatgtgtggattagacwtaaaaattcatccatatgttgggraaayaccaacttcrggttacttaaggctgttgaggaattttggttgttcttcccctcttggtaaaagtgtttctccaccgatcttcggaccttttttctcctagaaatacaaatcacagagaaaagttaaaacatgtcaagacgttccccagctttatgacagagttgggtctaatttagccaattaaatgttgtcagacactccagaaatatttacattctgactggttacagatacggagaaaggaaattctcca

SEQ ID NO: 63046 - DNA, 543 bp, Chicken  19866894325680_5
tctcagtacagattccacactaccattctcttttctaggctaaggctcgtaaacaagttgttactaagaaagagcagacatgaatgtgtatttcacatgcagccttattcagtcacttttaagatcaaagctggatatccatgcagtggtttggcaaagactttgtggacgtcttgctcacaaggaattgatttctctgctcattcatccctaaagccagaatsctcctggcgttccaataaagaaatgtgtggattagacwtaaaaattcatccatatgttgggraaayaccaacttcrggttacttaaggctgttgaggaattttggttgttcttcccctcttggtaaaagtgtttctccaccgatcttcggaccttttttctcctagaaatacaaatcacagagaaaagttaaaacatgtcaagacgttccccagctttatgacagagttgggtctaatttagccaattaaatgttgtcagacactccagaaatatttacattctgactggttacagatacggagaaaggaaattctcca

SEQ ID NO: 63047 - DNA, 600 bp, Chicken  19866894325686_1
tcttataataaaggaaataaacttgataagaaaaaaaaaaacagaagtaaatgagatagttaaatagtaaaggacaattgagagagaaattaaagaactgctacgatttgacaaatgggaaaaggtacctcatttttagtctacaatttccagtatattgtgcttataattgttttttgttactttcataaaattatgtttacattagaaagcactgcaatataatggaacaagcccttttgaaatcaggatgctagaaaagtagctaacaacattttcctgaatgatgtaaaaacattwaaaaagttgtattctggtttccagatcacaggttacagttaagagtgacactgcgactctcagtagaaagctgagtactttcaaattggttcatcttttcttcacctctccaggtggaagtgcaggcacaactgcactcatgttgctgtctgcatccccagtgctgaatctcaggactctattttgccatttactttggccacttttctaagtgtgctgccattttttttcttaatacaattttccattaccacttttctttcttcactgaagaaactgagatttatatcraggaatttt

SEQ ID NO: 63048 - DNA, 600 bp, Chicken  19866894325686_2
aaaacattwaaaaagttgtattctggtttccagatcacaggttacagttaagagtgacactgcgactctcagtagaaagctgagtactttcaaattggttcatcttttcttcacctctccaggtggaagtgcaggcacaactgcactcatgttgctgtctgcatccccagtgctgaatctcaggactctattttgccatttactttggccacttttctaagtgtgctgccattttttttcttaatacaattttccattaccacttttctttcttcactgaagaaactgagatttatatcraggaattttgctggaggcacctaggtactgtgatgatgggttaatggtagtgcatagctaactagttacctgtgttttatactcttcctctgctattttttattcataagagtgtacgtctcagaatagcttcaagtttggtttcagaggatgaaagaatttcaagtaaatgtctcatctgtatccaaactatcacaataaatcagaatattttcttcagtctctgaaagttcatagtgctagcatgatttatttatctggagctgcaaggttgcagctttgtgaaagagtttttatttt

SEQ ID NO: 63049 - DNA, 599 bp, Chicken  19866894325687_1
  misc_feature (1)..(167): n is any nucleotide
nnnnnnnnnnnnnnnnnnnnnnnnnnnnnnnnnnnnnnnnnnnnnnnnnnnnnnnnnnnnnnnnnnnnnnnnnnnnnnnnnnnnnnnnnnnnnnnnnnnnnnnnnnnnnnnnnnnnnnnnnnnnnnnnnnnnnnnnnnnnnnnnnnnnnnnnnnnnnnnnnnnnnnncatgctgtgcgttgcggtcactactcacaggcctctgtcttactaaaacaattgctcttgttaagtggaggattcattgtccataccatcttgtaaataatttgaatctcaaatgcttaaaatattgaagaarcttttatcagtttgtttgggggttatgttgttgttcttttgtttgttttgttttgttttgttttgttttgttttgtatctgacttttagacaaatctcaggacataacaaaaaaaagtcagaaatgacgmcatttgagaatagcagtcggtacatttataggaataaaggaaacattccatatactrtgtgattttatgaagatcaaatgcataagtaagcttatcaccaattcagtgaattcatagaggataagtggctatttatatgactgtcccgatgtgttcagaaagttaggtt

SEQ ID NO: 63050 - DNA, 599 bp, Chicken  19866894325687_2
  misc_feature (1)..(37): n is any nucleotide
nnnnnnnnnnnnnnnnnnnnnnnnnnnnnnnnnnnnncatgctgtgcgttgcggtcactactcacaggcctctgtcttactaaaacaattgctcttgttaagtggaggattcattgtccataccatcttgtaaataatttgaatctcaaatgcttaaaatattgaagaarcttttatcagtttgtttgggggttatgttgttgttcttttgtttgttttgttttgttttgttttgttttgttttgtatctgacttttagacaaatctcaggacataacaaaaaaaagtcagaaatgacgmcatttgagaatagcagtcggtacatttataggaataaaggaaacattccatatactrtgtgattttatgaagatcaaatgcataagtaagcttatcaccaattcagtgaattcatagaggataagtggctatttatatgactgtcccgatgtgttcagaaagttaggttattctaccagggatcattttctcctgtgtttttccaagtcttaatgctaccacagccatgatatttcgatcagctttgaactaacttacttagtaattctcacctcttctggtagcatatgatctttgct

SEQ ID NO: 63051 - DNA, 600 bp, Chicken  19866894325687_3
ctactcacaggcctctgtcttactaaaacaattgctcttgttaagtggaggattcattgtccataccatcttgtaaataatttgaatctcaaatgcttaaaatattgaagaarcttttatcagtttgtttgggggttatgttgttgttcttttgtttgttttgttttgttttgttttgttttgttttgtatctgacttttagacaaatctcaggacataacaaaaaaaagtcagaaatgacgmcatttgagaatagcagtcggtacatttataggaataaaggaaacattccatatactrtgtgattttatgaagatcaaatgcataagtaagcttatcaccaattcagtgaattcatagaggataagtggctatttatatgactgtcccgatgtgttcagaaagttaggttattctaccagggatcattttctcctgtgtttttccaagtcttaatgctaccacagccatgatatttcgatcagctttgaactaacttacttagtaattctcacctcttctggtagcatatgatctttgcttcctgacagaataaaagtgtgaatatttatctttcagaattttaggcagaaatgggta

SEQ ID NO: 63052 - DNA, 600 bp, Chicken  19866894325701_1
aaacaatttgaattgggtcctgcacttgcatccagtcttgggcagagagcatctgctcttctgtgccagttaccctagtcaataatttttttataaagggaatatgaaaaattacttgcagctgaaatggagaagtaggtggacacttagtaattagagctgggttttggccagggctacacctacttcatttggaagcgtgccacggaaaatgataattggtagtctgtgctgtctgcttttgcatgttgctcaaaaaatgacttctcggagctgcctgcatgcatctgaaggcttgcyttgcctttaccagacaaggagtccacctggttactggccagggctagcctggcttaattacagtatgcaggagtccagtgttatttttccagttcctgaaggagttgtggaatcaatttttttttgtagtgaaaaggggaaacagagaagctgttctatatatacasacttgggatgatcctgcagttttagaagctcgtgcaagcgtgacatagcaatagcaatatatgtgtaggctctgcattaatgtcgtggcaggctcagttgggtggcgtgcttgcttttgagaaggagtaagca

SEQ ID NO: 63053 - DNA, 587 bp, Chicken  19866894325701_2
tggccagggctacacctacttcatttggaagcgtgccacggaaaatgataattggtagtctgtgctgtctgcttttgcatgttgctcaaaaaatgacttctcggagctgcctgcatgcatctgaaggcttgcyttgcctttaccagacaaggagtccacctggttactggccagggctagcctggcttaattacagtatgcaggagtccagtgttatttttccagttcctgaaggagttgtggaatcaatttttttttgtagtgaaaaggggaaacagagaagctgttctatatatacasacttgggatgatcctgcagttttagaagctcgtgcaagcgtgacatagcaatagcaatatatgtgtaggctctgcattaatgtcgtggcaggctcagttgggtggcgtgcttgcttttgagaaggagtaagcatttgtggtgttactgagggatctcggtctgtctgagacacatcagtcacgtgtgacatcacgctgtgctgcagggagagctccaaggtgctcagtgtgacaagttggtacttttcatctttcctgggagctttaatgacagaatgggggaccca

SEQ ID NO: 63054 - DNA, 600 bp, Chicken  19866894325703_1
agtaaaattaaatccttgcttttgctgaaagagaaaattatgattctctttatattttaaatagctcttatagtttgacttatacagtcaattgagtagatattggttattggctaataagtttattaactgtggctaatgggctgtgaatacagcaaaggaatagcttcaaatttaaggtgtcctttagtcatttacttctcctggcttctagcctaaagcttttcatctttttcgcctgtgcttttaaagacctcagacatcctattttccccattcctcttagtaactgtaagtatrcttcttctgttcagtccacaatcttctacatacgtgtattccactcagtccwcagtctcaaatacacattctcttcttctaatgccaaagtaccctgcagcttataatcaagacttgagatttgcagttgagtttatggctttcttgagtgaaatgtgaacacttctgtataatgtcagaacaaaacggtcagcttatttttgtgttgttttattttgtactaaattgcttttatcatcttctttccagaaatgaaaatggtttttaaaaaggtcaagaaagagatggaagaagtttcac

SEQ ID NO: 63055 - DNA, 600 bp, Chicken  19866894325703_2
tattttaaatagctcttatagtttgacttatacagtcaattgagtagatattggttattggctaataagtttattaactgtggctaatgggctgtgaatacagcaaaggaatagcttcaaatttaaggtgtcctttagtcatttacttctcctggcttctagcctaaagcttttcatctttttcgcctgtgcttttaaagacctcagacatcctattttccccattcctcttagtaactgtaagtatrcttcttctgttcagtccacaatcttctacatacgtgtattccactcagtccwcagtctcaaatacacattctcttcttctaatgccaaagtaccctgcagcttataatcaagacttgagatttgcagttgagtttatggctttcttgagtgaaatgtgaacacttctgtataatgtcagaacaaaacggtcagcttatttttgtgttgttttattttgtactaaattgcttttatcatcttctttccagaaatgaaaatggtttttaaaaaggtcaagaaagagatggaagaagtttcacatgaatggtgaactctgaaggcttggtacctttttgatttacggttttaatc

SEQ ID NO: 63056 - DNA, 599 bp, Chicken  19866894325704_1
  misc_feature (1)..(72): n is any nucleotide
nnnnnnnnnnnnnnnnnnnnnnnnnnnnnnnnnnnnnnnnnnnnnnnnnnnnnnnnnnnnnnnnnnnnnnnncaaaaaaaaaacgaggggaaatggaacccaaggtgtattgtttttcgtagtactgagtgatatacacacagcttgataatatgttatccaggatctgaatttaaaatgagtccagctcttgtttgcactgtatgaagtcctacttgctttaacaaattttctctagcaaaaatggatcaattcaaagccactatttgacaggtgttttttagaagacttatttttagytttctcttaggtctagtttttatcatgttattaataaatgatattatgttattaataaatgaaattaataaatttcattgcaagtaaaaatgtacatcgtataaacaacagttatagcaaacgtgctgcatcaaaacctgcttaaacacaccatggccaaaaaactgcattcaggttttccagttaaaaatycttagtttcatatttggttgaaacgtatagtaaaggactatacttgtgcagcacatttagagatcttcaaatgataatgttttcatactctagtaataatatttcat

SEQ ID NO: 63057 - DNA, 600 bp, Chicken  19866894325704_2
gtttgcactgtatgaagtcctacttgctttaacaaattttctctagcaaaaatggatcaattcaaagccactatttgacaggtgttttttagaagacttatttttagytttctcttaggtctagtttttatcatgttattaataaatgatattatgttattaataaatgaaattaataaatttcattgcaagtaaaaatgtacatcgtataaacaacagttatagcaaacgtgctgcatcaaaacctgcttaaacacaccatggccaaaaaactgcattcaggttttccagttaaaaatycttagtttcatatttggttgaaacgtatagtaaaggactatacttgtgcagcacatttagagatcttcaaatgataatgttttcatactctagtaataatatttcattctactaacacaaatcagtcattgtatcatacaaaatatcaacatatttcaaaatgtatttatttctctttaccgtttcctaatgaaaaaattttctatttttaatttcatttggtccatgcctgctttgggatcaaagctaagcatcattctgggcaaatagtgaagacttgcaaattgccatggttataat

SEQ ID NO: 63058 - DNA, 599 bp, Chicken  19866894325706_1
  misc_feature (1)..(138): n is any nucleotide
nnnnnnnnnnnnnnnnnnnnnnnnnnnnnnnnnnnnnnnnnnnnnnnnnnnnnnnnnnnnnnnnnnnnnnnnnnnnnnnnnnnnnnnnnnnnnnnnnnnnnnnnnnnnnnnnnnnnnnnnnnnnnnnnnnnnnnnnnntatttttctccattgtcagccaagactgccatcatcaggacttggcttctgggctcattttcccccatttcacggaattctactatttcagtctgtctagtctgtgtttctcttggaagttgcaaacaagcacgtggaacttctaattgtgcaagctttttygaatattattaaattctttatgaataatacatctaaaagtatgtgctttccttgcagcataacatcgttgaaacataaatctggcatggtattgttttccctggaagtactgtgtagtcattaacaatatcttgaccggatctttggcaaaacatggcttccaagcagcggctgcggccacttgagtggtgccagcagcagatcttgtgctgggatgaggagcacgagggcgagtcaaagcttgataagagcttctgtgggaattgccacgtaccgccgtgctttctaagccaactcgg

SEQ ID NO: 63059 - DNA, 600 bp, Chicken  19866894325709_1
ttcgccactcgatggaagtggaagaaatgggaaggaggtgaaggcacctggcgcccggctctccccctgcacccccgggctggtgctttcccactgaccacgggcatgtgctgccttttgtttgaaacaaacgggaaaaaaagaaagacaaatccagaacaaccaaccaacaacagaataatcacaataaaaatcgctatggctacggaagcaagaaaaccaaacggtgctgcgccaacacgcagtgccgatggaggagcagaaggggctcggagctcccagccatcccctccacccaaygaccacggcacagctgagtgatgtccccttccccagccctactggagggctgtgtgctgccagctccccctatctctaccagcagatgctctatggtcctcagcacttacccctaaataaaaaaacaaaacaagtgtgtctacgctgcaggatggaggcagaatcgtaattaatgctaacgacaactactgcaggatacaaatcaacgtgctgactggtattcgagccctagattttggttttacagtgacaagagtagaacaagccattcccagttcttaacgtctccccttggactgg

SEQ ID NO: 63060 - DNA, 568 bp, Chicken  19866894325713_1
ttcaagctagatggtattaactgttccttcccacctgaaagtctccatagcacagcgggtgaagtgcaggagatggctgtgtgtggtctgtacctggtaactgttccttctaaggagggcctttgtcttgctggcctctcgaggtggcagcatccctgtatttctccccccctaccctaggacaaggtgcttagtggtgcagccaagctgtgcaggggctgtgctgcaattcacccgcttcctcatgaactgctctgcagtagctgtcgtgggatgggtggggatgggggaatgatgcartggtacatctcagccttggcctccttggaaagttttagatgttagggctcgttggtggatttggaatcaatctttgacatgtgtcatagctgttaaagtaggtattaatacaaaacagtaaatttgtgtggtattcaacttttttgtagctgtcaatcagaaagttctgaagtggatttctttaaagactcccgtctcccgaggaaaaggggataaggcagtgtgtccctggacaggatctatgactcattatgtcaatcaaattcca

SEQ ID NO: 63061 - DNA, 600 bp, Chicken  19866894325715_1
aactcacagggggataattatttcatttttacgtatttagaaaatcatttaaactttttttagttaataatgttgagaagacgtttatttggaaaaacccatttaagtcaatggccaaattcaaatctaggcatatgtaatttgttttaaagtgaattaatctatacattgataaacagccaagtatcaccaaaattaaactccatagatatagtgcagtgaactttcaccctagcatcaagaactcctggataatcatataattcagcttcacaaattccaaacactttcactgaaaartgtttctaaggtattatgcaacagccacttaaattcaaaggaaaagtctagaaagactaagtgaatcccagatgcttttacactgcagaaatgcatgctttaatacatggacaaagagaattaacattagcaaacatactaaaactctctcttctcttgggttcttatttaagtgcatgtttatatatattatggaatttctttatttcttaattaaaaacagcattatacttctaagtttaaagcaaacttacraaaggaagcttgttacaaaaatctgcctcttgaaggataactgct

SEQ ID NO: 63062 - DNA, 600 bp, Chicken  19866894325715_2
tcatataattcagcttcacaaattccaaacactttcactgaaaartgtttctaaggtattatgcaacagccacttaaattcaaaggaaaagtctagaaagactaagtgaatcccagatgcttttacactgcagaaatgcatgctttaatacatggacaaagagaattaacattagcaaacatactaaaactctctcttctcttgggttcttatttaagtgcatgtttatatatattatggaatttctttatttcttaattaaaaacagcattatacttctaagtttaaagcaaacttacraaaggaagcttgttacaaaaatctgcctcttgaaggataactgctagctttcaaacccaaagcatgctaaaaaaccccctgctgtgagtgtacatacacaaagtcaaaagcacaagctcttctccctgcttacattttaactgataggaaaattttccaagccaccttagaatgacacatgaactattcaagagacccggatgtctatgatagtgcttactgagttaagactatttacgaagtgaaaacaactactcaaatggtcttagtggaagaaaagtgactatgcagaagagctga

SEQ ID NO: 63063 - DNA, 599 bp, Chicken  19866894325720_1
  misc_feature (1)..(69): n is any nucleotide
nnnnnnnnnnnnnnnnnnnnnnnnnnnnnnnnnnnnnnnnnnnnnnnnnnnnnnnnnnnnnnnnnnnnngggctttcggggtgcagaatgcactgtcggttttgggaacttgaaacaggtgacttgcaatttgaaacagcagtgtaggagctatgcaacccgtggctcctgccatgcggtggcagcagtgagggagtgaggaggagcaaagagctgctgggtgcgcagcaacctgcttgtttgacaaagaagtataattactgactgtggagttgctagctagggtcgggctggaggctsttaactccctgtgctgtcctatagtatctggaacgaatacttcaattccacaakggattttagatgccctwctgacraggtagggggggaaaaaagtgtggtcagaaagggctttacattggtagtgcctctttttaggaggattctcttactgaaaagagttcctgtttttctgaactcctggttggtgataggtggtttgtctgaggagctgacttgcattttatttccatctgcttttgaaatgtttatcaaattttagttacaaaacttacaactcattgtaggattagcaatca

SEQ ID NO: 63064 - DNA, 599 bp, Chicken  19866894325720_2
  misc_feature (1)..(15): n is any nucleotide
nnnnnnnnnnnnnnngggctttcggggtgcagaatgcactgtcggttttgggaacttgaaacaggtgacttgcaatttgaaacagcagtgtaggagctatgcaacccgtggctcctgccatgcggtggcagcagtgagggagtgaggaggagcaaagagctgctgggtgcgcagcaacctgcttgtttgacaaagaagtataattactgactgtggagttgctagctagggtcgggctggaggctsttaactccctgtgctgtcctatagtatctggaacgaatacttcaattccacaakggattttagatgccctwctgacraggtagggggggaaaaaagtgtggtcagaaagggctttacattggtagtgcctctttttaggaggattctcttactgaaaagagttcctgtttttctgaactcctggttggtgataggtggtttgtctgaggagctgacttgcattttatttccatctgcttttgaaatgtttatcaaattttagttacaaaacttacaactcattgtaggattagcaatcagaacgatttatgtgcactaagttccctgatatttgctctcatggtgttgctgga

SEQ ID NO: 63065 - DNA, 600 bp, Chicken  19866894325720_3
gctttcggggtgcagaatgcactgtcggttttgggaacttgaaacaggtgacttgcaatttgaaacagcagtgtaggagctatgcaacccgtggctcctgccatgcggtggcagcagtgagggagtgaggaggagcaaagagctgctgggtgcgcagcaacctgcttgtttgacaaagaagtataattactgactgtggagttgctagctagggtcgggctggaggctsttaactccctgtgctgtcctatagtatctggaacgaatacttcaattccacaakggattttagatgccctwctgacraggtagggggggaaaaaagtgtggtcagaaagggctttacattggtagtgcctctttttaggaggattctcttactgaaaagagttcctgtttttctgaactcctggttggtgataggtggtttgtctgaggagctgacttgcattttatttccatctgcttttgaaatgtttatcaaattttagttacaaaacttacaactcattgtaggattagcaatcagaacgatttatgtgcactaagttccctgatatttgctctcatggtgttgctggacaagctgctgtcatctgc

SEQ ID NO: 63066 - DNA, 600 bp, Chicken  19866894325720_4
ggggtgcagaatgcactgtcggttttgggaacttgaaacaggtgacttgcaatttgaaacagcagtgtaggagctatgcaacccgtggctcctgccatgcggtggcagcagtgagggagtgaggaggagcaaagagctgctgggtgcgcagcaacctgcttgtttgacaaagaagtataattactgactgtggagttgctagctagggtcgggctggaggctsttaactccctgtgctgtcctatagtatctggaacgaatacttcaattccacaakggattttagatgccctwctgacraggtagggggggaaaaaagtgtggtcagaaagggctttacattggtagtgcctctttttaggaggattctcttactgaaaagagttcctgtttttctgaactcctggttggtgataggtggtttgtctgaggagctgacttgcattttatttccatctgcttttgaaatgtttatcaaattttagttacaaaacttacaactcattgtaggattagcaatcagaacgatttatgtgcactaagttccctgatatttgctctcatggtgttgctggacaagctgctgtcatctgcatcccc

SEQ ID NO: 63067 - DNA, 600 bp, Chicken  19866894325720_5
agggctttacattggtagtgcctctttttaggaggattctcttactgaaaagagttcctgtttttctgaactcctggttggtgataggtggtttgtctgaggagctgacttgcattttatttccatctgcttttgaaatgtttatcaaattttagttacaaaacttacaactcattgtaggattagcaatcagaacgatttatgtgcactaagttccctgatatttgctctcatggtgttgctggacaagctgctgtcatctgcatcccctgtcgacttgggtgaccttatggctgttgkgttacacctttctgtrggagagggaatttcctgaaaatggtttatttgaagtgcttcacctgtaatcctgtagggaaggttctttgtgagaaggaggtcagctgggcaggttttgtcatcagctgtgatgcagtgatttttttttgtttatttttacttatttttgtggggtataaatgggagcagtttgggacaaatggggctattaaaaatgaaagtacctcgatcctttattcttttttgatgcaaaactgtatctttttgccaatgacataggagccatttttggagcacttcagg

SEQ ID NO: 63068 - DNA, 600 bp, Chicken  19866894325720_6
agtgcctctttttaggaggattctcttactgaaaagagttcctgtttttctgaactcctggttggtgataggtggtttgtctgaggagctgacttgcattttatttccatctgcttttgaaatgtttatcaaattttagttacaaaacttacaactcattgtaggattagcaatcagaacgatttatgtgcactaagttccctgatatttgctctcatggtgttgctggacaagctgctgtcatctgcatcccctgtcgacttgggtgaccttatggctgttgkgttacacctttctgtrggagagggaatttcctgaaaatggtttatttgaagtgcttcacctgtaatcctgtagggaaggttctttgtgagaaggaggtcagctgggcaggttttgtcatcagctgtgatgcagtgatttttttttgtttatttttacttatttttgtggggtataaatgggagcagtttgggacaaatggggctattaaaaatgaaagtacctcgatcctttattcttttttgatgcaaaactgtatctttttgccaatgacataggagccatttttggagcacttcaggacatacttgggagccg

SEQ ID NO: 63069 - DNA, 600 bp, Chicken  19866894325722_1
tgcgtgaaattgtaaggctgaagcacggggcttctggttgacatcagcttaaacagaatcgagctgatactattaacatatatgaatactcaactatgagaccaatttttggaactctagagagagttccagagaatcaaataaatattaatacagcttcttttactttcttttagattgctaggggataatacattgctttcgattcaatctttttctcaggctgccttttagaacagtgggaagagtatttctaatacaaaataaactacaacagttatactaaaaatttagaacaaygcactgaaaaataatagtataactgacaccttttgaagagcccatgttccacagacattacaggctatacaagtacctggctgctatccatagttggttctcctctaccatcttcttgaatagagagttgaccattttgcaagaaatctttgtttagagcagctccgaacagctctttacattgcagtggctccccactttcctttttttgggaacctgacacaggatctttgcttttgttagtgtttatctgcagtgacaagaagttgaatggttttttgctttcattaagttgacgtt

SEQ ID NO: 63070 - DNA, 600 bp, Chicken  19866894325723_1
aattgaaacttaaaaattttatacttctactctgctttttgtaactaaacacgtcaaggctggaagggagaaaagaaatgtaacaggattttttcagtgcagtaaagcttcactgaaacgtagatgttattaacagtagttgttaaccagaacatatctgtttcaatgggcaaataattattttcaggtaacaaggtaagttaagcaaatgactctaacattaaatcatgacaaacactaataatgtacagctttaaaatgaaatgacaggaggaaacaacattatgaaatagtgcaagrtgtatactcatctgctctagaaatagctgtattttgggatcaggctttgggcagaattgctggtcttggaagatgagaaaaaatcttttacctgcttttgtttctcagatacaacccgtgcctttggctttatgggattaagtttatgtgcaaacacaaccttatccaaaatttcacaaattcactgaaacagtttcattgacttccaacaacttcttgacttgaatttaattaaagtggtagttgttgaactgtaaccagtgatatttgactgctgatgggaaagatgagtttttccct

SEQ ID NO: 63071 - DNA, 599 bp, Chicken  19866894325753_1
  misc_feature (1)..(227): n is any nucleotide
nnnnnnnnnnnnnnnnnnnnnnnnnnnnnnnnnnnnnnnnnnnnnnnnnnnnnnnnnnnnnnnnnnnnnnnnnnnnnnnnnnnnnnnnnnnnnnnnnnnnnnnnnnnnnnnnnnnnnnnnnnnnnnnnnnnnnnnnnnnnnnnnnnnnnnnnnnnnnnnnnnnnnnnnnnnnnnnnnnnnnnnnnnnnnnnnnnnnnnnnnnnnnnnnnnnnnnnnnnnnnnnnnnnaaagagaaaaaaaaatggaacatgaaccattgatatcaaaaccagaatttaaaaaaagaaaaaaaaaaaaaaraagaaggcactattctgagcaaaacagggctaaaattcatgagatgttcatgtttccactggatattcagcttggataatgttagacaccctgtgaatcctcaatacaaatttatatttttcatctgagtaggtggacttgttcaagtaatctgctatttaggaagttggagacaaaatacagtgtgctcccttccagcttgtttgagttgaaaccagctgttgagggagtcaacaytgttagaggcttgaacagcacacaaaaatcccatcctctttgtaagcttttttctacaatgc

SEQ ID NO: 63072 - DNA, 600 bp, Chicken  19866894325753_2
aaaaatggaacatgaaccattgatatcaaaaccagaatttaaaaaaagaaaaaaaaaaaaaaraagaaggcactattctgagcaaaacagggctaaaattcatgagatgttcatgtttccactggatattcagcttggataatgttagacaccctgtgaatcctcaatacaaatttatatttttcatctgagtaggtggacttgttcaagtaatctgctatttaggaagttggagacaaaatacagtgtgctcccttccagcttgtttgagttgaaaccagctgttgagggagtcaacaytgttagaggcttgaacagcacacaaaaatcccatcctctttgtaagcttttttctacaatgcctttttgctgatctcttgttgcattaaaaaaaatcctcatagttctacactccaaccccaaattctccttacttttgtcctagaacaagtttccctccgtggtctaagcctctccttttcacacctcctcacttctctgctctccacaaatacctgaggcacttacaggccacatgttccctttccttcccagcaggaggaatgatgtggacctgctgttgctgcgggttaccctgtt

SEQ ID NO: 63073 - DNA, 600 bp, Chicken  19866894325760_1
gtgcaaacaggaaagcatgggggaaaacacacctggggctctgccatgtccccattagaacttccaggtcttatactggtagagaatcatagaatatttagggtgggaaaggacctttaaaggtcatctagtccaactcccctgcaatgaacagggacacgcacagctaaatcagcttgccgagggaagcaggcaaagaagacagatatttaaaaagaatttgtttaaagtaattaattgtttatgcaacagatcctgtataaccttattacagaattgctactatttttttaaataaayccacttaaaaaaaagtttgcagtggcactataagtaaccagccaaasattcatatatttaaaaaagaaagatataatgaacatttgagggtctatgattgttgtctcctgttccattttatataaggcttctatgatttattgacatttcagtataaatggttctttattttctattcatcctaaccttggtcaaataataccaccctacttctcttcacaatattttcctaatatctcagctcatttaattctattgatccactgaagagtataatggcaatgaaactggaattaatag

SEQ ID NO: 63074 - DNA, 600 bp, Chicken  19866894325760_2
gtccccattagaacttccaggtcttatactggtagagaatcatagaatatttagggtgggaaaggacctttaaaggtcatctagtccaactcccctgcaatgaacagggacacgcacagctaaatcagcttgccgagggaagcaggcaaagaagacagatatttaaaaagaatttgtttaaagtaattaattgtttatgcaacagatcctgtataaccttattacagaattgctactatttttttaaataaayccacttaaaaaaaagtttgcagtggcactataagtaaccagccaaasattcatatatttaaaaaagaaagatataatgaacatttgagggtctatgattgttgtctcctgttccattttatataaggcttctatgatttattgacatttcagtataaatggttctttattttctattcatcctaaccttggtcaaataataccaccctacttctcttcacaatattttcctaatatctcagctcatttaattctattgatccactgaagagtataatggcaatgaaactggaattaatagcacctcccttttccaatgctaagagctttcctatttagtctgtggac

SEQ ID NO: 63075 - DNA, 599 bp, Chicken  19866894325763_1
  misc_feature (1)..(18): n is any nucleotide
nnnnnnnnnnnnnnnnnnatatacttaacaagatttactgttatatggttagaatagaaatagcataagattttctgggactggttttgccagtcagacattcttatgctgattcaattagaatcgaagcaccttgaagcccacgtgcccaagtccaccaagccaatcctagctgcccccagaacctggaagttacacattcggcaaaataagaccaaaaaaatgacaccaaaaaagctatgactaaatagagacaggcatctggaatgggcacactttaatgtattaagctgtcactgrgrttcctttggttataaccctggctgctggctgttcttaagggaaatgtaccagcaagcccctcaaacaccagagctgctctcccaaggccaggaggagcaaggagcagaacagcgacagttcctcccacactgagcctttaaccaggcttccacacgctcaagaagttcacctgtccaaagctgttactgtccccaagcaatttcagccttacagacstttgcccatgaacgcttgctagctcaaccagctgaaaggcttggaaaaaagagatttgtattaaggatttaacgtggatt

SEQ ID NO: 63076 - DNA, 599 bp, Chicken  19866894325763_2
  misc_feature (1)..(16): n is any nucleotide
nnnnnnnnnnnnnnnnatatacttaacaagatttactgttatatggttagaatagaaatagcataagattttctgggactggttttgccagtcagacattcttatgctgattcaattagaatcgaagcaccttgaagcccacgtgcccaagtccaccaagccaatcctagctgcccccagaacctggaagttacacattcggcaaaataagaccaaaaaaatgacaccaaaaaagctatgactaaatagagacaggcatctggaatgggcacactttaatgtattaagctgtcactgrgrttcctttggttataaccctggctgctggctgttcttaagggaaatgtaccagcaagcccctcaaacaccagagctgctctcccaaggccaggaggagcaaggagcagaacagcgacagttcctcccacactgagcctttaaccaggcttccacacgctcaagaagttcacctgtccaaagctgttactgtccccaagcaatttcagccttacagacstttgcccatgaacgcttgctagctcaaccagctgaaaggcttggaaaaaagagatttgtattaaggatttaacgtggattag

SEQ ID NO: 63077 - DNA, 600 bp, Chicken  19866894325763_3
aaaatgacaccaaaaaagctatgactaaatagagacaggcatctggaatgggcacactttaatgtattaagctgtcactgrgrttcctttggttataaccctggctgctggctgttcttaagggaaatgtaccagcaagcccctcaaacaccagagctgctctcccaaggccaggaggagcaaggagcagaacagcgacagttcctcccacactgagcctttaaccaggcttccacacgctcaagaagttcacctgtccaaagctgttactgtccccaagcaatttcagccttacagacstttgcccatgaacgcttgctagctcaaccagctgaaaggcttggaaaaaagagatttgtattaaggatttaacgtggattaggaatcgagcccagtgtctactccaaataccttttctaaatgaagtgaatgatttttaaccgtaacagttttcttgtctagagatcatccaccagaacagaaaaaaatcactcgggaaagcttgaaattgaagttttccctgatatccaactgaattttaattcatttacatgcaacgtgtagctgcaggatttgcccacataaaaatggctaacccca

SEQ ID NO: 63078 - DNA, 599 bp, Chicken  19866894325764_1
  misc_feature (1)..(181): n is any nucleotide
nnnnnnnnnnnnnnnnnnnnnnnnnnnnnnnnnnnnnnnnnnnnnnnnnnnnnnnnnnnnnnnnnnnnnnnnnnnnnnnnnnnnnnnnnnnnnnnnnnnnnnnnnnnnnnnnnnnnnnnnnnnnnnnnnnnnnnnnnnnnnnnnnnnnnnnnnnnnnnnnnnnnnnnnnnnnnnnnnnnnnctgggtttgccaaaagaaaaaagaaggcgggggagatgctaatgcgtgttggctgtgcccctttcctcgctgcgcttaagggagagcggaggaatagcacggtggtgtcagtttattgsttgtgctgccctgcgtttggctggggcctatgcaaatattgagcaggtttggggtgcgttgtgcttgggtttggtgcgtgaggtttgtggccctctacaagtagagccagccctgctgctccgggcatgtagatctggaggaagtggtgaatgtggtggttctcccttcactgccctgttccctctgacagctgcctgggtgagttgcctggtggtgctgggaaatggggtgatggtgtgctggcggtcctcagaaagtggctggtggttctcagaaagtggctacctaaaatgctaca

SEQ ID NO: 63079 - DNA, 600 bp, Chicken  19866894325764_2
ggggtgcgttgtgcttgggtttggtgcgtgaggtttgtggccctctacaagtagagccagccctgctgctccgggcatgtagatctggaggaagtggtgaatgtggtggttctcccttcactgccctgttccctctgacagctgcctgggtgagttgcctggtggtgctgggaaatggggtgatggtgtgctggcggtcctcagaaagtggctggtggttctcagaaagtggctacctaaaatgctacagaggagaggcagtgaagggtcagaagtgtctgggacaggaggacaaagagmtgctgtccctgggctgtgaaaggagctgccagccttggaaatgggaaagatgatgaagytgagtcccatagaggggwgtccttgtcccatagaggagatgggatccgccatcacaggccctcagtgggggatgcagggatagaggaggcagaagaccccctgtcagaggcagctgcctccctgcagaaccagtgctgggtcctgcacccttagtgcagcaaagatcccactgacagtgcaggtgtgggatcaaagcccggtcctcttcacgtcaatgcctgcagcagtgaacagccctgg

SEQ ID NO: 63080 - DNA, 600 bp, Chicken  19866894325764_3
gccctgctgctccgggcatgtagatctggaggaagtggtgaatgtggtggttctcccttcactgccctgttccctctgacagctgcctgggtgagttgcctggtggtgctgggaaatggggtgatggtgtgctggcggtcctcagaaagtggctggtggttctcagaaagtggctacctaaaatgctacagaggagaggcagtgaagggtcagaagtgtctgggacaggaggacaaagagmtgctgtccctgggctgtgaaaggagctgccagccttggaaatgggaaagatgatgaagytgagtcccatagaggggwgtccttgtcccatagaggagatgggatccgccatcacaggccctcagtgggggatgcagggatagaggaggcagaagaccccctgtcagaggcagctgcctccctgcagaaccagtgctgggtcctgcacccttagtgcagcaaagatcccactgacagtgcaggtgtgggatcaaagcccggtcctcttcacgtcaatgcctgcagcagtgaacagccctggggataaacatgaattatgctcactgttatgaagcagttaatgcaaacgagatctattta

SEQ ID NO: 63081 - DNA, 600 bp, Chicken  19866894325764_4
tgtagatctggaggaagtggtgaatgtggtggttctcccttcactgccctgttccctctgacagctgcctgggtgagttgcctggtggtgctgggaaatggggtgatggtgtgctggcggtcctcagaaagtggctggtggttctcagaaagtggctacctaaaatgctacagaggagaggcagtgaagggtcagaagtgtctgggacaggaggacaaagagmtgctgtccctgggctgtgaaaggagctgccagccttggaaatgggaaagatgatgaagytgagtcccatagaggggwgtccttgtcccatagaggagatgggatccgccatcacaggccctcagtgggggatgcagggatagaggaggcagaagaccccctgtcagaggcagctgcctccctgcagaaccagtgctgggtcctgcacccttagtgcagcaaagatcccactgacagtgcaggtgtgggatcaaagcccggtcctcttcacgtcaatgcctgcagcagtgaacagccctggggataaacatgaattatgctcactgttatgaagcagttaatgcaaacgagatctatttaaaatcctaagtaacggat

SEQ ID NO: 63082 - DNA, 600 bp, Chicken  19866894325773_1
gtgccctcactgcaaaaatgccattccacattttacgactgctgccgaagtctttaaagaagaccgaaaaggtaactaatttgctgttgatcgtttcggagatatttaagaactttccatctgtgctttgcaggctttgcttacggatgaggtggtaggcttgcaggtaaaattgctgttgaactaatggacgtgcatgtgcatctgaagggctgtgtcttttgggtcaaactgagttatgcttttaacagctgctttgctttcttttatttgttgtattttctgttcagtccttcgtgyaagagttctttcctatgaagtgaggcacattgtttctcagtgaaagattaataaaagataattcacagctccattccccttcatctcttgtcaggcataaaccacaagttttgtgacagacttgagaacctcaattgtataactaccccttgctcgcataaatatattacgttcctgttggttggctggcctgagtctgggatgttgtgcccttcttaagggccttcatgcttctgccttgcaggttcatctgatggccaaagctcaccatttcatttccctgcatcagctgagccattt

SEQ ID NO: 63083 - DNA, 600 bp, Chicken  19866894325779_1
cttgaatgtttccacatctctgggcaatctgttcactaaccttatggcaattttttttccccttatatcttacttccttttatcttgatggaccccgtggatcttgctctattttgtcagcctgcctctcgtaccaggatcccagaattgaacatagtgtttgagatgtcctcataagtgccacatccaggggaataatcacttctctggcactgatggctgagcacttacaaatgcagcccaagaagcagttggctttctttgctgaaagggttgctgctgatggaggcagcatatccraaacaaatccttattgtgtcctacaaaggaygcccacagcctcaggcatgacctgagtgtggctcattaacatcttgattgaggagccatagaaatggagaggcaatgaaggctgaatgccctcttgcctcttattgtaggggagatcctcagggatgtttggagtcatgggagcaggggatgtaagaaagtacttgtcatacccctcaggtcatttaagggccggtgagaatctgctgttgttgtgcagttaacgctactaaaaagctcaacttctgggtgatgatcatcctttctatt

SEQ ID NO: 63084 - DNA, 600 bp, Chicken  19866894325779_2
ttcactaaccttatggcaattttttttccccttatatcttacttccttttatcttgatggaccccgtggatcttgctctattttgtcagcctgcctctcgtaccaggatcccagaattgaacatagtgtttgagatgtcctcataagtgccacatccaggggaataatcacttctctggcactgatggctgagcacttacaaatgcagcccaagaagcagttggctttctttgctgaaagggttgctgctgatggaggcagcatatccraaacaaatccttattgtgtcctacaaaggaygcccacagcctcaggcatgacctgagtgtggctcattaacatcttgattgaggagccatagaaatggagaggcaatgaaggctgaatgccctcttgcctcttattgtaggggagatcctcagggatgtttggagtcatgggagcaggggatgtaagaaagtacttgtcatacccctcaggtcatttaagggccggtgagaatctgctgttgttgtgcagttaacgctactaaaaagctcaacttctgggtgatgatcatcctttctattgacatcatagtcaagaggagaggaggaggga

SEQ ID NO: 63085 - DNA, 599 bp, Chicken  19866894325781_1
  misc_feature (1)..(19): n is any nucleotide
nnnnnnnnnnnnnnnnnnncatgttttgatgatgtaaaaagtatcttcttccagaatcataataggcactcctgaagaaacaggaagacaggacactgtgctgcagaaaaccgacccaaaataatcatgttcttagctacaagtagaagatgatatgatacactaaattaatgattgggaattcagagtaaatatcaccctttggccaagactgaacagcatgttctgcagtaaactacttgatctttctttgctttataaatttaaaacatgaagaatttaacttttaaatgttactargatatatacgtcaacattgaattcactcattctgtagtaatccatccaaggaagggttctgtttatgttcaagtaagaggtrcaaagctcaaagtatttcttcatatttttaaaggtatatgtacaacataggcttagctaggcagtacttcagaaataagtagccagattctttccacaggttgcagagaagttatcttgtgactacaagtgaagttgtgccctggtgtttataagtgacatggatgattggttgcccaatgctctttgtttgtgaaactgacacaaaccagcttttt

SEQ ID NO: 63086 - DNA, 600 bp, Chicken  19866894325781_2
ggaagacaggacactgtgctgcagaaaaccgacccaaaataatcatgttcttagctacaagtagaagatgatatgatacactaaattaatgattgggaattcagagtaaatatcaccctttggccaagactgaacagcatgttctgcagtaaactacttgatctttctttgctttataaatttaaaacatgaagaatttaacttttaaatgttactargatatatacgtcaacattgaattcactcattctgtagtaatccatccaaggaagggttctgtttatgttcaagtaagaggtrcaaagctcaaagtatttcttcatatttttaaaggtatatgtacaacataggcttagctaggcagtacttcagaaataagtagccagattctttccacaggttgcagagaagttatcttgtgactacaagtgaagttgtgccctggtgtttataagtgacatggatgattggttgcccaatgctctttgtttgtgaaactgacacaaaccagctttttaattatagcaactacctgcccttccttaatttcaagtacattaggtgatgaagtctaagaaagaattaatcactgtaatcatt

SEQ ID NO: 63087 - DNA, 599 bp, Chicken  19866894325785_1
  misc_feature (1)..(93): n is any nucleotide
nnnnnnnnnnnnnnnnnnnnnnnnnnnnnnnnnnnnnnnnnnnnnnnnnnnnnnnnnnnnnnnnnnnnnnnnnnnnnnnnnnnnnnnnnnnnngtcggtattgttggtaagtggctgttggtttgcgtgggctaagcacagaccagtggcttaggcttgaaaggctccttgcttccaagaaaagcttcctgctgttcttgtctgtggcctaatggactggtccatcgttctcctaacgtcaactgtttggaagcgtgagatgtgacaaagtccccctccttgggtcctcctttctggcayggctcacttgctggccttggcttggaaggcgaagtggtgatgtgaagcgtaaaacacactgtgtggaaaagaygataatggagtgcctcatgtattgcatgcraaagcattcctgccatggtgctacatactgctctgccatcctaatttgctttcacaggcttcagtataatcattctttgtatttcctaagggacgtgaagactgaatatgagtttggtcaatggtttcattgttggtttctyccagtgctataaagcaaatacaaaatattagcgacaggcrgggtacatctcatt

SEQ ID NO: 63088 - DNA, 599 bp, Chicken  19866894325785_2
  misc_feature (1)..(20): n is any nucleotide
nnnnnnnnnnnnnnnnnnnngtcggtattgttggtaagtggctgttggtttgcgtgggctaagcacagaccagtggcttaggcttgaaaggctccttgcttccaagaaaagcttcctgctgttcttgtctgtggcctaatggactggtccatcgttctcctaacgtcaactgtttggaagcgtgagatgtgacaaagtccccctccttgggtcctcctttctggcayggctcacttgctggccttggcttggaaggcgaagtggtgatgtgaagcgtaaaacacactgtgtggaaaagaygataatggagtgcctcatgtattgcatgcraaagcattcctgccatggtgctacatactgctctgccatcctaatttgctttcacaggcttcagtataatcattctttgtatttcctaagggacgtgaagactgaatatgagtttggtcaatggtttcattgttggtttctyccagtgctataaagcaaatacaaaatattagcgacaggcrgggtacatctcattctcattatgtttcatacaatccaagatggatgtctttatcaaaagtgcttacgaggctgtttgagcaggagaa

SEQ ID NO: 63089 - DNA, 600 bp, Chicken  19866894325785_3
ttggtaagtggctgttggtttgcgtgggctaagcacagaccagtggcttaggcttgaaaggctccttgcttccaagaaaagcttcctgctgttcttgtctgtggcctaatggactggtccatcgttctcctaacgtcaactgtttggaagcgtgagatgtgacaaagtccccctccttgggtcctcctttctggcayggctcacttgctggccttggcttggaaggcgaagtggtgatgtgaagcgtaaaacacactgtgtggaaaagaygataatggagtgcctcatgtattgcatgcraaagcattcctgccatggtgctacatactgctctgccatcctaatttgctttcacaggcttcagtataatcattctttgtatttcctaagggacgtgaagactgaatatgagtttggtcaatggtttcattgttggtttctyccagtgctataaagcaaatacaaaatattagcgacaggcrgggtacatctcattctcattatgtttcatacaatccaagatggatgtctttatcaaaagtgcttacgaggctgtttgagcaggagaaatcttttgtaaaacgttattttgggatcttt

SEQ ID NO: 63090 - DNA, 600 bp, Chicken  19866894325785_4
tttggaagcgtgagatgtgacaaagtccccctccttgggtcctcctttctggcayggctcacttgctggccttggcttggaaggcgaagtggtgatgtgaagcgtaaaacacactgtgtggaaaagaygataatggagtgcctcatgtattgcatgcraaagcattcctgccatggtgctacatactgctctgccatcctaatttgctttcacaggcttcagtataatcattctttgtatttcctaagggacgtgaagactgaatatgagtttggtcaatggtttcattgttggtttctyccagtgctataaagcaaatacaaaatattagcgacaggcrgggtacatctcattctcattatgtttcatacaatccaagatggatgtctttatcaaaagtgcttacgaggctgtttgagcaggagaaatcttttgtaaaacgttattttgggatctttcccaatgggatycttcgtgcaagagaactggccagctttttgcaaacaaactcagccaacattagctttggacatctgcttgttttaaggttgccttcacaattttctctgtagctggagattggtacttgatgtctatgtg

SEQ ID NO: 63091 - DNA, 600 bp, Chicken  19866894325785_5
cctcctttctggcayggctcacttgctggccttggcttggaaggcgaagtggtgatgtgaagcgtaaaacacactgtgtggaaaagaygataatggagtgcctcatgtattgcatgcraaagcattcctgccatggtgctacatactgctctgccatcctaatttgctttcacaggcttcagtataatcattctttgtatttcctaagggacgtgaagactgaatatgagtttggtcaatggtttcattgttggtttctyccagtgctataaagcaaatacaaaatattagcgacaggcrgggtacatctcattctcattatgtttcatacaatccaagatggatgtctttatcaaaagtgcttacgaggctgtttgagcaggagaaatcttttgtaaaacgttattttgggatctttcccaatgggatycttcgtgcaagagaactggccagctttttgcaaacaaactcagccaacattagctttggacatctgcttgttttaaggttgccttcacaattttctctgtagctggagattggtacttgatgtctatgtgaaagtattgccaaaaaagtgatgatgttctgccaactgtt

SEQ ID NO: 63092 - DNA, 600 bp, Chicken  19866894325785_6
ccatggtgctacatactgctctgccatcctaatttgctttcacaggcttcagtataatcattctttgtatttcctaagggacgtgaagactgaatatgagtttggtcaatggtttcattgttggtttctyccagtgctataaagcaaatacaaaatattagcgacaggcrgggtacatctcattctcattatgtttcatacaatccaagatggatgtctttatcaaaagtgcttacgaggctgtttgagcaggagaaatcttttgtaaaacgttattttgggatctttcccaatgggatycttcgtgcaagagaactggccagctttttgcaaacaaactcagccaacattagctttggacatctgcttgttttaaggttgccttcacaattttctctgtagctggagattggtacttgatgtctatgtgaaagtattgccaaaaaagtgatgatgttctgccaactgttcctttcatgtgaacagcttcttagaaatgaccgctttatgctgaagatcttctttgcattgctcccttggatgaggaccatttgatcgtgtcctcacagttatctgaaatgagcaatacatgtttcctga

SEQ ID NO: 63093 - DNA, 600 bp, Chicken  19866894325788_1
ttggtgtgatacatgagttttcagtaacagcaaaaaaaaaaagaagaaaaaagagaacagtaaaaccctttcatatggtgaagaatgggaccaactgattgagtggagttcagcagcgctgctatagagccacagtaaataaaatcagaatggtagcagtcgtgtgatttagactttcctctttagaaaatatattttactggtccatcaacataaattctgccacaggtaatagatagtgttagctgaaattttctcaaaattctcactatggttagctaaaatcagtttctatcttayagcacgttctgagctttgattctgtaatcaaattatgaatgaacgtacgagaactacactactttacttttctcaaaacatttaattgacaggtgaccactctgatacttgttacaaaaacaataaaagatctgaaaagaacctgaagatgtcatcccattcacaccctgcaactgataagctcaagtagaactacgctgtcactgcaaggtatttgtataacctataattaacactccacaataagggacatttaacaacctccacgcttagctttttttgccctgtaagtatcgatat

SEQ ID NO: 63094 - DNA, 600 bp, Chicken  19866894325794_1
tgagtgaacctaaagatgacaaccagtggcacttcaaattctgaaaatacgggaacgcgaaagaacattaaatttaaagaatagcagcactcatgtatgggctttgtaccgactgtgtcatttgttcacctctgtaagtaaagttgtttttgaaacctgtatgtggaaatactgcagttctgagggctctccagcagcccagcctgctgcgcactgctccctgccattgccttatctccgcgcaagccgttgcctactgcagagctttggagaaaacagggcgcttctgtggaagggcasagtatgaaggataagtgagatagagtgtgaaaggcgagaagtggtgtaccacgtgtgcctactctgttctgtgcatttattagtgacacactgcttaaggaagcctgtatgctttgtacatggcctccacctggatgtgtgtgatctgtgtcccaagaaacttgttaatccatcttaaggagagtgaagagttgtgaggaaaaaaacaacgaaacttttgaaatgaaggctgattaaggccgttatataaaaaagtagcacttaggaaaaacttcagcacagcagggagagaaaaggggt

SEQ ID NO: 63095 - DNA, 600 bp, Chicken  19866894325797_1
cagtctccagccttcaaccactgcagtgagtttcctgcagtgccacagcacaagcacctcaaagccctgtgctgccaatacagccagggggctgagggcagacccatggctccgagctgccccagggtgatgtgcagcagcagcaggagctgctatctaccccagcatgggctgggcaacctgtgccatgctgatagcaagcagggagcacacagagctgggagaaacactcagcaactgctgccccaaaggcacagcagaaggctcctattccttttagcatgaggatgatggagccarccacggatggcacccatggrccccacaattgtctcagcagttccccagcttacacaaagcagccaactaamatcagtttttaacagaactccagtgctctgtactccaaccacctcctgatgtgcattgcaagccttcaacaagggagcagtaggaaacatgcagcaccaggcagggctgaacctcagtaactgggggcactgcaactccatctgctacattcgtgcctggggccatcaaaccagtcacagttgctgcacctgctgcaaggccaagccaaaggctccaacagaaaggcaa

SEQ ID NO: 63096 - DNA, 600 bp, Chicken  19866894325797_2
ctgcagtgagtttcctgcagtgccacagcacaagcacctcaaagccctgtgctgccaatacagccagggggctgagggcagacccatggctccgagctgccccagggtgatgtgcagcagcagcaggagctgctatctaccccagcatgggctgggcaacctgtgccatgctgatagcaagcagggagcacacagagctgggagaaacactcagcaactgctgccccaaaggcacagcagaaggctcctattccttttagcatgaggatgatggagccarccacggatggcacccatggrccccacaattgtctcagcagttccccagcttacacaaagcagccaactaamatcagtttttaacagaactccagtgctctgtactccaaccacctcctgatgtgcattgcaagccttcaacaagggagcagtaggaaacatgcagcaccaggcagggctgaacctcagtaactgggggcactgcaactccatctgctacattcgtgcctggggccatcaaaccagtcacagttgctgcacctgctgcaaggccaagccaaaggctccaacagaaaggcaacctaaaagcacaaaaacaac

SEQ ID NO: 63097 - DNA, 600 bp, Chicken  19866894325797_3
ctgccaatacagccagggggctgagggcagacccatggctccgagctgccccagggtgatgtgcagcagcagcaggagctgctatctaccccagcatgggctgggcaacctgtgccatgctgatagcaagcagggagcacacagagctgggagaaacactcagcaactgctgccccaaaggcacagcagaaggctcctattccttttagcatgaggatgatggagccarccacggatggcacccatggrccccacaattgtctcagcagttccccagcttacacaaagcagccaactaamatcagtttttaacagaactccagtgctctgtactccaaccacctcctgatgtgcattgcaagccttcaacaagggagcagtaggaaacatgcagcaccaggcagggctgaacctcagtaactgggggcactgcaactccatctgctacattcgtgcctggggccatcaaaccagtcacagttgctgcacctgctgcaaggccaagccaaaggctccaacagaaaggcaacctaaaagcacaaaaacaacagaatgaaccaccttcgctcctagcgcaacttacaaacagggagagttcct

SEQ ID NO: 63098 - DNA, 600 bp, Chicken  19866894325806_1
caatagccttatgattcacagttgcctctttgctatacgcacatgtgcacaagtatattaaacagttaatccaaaggtctaattccgaagtgttttgcacaagcacgtgtgattagttgtgcaaggggatagggacgtcctggtaactgaactcctctgccctgctcaggaccatcccttggttgttgaatggggtggtcttggatggaggtatacatggagctggggctccaggaggatcaaacttgtggctgctccatgacctgctgctgaagctgaaccattgggaccagctcgagkatagtgctgtgggctgattccttctgcagcgtcagaccctgcagacaggctgtgctggtgctgcctgggcctctcctttccctctgctttttcagaacagcatctcccagatgctggcagtcaccaagtctgagttgctgctgctgtgtctgggagggctctgatgggcacatgaggcaatctggcacagggtttgggggatttctccttagtttctcaagacttccttttttcactactcttttgggagacatctacttgcttgaaaacctcttgctgcagcttctctttacagcagac

SEQ ID NO: 63099 - DNA, 600 bp, Chicken  19866894325813_1
gcaaaacagccatcctggggctgacagtatttccagtttccaaaatgcccacgtaggctacaaactaaagagaccggcgtgatgctgtgatccagcgtgatccagcacccaggcgtgtcggggagtctcaggctactgcagtttgctgcagtcattatggtccttttcaacccaggccattctatgattctataagaggctgtgggacagggctgggatggaccaccactctgcaccaaccccagcgtgctgcagcaaggcctccaaacgtagatttttcagcactttgacaacaaacgygctttacacatgtacacacccacactcagaatgattcaatcaaaaccctatttcccttacaaaggagttttgatagaaaacgttctatttgccccagtcaatttggcttaagcatcagtcaaaatgttttctggaattgacaccgttggtggcagagcaggcgaacaagctctgagataatctgcctccaaaggtgggtactgacctttcagttgcattatttttctcrtttaaaataaaggtaacttttaaaatagtgctacttttctgctgatgctgctgggagacgctgagccaacg

SEQ ID NO: 63100 - DNA, 600 bp, Chicken  19866894325813_2
tctgcaccaaccccagcgtgctgcagcaaggcctccaaacgtagatttttcagcactttgacaacaaacgygctttacacatgtacacacccacactcagaatgattcaatcaaaaccctatttcccttacaaaggagttttgatagaaaacgttctatttgccccagtcaatttggcttaagcatcagtcaaaatgttttctggaattgacaccgttggtggcagagcaggcgaacaagctctgagataatctgcctccaaaggtgggtactgacctttcagttgcattatttttctcrtttaaaataaaggtaacttttaaaatagtgctacttttctgctgatgctgctgggagacgctgagccaacggggctgtgtccctgctacagaatcgcgtggccaatcttaatatcacttaattttcaaatgaggaatttggtagtaaacaacctttccgttgtacacaaacatttttaatttcatgccctgctaatcatacatctgttagagttcctcttccatccactgctgtagcgataataaaagaaaaaaygtcgtgctacaaatgtggtttgcctaaaatgaaaactgcataata

SEQ ID NO: 63101 - DNA, 555 bp, Chicken  19866894325813_3
cctccaaaggtgggtactgacctttcagttgcattatttttctcrtttaaaataaaggtaacttttaaaatagtgctacttttctgctgatgctgctgggagacgctgagccaacggggctgtgtccctgctacagaatcgcgtggccaatcttaatatcacttaattttcaaatgaggaatttggtagtaaacaacctttccgttgtacacaaacatttttaatttcatgccctgctaatcatacatctgttagagttcctcttccatccactgctgtagcgataataaaagaaaaaaygtcgtgctacaaatgtggtttgcctaaaatgaaaactgcataataatcaatttccctcagcgggatgagggagggcagcaagaagcagaactcacccaatgaaggtgacagagatatagttttatgccaactggtggtcccgttccccacccgaggggtgggttacagcagccccatttcatgggcactgtcaccacagccaccactcctgtttgattttgagctttttccgtactgctgacacatgactttcgc

SEQ ID NO: 63102 - DNA, 600 bp, Chicken  19866894325816_1
gccctgggatggaggattgattcctctcctgctgatgccacccacggctgggggctgcctgggggggctgctccgctgccaggcgcggggctcagtgcctccctgggaaataaatcccagctccgaggcacacggccacgcgggatggcaccgagcggtactgccgtgcggggccgcagctccgtagccgggctgtgcagctgcagagctgggaggaagccctgagacccgtcgggatgaggcccctctccagctctgctgtgcccgaggccggctgctattgacaagcagcacttcaaraacaggtgacttcaagagaaacaaggggggaaaaaaaaacaataaaaaaaacaaccacgcacgcacacacaaatttcttcaaaccccagcaagcaggagcctggaaagcagcttcatggtgcgtttccagagatgcaaacactgtaaaaatgccaaggattctttcatcagacaggctgctgcagccagaccattttccatctgctccccacagcatccctggctccgcgcagccaataatccactctctgacaggtcattacggagagcttgaaccccaggagccgggggcgagcatgc

SEQ ID NO: 63103 - DNA, 359 bp, Chicken  19866894325816_2
accccaggagccgggggcgagcatgcaggctggaaatggaaagcactgacctctcatttcagcagcagaaagtgccgaatcaggagctctgtgcgtgctgacgaccgccccaagcctccccgcgcactgctctcaccttcctcctcctcctgcccaccttcctgcgcacacggctggagcatcccgctctgcaccctgcagccaggcccttcctttggcaaaggcgacatgcagcccacgctggagccgtggtcccgtgccctgtgcagacaggggggcacggcagcacacccgaccccrcagcgccccaatgctccgtcccatggcgaaacattgaaaatacaggcagcagacaagga

SEQ ID NO: 63104 - DNA, 600 bp, Chicken  19866894325818_1
agcttccaagactacttggaaaatctgctgcagtcaaagtgagtgggatacagagttaattcacaaaacacatcagactgtgacaggagcctaaattagccattactcgcacctacaaagtaaaatagtaagacagacaaataaataggtgtccctttgctaatactcccgttccaccacacttactgaccagttattactcagttataggagcccatcagtttttgttaaaatctgtatcaatgggtaatcaaaactgccatgctgaccttctctactgcctatctcctatggagataytcaagacctgtccggatatctaccttagtggcctattgcaggatacctgcgttagcaggagcgttggactctatgatctcttgaggtcccttctaacacctgtgattctgcgattttaaaggcttcacaggaagcctttattatgcagtcttctcaatactgttacagaatccattccacttggcagaggtggcatggcacagggccatcaaagatagcacaccaagttcatggactaggttctgggaagggctagacaaagttccatcttcaggcaactctcaagaggttacagaacac

SEQ ID NO: 63105 - DNA, 426 bp, Chicken  19866894325823_1
tgtctaacagatttgtcctgtggcatagcacaagctatactctcctatagataagctgggtagaaattcaaataaaatggatttttgtgttatgccttctaaaatatatactgatctgttattacagttaagttttatgtcatagaggaagagtttaaaaatgaacagaatttaacttcttgaagaaagacaaataggtcactactatgaaacctaacagactgtcttaacagtagaagatggaatgtaaggtggaatttctatgaatttgactttttttttttaataggaaaaaatagkgaaagtgcatttcagtgttttgtggtttgcatcagcagtgaattcattgtagccaagtatctttgtaagggctaactgaggaaaaaagtgagcataagtgaggaagaaaagtcacaggtagtagaa

SEQ ID NO: 63106 - DNA, 599 bp, Chicken  19866894325829_1
  misc_feature (1)..(76): n is any nucleotide
nnnnnnnnnnnnnnnnnnnnnnnnnnnnnnnnnnnnnnnnnnnnnnnnnnnnnnnnnnnnnnnnnnnnnnnnnnnntaattacctgcaatggacattgtttcacatctgcttctcaaaggttccagccttcttccctaccactccccccatagatttttcatcaagccaagtgaatgaaaacagaaataattgcacctgctgttatattgttgctgactataagggtctaagcaggaaccagagctttcctgtgaacagaacagcagctataaaaaggatgaggtgctgagaagacacartttgcctgagggaatagcaatgtcagaaaatcaaaaggaatataaaatgtctagacttaaacacagcctgaccgacacagagtatctccaagtatttcattcagaggaaacacttgctcataatactggcacagcttattattctatgcagggaagccatccagtaagtcgaaagaactaaatacctcaccagggaaaatcaaccttttctatccttgcaccctttcagttttgataggyaagacagagattgtgaaaatcrtatgtggagcttcacagatgggctttaagatggttat

SEQ ID NO: 63107 - DNA, 600 bp, Chicken  19866894325829_2
agagctttcctgtgaacagaacagcagctataaaaaggatgaggtgctgagaagacacartttgcctgagggaatagcaatgtcagaaaatcaaaaggaatataaaatgtctagacttaaacacagcctgaccgacacagagtatctccaagtatttcattcagaggaaacacttgctcataatactggcacagcttattattctatgcagggaagccatccagtaagtcgaaagaactaaatacctcaccagggaaaatcaaccttttctatccttgcaccctttcagttttgataggyaagacagagattgtgaaaatcrtatgtggagcttcacagatgggctttaagatggttatatagacctttaaggagacatatccccatctggcacctgttaagagtcagaatgrttctgcgtcagacagcattatggtactgaagaatttctgatgtgtggagccagaccttgtaactttctgctcactgaactcatgaagaaaaacaattgactycatcattctaaaagtgcaagattggtcttgtccagcatcaaagggaaggcttcttccttgtcttcttagaaaatgttcagtctgt

SEQ ID NO: 63108 - DNA, 600 bp, Chicken  19866894325829_3
agcagctataaaaaggatgaggtgctgagaagacacartttgcctgagggaatagcaatgtcagaaaatcaaaaggaatataaaatgtctagacttaaacacagcctgaccgacacagagtatctccaagtatttcattcagaggaaacacttgctcataatactggcacagcttattattctatgcagggaagccatccagtaagtcgaaagaactaaatacctcaccagggaaaatcaaccttttctatccttgcaccctttcagttttgataggyaagacagagattgtgaaaatcrtatgtggagcttcacagatgggctttaagatggttatatagacctttaaggagacatatccccatctggcacctgttaagagtcagaatgrttctgcgtcagacagcattatggtactgaagaatttctgatgtgtggagccagaccttgtaactttctgctcactgaactcatgaagaaaaacaattgactycatcattctaaaagtgcaagattggtcttgtccagcatcaaagggaaggcttcttccttgtcttcttagaaaatgttcagtctgtgagggcagagstagactcaagg

SEQ ID NO: 63109 - DNA, 600 bp, Chicken  19866894325829_4
gacttaaacacagcctgaccgacacagagtatctccaagtatttcattcagaggaaacacttgctcataatactggcacagcttattattctatgcagggaagccatccagtaagtcgaaagaactaaatacctcaccagggaaaatcaaccttttctatccttgcaccctttcagttttgataggyaagacagagattgtgaaaatcrtatgtggagcttcacagatgggctttaagatggttatatagacctttaaggagacatatccccatctggcacctgttaagagtcagaatgrttctgcgtcagacagcattatggtactgaagaatttctgatgtgtggagccagaccttgtaactttctgctcactgaactcatgaagaaaaacaattgactycatcattctaaaagtgcaagattggtcttgtccagcatcaaagggaaggcttcttccttgtcttcttagaaaatgttcagtctgtgagggcagagstagactcaaggggcacaaaatactagacctcaaggaaacagctgctgatttgcaccmactaagaataaattacgcatggattcatacactgttctccctgca

SEQ ID NO: 63110 - DNA, 600 bp, Chicken  19866894325829_5
gccatccagtaagtcgaaagaactaaatacctcaccagggaaaatcaaccttttctatccttgcaccctttcagttttgataggyaagacagagattgtgaaaatcrtatgtggagcttcacagatgggctttaagatggttatatagacctttaaggagacatatccccatctggcacctgttaagagtcagaatgrttctgcgtcagacagcattatggtactgaagaatttctgatgtgtggagccagaccttgtaactttctgctcactgaactcatgaagaaaaacaattgactycatcattctaaaagtgcaagattggtcttgtccagcatcaaagggaaggcttcttccttgtcttcttagaaaatgttcagtctgtgagggcagagstagactcaaggggcacaaaatactagacctcaaggaaacagctgctgatttgcaccmactaagaataaattacgcatggattcatacactgttctccctgcacgcactatggtttgcaagtgattcctgggaaaggtcacttatcttcctgccttttaaagtacagctgactcctcagagcagttgagagagtggttaatcaag

SEQ ID NO: 63111 - DNA, 600 bp, Chicken  19866894325829_6
tgtgaaaatcrtatgtggagcttcacagatgggctttaagatggttatatagacctttaaggagacatatccccatctggcacctgttaagagtcagaatgrttctgcgtcagacagcattatggtactgaagaatttctgatgtgtggagccagaccttgtaactttctgctcactgaactcatgaagaaaaacaattgactycatcattctaaaagtgcaagattggtcttgtccagcatcaaagggaaggcttcttccttgtcttcttagaaaatgttcagtctgtgagggcagagstagactcaaggggcacaaaatactagacctcaaggaaacagctgctgatttgcaccmactaagaataaattacgcatggattcatacactgttctccctgcacgcactatggtttgcaagtgattcctgggaaaggtcacttatcttcctgccttttaaagtacagctgactcctcagagcagttgagagagtggttaatcaagaagccctgtgtgagcattcagctgttttataagactcttaaaaggacattcacctttgaacttacttcaaatacaagattgccctaatctggaagt

SEQ ID NO: 63112 - DNA, 600 bp, Chicken  19866894325829_7
taaggagacatatccccatctggcacctgttaagagtcagaatgrttctgcgtcagacagcattatggtactgaagaatttctgatgtgtggagccagaccttgtaactttctgctcactgaactcatgaagaaaaacaattgactycatcattctaaaagtgcaagattggtcttgtccagcatcaaagggaaggcttcttccttgtcttcttagaaaatgttcagtctgtgagggcagagstagactcaaggggcacaaaatactagacctcaaggaaacagctgctgatttgcaccmactaagaataaattacgcatggattcatacactgttctccctgcacgcactatggtttgcaagtgattcctgggaaaggtcacttatcttcctgccttttaaagtacagctgactcctcagagcagttgagagagtggttaatcaagaagccctgtgtgagcattcagctgttttataagactcttaaaaggacattcacctttgaacttacttcaaatacaagattgccctaatctggaagttaagcaggatttttttatttttatttttttacaaaccaccaagacctttacacttta

SEQ ID NO: 63113 - DNA, 600 bp, Chicken  19866894325831_1
atctgctaattctacacttggagataggtgggtgtattaatcccagcagcttcgttgttaccctttgtagcagctgtgtgcttcattttgtgatggctcctttttatgtagctgtcagtttaaaagtgtagttctctttttctactccttatgcatagaattactcaagctaaattccttgtggtatctaagacatggctcatgtatctgatagctgtactggtggagaaagacctggggaataactagtagtgaagtagtgtatgcaactgtggttgtattggggctgctccttggtcrtgagaaggaccattgctttttgttcraagagatgaaggaagagttcactaatgtgtgtgtatctttgtggaactcttttcaaggagaggagtttcaaagcagtttagtggtgaggatttgaggaaaatcagtctaraatgcttttgcttcctgacagatgctggttgcatacagttccctgtctgtgaaagaatataactccacgttcttggggatactgataagagctcccactttcttcaccatggccttgaggaagtcatttaccaacttggtgtatcaggaaacagctaactattg

SEQ ID NO: 63114 - DNA, 600 bp, Chicken  19866894325831_2
ggtgggtgtattaatcccagcagcttcgttgttaccctttgtagcagctgtgtgcttcattttgtgatggctcctttttatgtagctgtcagtttaaaagtgtagttctctttttctactccttatgcatagaattactcaagctaaattccttgtggtatctaagacatggctcatgtatctgatagctgtactggtggagaaagacctggggaataactagtagtgaagtagtgtatgcaactgtggttgtattggggctgctccttggtcrtgagaaggaccattgctttttgttcraagagatgaaggaagagttcactaatgtgtgtgtatctttgtggaactcttttcaaggagaggagtttcaaagcagtttagtggtgaggatttgaggaaaatcagtctaraatgcttttgcttcctgacagatgctggttgcatacagttccctgtctgtgaaagaatataactccacgttcttggggatactgataagagctcccactttcttcaccatggccttgaggaagtcatttaccaacttggtgtatcaggaaacagctaactattgcctacctcacagggacactgagccaa

SEQ ID NO: 63115 - DNA, 550 bp, Chicken  19866894325831_3
tttttctactccttatgcatagaattactcaagctaaattccttgtggtatctaagacatggctcatgtatctgatagctgtactggtggagaaagacctggggaataactagtagtgaagtagtgtatgcaactgtggttgtattggggctgctccttggtcrtgagaaggaccattgctttttgttcraagagatgaaggaagagttcactaatgtgtgtgtatctttgtggaactcttttcaaggagaggagtttcaaagcagtttagtggtgaggatttgaggaaaatcagtctaraatgcttttgcttcctgacagatgctggttgcatacagttccctgtctgtgaaagaatataactccacgttcttggggatactgataagagctcccactttcttcaccatggccttgaggaagtcatttaccaacttggtgtatcaggaaacagctaactattgcctacctcacagggacactgagccaacatcactatcacagctttgaaagtaacaagtgctttatctctgtgtgctttccaaaagtg

SEQ ID NO: 63116 - DNA, 599 bp, Chicken  19866894325833_1
  misc_feature (1)..(60): n is any nucleotide
nnnnnnnnnnnnnnnnnnnnnnnnnnnnnnnnnnnnnnnnnnnnnnnnnnnnnnnnnnnntggcttcatgtctctcccttaaattcacctgcttttcccacgtttccctgttggtcttcccaactcgtggcctttcagccagactgtaactgctagtgacaggctgtgatcatccccttgctatacaaggactgataggggaaaaaaaaaaaaaaaaaaaaggagagggagcagagtgggaggaagaaaggtgtccctgcactcagccccttgatcttgtctgtcttccctgatggcttytcagcctcccagtgtactgatggttgctgtttgcccttggttaaagagcccaactttgggcagggagcctctgcaaactgctgggaagcagcaggaaattctgccagcagttcctcgggaagctcctttggaagccctggccatgctccttgtgctttctcccatcgaatacccttctcttccaggcagtgttagcaggacctgtggatgagctcctgtctctggggtaagaacactttcttgccatgcacctggctctgtagcatggcctcagctggctgtgtgctctttgcattcct

SEQ ID NO: 63117 - DNA, 600 bp, Chicken  19866894325838_1
tgtgtatagccagatttgcctggtcccaggtgaaagatctggcacttgctcctgttaaacttcatgtagttagaagtgagcatgagttacagtggctgatgtggggcactccagtgtggcagcaaatacagtgtgggctgagctgctgctgagtgcaaccacgcttccccgtggctggctctcctgctgctccctcagctccctctccccagctgacctgcaagagtcagttaaacctgatttggtggtacgagcagatggatggatccagcattgagagcctcctctaagggactgtcrcacccaaaagyagtattgggttcatggaactactctcttccttgagctgagatctgacttcctcttctgtgttctccagcctctggaagagatcagtgccagctgaaagttgacggttgctctggtgtttacttgtccagagcagcgccttgctagtaggaatttcactcttgtgatgcactgctacttaggctgctgtttctagggtacataatttggctctggctgaaattcttccccttgaatgcagtctgagaggaggattttgcctgaactgtttccgcagccagtatctacatt

SEQ ID NO: 63118 - DNA, 600 bp, Chicken  19866894325838_2
agatttgcctggtcccaggtgaaagatctggcacttgctcctgttaaacttcatgtagttagaagtgagcatgagttacagtggctgatgtggggcactccagtgtggcagcaaatacagtgtgggctgagctgctgctgagtgcaaccacgcttccccgtggctggctctcctgctgctccctcagctccctctccccagctgacctgcaagagtcagttaaacctgatttggtggtacgagcagatggatggatccagcattgagagcctcctctaagggactgtcrcacccaaaagyagtattgggttcatggaactactctcttccttgagctgagatctgacttcctcttctgtgttctccagcctctggaagagatcagtgccagctgaaagttgacggttgctctggtgtttacttgtccagagcagcgccttgctagtaggaatttcactcttgtgatgcactgctacttaggctgctgtttctagggtacataatttggctctggctgaaattcttccccttgaatgcagtctgagaggaggattttgcctgaactgtttccgcagccagtatctacattcactgcagaaa

SEQ ID NO: 63119 - DNA, 600 bp, Chicken  19866894325840_1
aattgagctgcatgctcaatattaagaagcccaacagtcttggcaatgttgtgatgtcagttttggatgaacaaagggatttggtcttttctctgatttgcgatgaatgctggatgattttctgcccaccaatataatttttaatctggtatgtattttatctcttaatcatgattgtgctggagggtgagggttttgttgccgtcaaaaccatttactcctacaagtcaaaagaaaagtcttccagtttcactatattttaggagctgagcaacaacatcagtcagagagaccaaatamtgatatcctctgccagcagcagatttgtaaagcaatgatattttttgtccagagaccaagagttggataaaagtattttatcctagatgctgcaaattatcagactacactgaaagtattttcattcccttattgtgaagtattttttgttcatatgcttggttttttttatgacagggtattatgcctgcaaaaaaacatgctcatcagcactgttagcattattatgacaaaatgttattttccagtttaagtgccacttcacaagctacaggttttaaagctgtcacaacagagaca

SEQ ID NO: 63120 - DNA, 600 bp, Chicken  19866894325845_1
aaaaacatagcaactaaaacacaacagatttagcatttcaaaaaagttggaacatttttataaacaaattgaaaatatctttaattgaaaatgaaaccaatctagaatattgtagtagatctctaatgacaacagcatacattttaactgaatgaaattggaaagcattgaagtaacaggaaataaacatccaggattttcaagctttccacctcctaaaccaatggttaacttcgaaacagagcagagaatcttctatgtgcagcatttacaaaaatgcaacagcaacataaccactargaaacaaattcagaaacacaaaagaaaataagaaacttggaaaaagcagactaagcagagcatagcttgactgagttgcatattatctcatttcaggcaatcaactccacaggcagaggttaacaagtccagtttttgaggatccaccatttcaggtaggttacatttcacaccactatctagtacaatgctcagatttgtccagaactgagcttcaggaacatattcacactcatacaaagtcagaaacaagccactattaacctgtagaacgtagatggaaaggccaatcgaccacca

SEQ ID NO: 63121 - DNA, 600 bp, Chicken  19866894325857_1
gcatttgcagcaaagatctcccagcgcagccctgcccagcctggaggagcacctgaacgttcaagcccatcgttgtggcctctgggcttcagctcttctccgggaaggtccctctgccctcacacagcccagggcctttctggacgtttcacaaggattggcttttggggagatgctctccagggaggaacccacgtgggctggaagggacaaaccggtccattgacagcgatcacagcgtaaaatcagcataaaattgagagcacggggctgtttgttgggctgcagcttgctccgagyggaagggttaactggctgctttgactggagaggatattttaaatccacaactgggtggggattagccaaatgtttctttccccgtcctcttccttctgacaaatagatcaaagtgatctatttatccagcactaagtccagattgagtaaaaactgtctgccgttggaccacagaggctcatctgaatatggagcaaaccctgaaaaacagccmttttccccatgtttccccctgaagctttgacagccaaagagctaaatggagatttctattcaacttggctttcccacacaaacatg

SEQ ID NO: 63122 - DNA, 600 bp, Chicken  19866894325857_2
ccggtccattgacagcgatcacagcgtaaaatcagcataaaattgagagcacggggctgtttgttgggctgcagcttgctccgagyggaagggttaactggctgctttgactggagaggatattttaaatccacaactgggtggggattagccaaatgtttctttccccgtcctcttccttctgacaaatagatcaaagtgatctatttatccagcactaagtccagattgagtaaaaactgtctgccgttggaccacagaggctcatctgaatatggagcaaaccctgaaaaacagccmttttccccatgtttccccctgaagctttgacagccaaagagctaaatggagatttctattcaacttggctttcccacacaaacatgccccagcggagaggaagacagataggctgggtgctgctgtatttccaaatgacatttgccataaatacagtatcatgggtgatgtgctcrggttccttaatccaacttcatccataaagcgctgtcccagctcaagacaatgaactgcactcgagcagccagggctcaccggcgaggagcactgccagctctccttttctggcctccttttccc

SEQ ID NO: 63123 - DNA, 600 bp, Chicken  19866894325857_3
tccttctgacaaatagatcaaagtgatctatttatccagcactaagtccagattgagtaaaaactgtctgccgttggaccacagaggctcatctgaatatggagcaaaccctgaaaaacagccmttttccccatgtttccccctgaagctttgacagccaaagagctaaatggagatttctattcaacttggctttcccacacaaacatgccccagcggagaggaagacagataggctgggtgctgctgtatttccaaatgacatttgccataaatacagtatcatgggtgatgtgctcrggttccttaatccaacttcatccataaagcgctgtcccagctcaagacaatgaactgcactcgagcagccagggctcaccggcgaggagcactgccagctctccttttctggcctccttttccctccttcccatcccaaatcccagcgctgctgtacccgagctggcagggacgggctgtgctgggctgctgtcagcaggaggcacaatgtgccttccccagccaggctgcagtgcagcagtgcagctccctcctgcaaggctgggagccctgagatgagctctgtttgggctccttgaa

SEQ ID NO: 63124 - DNA, 600 bp, Chicken  19866894325857_4
ttccttaatccaacttcatccataaagcgctgtcccagctcaagacaatgaactgcactcgagcagccagggctcaccggcgaggagcactgccagctctccttttctggcctccttttccctccttcccatcccaaatcccagcgctgctgtacccgagctggcagggacgggctgtgctgggctgctgtcagcaggaggcacaatgtgccttccccagccaggctgcagtgcagcagtgcagctccctcctgcaaggctgggagccctgagatgagctctgtttgggctccttgaagwgctgtggatgcattaccctctctgacagatgggaccgtacaactcaaacccagcgaggttttccagcccaaattcttgagcttctccaagtggaacagcgttggcaagcagagaaagaaaagcagaggaaagttgggaatgaaaacagtaaacattaggaaagggtcccacaccatcactggaacaccaagacaaccactgcttagaagtttcagttttccccttcttctttgctttcagaaacaattcagacatgtaactgtgccatcagattaggaaggagccatttatagaaaaaaa

SEQ ID NO: 63125 - DNA, 574 bp, Chicken  19866894325857_5
gaacaccaagacaaccactgcttagaagtttcagttttccccttcttctttgctttcagaaacaattcagacatgtaactgtgccatcagattaggaaggagccatttatagaaaaaaatctgtgtggccctgacacacaaatagagtcaattaacctgcaaggggaagacaaggaaacaggctgatgaaaaaggaacagttacgtaatttgtcctcgtctcggtctgccttctctcaaagtcaacagcacgtcctactaaaggcaatggggagcactgccccagcagaccaggagcctsatgttcgttttaawgctcctgtttttccctggcagtggatycttgaacacctttgggaatggagatccttgctgcccaggcagcttgcacgttgcatgtgaaatgcaggaacagtttgcatgctctcctatgatgcaggacagcagtgagatgctgtcccagcctgggcatgcacacacacactgcccaggagctgcaacaaacctgctttggatcacattaagtcaatcaaggaaccaaggagaaaggccaacaatccattgctgcgctccct

SEQ ID NO: 63126 - DNA, 560 bp, Chicken  19866894325857_6
ccactgcttagaagtttcagttttccccttcttctttgctttcagaaacaattcagacatgtaactgtgccatcagattaggaaggagccatttatagaaaaaaatctgtgtggccctgacacacaaatagagtcaattaacctgcaaggggaagacaaggaaacaggctgatgaaaaaggaacagttacgtaatttgtcctcgtctcggtctgccttctctcaaagtcaacagcacgtcctactaaaggcaatggggagcactgccccagcagaccaggagcctsatgttcgttttaawgctcctgtttttccctggcagtggatycttgaacacctttgggaatggagatccttgctgcccaggcagcttgcacgttgcatgtgaaatgcaggaacagtttgcatgctctcctatgatgcaggacagcagtgagatgctgtcccagcctgggcatgcacacacacactgcccaggagctgcaacaaacctgctttggatcacattaagtcaatcaaggaaccaaggagaaaggccaacaatccattgctgcgctccct

SEQ ID NO: 63127 - DNA, 533 bp, Chicken  19866894325857_7
cttcttctttgctttcagaaacaattcagacatgtaactgtgccatcagattaggaaggagccatttatagaaaaaaatctgtgtggccctgacacacaaatagagtcaattaacctgcaaggggaagacaaggaaacaggctgatgaaaaaggaacagttacgtaatttgtcctcgtctcggtctgccttctctcaaagtcaacagcacgtcctactaaaggcaatggggagcactgccccagcagaccaggagcctsatgttcgttttaawgctcctgtttttccctggcagtggatycttgaacacctttgggaatggagatccttgctgcccaggcagcttgcacgttgcatgtgaaatgcaggaacagtttgcatgctctcctatgatgcaggacagcagtgagatgctgtcccagcctgggcatgcacacacacactgcccaggagctgcaacaaacctgctttggatcacattaagtcaatcaaggaaccaaggagaaaggccaacaatccattgctgcgctccct

SEQ ID NO: 63128 - DNA, 600 bp, Chicken  19866894325859_1
cataccagttaccttccataactcagaatgcaaacaattgagatgtgatgtgattcctgtttgaccagattacttatcagaaaaaaagttttggaaatcctgccaccatgctgttttctccttgccagaaatgcaaaaaagaggagacattactggccaaatatctcactttgagtcatccctggcatggtcagtctgccaaggcaaatggtacaggactggaaatgagaagaggcaaaatcctattagaaatactccaaaaaggcatgtttcaaagaagagctgggaaaggaaagattkatggcagtaacttcactgataccaactgagaagtattccccagttcatcctgccagtatttgtcttgatgacacacatgcacacacaccaatggaggaaacactacaatcaaaatcaaaataatacaagtggatttgtcttattggcagataggagtcttgtgcagctccctgtagagaatgcaaggtaatgagattagggatgaaaaataagatactgtataaagtcaggaaagcaagcatgagagagaccccagggtagttgtggatcatttcacttaagccctgtgtttgccaacaa

SEQ ID NO: 63129 - DNA, 600 bp, Chicken  19866894325859_2
ggagtcttgtgcagctccctgtagagaatgcaaggtaatgagattagggatgaaaaataagatactgtataaagtcaggaaagcaagcatgagagagaccccagggtagttgtggatcatttcacttaagccctgtgtttgccaacaagaacaagcaaagtaagctgtaggatatttacaaccaatatgtatgcaggtatagtacatggaagtactggcacagtgcctctgaagtattggtttgaggctcttgcttgatctttgaggcacaatgtgtcaatgtgttggcgtaggcatgtrtctccttatgaatattcaggctagtctgctggtttcatattgtattttcagtattccagtgtagcaactattttcccatcaggcagacaggaaaatttatgtgaatttttgaacatgagatttaaaatatttctacctgttaattttccttaacaataaaccttaattatattatagacaattgcatacttatagtcatgctgcattaatatataagccagaattctgccaatgtttattttgctatatattttatgttgcaccaaattttcctttaaaacaaaccaaagcaaaaaaaaa

SEQ ID NO: 63130 - DNA, 600 bp, Chicken  19866894325864_1
gtcagagccgttttagtattgtaattatggcaccatccctaatagccaccataaatacactccacccttgttacccagagggaagaaatacttttttttctttctttctttctttttttgtaaggaaaaaaaaatatatatatatacatttggagccaagaggctatgagcaaagaggttcattgtaatttgcagcagtagcacctaggtcagtgttcaggtcagtggggttttgctgggttttgttgaaagccagcgcttctgttttgggacctcctgggtcgtgtcctgagtggagcratgggcaccaatgggcagggctagaatggctgagagccaaatgagggacggtctctggaggtgaagtgcctcagtyctgaccatgctccatgtgtcccctgctgtgaggatactcccaaagaccaacggtccagaaagcgcagttacctgcactgcgcctcttgggtggtgtggcaaaagaggatctagttataaagccttgtcggaggccaggtttgcactgagggatcaatccaggctttggacgaagagaggagattgcaggtacctaccaacagagtgcatcacaagtttgggatc

SEQ ID NO: 63131 - DNA, 600 bp, Chicken  19866894325864_2
agagggaagaaatacttttttttctttctttctttctttttttgtaaggaaaaaaaaatatatatatatacatttggagccaagaggctatgagcaaagaggttcattgtaatttgcagcagtagcacctaggtcagtgttcaggtcagtggggttttgctgggttttgttgaaagccagcgcttctgttttgggacctcctgggtcgtgtcctgagtggagcratgggcaccaatgggcagggctagaatggctgagagccaaatgagggacggtctctggaggtgaagtgcctcagtyctgaccatgctccatgtgtcccctgctgtgaggatactcccaaagaccaacggtccagaaagcgcagttacctgcactgcgcctcttgggtggtgtggcaaaagaggatctagttataaagccttgtcggaggccaggtttgcactgagggatcaatccaggctttggacgaagagaggagattgcaggtacctaccaacagagtgcatcacaagtttgggatcagagggccccgcggcagcagatcccgtcctgctgtgcgcgctgccgcgaacatcccagtaagtaggttaactgctt

SEQ ID NO: 63132 - DNA, 600 bp, Chicken  19866894325865_1
cagctccacctcttctacagctctttcttttatggctagttatggaaaaatccacttcctggatttaatgtattacttgatgaaattgcagacatttcagggactctgttaattaatttattcagctgtgtttcactgtgtctctctcttctattttcagtcacctttacccaccagaccatttacataaccagtgagcaatcagctcctgacagataggaaacctttgttgtggacgcatgtttttctttgcaacactgacactgtctacacgatgccagttgtcttcagcgactttcytacttctcctgaacttaatgtgccaacaagcctrgatttaaacagcaacagtaataacttcttgtccttctgagtcttcaagaattagggaacacacattttgcaattggaatttaatcaaacagaaccgcactgaggacttcacctccttgaaatcctgtgggatcgaagggacatgcaacactgcaattcatataaaacattttcaatttcagatgatggcttcccgaatccagaaatacttgctgccttttccttctgagagtggggattatagccatcacctcatcagggtgaagt

SEQ ID NO: 63133 - DNA, 600 bp, Chicken  19866894325865_2
gctagttatggaaaaatccacttcctggatttaatgtattacttgatgaaattgcagacatttcagggactctgttaattaatttattcagctgtgtttcactgtgtctctctcttctattttcagtcacctttacccaccagaccatttacataaccagtgagcaatcagctcctgacagataggaaacctttgttgtggacgcatgtttttctttgcaacactgacactgtctacacgatgccagttgtcttcagcgactttcytacttctcctgaacttaatgtgccaacaagcctrgatttaaacagcaacagtaataacttcttgtccttctgagtcttcaagaattagggaacacacattttgcaattggaatttaatcaaacagaaccgcactgaggacttcacctccttgaaatcctgtgggatcgaagggacatgcaacactgcaattcatataaaacattttcaatttcagatgatggcttcccgaatccagaaatacttgctgccttttccttctgagagtggggattatagccatcacctcatcagggtgaagttacccctttatatcctaagacatcatctgccagt

SEQ ID NO: 63134 - DNA, 599 bp, Chicken  19866894325875_1
  misc_feature (1)..(159): n is any nucleotide
nnnnnnnnnnnnnnnnnnnnnnnnnnnnnnnnnnnnnnnnnnnnnnnnnnnnnnnnnnnnnnnnnnnnnnnnnnnnnnnnnnnnnnnnnnnnnnnnnnnnnnnnnnnnnnnnnnnnnnnnnnnnnnnnnnnnnnnnnnnnnnnnnnnnnnnnnnnnnnnaacatttagatgccgtgtgatctacaaaatttaatacttccaccatgacaagttccagttgacaagaatgtgtgtgagtacattgaaaataggacttcttttctgtaaggattaaatgtcactgaaatggttgacacttayagttttaactactgatccatttggaaatgtttcatttccaagcagcattctaaataacagtattcttgctacaaacacttatagcaagcactttttctcatcaaaatgtatgaactggagttgtcacatttcattttcagaaaaaatacattcctctatgatcttgaaattaacaccttttattacaattttttctcataattactgtaaagtgttattatttaaatgcagttatactggattttgatctgaaaaaaagaatatgctataaattaatcataaaagtatgcaaaaatatg

SEQ ID NO: 63135 - DNA, 600 bp, Chicken  19866894325882_1
ggacctagcactaaaccttgagcctcatctgtggtgaaggtaacctgatttgctcataatgagctttgagagagtctgctaattatctcaggtaccgaaatactgccccactgggtagataagtccttcctgtctttttaatacaagtctaaaacatttatgttcagctgtcacaccaggaacgcgagtcactttggtctttgccatggaggtcccactgatgagagttgcccaaatctcatcacttacaaggagcaacacagcaaagcttatgtgtaattgccactgcaattgaactgyaggtagctattcctctccccccttcccatgttgggccacctgcaggaaatactctcaaagcttctctgtcagattgagcatgacaaggaacactgtgaaagatgagacacccagcagctccatcgttagctctgtcctccatgccacaggaggatggtattcaattccttctttractgagaagtactgaacatgctgctatgcyttccctttctgtcctggaggttgtaaggccatatgtcatttaaagtcttttgaacaacttatacgtcgcaaaactaattcaagtatttaaagaat

SEQ ID NO: 63136 - DNA, 600 bp, Chicken  19866894325882_2
ccaggaacgcgagtcactttggtctttgccatggaggtcccactgatgagagttgcccaaatctcatcacttacaaggagcaacacagcaaagcttatgtgtaattgccactgcaattgaactgyaggtagctattcctctccccccttcccatgttgggccacctgcaggaaatactctcaaagcttctctgtcagattgagcatgacaaggaacactgtgaaagatgagacacccagcagctccatcgttagctctgtcctccatgccacaggaggatggtattcaattccttctttractgagaagtactgaacatgctgctatgcyttccctttctgtcctggaggttgtaaggccatatgtcatttaaagtcttttgaacaacttatacgtcgcaaaactaattcaagtatttaaagaattgtttctaaggattcttcaatcactgctaccgtaacactgtataaaactcttcctctatttctgagcagatcagaaaagaaatgaagccttgataggcattccaatataaaatagatttccatgcaaaaccaatgcaagctaccaaatcacatccctttacaaactggaaattca

SEQ ID NO: 63137 - DNA, 600 bp, Chicken  19866894325882_3
atggaggtcccactgatgagagttgcccaaatctcatcacttacaaggagcaacacagcaaagcttatgtgtaattgccactgcaattgaactgyaggtagctattcctctccccccttcccatgttgggccacctgcaggaaatactctcaaagcttctctgtcagattgagcatgacaaggaacactgtgaaagatgagacacccagcagctccatcgttagctctgtcctccatgccacaggaggatggtattcaattccttctttractgagaagtactgaacatgctgctatgcyttccctttctgtcctggaggttgtaaggccatatgtcatttaaagtcttttgaacaacttatacgtcgcaaaactaattcaagtatttaaagaattgtttctaaggattcttcaatcactgctaccgtaacactgtataaaactcttcctctatttctgagcagatcagaaaagaaatgaagccttgataggcattccaatataaaatagatttccatgcaaaaccaatgcaagctaccaaatcacatccctttacaaactggaaattcattttgaggtgaggctgtcagagaacactga

SEQ ID NO: 63138 - DNA, 599 bp, Chicken  19866894325886_1
  misc_feature (1)..(152): n is any nucleotide
nnnnnnnnnnnnnnnnnnnnnnnnnnnnnnnnnnnnnnnnnnnnnnnnnnnnnnnnnnnnnnnnnnnnnnnnnnnnnnnnnnnnnnnnnnnnnnnnnnnnnnnnnnnnnnnnnnnnnnnnnnnnnnnnnnnnnnnnnnnnnnnnnnnnnnnntcttgagcagctccagggacagtgactccaccactgccctgagcagtctgtgccactgcatcactgcctgcctgcagttttgagctttttgcagcccaacatgcctgtctggatggcaggagcactgaactgcaaatgcttttcttcrctgtcagcaacatgaccagcaaacaacgtgattcctcatctgccggctcacgtttgagctcattccagctcctgattatccaggtttggattaattcaaggagcatgtctgaagcactccagcagcaacagggacaacagcaaggaaagcagggtaagaggctgctatcagacaccacggctgtgcagagcctgtcccctcatcagcagcagggacagatccttcatcatacagggaggttatagagaaagttctggacaggctggagtggcacagcagtgagaacatttaagctgttg

SEQ ID NO: 63139 - DNA, 600 bp, Chicken  19866894325903_1
tgatggtaagagcaagaagtagaatatggcttcaacagaaactgtagattaagttgctggtgcaaactatagtgtctttgttccttaaagggtcacagagcttaaatgtgttgtgatacagttgagtgatacaggacaagagccaagattagcttaatcaacaaagtaaatgcttcttgtttcagaatggctccattactgatgaatatgatgttgacctacttgggaatctaatctgccacttacctccagcttttctacatgccagaatgtccctaaaggcaacagcaacagcccttyatcaattcaaactctgccgacagctcagccatgagcagaagactgaaattaaatacaaactcctcgagttatatgggtaaggtattaggtatagtactttgcttctgctgacagttaaggcatgcaggtcattaaggcagtgctctctattcacgagaatgacatttctgtttgagtgcgtaatgtgataactgcagaacaaacgacagcccaagggacaccctgggtaagttaagtcctagagcaaaaaagagagaaagcataatgattgaggaggggcaggcagtaagaatctctggc

SEQ ID NO: 63140 - DNA, 600 bp, Chicken  19866894325903_2
tttctgtttgagtgcgtaatgtgataactgcagaacaaacgacagcccaagggacaccctgggtaagttaagtcctagagcaaaaaagagagaaagcataatgattgaggaggggcaggcagtaagaatctctggcgtggcaagagctaggggttactggtgaggtatggcacagggagctgaagaattctcacacttttgcactggtttgagaagaaaaagatgactgcaggcatctgtggcaaatggagagagccagaggaggaagcagagagatatattgaaacaacagaggagagwgtgtgttagataycgtttatgactcagatttggaggctggtttgaaccacactgctgtatcagtcayggaaaaagcaaagctgtcctctggcaagaatgtaacgtttctcttttgcatactctcttagagatatcttgctttcaagataatagagatatcttggttccatttagcagaataccactgcrgtatgaatctgatagaaaatgtgaaattataattgctctgaacagaactgtttctccttacttggacactgtaatgctaagaatgttacgaacattgagggagagagaggg

SEQ ID NO: 63141 - DNA, 600 bp, Chicken  19866894325903_3
gcgtaatgtgataactgcagaacaaacgacagcccaagggacaccctgggtaagttaagtcctagagcaaaaaagagagaaagcataatgattgaggaggggcaggcagtaagaatctctggcgtggcaagagctaggggttactggtgaggtatggcacagggagctgaagaattctcacacttttgcactggtttgagaagaaaaagatgactgcaggcatctgtggcaaatggagagagccagaggaggaagcagagagatatattgaaacaacagaggagagwgtgtgttagataycgtttatgactcagatttggaggctggtttgaaccacactgctgtatcagtcayggaaaaagcaaagctgtcctctggcaagaatgtaacgtttctcttttgcatactctcttagagatatcttgctttcaagataatagagatatcttggttccatttagcagaataccactgcrgtatgaatctgatagaaaatgtgaaattataattgctctgaacagaactgtttctccttacttggacactgtaatgctaagaatgttacgaacattgagggagagagagggcaaagcaatgttt

SEQ ID NO: 63142 - DNA, 600 bp, Chicken  19866894325903_4
ttaagtcctagagcaaaaaagagagaaagcataatgattgaggaggggcaggcagtaagaatctctggcgtggcaagagctaggggttactggtgaggtatggcacagggagctgaagaattctcacacttttgcactggtttgagaagaaaaagatgactgcaggcatctgtggcaaatggagagagccagaggaggaagcagagagatatattgaaacaacagaggagagwgtgtgttagataycgtttatgactcagatttggaggctggtttgaaccacactgctgtatcagtcayggaaaaagcaaagctgtcctctggcaagaatgtaacgtttctcttttgcatactctcttagagatatcttgctttcaagataatagagatatcttggttccatttagcagaataccactgcrgtatgaatctgatagaaaatgtgaaattataattgctctgaacagaactgtttctccttacttggacactgtaatgctaagaatgttacgaacattgagggagagagagggcaaagcaatgtttgaaggctttctctgtatgtcctgagaattccactaatactccatatgtcagaga

SEQ ID NO: 63143 - DNA, 528 bp, Chicken  19866894325903_5
ctcacacttttgcactggtttgagaagaaaaagatgactgcaggcatctgtggcaaatggagagagccagaggaggaagcagagagatatattgaaacaacagaggagagwgtgtgttagataycgtttatgactcagatttggaggctggtttgaaccacactgctgtatcagtcayggaaaaagcaaagctgtcctctggcaagaatgtaacgtttctcttttgcatactctcttagagatatcttgctttcaagataatagagatatcttggttccatttagcagaataccactgcrgtatgaatctgatagaaaatgtgaaattataattgctctgaacagaactgtttctccttacttggacactgtaatgctaagaatgttacgaacattgagggagagagagggcaaagcaatgtttgaaggctttctctgtatgtcctgagaattccactaatactccatatgtcagagatatgagaaaatgcagtctgatgttaatcatagaatgatagaatggtttag

SEQ ID NO: 63144 - DNA, 600 bp, Chicken  19866894325907_1
tttttaaaggtaacgggtaccacagagatgtcagaatagattttcagagctggactgtgcaggttaacaaagagtgtgaatggaatacctgaatatgcacaactaacgaagcagacaccaaacttttgccttgaatatctttgtagggtcacatttataaaaataaacatgaagattatgacaaaacattacattagcatctcagttcagtcagtttgggaacatatagttcactgatctaatctgaactgttcacagagatggtgagagctcagctgtatgccagctttgctgtttacrgtcttgagggaactgaaagatttattctgatcattactctgattttgactgagcttcagatagaaccttgcttgcctttgctgagatctgacaaggcgtctgtactagcctgtcttgcctggaaggggctggaaatgtctggtgtaagagctgatgtcatcactgatgctagatagcccatgtaagtgtggagcacagatgtgcagcctcatatctttcttgacagagctccttttggggaatggaacaatgaaagaaggaatagagaatattccccactagtactctccagaagctgtc

SEQ ID NO: 63145 - DNA, 600 bp, Chicken  19866894325907_2
aactgaaagatttattctgatcattactctgattttgactgagcttcagatagaaccttgcttgcctttgctgagatctgacaaggcgtctgtactagcctgtcttgcctggaaggggctggaaatgtctggtgtaagagctgatgtcatcactgatgctagatagcccatgtaagtgtggagcacagatgtgcagcctcatatctttcttgacagagctccttttggggaatggaacaatgaaagaaggaatagagaatattccccactagtactctccagaagctgtcatgttttctyaccagatgtgcttttctgtgttcctctcatgcttagtttggtaatgactttcaaagcccacagtacaacctttatattttgggagaatctactgtgttaaaaacaggtctcgggctgagattaccaaaatcatctggaggattcagacacgctgttcccattaacttaaataacaatcttcttaggccttcaaaatcacaaatcttaaattttataccgctgcagttccctagctcacacccagcagataaactgtgcaagtattttccaggcactactctgtcttccagttgctccccc

SEQ ID NO: 63146 - DNA, 599 bp, Chicken  19866894325908_1
  misc_feature (1)..(5): n is any nucleotide
nnnnnggacctacaccttctttatttcagctcctctttcaagagtggtgaacagagggctctgctttctgaggcaagctacatgttaagtacagagcatctgactgagagaccaccctcattccctctcaggaaagatgcttgggaacaacatgggtcccaagaatcaatggccttcactcacagagtggagataccctgtcacaactgtcctgctaccctgcctgagcaatcgtgccacactgagatgcattttatcacctagcaccaacctccctggccagaaggttacctgtactcrcattggtgaccacatctcggtcagatcttgagattcaagtgccacaaagccctgcccagcacaggtttcagtaaagctgtcaatgaagtcagaacaaccagtttcagagcttgccatctatttatttaacctaaaaggagagggcacttccttttatttttgagctgtactacttttccttttattcagctgctccaggagctggaaatattttacactgcacccatttgtccaggaagcttcaggacacgtaagtatttcctaggcctgacagccatataatgasactcaacgagact

SEQ ID NO: 63147 - DNA, 600 bp, Chicken  19866894325908_2
gttacctgtactcrcattggtgaccacatctcggtcagatcttgagattcaagtgccacaaagccctgcccagcacaggtttcagtaaagctgtcaatgaagtcagaacaaccagtttcagagcttgccatctatttatttaacctaaaaggagagggcacttccttttatttttgagctgtactacttttccttttattcagctgctccaggagctggaaatattttacactgcacccatttgtccaggaagcttcaggacacgtaagtatttcctaggcctgacagccatataatgasactcaacgagacttgaaagttaaagtttagttggcagagtcattaggtcagtcattactacttctgcacacaggcatgcacagggttttaactgaaagctctgtggccacctacacaggaggagggcgtgggctgaggtcttgtttacagaagcacttgacattataaacgtgtggaaacttggcaacggctaacaaagcttaaatgccccatgagcttttacctatttcactacctgctcctaaacttcctcaagagcctcctcgtgccttccagatgaagctcagcaccctctgaagg

SEQ ID NO: 63148 - DNA, 600 bp, Chicken  19866894325909_1
ctaagcaacaattattatccctgacaacaggaataaattgagcttcccccatctccagcattttatctgaattttatctagattagcatttttcgtgacattcaggccttgtaagaagggcacttggtggtgctcagcttcatctccatcactgtccaagcttttgtgtcaggagcaggtctttaccacagcaggtcccaaatctctattctagttcagcaaaacttagaatcatagaatcagggaactgaatgagttggaagggacctttaaaggccatctggtccaacccctatgcartgaacagagacacccatagctccatcaggtgttcacagccccatccagcctgaayttgaatgtctccagygatggagcawctcccacctctctggacaaacgtatggggatgcaaataacactatctacatgaaagcagtcaaactgagccaaaagtgagctcctacagacctttcatcaagggatcctggagagctattcacagaaagcacctgcatttggttggaggaatttcccttcagacatcagtgcctgcagtggcatgagactcaatggggctgccatagatgtctggtgtac

SEQ ID NO: 63149 - DNA, 600 bp, Chicken  19866894325909_2
cagcattttatctgaattttatctagattagcatttttcgtgacattcaggccttgtaagaagggcacttggtggtgctcagcttcatctccatcactgtccaagcttttgtgtcaggagcaggtctttaccacagcaggtcccaaatctctattctagttcagcaaaacttagaatcatagaatcagggaactgaatgagttggaagggacctttaaaggccatctggtccaacccctatgcartgaacagagacacccatagctccatcaggtgttcacagccccatccagcctgaayttgaatgtctccagygatggagcawctcccacctctctggacaaacgtatggggatgcaaataacactatctacatgaaagcagtcaaactgagccaaaagtgagctcctacagacctttcatcaagggatcctggagagctattcacagaaagcacctgcatttggttggaggaatttcccttcagacatcagtgcctgcagtggcatgagactcaatggggctgccatagatgtctggtgtacttgttacatgctgtggtgcctgggacatcctattggggtggcacaggctctgtaa

SEQ ID NO: 63150 - DNA, 600 bp, Chicken  19866894325909_3
attttatctagattagcatttttcgtgacattcaggccttgtaagaagggcacttggtggtgctcagcttcatctccatcactgtccaagcttttgtgtcaggagcaggtctttaccacagcaggtcccaaatctctattctagttcagcaaaacttagaatcatagaatcagggaactgaatgagttggaagggacctttaaaggccatctggtccaacccctatgcartgaacagagacacccatagctccatcaggtgttcacagccccatccagcctgaayttgaatgtctccagygatggagcawctcccacctctctggacaaacgtatggggatgcaaataacactatctacatgaaagcagtcaaactgagccaaaagtgagctcctacagacctttcatcaagggatcctggagagctattcacagaaagcacctgcatttggttggaggaatttcccttcagacatcagtgcctgcagtggcatgagactcaatggggctgccatagatgtctggtgtacttgttacatgctgtggtgcctgggacatcctattggggtggcacaggctctgtaaagatgggtatgtgac

SEQ ID NO: 63151 - DNA, 600 bp, Chicken  19866894325909_4
gattagcatttttcgtgacattcaggccttgtaagaagggcacttggtggtgctcagcttcatctccatcactgtccaagcttttgtgtcaggagcaggtctttaccacagcaggtcccaaatctctattctagttcagcaaaacttagaatcatagaatcagggaactgaatgagttggaagggacctttaaaggccatctggtccaacccctatgcartgaacagagacacccatagctccatcaggtgttcacagccccatccagcctgaayttgaatgtctccagygatggagcawctcccacctctctggacaaacgtatggggatgcaaataacactatctacatgaaagcagtcaaactgagccaaaagtgagctcctacagacctttcatcaagggatcctggagagctattcacagaaagcacctgcatttggttggaggaatttcccttcagacatcagtgcctgcagtggcatgagactcaatggggctgccatagatgtctggtgtacttgttacatgctgtggtgcctgggacatcctattggggtggcacaggctctgtaaagatgggtatgtgactgccacagca

SEQ ID NO: 63152 - DNA, 600 bp, Chicken  19866894325917_1
cttgtttctcctgctaggagatatcttgcaccctttcagatggttagttagacctcagaaagaaaaaaaaaagttttaaagtttgtttgaatgtgatttaaaaaagaaacaaaacaacaacaaagggacagcaacaaagaaacaaacaaaatggaatcatagggaacaacttttttaaaagtccttcaaaataaggctatagaagtaagatgaatgcatatggagaaatagttttcacagaatcacagcattgcagggcttggaaggaacctcaaaagatcataaagtccaaccccctgytaagcaggtaccctacaatgcgttgcacaggtcggcgtccagacaggtctggaatatctctgtagaagttggctccaccacctctctaggcagcctgygccagtgctctgtcatctttaacataaggaagttctccctcatgttaccacagaactwcctatgttcaagtttcaggccattaccccttgtcctattgctatacaccaccaagaagagcctgacctcatccatttgcctcctacctccctttaggtctttatgaacactgttcagatcccctctcagtcttcttttccccag

SEQ ID NO: 63153 - DNA, 600 bp, Chicken  19866894325917_2
taaaaaagaaacaaaacaacaacaaagggacagcaacaaagaaacaaacaaaatggaatcatagggaacaacttttttaaaagtccttcaaaataaggctatagaagtaagatgaatgcatatggagaaatagttttcacagaatcacagcattgcagggcttggaaggaacctcaaaagatcataaagtccaaccccctgytaagcaggtaccctacaatgcgttgcacaggtcggcgtccagacaggtctggaatatctctgtagaagttggctccaccacctctctaggcagcctgygccagtgctctgtcatctttaacataaggaagttctccctcatgttaccacagaactwcctatgttcaagtttcaggccattaccccttgtcctattgctatacaccaccaagaagagcctgacctcatccatttgcctcctacctccctttaggtctttatgaacactgttcagatcccctctcagtcttcttttccccaggctgaacagaccaaggttactcagcttttctttttagtaactctgaaagactacagttaaacacagaataaagttttatttaattataagctttcaaa

SEQ ID NO: 63154 - DNA, 600 bp, Chicken  19866894325917_3
tcatagggaacaacttttttaaaagtccttcaaaataaggctatagaagtaagatgaatgcatatggagaaatagttttcacagaatcacagcattgcagggcttggaaggaacctcaaaagatcataaagtccaaccccctgytaagcaggtaccctacaatgcgttgcacaggtcggcgtccagacaggtctggaatatctctgtagaagttggctccaccacctctctaggcagcctgygccagtgctctgtcatctttaacataaggaagttctccctcatgttaccacagaactwcctatgttcaagtttcaggccattaccccttgtcctattgctatacaccaccaagaagagcctgacctcatccatttgcctcctacctccctttaggtctttatgaacactgttcagatcccctctcagtcttcttttccccaggctgaacagaccaaggttactcagcttttctttttagtaactctgaaagactacagttaaacacagaataaagttttatttaattataagctttcaaaaaatagaaactcaacatctcacataacaaataaataaataaataaaggtctgaaattg

SEQ ID NO: 63155 - DNA, 600 bp, Chicken  19866894325918_1
aagatacacataaatgttaaacaattcacattaagccaccatctggcccccaatggaaattttcatgttttagatttacatatcagcatttgccatctgggcagagtctgttatacattttatgagaaaatctcccactacattgtaaagtttgacaattaactcttatcgctcctaagcaaacacacttccagtcgggtaaacaaaggaaagagaccctggttttgtgttatttcatggaatggctttcctagtttccacaaaatgctcatccttccatctcacgtctctttggtttcmcatgatccattagaawctaaaagacgacagaatattccacacaccagggtgaataaatccagcaaagagggcagaagacaaccccacaagaggtaaggaagcactcctgtctgtagcttattcacagaaaggacctggaaaaatatcactcattttccctttgctttccaggaagggaaaggaatgcacaaaaagcaccttacattactgctgtattcaaaataacatacaggaagtgaagatcaaggtcttgtaatcttcctggacaagaatgaaaggaaggagactaaataatgaggc

SEQ ID NO: 63156 - DNA, 600 bp, Chicken  19866894325918_2
ttaaacaattcacattaagccaccatctggcccccaatggaaattttcatgttttagatttacatatcagcatttgccatctgggcagagtctgttatacattttatgagaaaatctcccactacattgtaaagtttgacaattaactcttatcgctcctaagcaaacacacttccagtcgggtaaacaaaggaaagagaccctggttttgtgttatttcatggaatggctttcctagtttccacaaaatgctcatccttccatctcacgtctctttggtttcmcatgatccattagaawctaaaagacgacagaatattccacacaccagggtgaataaatccagcaaagagggcagaagacaaccccacaagaggtaaggaagcactcctgtctgtagcttattcacagaaaggacctggaaaaatatcactcattttccctttgctttccaggaagggaaaggaatgcacaaaaagcaccttacattactgctgtattcaaaataacatacaggaagtgaagatcaaggtcttgtaatcttcctggacaagaatgaaaggaaggagactaaataatgaggcaagactaagaggaact

SEQ ID NO: 63157 - DNA, 600 bp, Chicken  19866894325922_1
agtgcgccatgcatcctcaagcagagtggccttctgcactatttgtctttctggcatgccagtgatttcagcctgaacatattaaaatggctagctcacgatctgtaaaatactgaaaaatattggtttggcatgaataactggtgaatcatcagcatttgtaattgtttaggggcatggaggtagttctgtgttatttgtattctgatttcacatgagaacattgatatgaaacagcagtaattgaatctgataagcaccagtgagcctttccccaggagaggaggtacgattcagagrgagatagaggagtacagagagaactctagagctaggcatggagacttgcaggttgcctcatatcactactcatagattttatacactcccaaaatgagagatcatcagctcaggcaaagctaattacctgaaacattatgattgtatctgccataagaaggatgagattcaaggcatttcccctcccccctttttaattagttgtctgtctatttaagctttctttgaaaatatagggctcttagacagcataggactgcagtctgcacatctctggtgacacacagctgtcactgattg

SEQ ID NO: 63158 - DNA, 600 bp, Chicken  19866894325922_2
atatcactactcatagattttatacactcccaaaatgagagatcatcagctcaggcaaagctaattacctgaaacattatgattgtatctgccataagaaggatgagattcaaggcatttcccctcccccctttttaattagttgtctgtctatttaagctttctttgaaaatatagggctcttagacagcataggactgcagtctgcacatctctggtgacacacagctgtcactgattgtttttctccttctattggtcggtggctgtgctgagaaaaggtaccactgagcagcatcrggctctggtgttgtcctccattccctcccagctgcgctgactcagaatgagagagcccctggaagcagattcggttggcaaatttaaatttccctgacttggcaaatccaaagcttgtaactgtgtaagctagagccaaaggcctagtttattcttagcctgtgaaagccagctcaaggctggtggcatctggggaaagggcagttcccgtgggtacagctggggatgctgtaactgccccacctcggaaaagggggtggaagaagagagcagaggcaggagctgacacacagtgagcaa

SEQ ID NO: 63159 - DNA, 600 bp, Chicken  19866894325926_1
gcttgcgtaaaaggatggcgttcagcacctgtgctagctaggttaagtcatcagaaacgcagcccctccttactgccacagcaaaagaaatgcaggagtgaagctaaaaggagacaagtcagttaaatgtgagaagcctgatcctgcatacacacgtcttcacttaccctctgtcacttgggagtggtgccatgttggcctaacagtgactttgggagtaaagttcagcacaaacagatgactctgaagaactggcaagccagcatcttacattctttccatagaaaagctatccaagcrkgagcacttaaatgcctgttactgcaatgccccagataggagcttgtggatgccccatcccttggaggcattcaaggccaggctggatgtggctctgggcagcctggtctgctggttggcaaccctgcacatagcaggggggttgaaactcgatgatcattgtggtccttttcaacccaggccattctatgattctgtgatatcgcatcaatatctctgaggatgatcagacgattcttccacacagagacctagaaataaaaacaagtggttccctgctactctgaggtacttgattta

SEQ ID NO: 63160 - DNA, 600 bp, Chicken  19866894325926_2
cttgcgtaaaaggatggcgttcagcacctgtgctagctaggttaagtcatcagaaacgcagcccctccttactgccacagcaaaagaaatgcaggagtgaagctaaaaggagacaagtcagttaaatgtgagaagcctgatcctgcatacacacgtcttcacttaccctctgtcacttgggagtggtgccatgttggcctaacagtgactttgggagtaaagttcagcacaaacagatgactctgaagaactggcaagccagcatcttacattctttccatagaaaagctatccaagcrkgagcacttaaatgcctgttactgcaatgccccagataggagcttgtggatgccccatcccttggaggcattcaaggccaggctggatgtggctctgggcagcctggtctgctggttggcaaccctgcacatagcaggggggttgaaactcgatgatcattgtggtccttttcaacccaggccattctatgattctgtgatatcgcatcaatatctctgaggatgatcagacgattcttccacacagagacctagaaataaaaacaagtggttccctgctactctgaggtacttgatttag

SEQ ID NO: 63161 - DNA, 599 bp, Chicken  19866894325932_1
  misc_feature (1)..(12): n is any nucleotide
nnnnnnnnnnnncattttattggcaaggttgggaggtgaaataaaggccctttggtaaaatttccaaaagtgagcgcctacattccagtataactgtggaaaagcaaagtttttgcagacagtgaacatctttcatccctgcctatgtttgggaaaagttgtgttcaccctctgtgaggaggaggtcagttacacagagatgtgaggtgtaagatctcaggtctgcttttctggtctgtgtgacctagtcagacacatacaggagttgtggaggggagagaagtgagaagctacaggaaraagaaaaataatctgtagttcaggtcttttcttgacaaaattttgcatatatgtcttttgcagtcatctgtttcctctcctcctaatgcacatataaagactacatgtttcttcctgctttttgagctgtcttgcacaaccttcctttgctgctcctaactgctcgaagcactgtgcacagtacttcctttttggtttctcattttcccatatctgacagagatgtttctcactaggttccttctccttgttgtgcatttgttaaatgaacactttctccycaagtttcttcattttat

SEQ ID NO: 63162 - DNA, 600 bp, Chicken  19866894325932_2
agtgagaagctacaggaaraagaaaaataatctgtagttcaggtcttttcttgacaaaattttgcatatatgtcttttgcagtcatctgtttcctctcctcctaatgcacatataaagactacatgtttcttcctgctttttgagctgtcttgcacaaccttcctttgctgctcctaactgctcgaagcactgtgcacagtacttcctttttggtttctcattttcccatatctgacagagatgtttctcactaggttccttctccttgttgtgcatttgttaaatgaacactttctccycaagtttcttcattttatttaaccgaggggatgaatgacagagtgcacaaaaccaatccaagtgttgcttgcatgtttggatgaaggaaaacaaggttccagctctagggaaagctcagggtttatgctgtgtaatttatgtttaatgcagcagcagaatcttttttcatgtctggctcttcaaagatgtaacttctgtgacatgttttgcagcttcttttttgcgtgagagagtaaaggacactggctcatttgagatccctagacatgttaaaaaatagtggaagaaaaaagtacaag

SEQ ID NO: 63163 - DNA, 600 bp, Chicken  19866894325934_1
cacacatacacaaatctcacagagcaaacagacaaacaatcatcaaacaaacacaatgaagagaaatcccacacattagggaaataatacaacagtttgcagctatgattaaccagacagccaaacagcaatcacaaagcaactctttattagaaaatacattttgtgcggtatcagataccatttttatatatagtaatgctttctctatagttctattttgacagtacggtgtaaacctccttagatgaacataagcatgacttgctgctgtaaaagcagttgagaagtgtcctataraggataccgcagaaaaaatcagcttctgaactgaacttgaaatttcacrttttttttcaacaaaacattccctgtggttttgaacatttgtcctattgaagagaacacagaaacagttctaacaaacacattaatcttattgaaccgcttatggttaagtagcgaacccaaattaagacataccatacatcttttgtaccagagaaatctctcccttctgacacggcttttagcttcctaccactaactctgcattggcaaagttcacgttaacaactccctgagacctacctctcaaag

SEQ ID NO: 63164 - DNA, 600 bp, Chicken  19866894325934_2
aacacaatgaagagaaatcccacacattagggaaataatacaacagtttgcagctatgattaaccagacagccaaacagcaatcacaaagcaactctttattagaaaatacattttgtgcggtatcagataccatttttatatatagtaatgctttctctatagttctattttgacagtacggtgtaaacctccttagatgaacataagcatgacttgctgctgtaaaagcagttgagaagtgtcctataraggataccgcagaaaaaatcagcttctgaactgaacttgaaatttcacrttttttttcaacaaaacattccctgtggttttgaacatttgtcctattgaagagaacacagaaacagttctaacaaacacattaatcttattgaaccgcttatggttaagtagcgaacccaaattaagacataccatacatcttttgtaccagagaaatctctcccttctgacacggcttttagcttcctaccactaactctgcattggcaaagttcacgttaacaactccctgagacctacctctcaaagttaaagacatgtaaggaaattaccttgatccttacaccttcattctgtg

SEQ ID NO: 63165 - DNA, 541 bp, Chicken  19866894325934_3
gtctgttgctttatctacctggccttgaagaatagattacttacttgcaggcaaagatgcacacccttacagcatgtatgccatgtaccacatcctgtgctttaggatacataagttacagtccttgtataacagaaaaataaaacagaacacaaagcagtagagctccaccccacttaccaaactcaagcctttacagcaccgcatcatcgtgcatattatctgaatctaaagttctcgtaaaataaaatcaaaggtgctctgtgcaaacctgaataaagcaatacttgaagcgtcccrtgtaacaaagatggtrttcagcattaaaatgttttagcagcttctttcactctccgacttaaatacttgatgccctctcgctaatggctaccatagaatgtagaaaggacaatcaaagtgatacagaattcaattcccaatttgaaacactccttcccagtgcacatcagcctcagtttgttggaggagatcctggagcacacaagagatggatgccttcaaggggagcaagtccaggaga

SEQ ID NO: 63166 - DNA, 525 bp, Chicken  19866894325934_4
acctggccttgaagaatagattacttacttgcaggcaaagatgcacacccttacagcatgtatgccatgtaccacatcctgtgctttaggatacataagttacagtccttgtataacagaaaaataaaacagaacacaaagcagtagagctccaccccacttaccaaactcaagcctttacagcaccgcatcatcgtgcatattatctgaatctaaagttctcgtaaaataaaatcaaaggtgctctgtgcaaacctgaataaagcaatacttgaagcgtcccrtgtaacaaagatggtrttcagcattaaaatgttttagcagcttctttcactctccgacttaaatacttgatgccctctcgctaatggctaccatagaatgtagaaaggacaatcaaagtgatacagaattcaattcccaatttgaaacactccttcccagtgcacatcagcctcagtttgttggaggagatcctggagcacacaagagatggatgccttcaaggggagcaagtccaggaga

SEQ ID NO: 63167 - DNA, 599 bp, Chicken  19866894325935_1
  misc_feature (1)..(78): n is any nucleotide
nnnnnnnnnnnnnnnnnnnnnnnnnnnnnnnnnnnnnnnnnnnnnnnnnnnnnnnnnnnnnnnnnnnnnnnnnnnnnntccctttagcaggtgattagaccagcagtgctttttgctttaggtcacttttttgaattctctaatttccagtttgaatacagtcttggctatgtgtgcgtggtccatttcttatagtggttagtccatagtgcaaatgaaaagcctgtgtgtggcgcagaccaggcagaaaacaggctgaaatttagagaaacatggcaagtgggcaagtgctattatttsatgargtatactgctggaaatggcaaattcttcctgaagtcatgggagggaatgctccaacatattttcatggaggatgttgaatcctcatctttgatatccatttttagaagatgatattcaaagccagagcatgttgcttgttctttgaaaatgtccatctgccatttctcatttctaatagtacgtgtcacggtgccttcacatgctacacaacttaatcagccaaatggcccattccagactgaatatgacaatgaactgaactgtgaatacgccgcatttcagtattgagtcat

SEQ ID NO: 63168 - DNA, 599 bp, Chicken  19866894325935_2
  misc_feature (1)..(73): n is any nucleotide
nnnnnnnnnnnnnnnnnnnnnnnnnnnnnnnnnnnnnnnnnnnnnnnnnnnnnnnnnnnnnnnnnnnnnnnnntccctttagcaggtgattagaccagcagtgctttttgctttaggtcacttttttgaattctctaatttccagtttgaatacagtcttggctatgtgtgcgtggtccatttcttatagtggttagtccatagtgcaaatgaaaagcctgtgtgtggcgcagaccaggcagaaaacaggctgaaatttagagaaacatggcaagtgggcaagtgctattatttsatgargtatactgctggaaatggcaaattcttcctgaagtcatgggagggaatgctccaacatattttcatggaggatgttgaatcctcatctttgatatccatttttagaagatgatattcaaagccagagcatgttgcttgttctttgaaaatgtccatctgccatttctcatttctaatagtacgtgtcacggtgccttcacatgctacacaacttaatcagccaaatggcccattccagactgaatatgacaatgaactgaactgtgaatacgccgcatttcagtattgagtcatagaaa

SEQ ID NO: 63169 - DNA, 600 bp, Chicken  19866894325942_1
gttcgtcttctgacagagcacctctaagttgaagctgatcaactttcgtctgttgtgaacaattctgctgctagtgaggagagtttgtgttgaaattaaaacacaccagcaaccaccctggatcagcctggcaggctcgctggtgccagggttcaccatggccacttgcttgatcaaacggaggagcagcttggaaccagcgtcatgatcctggtgcttcaactgccagagaagaagcgtagcttaaaaaagctttcttcagtggtatgacacagtggtgtctttgtattccctgggtgygtgtgctggcttttacagccttctcgcgtcacccgctycgaagtggtttggtaagtgtctatggtaatgcatggtaactcaagtrgggacgatgtgcctgtgtccatcttgggcagcattggcccagaggcaactgaagtagatccttagagaaggaggatgtgtcacaggctgtaacagctgctgacggtactgttctattgccatttgcgtgtcacttttcagatggtttctataatttgatttaaatagcagaacatgccacagctcaatttgtgtcacaaagaagaatttcctcct

SEQ ID NO: 63170 - DNA, 600 bp, Chicken  19866894325942_2
tcaactttcgtctgttgtgaacaattctgctgctagtgaggagagtttgtgttgaaattaaaacacaccagcaaccaccctggatcagcctggcaggctcgctggtgccagggttcaccatggccacttgcttgatcaaacggaggagcagcttggaaccagcgtcatgatcctggtgcttcaactgccagagaagaagcgtagcttaaaaaagctttcttcagtggtatgacacagtggtgtctttgtattccctgggtgygtgtgctggcttttacagccttctcgcgtcacccgctycgaagtggtttggtaagtgtctatggtaatgcatggtaactcaagtrgggacgatgtgcctgtgtccatcttgggcagcattggcccagaggcaactgaagtagatccttagagaaggaggatgtgtcacaggctgtaacagctgctgacggtactgttctattgccatttgcgtgtcacttttcagatggtttctataatttgatttaaatagcagaacatgccacagctcaatttgtgtcacaaagaagaatttcctccttttgtaactctttattacgagtgtgtttcactgagcag

SEQ ID NO: 63171 - DNA, 600 bp, Chicken  19866894325942_3
tgtgttgaaattaaaacacaccagcaaccaccctggatcagcctggcaggctcgctggtgccagggttcaccatggccacttgcttgatcaaacggaggagcagcttggaaccagcgtcatgatcctggtgcttcaactgccagagaagaagcgtagcttaaaaaagctttcttcagtggtatgacacagtggtgtctttgtattccctgggtgygtgtgctggcttttacagccttctcgcgtcacccgctycgaagtggtttggtaagtgtctatggtaatgcatggtaactcaagtrgggacgatgtgcctgtgtccatcttgggcagcattggcccagaggcaactgaagtagatccttagagaaggaggatgtgtcacaggctgtaacagctgctgacggtactgttctattgccatttgcgtgtcacttttcagatggtttctataatttgatttaaatagcagaacatgccacagctcaatttgtgtcacaaagaagaatttcctccttttgtaactctttattacgagtgtgtttcactgagcagtgaacagacgttcttcattcctgacgtactttgcatgaaaccagtgg

SEQ ID NO: 63172 - DNA, 600 bp, Chicken  19866894325944_1
taaacttggaaattaagaacacacacatagcttgtttgactgatgcaactcttagagctgaacagcaatttctattttgattgtgctgtttgttagctgatgttatagacgtgcattccaaataaaggtcaatgatgattttgccatacatccaatgcgattacactggtgtactttgatattaaaagtcggagtacttcccacttccaagagctctttaaggcatacagcaagccactgcagcacacaggtgttgatcacagtctgtaacactgtggattatttgatgtattctcaacrcaaaagcgcaatactacagaaactcagtggataaaaccaaatgcagagaactgggatattacagaatcccaaatattaattatgaatcagaaggaaatacagtttcagttgcaacacatcttcacacctgcatgttttcctttgcagttgctacccgatatgtcaggaagctgcaggcagatttgtcggcaactgcaacaggtgcactcctccgtgtgctctgcgctaagaactgcgctcacctccgcctatggcaaagcagattcccgaaggaaagctgcccaaagcccacacagcacc

SEQ ID NO: 63173 - DNA, 600 bp, Chicken  19866894325946_1
ctgaagacttgggatctgctgtgtgcatttctttcacaagaagaagataatcaagactgtgtgcacctctgacttgctttctcagtttccattatcgtcgttaggaaacctggctgtgatgtctgcatcttcaacactgagagcgcttttcatgctttggttttggttgtgggtggtcacatcggagaaaccacttcatgtgcatatggagcacagtccccactcttcctgctcctttggagaataattgtatcagttcgatgcagaaatcagccagttgcttaattccttgtacttttycagtttgagtcatataaagcaggcattactgggtaaccccagtaggaagtaagtgtcaccatttttctacactataggtggttcggggataagaactgagcatctttctgtatcagaggaagtggaaaaagcttacaataaaatggtgatgtataattaaaacacttttttttcccctctattcccaggtggtcactgagatcactgacagcactagcacagaattcacaggtcctacaaccatcacccgtacgattgagtatgaaaaaacttctggtgagggtgcagcaactccagtca

SEQ ID NO: 63174 - DNA, 600 bp, Chicken  19866894325951_1
gtatccagaataggatctctccactgttgcagctgtcctagcaaactgtattgatagcgtgtccccagcacaggcttcattcgtactagcaaaattgtattatttgctagcatagctttttcctaaggttcctctttccttatccagcaggtaaaaagtgtatccataaaagtagaggtttgtcataagtgtctccacagtgagagcttctgtgtcagtcagggatcgcatcaaggatcaagcctctttacaccttcggtcaagacagttatgtcagcacaagtctgtgtaacaggcacsttcctcatcygcctggagtgaaaagtcagcagtcacctgctgcagcgttctgggcaggaatggagagtcaggctgagcatacttatcccaccctgacaggaaaaactgcaccaaaccaagtgcctgggatcatacttaaagatagaaccacattcaccgtgatgatgaaaaatacagctgacctaagatgtattttcaaggaattatcacgtggatctgctttcaggagctgtctgaaaagatattttccaggagtgctatgtggtatgttctactgttcacaatcacccaagtgattta

SEQ ID NO: 63175 - DNA, 600 bp, Chicken  19866894325951_2
taggatctctccactgttgcagctgtcctagcaaactgtattgatagcgtgtccccagcacaggcttcattcgtactagcaaaattgtattatttgctagcatagctttttcctaaggttcctctttccttatccagcaggtaaaaagtgtatccataaaagtagaggtttgtcataagtgtctccacagtgagagcttctgtgtcagtcagggatcgcatcaaggatcaagcctctttacaccttcggtcaagacagttatgtcagcacaagtctgtgtaacaggcacsttcctcatcygcctggagtgaaaagtcagcagtcacctgctgcagcgttctgggcaggaatggagagtcaggctgagcatacttatcccaccctgacaggaaaaactgcaccaaaccaagtgcctgggatcatacttaaagatagaaccacattcaccgtgatgatgaaaaatacagctgacctaagatgtattttcaaggaattatcacgtggatctgctttcaggagctgtctgaaaagatattttccaggagtgctatgtggtatgttctactgttcacaatcacccaagtgatttaagattttaat

SEQ ID NO: 63176 - DNA, 600 bp, Chicken  19866894325953_1
gccggaggcagtcacaaggttttggaatagaaaagcaagtggtagtgtagacaccagccatcctctgctggatggcctcggtggtggagagcagtcgccagcatgtttaacttagagttgtataggtagagctttaaggctgaaatgtctttgtgtcacagtgggatggcaaatagtgccttctgccaaatattggtgggtgtttaatatgtacttcaggcacgtgctgtgaccagggaaggttgtgctgatgttgcatgaggactcctgactccagcagtgccatgctgcggtagaacrcagaggagaatcataagtgcaaagtgctttaagatcacactccagcaacttttaccagaaaaatactcttgattagaagtgtgatctttttcaacagcatttctatattaccaaaagccctttgtggatgcagttacgctaagggaaaagtaaaagctttggtcagtatarcttactttgttcaggaaacctgcataaactgcaatacaaatgcatggctctgtatgtggaagcagctcttaatgaggaagacacaggtacaccagctgatgtctcctgtcctccttcttccagcacaga

SEQ ID NO: 63177 - DNA, 600 bp, Chicken  19866894325953_2
aatagtgccttctgccaaatattggtgggtgtttaatatgtacttcaggcacgtgctgtgaccagggaaggttgtgctgatgttgcatgaggactcctgactccagcagtgccatgctgcggtagaacrcagaggagaatcataagtgcaaagtgctttaagatcacactccagcaacttttaccagaaaaatactcttgattagaagtgtgatctttttcaacagcatttctatattaccaaaagccctttgtggatgcagttacgctaagggaaaagtaaaagctttggtcagtatarcttactttgttcaggaaacctgcataaactgcaatacaaatgcatggctctgtatgtggaagcagctcttaatgaggaagacacaggtacaccagctgatgtctcctgtcctccttcttccagcacagaagggcaggcagcttagaagtctcagacagatgcctaatatccagtagatgagtagataaatcctccctttccaaggaaatcgtgtgtacaatggaagaattctttctgaaagtacactgtatgtagcataagaatggaaaaagacaaaccaagagatccaaggtctgatat

SEQ ID NO: 63178 - DNA, 600 bp, Chicken  19866894325963_1
aagctggatgaactggcaggctgaaatgctaataattgagtgctgaacactcatttggtaactagaaatgtgcagaatatcattaagatcagtatcagagcagacaacgttcagcatcttctgaagcactttggacaatgggacaaacagcaaatctgcagaaaatgcaaattgtaataaaactgagtaaaataagggacaaaatacttaagttacaactttggaggtcttggtggggcatcacgaggacatttcttcacttgcaaggccctggagcatgtccagagaaggacagcagasctgtgaggggtacagaacacaagtcttctgtggaacagaagttcagtttggaggagaggaggctcagaagagaccttattgctcacagctcccygaaagggggttctggagaggtggggttaacctctgctcrcaggtaacagagayaggacaggagggaatggcctcaagttgtaccaggggatggtcaggctgggtgtcaggaaacatttcttctccaaaagagtggtaacgcattggaacaaactgcccaaggaagcagtggggtcactgtccctggaggtggttaaggaaagggca

SEQ ID NO: 63179 - DNA, 600 bp, Chicken  19866894325963_2
tcagagcagacaacgttcagcatcttctgaagcactttggacaatgggacaaacagcaaatctgcagaaaatgcaaattgtaataaaactgagtaaaataagggacaaaatacttaagttacaactttggaggtcttggtggggcatcacgaggacatttcttcacttgcaaggccctggagcatgtccagagaaggacagcagasctgtgaggggtacagaacacaagtcttctgtggaacagaagttcagtttggaggagaggaggctcagaagagaccttattgctcacagctcccygaaagggggttctggagaggtggggttaacctctgctcrcaggtaacagagayaggacaggagggaatggcctcaagttgtaccaggggatggtcaggctgggtgtcaggaaacatttcttctccaaaagagtggtaacgcattggaacaaactgcccaaggaagcagtggggtcactgtccctggaggtggttaaggaaagggcagacacagcackgagggacatggtatggtgggcagcactggtggtaggtggatggttggacgagtagaggtcttttccaaccttaatgattctgt

SEQ ID NO: 63180 - DNA, 600 bp, Chicken  19866894325963_3
gacaatgggacaaacagcaaatctgcagaaaatgcaaattgtaataaaactgagtaaaataagggacaaaatacttaagttacaactttggaggtcttggtggggcatcacgaggacatttcttcacttgcaaggccctggagcatgtccagagaaggacagcagasctgtgaggggtacagaacacaagtcttctgtggaacagaagttcagtttggaggagaggaggctcagaagagaccttattgctcacagctcccygaaagggggttctggagaggtggggttaacctctgctcrcaggtaacagagayaggacaggagggaatggcctcaagttgtaccaggggatggtcaggctgggtgtcaggaaacatttcttctccaaaagagtggtaacgcattggaacaaactgcccaaggaagcagtggggtcactgtccctggaggtggttaaggaaagggcagacacagcackgagggacatggtatggtgggcagcactggtggtaggtggatggttggacgagtagaggtcttttccaaccttaatgattctgtgaaaggtaatgcagcatcaagtacccagagaagttagag

SEQ ID NO: 63181 - DNA, 600 bp, Chicken  19866894325963_4
cagcaaatctgcagaaaatgcaaattgtaataaaactgagtaaaataagggacaaaatacttaagttacaactttggaggtcttggtggggcatcacgaggacatttcttcacttgcaaggccctggagcatgtccagagaaggacagcagasctgtgaggggtacagaacacaagtcttctgtggaacagaagttcagtttggaggagaggaggctcagaagagaccttattgctcacagctcccygaaagggggttctggagaggtggggttaacctctgctcrcaggtaacagagayaggacaggagggaatggcctcaagttgtaccaggggatggtcaggctgggtgtcaggaaacatttcttctccaaaagagtggtaacgcattggaacaaactgcccaaggaagcagtggggtcactgtccctggaggtggttaaggaaagggcagacacagcackgagggacatggtatggtgggcagcactggtggtaggtggatggttggacgagtagaggtcttttccaaccttaatgattctgtgaaaggtaatgcagcatcaagtacccagagaagttagagacttgtggataaaa

SEQ ID NO: 63182 - DNA, 555 bp, Chicken  19866894325963_5
acagaacacaagtcttctgtggaacagaagttcagtttggaggagaggaggctcagaagagaccttattgctcacagctcccygaaagggggttctggagaggtggggttaacctctgctcrcaggtaacagagayaggacaggagggaatggcctcaagttgtaccaggggatggtcaggctgggtgtcaggaaacatttcttctccaaaagagtggtaacgcattggaacaaactgcccaaggaagcagtggggtcactgtccctggaggtggttaaggaaagggcagacacagcackgagggacatggtatggtgggcagcactggtggtaggtggatggttggacgagtagaggtcttttccaaccttaatgattctgtgaaaggtaatgcagcatcaagtacccagagaagttagagacttgtggataaaaaaaaaaaatcagtttgattctgtatcaggattcattttctgaaataggcacagtgataccccatgcatgtgtatgtgcaacatgcactcagaataaaaaacatgatactgctgggaaga

SEQ ID NO: 63183 - DNA, 600 bp, Chicken  19866894325970_1
gatgttacaagggtgctttgagggcaccattgtccaataaaatagaaattatactcttgtttgtacacaaagtatatggttttcagctcagggatgttttgtgtagttattattatcttaaaggcaataaaatagttttagtatgttaagttcatatgaatatatctttatacagtgttgtacagaaaggagcttggaaatgggttttgttttagaatttgcatagtgttgtcagtccacctttaaatataaggaacataagagttttaaaactgttgaaatgtttccaatttctgtaargatttttaagtacatacattttagatttaagcttccaggaggataacttgaaaacaaacattagtaacataaaatgaaataccagaacatttttacattaattaaaataacagaaaacgtaaaagaaaaataaaggcacacagatactccttttgtacgtcactgtgaaaaaaatacaagtgtaaggaactattgtgggttagtttttgtcaatagctaaactaccaaccaaccagatgcttacttgcttccacttgtcaaaaggacagggggagaaagtacaatgagtaagttcaggat

SEQ ID NO: 63184 - DNA, 600 bp, Chicken  19866894325974_1
agggctgcctcatccttctggaaactgaagtgaccatgtgtaaccacagtctgaggagtcagaaaaagatcagttgaaaatggagaaaacaattgaaaataataggagacagaggatggaagaaacagctagctgtagtccagcatgctgagaaatccttagaccaattagagataatggattcaaggcatttccattggccatggactgtagagaaataaacaggttatacaacaaattagttcagcacctaatttatctgcaagcaaagagctggtgtgtggtggttgtggtttgtcyttattgaagacatcggcaagctttgtttttcccttgttacatcgtgctggtaccactgcagtgtagcccttagtaaggatgtgcagacaacttgtttcacacagtctacagctttttgtttgctcagtaatttaaaaaaaaaaaaaaaagtttgtttttcctagcttgcaccgctctcaatcccacaatatactgcctcttaaaatgtattttattctctttaactgctaatactgaaacccagctccaattaagtggatactgtctcggatgattgccctgcttactccctttgtttaa

SEQ ID NO: 63185 - DNA, 599 bp, Chicken  19866894325975_1
  misc_feature (1)..(137): n is any nucleotide
nnnnnnnnnnnnnnnnnnnnnnnnnnnnnnnnnnnnnnnnnnnnnnnnnnnnnnnnnnnnnnnnnnnnnnnnnnnnnnnnnnnnnnnnnnnnnnnnnnnnnnnnnnnnnnnnnnnnnnnnnnnnnnnnnnnnnnnnntggcagagagccccagtgcgcctacagcccccagtaacttctctggaataggtcacaaatttgaacttattttcttcttgggaaataaatgtctcctcgtcactaaatgagttattttgaacctgcaaagatagaagcacttcattttgtatgatttgcttgrtttcctcctaatccaacacagatttctatgaaatgagggaaaaatgagaatctgagtaacagggaaatcagaagcaagagatctgagatatcccacgctaaattctggtataagagtctgtcaaatagtagtaagaagaaaaatactgcacattagtagctgtcagtagtcttatcatgaggacctattagtaacagctgtaaatgctcctatattagcctctctttttccaagtacaaactaatcatattgcaagacagatgcaatcctctctctcccatcatgaattagaaagctct

SEQ ID NO: 63186 - DNA, 599 bp, Chicken  19866894325979_1
  misc_feature (1)..(102): n is any nucleotide
nnnnnnnnnnnnnnnnnnnnnnnnnnnnnnnnnnnnnnnnnnnnnnnnnnnnnnnnnnnnnnnnnnnnnnnnnnnnnnnnnnnnnnnnnnnnnnnnnnnnnntgggagcgtaggacttcccaccaacccagcacatctcacccaacgtaggactttccacccaatgaaggacatcccactcaacgtaggacatcccacccaacaaaggacatactgcccaatgtaggatagcccacccaaggtaaggcatcccaatcaactaaaggacatcccaatccctcccaacacagggcattcccmcrgtgctggccctgggcagaagagcctcctgtcctccatgtgttacccactcccagaatgctcacatggtgccagcgtgcttcatctatggacaaggaagagggctgggaggcacagacagatgtaattcatggacacrtgggagatgagggatggtggaaacagcatacgtagagggcactgctgtgcctggtccacaagcccccttgtgggatgcctgcagagtaagaaagggttattgacttggttcttctggaatcatacagaaattaggaaatgagcatttgcaggtctatgct

SEQ ID NO: 63187 - DNA, 599 bp, Chicken  19866894325979_2
  misc_feature (1)..(100): n is any nucleotide
nnnnnnnnnnnnnnnnnnnnnnnnnnnnnnnnnnnnnnnnnnnnnnnnnnnnnnnnnnnnnnnnnnnnnnnnnnnnnnnnnnnnnnnnnnnnnnnnnnnntgggagcgtaggacttcccaccaacccagcacatctcacccaacgtaggactttccacccaatgaaggacatcccactcaacgtaggacatcccacccaacaaaggacatactgcccaatgtaggatagcccacccaaggtaaggcatcccaatcaactaaaggacatcccaatccctcccaacacagggcattcccmcrgtgctggccctgggcagaagagcctcctgtcctccatgtgttacccactcccagaatgctcacatggtgccagcgtgcttcatctatggacaaggaagagggctgggaggcacagacagatgtaattcatggacacrtgggagatgagggatggtggaaacagcatacgtagagggcactgctgtgcctggtccacaagcccccttgtgggatgcctgcagagtaagaaagggttattgacttggttcttctggaatcatacagaaattaggaaatgagcatttgcaggtctatgcttt

SEQ ID NO: 63188 - DNA, 600 bp, Chicken  19866894325979_3
acccaacgtaggactttccacccaatgaaggacatcccactcaacgtaggacatcccacccaacaaaggacatactgcccaatgtaggatagcccacccaaggtaaggcatcccaatcaactaaaggacatcccaatccctcccaacacagggcattcccmcrgtgctggccctgggcagaagagcctcctgtcctccatgtgttacccactcccagaatgctcacatggtgccagcgtgcttcatctatggacaaggaagagggctgggaggcacagacagatgtaattcatggacacrtgggagatgagggatggtggaaacagcatacgtagagggcactgctgtgcctggtccacaagcccccttgtgggatgcctgcagagtaagaaagggttattgacttggttcttctggaatcatacagaaattaggaaatgagcatttgcaggtctatgctttggttwcttttcctgttaaaggagtctaccaaagtggagccattgtgctggaaagaagatgctctcacatgcactgagatctctgggcatgaggagtggaagtgcctgtctgccttcttccctgagtgaatgcagacac

SEQ ID NO: 63189 - DNA, 600 bp, Chicken  19866894325979_4
tggccctgggcagaagagcctcctgtcctccatgtgttacccactcccagaatgctcacatggtgccagcgtgcttcatctatggacaaggaagagggctgggaggcacagacagatgtaattcatggacacrtgggagatgagggatggtggaaacagcatacgtagagggcactgctgtgcctggtccacaagcccccttgtgggatgcctgcagagtaagaaagggttattgacttggttcttctggaatcatacagaaattaggaaatgagcatttgcaggtctatgctttggttwcttttcctgttaaaggagtctaccaaagtggagccattgtgctggaaagaagatgctctcacatgcactgagatctctgggcatgaggagtggaagtgcctgtctgccttcttccctgagtgaatgcagacacaagtagttcctgcttctgctcatccaacatttaaagcaaagtgcttctgacaaacaagggggaaggtggactttattaaaaataaagaaatctcttgagatctgatcaagcactgataactcctcctcgcctgtacgaggattttgttctatttctcagttattgca

SEQ ID NO: 63190 - DNA, 600 bp, Chicken  19866894325981_1
ggcacaggcttcccagaggccatggatttgcctccttggagaaaagctgcctggacacgggtctgggcaccctacttggggtggcattgctggaacatgagttggacaagatggacccagaggtcctttcccactttagccattatgcgattctgtgattctgtgatgtcgagtgggatcagagaccacaattttgtcttcattatcttacatttgtgattattttagtgttggaaggaagccaaacctacaaagtctttggcttgtgctctccttgttagttaaaaagtatgccaaaawttttaatacaaaggtctataaccctctggaagaaaagacaccccctgaaaacaatcagtatgcttcaaaaaatgtgaaaaaataattgggaaaacaaaaatgttttactgtcccgttaaaatacaaatgtctggcttctgtgtccatgccccaagttcccatgaaaagccagcaaaaaacattccacaagcactttgctttgtgttatttgttgttacagaagggattattcttcattagcttaactccagcaagaagaaatcttaaaccatatcatgtgggtgaggagacagtgaaggg

SEQ ID NO: 63191 - DNA, 599 bp, Chicken  19866894325992_1
  misc_feature (1)..(136): n is any nucleotide
nnnnnnnnnnnnnnnnnnnnnnnnnnnnnnnnnnnnnnnnnnnnnnnnnnnnnnnnnnnnnnnnnnnnnnnnnnnnnnnnnnnnnnnnnnnnnnnnnnnnnnnnnnnnnnnnnnnnnnnnnnnnnnnnnnnnnnnnacaacagatggatgcagagagatgtcaactattttctaagtattatgccaaaggatattttaaagaaagatttaaatggtttaacagattttagcaaatattttcagggagaaaaaaggggagtcatttgcaggacacaaagaaagaaaaccctattacagagkataggagtgagaggttggyccagctgaggaggatggaataaggttcctacattaacaaggccacaccacagcagggccatctgttgcactacaaaacaccaatgcaaataaggtgtgagatggccaaggcaagaattaaggatgcatcctttactgctggaaaggacgcgtcccaaacagattaaagtcacaactggatttaggagaaggagagaaagagatagcagaaggtgaaatgagagaagatgcttaggccagagttccagctccatggctggtaaagaatgtgcaccttagaa

SEQ ID NO: 63192 - DNA, 599 bp, Chicken  19866894325992_2
  misc_feature (1)..(117): n is any nucleotide
nnnnnnnnnnnnnnnnnnnnnnnnnnnnnnnnnnnnnnnnnnnnnnnnnnnnnnnnnnnnnnnnnnnnnnnnnnnnnnnnnnnnnnnnnnnnnnnnnnnnnnnnnnnnnnnnnnnnnacaacagatggatgcagagagatgtcaactattttctaagtattatgccaaaggatattttaaagaaagatttaaatggtttaacagattttagcaaatattttcagggagaaaaaaggggagtcatttgcaggacacaaagaaagaaaaccctattacagagkataggagtgagaggttggyccagctgaggaggatggaataaggttcctacattaacaaggccacaccacagcagggccatctgttgcactacaaaacaccaatgcaaataaggtgtgagatggccaaggcaagaattaaggatgcatcctttactgctggaaaggacgcgtcccaaacagattaaagtcacaactggatttaggagaaggagagaaagagatagcagaaggtgaaatgagagaagatgcttaggccagagttccagctccatggctggtaaagaatgtgcaccttagaactcctccagcctcagacag

SEQ ID NO: 63193 - DNA, 600 bp, Chicken  19866894325992_3
ccagctgaggaggatggaataaggttcctacattaacaaggccacaccacagcagggccatctgttgcactacaaaacaccaatgcaaataaggtgtgagatggccaaggcaagaattaaggatgcatcctttactgctggaaaggacgcgtcccaaacagattaaagtcacaactggatttaggagaaggagagaaagagatagcagaaggtgaaatgagagaagatgcttaggccagagttccagctccatggctggtaaagaatgtgcaccttagaactcctccagcctcagacagwgcacagatccaaggctatatggagcagcagcagcctttcagtgcarcacaagaggcagctgcctcaggcacagcaacctgtgaaagggatggtgagaactgttccatgaaaggtgcttgtggctgctcagagtagagaaagastgaggaatagtaaaccttgtgcttggataagagctcaccctcaggtatatgctttaaaccaatttctgaacaacagacaaaaaaacccacaagtttaaattcattgtaacctttctcaaataaataaacaatagcagtcatagcactgatgcagttt

SEQ ID NO: 63194 - DNA, 600 bp, Chicken  19866894325992_4
ccacagcagggccatctgttgcactacaaaacaccaatgcaaataaggtgtgagatggccaaggcaagaattaaggatgcatcctttactgctggaaaggacgcgtcccaaacagattaaagtcacaactggatttaggagaaggagagaaagagatagcagaaggtgaaatgagagaagatgcttaggccagagttccagctccatggctggtaaagaatgtgcaccttagaactcctccagcctcagacagwgcacagatccaaggctatatggagcagcagcagcctttcagtgcarcacaagaggcagctgcctcaggcacagcaacctgtgaaagggatggtgagaactgttccatgaaaggtgcttgtggctgctcagagtagagaaagastgaggaatagtaaaccttgtgcttggataagagctcaccctcaggtatatgctttaaaccaatttctgaacaacagacaaaaaaacccacaagtttaaattcattgtaacctttctcaaataaataaacaatagcagtcatagcactgatgcagtttcatacacgcacgtaactgtagcacatcatactgatgagaaatagtt

SEQ ID NO: 63195 - DNA, 504 bp, Chicken  19866894325992_5
aggacgcgtcccaaacagattaaagtcacaactggatttaggagaaggagagaaagagatagcagaaggtgaaatgagagaagatgcttaggccagagttccagctccatggctggtaaagaatgtgcaccttagaactcctccagcctcagacagwgcacagatccaaggctatatggagcagcagcagcctttcagtgcarcacaagaggcagctgcctcaggcacagcaacctgtgaaagggatggtgagaactgttccatgaaaggtgcttgtggctgctcagagtagagaaagastgaggaatagtaaaccttgtgcttggataagagctcaccctcaggtatatgctttaaaccaatttctgaacaacagacaaaaaaacccacaagtttaaattcattgtaacctttctcaaataaataaacaatagcagtcatagcactgatgcagtttcatacacgcacgtaactgtagcacatcatactgatgagaaatagttt

SEQ ID NO: 63196 - DNA, 600 bp, Chicken  19866894325994_1
gatagtcaccagagaaaaataagaatttgtaggatatgagtcatctcatcctactgcagatgtctaaattatgtcataataattgttcctgagaagtgcttgtttctcaccagtgattacataagaagtcttgagtggctagctctgatgtaggcttttgcattgttgatatttaaatttgctgagacaaaattcattttggttcagtttacaacaaggtatgtctctggccaccaaatgggtgaaggaatacaccaaaatctgcaagaagtagttctaggacagtccttgctgtgtttkactccagctgcagcacctggccatggcactgagatcaccatctgacagcagagcagctgagtggtggattgggccttgggatgagcattacacacagaaagcaaagggaggaaggcactgatacttcaccatgactgcaagggctattgccacagtgctgaggagtggacgtgagagatgaaggaagaattctcattaaccatgattatcagtgtacacaacagattattagtagtagaagctggaaaacagtgctggcaaggtgactaatggggaaaaagtatagacagaacagaaaat

SEQ ID NO: 63197 - DNA, 600 bp, Chicken  19866894325996_1
ttggaataagtggtggtggggagaagagctgagcgtggctccgtgggagatgtccatgccatcagtcacggtcccatccgtgccatgccctgtggattccatgagctggtcgggcacaacggtgctgccactttggagttctgtgccgggcgccgtctcgggagagtcggtctcatccagaagagccattgtggtgaccaccaaagccttggcctgcctggtgctgttgcccatctttggtggcagctccgtgcccaacggtgcaatgggctcagtggtgtcggtcccatccaatagatytgctgtggtgaccagcgaggccttggtttgtatgggggtgttgcctgaccctggtggtggctstgtgcycaagggcacgagggactgagaggaatccatctcatccaaggaactgaccgtggtcagcaccagggcctggctggaggtgttgtccagctctgtgcccagcagtgcgtgaggggagtcattcaatggaaccgttgtggtgaccaccaaaggtttgggctgcccggtggtgttgcccggctctgtgcccatcagcatgtcatgcccagggaatgcggtctcattgctaacagg

SEQ ID NO: 63198 - DNA, 600 bp, Chicken  19866894325996_2
agtcacggtcccatccgtgccatgccctgtggattccatgagctggtcgggcacaacggtgctgccactttggagttctgtgccgggcgccgtctcgggagagtcggtctcatccagaagagccattgtggtgaccaccaaagccttggcctgcctggtgctgttgcccatctttggtggcagctccgtgcccaacggtgcaatgggctcagtggtgtcggtcccatccaatagatytgctgtggtgaccagcgaggccttggtttgtatgggggtgttgcctgaccctggtggtggctstgtgcycaagggcacgagggactgagaggaatccatctcatccaaggaactgaccgtggtcagcaccagggcctggctggaggtgttgtccagctctgtgcccagcagtgcgtgaggggagtcattcaatggaaccgttgtggtgaccaccaaaggtttgggctgcccggtggtgttgcccggctctgtgcccatcagcatgtcatgcccagggaatgcggtctcattgctaacaggtgtcacagtggtgctgtggggtccagcatcagctcttctcctgcgggagagcagcgggggctc

SEQ ID NO: 63199 - DNA, 600 bp, Chicken  19866894325996_3
ggtcccatccgtgccatgccctgtggattccatgagctggtcgggcacaacggtgctgccactttggagttctgtgccgggcgccgtctcgggagagtcggtctcatccagaagagccattgtggtgaccaccaaagccttggcctgcctggtgctgttgcccatctttggtggcagctccgtgcccaacggtgcaatgggctcagtggtgtcggtcccatccaatagatytgctgtggtgaccagcgaggccttggtttgtatgggggtgttgcctgaccctggtggtggctstgtgcycaagggcacgagggactgagaggaatccatctcatccaaggaactgaccgtggtcagcaccagggcctggctggaggtgttgtccagctctgtgcccagcagtgcgtgaggggagtcattcaatggaaccgttgtggtgaccaccaaaggtttgggctgcccggtggtgttgcccggctctgtgcccatcagcatgtcatgcccagggaatgcggtctcattgctaacaggtgtcacagtggtgctgtggggtccagcatcagctcttctcctgcgggagagcagcgggggctcggccgg

SEQ ID NO: 63200 - DNA, 600 bp, Chicken  19866894325998_1
aaatagaattaagacattaagacattgtatcacccttcttccaggctgtgttgccactggaactgttaagtgttttgtctaaataatggctccaggattgaaccttcacttttctaaccacaagtcattcccttaaaaagaaatacagttcccctgtaatgttttttctttcttttccacacgtggggcagttctgaattgtggtatgggatgatatatgtattacagtagagtgaatagattcctatagtaccattggtaacacccaagccaacattctgccttagctaggaagagtamatgggaaatagcttgtaaaatgcatgttagatrtagagttaacatatacgacattctgggggaaagtatagaacagagtataaccgatgaggcagaactgccttcattttccaaaggaatcagtacacttaaagggaaagcacagcatgggtagcgacagagtagctagagaacagaactgtgactcagcattcagtaatgacttcctttgagctgggcatagatgcatgtctgtgagacacagctcatttgttacgcactcacagacttgcaataggggttttacaataaaattcatat

SEQ ID NO: 63201 - DNA, 600 bp, Chicken  19866894325998_2
ccttcttccaggctgtgttgccactggaactgttaagtgttttgtctaaataatggctccaggattgaaccttcacttttctaaccacaagtcattcccttaaaaagaaatacagttcccctgtaatgttttttctttcttttccacacgtggggcagttctgaattgtggtatgggatgatatatgtattacagtagagtgaatagattcctatagtaccattggtaacacccaagccaacattctgccttagctaggaagagtamatgggaaatagcttgtaaaatgcatgttagatrtagagttaacatatacgacattctgggggaaagtatagaacagagtataaccgatgaggcagaactgccttcattttccaaaggaatcagtacacttaaagggaaagcacagcatgggtagcgacagagtagctagagaacagaactgtgactcagcattcagtaatgacttcctttgagctgggcatagatgcatgtctgtgagacacagctcatttgttacgcactcacagacttgcaataggggttttacaataaaattcatatgttcttcccactgcagctctttaatgtgcggct

SEQ ID NO: 63202 - DNA, 440 bp, Chicken  19866894325998_3
aacatatacgacattctgggggaaagtatagaacagagtataaccgatgaggcagaactgccttcattttccaaaggaatcagtacacttaaagggaaagcacagcatgggtagcgacagagtagctagagaacagaactgtgactcagcattcagtaatgacttcctttgagctgggcatagatgcatgtctgtgagacacagctcatttgttacgcactcacagacttgcaataggggttttacaataaaattcatatgttcttcccactgcagctctttaatgtgcggctgcccccygctttgccatcgtgtcccaatgccctgacctactcagactctgtaactttaattaaaaaaaaaaaaaagggaaaaaaaagctgagtcaggtccacaactaggcttcttagcatttccagggatttcaattcaaaagggta

SEQ ID NO: 63203 - DNA, 600 bp, Chicken  19866894326000_1
gctctggggaatgttaaagaatgaagcttcactgtgccagggcttgtactctcactccttactttgtgggaacaaacttcagcagcaggtggtgctgctggtggtcagcatcagggctggtgacatctgaccttagagccccacagcttaggcttccctttctgacagcgtcagaggctcaggcagggatctcttttgaagtgaagctagatgcttcagaggccttcaagctcagaaacttgataggatttaccctctgtgtaggacgtagctgggctaggggcagggtgtttccacatygtgatacctcatttatggtaagtagggacctaataaaaatcagtgattttatttatgatgtatgtatgtgtgcacccagttttcctctagcatagagacagggtgacagtcactggttggtactgctcagctacagagtgttcctgaatagatcaggcatggtaaggatattgctgccgtgtaggttttcccagacatgagtacactgtatccaaacccatccttacttacatgtgcccaggcaagagctgctcctaaaaggaggccagaatgcctcatctctgactgcagaggtcaggc

SEQ ID NO: 63204 - DNA, 600 bp, Chicken  19866894326001_1
atgacaatggaaccggccaaagaggagcggtgacggcgcggtcctccacgtcccatctctgctgccgtccccacgcgtgtccccagggacactggagtgcctggcccctggcggcccagaagatgcgactccctgtaaatacacccctgttttgtaggacaggagcaaatgtatttatcacttcagcctccttgccctcctctcctgggctttcatcccatcccttcctcgtcagctcctttccatctccatcccgatctcaggagctgctgggagagctgtgggcacatcccgtgcttyctctcaaaggaagagaatggggartaatgaaacaaaaaaggaaaactgaattgtagagagaaaggaagtctgagggtaaacctgcaggaggtgagatgctcagagtggagcaagcgtgtcccatggcccatrgatgtgctgccccgtgcccctcctctactggcagctggcttctgcccgtagccaacgccgactgctcggtcctcagaactcggagacttcccagccctgcccttcatccatctctatgtttttttttcttcctccttcaaatgtgtgcatttgctggacaactgcatt

SEQ ID NO: 63205 - DNA, 600 bp, Chicken  19866894326001_2
gagcggtgacggcgcggtcctccacgtcccatctctgctgccgtccccacgcgtgtccccagggacactggagtgcctggcccctggcggcccagaagatgcgactccctgtaaatacacccctgttttgtaggacaggagcaaatgtatttatcacttcagcctccttgccctcctctcctgggctttcatcccatcccttcctcgtcagctcctttccatctccatcccgatctcaggagctgctgggagagctgtgggcacatcccgtgcttyctctcaaaggaagagaatggggartaatgaaacaaaaaaggaaaactgaattgtagagagaaaggaagtctgagggtaaacctgcaggaggtgagatgctcagagtggagcaagcgtgtcccatggcccatrgatgtgctgccccgtgcccctcctctactggcagctggcttctgcccgtagccaacgccgactgctcggtcctcagaactcggagacttcccagccctgcccttcatccatctctatgtttttttttcttcctccttcaaatgtgtgcatttgctggacaactgcattttttattttctctctcagacacgt

SEQ ID NO: 63206 - DNA, 574 bp, Chicken  19866894326001_3
ctgtaaatacacccctgttttgtaggacaggagcaaatgtatttatcacttcagcctccttgccctcctctcctgggctttcatcccatcccttcctcgtcagctcctttccatctccatcccgatctcaggagctgctgggagagctgtgggcacatcccgtgcttyctctcaaaggaagagaatggggartaatgaaacaaaaaaggaaaactgaattgtagagagaaaggaagtctgagggtaaacctgcaggaggtgagatgctcagagtggagcaagcgtgtcccatggcccatrgatgtgctgccccgtgcccctcctctactggcagctggcttctgcccgtagccaacgccgactgctcggtcctcagaactcggagacttcccagccctgcccttcatccatctctatgtttttttttcttcctccttcaaatgtgtgcatttgctggacaactgcattttttattttctctctcagacacgtaaaaaatgcgttctgttctcatgcattgtttacaaagtagaatacgaaacaaaacaaaaacaaaaaaaaaagtggaaaaaac

SEQ ID NO: 63207 - DNA, 600 bp, Chicken  19866894326006_1
ataagtaatgcagaccaaaatatgatatggaggagctgttgttatactttcagagaaggtaggagttgtaagatatgctattccctcatcatacttgcatgtgtaacacaattgctgaaagcacagttaatttcagaaaggcttcaacacacaaataccaaaagagatttcaaaggaaacaattagtcaatgtgatcatcttatcttgcatatgaaaaccttgcttattaggaatgcctactgcatctttaaatgcttaacagtaatatgaagggtgtgtgtgttactgctatatttctrtaatgagtagtttcaacatacatccagggcatgatgataaaaaggacgtctttcacctatctttagcagcagcaaaacacacacttcttgatgatgaggtatacccctaagcatttgaacttaccttggagaattgaatgtaaattgtgatgaaaatgagacaaaaaatttaaaaagaattaccctactaaattattttcaagtcatagcctggataaattgggcctatcctatttaaaccaatgaataaataaactttataaataattatcatagatataatttcatagcttgtaaact

SEQ ID NO: 63208 - DNA, 495 bp, Chicken  19866894326006_2
tttattcctttggcctcggctgcctagcaacctccacagagctttcttagtctatactaattctgggcagtttatatttatatatttatttataagaatgtcaataagaaggatacagaaacaaagagatgtttgtttcttccttttaacactggaccctaaatgcatcacctcagtggctcagtgaaggacagtccttgattgtgcagtgaaaggtatctacctctatgaaatcacttgggaactaagaaaatcccactttccatgagacaaaagatgtatctttgtaagaagctcctkttggaatggtcactgatatttcttaccttccctgttgatttgacaagctttttcttgtcaaatatagtgaaatgctgaaatagtgagctgcttatgtaatgctcctgctttcaagcagcctggagcttttacgtaagatgaagacagagtttgtgctgctgtactgagtcactagcagttcctgcattatccaag

SEQ ID NO: 63209 - DNA, 600 bp, Chicken  19866894326008_1
ctcagctacaaaaaaaaatttcaatggagtcaccaccattagctatatgtttttgccagcaatgagaaaaagcctgcatgtcatgctcataacaatctgcaccacccactgccacactgtgctcacatccactgcttggtctccagaaatgttcagtaagtattgatgaatgtcagggggtgtcattttttctgcatggaggaattcaatgacacacctttgcttcatatgaacttgtcaaatgccattgtgtcagactgcctctctgctaccatctaccacacggcaacaacatttagyggtatactggtgggaatgttcagcctctactgccataccacaaacatctgcctctgatgttgtgggccaacatacaaaataggaggcattactttggagcagcaaatacattgtcacacacatccctaactggtactgcacactgggcaggacatgcggacactgggacagcaagggctgaacaccctcggatgctctccactgttgttgtggtcttgctggttctggttccaggcacatgcccctcttgcagtgttytccaaatgtttgcagattttcacagtatctgcaaaaatgtta

SEQ ID NO: 63210 - DNA, 524 bp, Chicken  19866894326008_2
tgcctctctgctaccatctaccacacggcaacaacatttagyggtatactggtgggaatgttcagcctctactgccataccacaaacatctgcctctgatgttgtgggccaacatacaaaataggaggcattactttggagcagcaaatacattgtcacacacatccctaactggtactgcacactgggcaggacatgcggacactgggacagcaagggctgaacaccctcggatgctctccactgttgttgtggtcttgctggttctggttccaggcacatgcccctcttgcagtgttytccaaatgtttgcagattttcacagtatctgcaaaaatgttaggtgagtttaaagtctaatttgctcatgaaccaggatcatagggactgtcacagagtgaaaggcactccacctttgtttataactccttcacccacgattggataaggctgccttgcttatggtatgcatcatgcacctgcacagcttattaatcttcttattgtttcaactaatgctttta

SEQ ID NO: 63211 - DNA, 600 bp, Chicken  19866894326010_1
tgactcacctacattcatgtctcacttatattttcttatgaaaatacagggtacatctattgctaaataatagtgaatttaatatagaaagctagttgaaatttattagcagtctacaagagtatcttgtagataattatttaataactattttctttaggaaaaattcagctagaaatgaatttcaagtgcttttttacttgagggccagaaatgagaagacagtgttctctttgagattttataaggtcagagcaaggatgatgaatctcttacgtacatagaatcataagcttatayagaattataacttccctttgttatgctataaccaacacttagggttttcagggctatttcttttctgtggaagcattgatgatatttgtcaagaagactttagatgttttgttatttcttttattaactttacacaacagtggggttaacattggtcaataacttctttgtaccgaaatccctstctgtgtgactctggctcagtgtcagatgaaatatcctccttgctttctagaacagtcctccttgcagctgtggcatccaacctcaaccatccaatctcctttttgcctgtagatg

SEQ ID NO: 63212 - DNA, 600 bp, Chicken  19866894326010_2
tcaagtgcttttttacttgagggccagaaatgagaagacagtgttctctttgagattttataaggtcagagcaaggatgatgaatctcttacgtacatagaatcataagcttatayagaattataacttccctttgttatgctataaccaacacttagggttttcagggctatttcttttctgtggaagcattgatgatatttgtcaagaagactttagatgttttgttatttcttttattaactttacacaacagtggggttaacattggtcaataacttctttgtaccgaaatccctstctgtgtgactctggctcagtgtcagatgaaatatcctccttgctttctagaacagtcctccttgcagctgtggcatccaacctcaaccatccaatctcctttttgcctgtagatgtttctactgagcaaatgctaagacttaaaacttcagatgatctcactttgactgaaatgttattagtatagtttaagaactgggaagcaagaggtcttctcagaaaattaagcacctgaactagctgaaaacattgagtttcagtgttttcaagtagaagctcactccaatatcttcctgaaaa

SEQ ID NO: 63213 - DNA, 600 bp, Chicken  19866894326013_1
tttaggacagcaaactactatggagtaggctaactgaaaaaattttaccctaaatttccattaccagaaggttttagtattcaacacttccaaatatgagtaataaaatactaaaaattaagaataaaatcgagtttttatagtagtgattcatagtggacataagtttggttacctaccaaggttattgcatgagtggcccctttgaaatcgttgaaagtaacaatacgcatagaattaaccctatatgtctacttttgctctctcagtttgtgcctttaatatgacaggaaaatgagyttaaggtactttttaagctactgaagcaaaattgacttgagctttgttttatatgccaccacatcctctttaaagcctgtgataggcatcagctgaagtttcttggaaaacatcgttttgagatttcagtagcctaagagaaaagaagtgtcatgacagaagtaacaaatgtgctctgtttagtaaaagctacatatttggaaggtaagcagaaatcaacattaagactagttcaagttctagaaaagctatcacaaattccaagtgatcagaatgtataaagtatacaaaagaaatgta

SEQ ID NO: 63214 - DNA, 599 bp, Chicken  19866894326018_1
  misc_feature (1)..(85): n is any nucleotide
nnnnnnnnnnnnnnnnnnnnnnnnnnnnnnnnnnnnnnnnnnnnnnnnnnnnnnnnnnnnnnnnnnnnnnnnnnnnnnnnnnnnncttttgtagctgagattgtatttcccagaagaaaaaaaaaaagtctaaaagaaatatgcaggttgaatatatcctgaggatagttgtgttgacatcatctttatatgacttgatttggagaaaataataataaaaaaatgtgaaaatctgaaaattgagccgcttgaacataggaaggcagcctcagaaaagccacagaggctcagttcctcttygcattacactaaaatgtctcagctgcatggaagagtattccattgcatacttggcattttggtaatgctcataccataggaacttccatggcttcttctagatagtctctactcttttacttggaaagtttcttggtgcaacctcactggaatttcccaccagcagcaggttacagaaaggagctgactgacagttccaaataatttcaaatyccttctgattcataaaagacatataatgacatgctccaagggagtggcaggcagcagtaatttctttgcaggttatgattaataac

SEQ ID NO: 63215 - DNA, 600 bp, Chicken  19866894326018_2
aataaaaaaatgtgaaaatctgaaaattgagccgcttgaacataggaaggcagcctcagaaaagccacagaggctcagttcctcttygcattacactaaaatgtctcagctgcatggaagagtattccattgcatacttggcattttggtaatgctcataccataggaacttccatggcttcttctagatagtctctactcttttacttggaaagtttcttggtgcaacctcactggaatttcccaccagcagcaggttacagaaaggagctgactgacagttccaaataatttcaaatyccttctgattcataaaagacatataatgacatgctccaagggagtggcaggcagcagtaatttctttgcaggttatgattaataactataaatgaaagaaggagtacgcatttcatggaatcatagaatcacagcatggttcgggttggaagggacctcaaagcccactcagccccaccctgttccatgggcagggctggctcccaccagctcaggctgcccagggccccatccaacccggccttgagcgcctccagggatggggcaccacagcttctctgggcagctgtgcctgcgcct

SEQ ID NO: 63216 - DNA, 600 bp, Chicken  19866894326024_1
ttccacactaagacaaataccctgaggaataaatcattccatgctcccttccaggtaacatttacctcaggcactttatcacctaaattaatagaaagccattcctggaaacggcttctgatcccttcccccccccccccatcattatcatctgcaaaatactaaaggtcagctctgcatttgatgattattttctggcattgtcatcagatcatacagttaatttttactcaacaacttattataaatattgattacatctcccttcaatgaaattgccacagaataaaaacttgcacrttttcagaatgaaatcttacgttttaatgaaatctgcccaaaggaggagagttacaattctgtcactaatatgcatatgaataagatacaatcactgacatagttcatacttcctcgggcataaattctgaaaatgattataccagggctatcttttaaaacagtgaataaagttaaaagggagagattcctgaaaagaatgactaccaattaggctgtcaatcctgcacttccttcagctgccttctacactggttgctccgaaagtaatgcctcctctattagtttccatggaaacta

SEQ ID NO: 63217 - DNA, 519 bp, Chicken  19866894326027_1
caggctggatgggatcctgtgcagtctcatctactggttggcagccctgcccacagcaggggagttggaattaaatgatctctgaggtccctcccaacccaagtcattgtacgattctagttctctaattagccttctagctttcagatagtttcatagctcaattttcaactggcctataaagctcagcgttaccactaaaaaagtttatgttctcttccctgtagggcacttggactggtttgctaatactactgaatgttcagacattactcagcaacatagcagaaaggactaaakaaaggaaagcagaaagatgacaaaaatagaagtgacattaccaaatctacagaaaaaagtgtatagaaataggaataattcttgctgcttttttgtgaaatgtctgattattttttttcctgtgctgtattattctctcaagaggttaaaatgcttagtctttcatgaagtaaatttcattcagtgttgttttcttaaagtaagtgcagaacaaggtca

SEQ ID NO: 63218 - DNA, 600 bp, Chicken  19866894326030_1
tgatatttgatgcatattcccagctcctttctgttttgcatccccgtgcttctgtagacagcacgtgaaaactgttgtttgtcatggagaaagagtcctgctgggcaggtggctccttgctaagtgctcctgctgaatggatttctgatccgagggaatctcacaggagataagtgcttgtgttcttggttttgaatgtttggagagacatattggtcccctttccagtcagcaaacacagatgcagaaggattttgctggggtcacacattcacactgttcacatttcctctttcctcmatggtgtgctgcagacatcctttccaagtccaaatctgcccaccagcaccgtgtagaggctgctgacactcccggcagtggcagcgaggggagtggcattagttgcttctcccagctcaaaggcgctgtgggagttgcgagatttgagagacaggaaggcttgccagcccacccagccccggcttctgcacggccggatcaggggaattcagagtcccatcttttcccctgattggagtagagcacttcttccagaaaggggaacttaatcttgatggaggaactacaagaagtgaacag

SEQ ID NO: 63219 - DNA, 599 bp, Chicken  19866894326032_1
  misc_feature (1)..(169): n is any nucleotide
nnnnnnnnnnnnnnnnnnnnnnnnnnnnnnnnnnnnnnnnnnnnnnnnnnnnnnnnnnnnnnnnnnnnnnnnnnnnnnnnnnnnnnnnnnnnnnnnnnnnnnnnnnnnnnnnnnnnnnnnnnnnnnnnnnnnnnnnnnnnnnnnnnnnnnnnnnnnnnnnnnnnnnnnnctgccgtgcagctgtgggggtgatgttcacctcctggaggtgtggggttgtgctgcacgtctgcccgaagcactcacttggagctttggtgtgagagcaagcaatgcagtgagctcttgcatgcactgatygctgccaaaatgcagtgcacagtggcygtgtgtggcaatagaggtgccttggagtcatgctgaaagtggcaacccgttgtcttgttcccgttgtcttgcagaagtrtcccactgctgaccttaacggagaagtgtaactccaagtgcagcccctcggctccgtggtggggctgttatggggtgtatggggggagctgctgtgcccctgccgtacagctctttgtggcagctcatcaggagggctcccacccccacggaggcagcggggagacagcagagccagctggggggtgcagagc

SEQ ID NO: 63220 - DNA, 599 bp, Chicken  19866894326032_2
  misc_feature (1)..(142): n is any nucleotide
nnnnnnnnnnnnnnnnnnnnnnnnnnnnnnnnnnnnnnnnnnnnnnnnnnnnnnnnnnnnnnnnnnnnnnnnnnnnnnnnnnnnnnnnnnnnnnnnnnnnnnnnnnnnnnnnnnnnnnnnnnnnnnnnnnnnnnnnnnnnnnctgccgtgcagctgtgggggtgatgttcacctcctggaggtgtggggttgtgctgcacgtctgcccgaagcactcacttggagctttggtgtgagagcaagcaatgcagtgagctcttgcatgcactgatygctgccaaaatgcagtgcacagtggcygtgtgtggcaatagaggtgccttggagtcatgctgaaagtggcaacccgttgtcttgttcccgttgtcttgcagaagtrtcccactgctgaccttaacggagaagtgtaactccaagtgcagcccctcggctccgtggtggggctgttatggggtgtatggggggagctgctgtgcccctgccgtacagctctttgtggcagctcatcaggagggctcccacccccacggaggcagcggggagacagcagagccagctggggggtgcagagcagacagactctgatccccggtaatccc

SEQ ID NO: 63221 - DNA, 599 bp, Chicken  19866894326032_3
  misc_feature (1)..(63): n is any nucleotide
nnnnnnnnnnnnnnnnnnnnnnnnnnnnnnnnnnnnnnnnnnnnnnnnnnnnnnnnnnnnnnnctgccgtgcagctgtgggggtgatgttcacctcctggaggtgtggggttgtgctgcacgtctgcccgaagcactcacttggagctttggtgtgagagcaagcaatgcagtgagctcttgcatgcactgatygctgccaaaatgcagtgcacagtggcygtgtgtggcaatagaggtgccttggagtcatgctgaaagtggcaacccgttgtcttgttcccgttgtcttgcagaagtrtcccactgctgaccttaacggagaagtgtaactccaagtgcagcccctcggctccgtggtggggctgttatggggtgtatggggggagctgctgtgcccctgccgtacagctctttgtggcagctcatcaggagggctcccacccccacggaggcagcggggagacagcagagccagctggggggtgcagagcagacagactctgatccccggtaatccccagctgccttcagggtgccgtggggctgacggccccaaactgcccctaatgcagcagccagacaggctctgtcctcccc

SEQ ID NO: 63222 - DNA, 600 bp, Chicken  19866894326050_1
agaaaagcatgctgaagaaaaacatttaggataagcatttaagcagggcagaaacttaaaacacgttcgtatgatcagttatatttgaaaacaggttatgtaaaccacactgagaacattattctgcattttatagcaaaaagcatcagtaaattgctaccattaaattttgttaggttcttttgttaggctttgttaggtaaaaaaacgttttaactaacttgttgcagcaaaatttttattcacctctgaagagtagtactatcttgagataccttaagattttgttgtattcaataytttttgttcttgttttctgtgttttcagagtatttgaactactgaaagcacatgaatgttgggttgaattgtgctttaggggtgttatgggtgattagtccatctgctgctgaagtttaggagaatgtcaggtttgttgctgacctgatggcccctcagtttttgtaaagaggtgtctaatccttctttttccagtctttcaaacattgtatgctgtaaactataatcaaaggacattaccttgtagttagccgctcataaattatggaatactacaagaaatgatttgtgctcaagcat

SEQ ID NO: 63223 - DNA, 565 bp, Chicken  19866894326052_1
atgtgagtagattagctttggcaatgctgtacagatgagagacagatgtgtttaatcttaccttgaaattataggattactcaggcaaacaatatatctagtttgcatttctcttctagaaaacagttgtgtgatatttggttgtaaactaaacattttagtatttttgataataataacactgatggtagcaataataacaataataagagagtctgcgaggcaaactctttcacctgtggtctttttgagaaaatgttttatgagtaaaagtcattttgtaggatccaaatcacccaytggccaaaatttctagataaattctgcttctatttctagtattctattttactatcttttctattttactatcattatttggtcttgatttcactgtgcctcattttcaatttrtctcacatttatgcttacattttaactgagtcattataatatgcataatataatatcgctgaagactcttcttgtgaacctactagaactatcacagtaagtgctattatttgtagaaataaaaagatctgtgttgaaatactttttatat

SEQ ID NO: 63224 - DNA, 451 bp, Chicken  19866894326052_2
tctagaaaacagttgtgtgatatttggttgtaaactaaacattttagtatttttgataataataacactgatggtagcaataataacaataataagagagtctgcgaggcaaactctttcacctgtggtctttttgagaaaatgttttatgagtaaaagtcattttgtaggatccaaatcacccaytggccaaaatttctagataaattctgcttctatttctagtattctattttactatcttttctattttactatcattatttggtcttgatttcactgtgcctcattttcaatttrtctcacatttatgcttacattttaactgagtcattataatatgcataatataatatcgctgaagactcttcttgtgaacctactagaactatcacagtaagtgctattatttgtagaaataaaaagatctgtgttgaaatactttttatat

SEQ ID NO: 63225 - DNA, 600 bp, Chicken  19866894326056_1
ctattattctctgagtgctcaacagcgtctcctcatatataactgtaattaggtggattagaacatgctggaatcgttaaatcatgatttaggatttgcagaccctacattaacaatagttggtatttatgttcgtgtgcataatgtgtgtgtatcggggttagcccttcgattaacccttctttcttctttttcattatgcttgcactttggaaataacagcaaatattcagagtgaatgtaagtgctgccttctgcttgaacaaaatggtgtcctttgcatgtccaaaatggcatgasgggttagtgatggtgccagctttgccttggtgcaaggtgcatgcggtgcacagggctggtggcaaatagtatgcaccctacacgtgcttgtgctttcagaggcttttggaccacagattgcacagccagcttggggaaggtgccagaatcctggcgagatctgctgcaggagagcagagaggggcttctccctctcacactgcccacctcactgctgtcatttgctttgcagtgcctcagccccccaccatcaccaagcagtctgtgaaggactacatcgttgacccccgggacaacatc

SEQ ID NO: 63226 - DNA, 600 bp, Chicken  19866894326066_1
tttttcaatggatgtcctttcagcaagaatcagaggacaataatacaatcccaactttgttctcttgccagtttttttcatagccatgcattaaattgtatatttggaaaaatgacctatgtgatggaatgtatctcaatttaagttattccctgtctgtggagacattttcaaaagctactagatgattcaggatcctaaactctacgttcaattaaaaaatgtggagtttttatgaacgtaaggaggcttaactgttcttgactgaaatagtgctaagcaagtgggtactctcacagmatctctcatttctgtagatagccatcaaaatcaatccacgtgaggtctagaaaataagttatagtctcttaaatcacttaagctgcattcttactaaataaagccagaggacaagttcaagaacagacctgtattcaatgttcttcttaagactggcatggtctttaccatggtgtgctgactagcatcctcccaggcaatgccatggcagttgaaaactgagaggaggaatggtccaggctggtcctgagcctgagagacaacttttgtactggtggctgaagttgcatggctgtaaga

SEQ ID NO: 63227 - DNA, 600 bp, Chicken  19866894326076_1
taggaaggatccttgttatagattcagaaattagattccatgtacctcagaggaaaacaaatcccagtcttgtaaaatcaccctgcctccttttctccagtcacagatgctgttacttcactgttccttctctcatctttcttcaacatttacacagtgcattgactctactgtggcttcctagatcaatcttcactcaaatgacacattaagaaacatcacattttgtttactccttttaagtgctttccatttatgttagttgtaaaggcagaagtgtttcatgcttcatttttaatwtattgtctgttttttatagatgagaattattgaaatttgaaaatgtaaaggcatactaatcatccagagaatttagtgtaagttttcacatttattccaaggtgatgattttaaacaaaatacataactagatccagggaagaaacatctgtttgaagagagcaaacctgggaagttcaagttagtaatcactagagatacataaggaggggctgctagcaatcatttgaggagcaaatatttaatttctgttgcttgcttcctccatataccacagatcaagtcagttttttttccaaa

SEQ ID NO: 63228 - DNA, 600 bp, Chicken  19866894326082_1
aagtgccatgtgggtcaatgggtaacagcgggagctggggttggtgccatgcgcggtgccccgcagccaacgcacggctttgggcatcgcctgctgctctcagccattaaaacaaacagcagtgctggccaggaggaagccgagtgcatagcaaaaatcaaagcaatagaatgagaagagcgaatggaagagggaaatgcagctgaaggggaggttgtggggagcagcgtggggccacggcgagctcaaggacaaggggatgccaatggaaagcagcgggatggggaggctgaggtctcyggtcctggaacggtgaaaaaactgatggataattgtaattagctttcagaatttttaattatagaagaggtataaataatcacaaagcacaactttgctaatgagagtccttgtgctaagaaacacagggatgcatttgttagggagactttgaaagctctgctgttaattaggtgtctcaccgccagcagggttgcaggagaaggagaaacatgtatacatttaaatcaggctcattgtgagaggtatccaacatcaattatgggatagcagggtgctaaaatgaatgcactttgtaat

SEQ ID NO: 63229 - DNA, 600 bp, Chicken  19866894326085_1
tttgtttgtttacttgtgaaagtcagctcagacaacatctcgtaacttctaagtaaatcaagaacagaatttttttactcctcctccaaactacagcttatcgcacagtgtcaatgtatggcagtatgtctgtcctatttgagtttcaaaacatacaaagagaaccaccagaagtttaaagtcagttacagcacaagctcttaagaggttcaagagcacactgcctttgtcaatttttggaaataaaagtgaaatatatgtcaattattatctttgatatgtacgacaacaaagccatayatcttttgtgcactgaatgaagaaaaataaaaaggttttctagattcatttgaaatcttaatactgccaaggggaataatttattttcccaaacttaacatttatgaaagtgttttataatgcagccgtagtatcagacttctggatacagcaccacattagtaccagtgtgctgtttgcagatgcaaagagttggagataaaagagatgtcattttaatgccaaggctgcagacatttcagtgacactgatcaactcacaaacagcagagaaaaatggcatgactattttaaatgccta

SEQ ID NO: 63230 - DNA, 599 bp, Chicken  19866894326095_1
  misc_feature (1)..(224): n is any nucleotide
nnnnnnnnnnnnnnnnnnnnnnnnnnnnnnnnnnnnnnnnnnnnnnnnnnnnnnnnnnnnnnnnnnnnnnnnnnnnnnnnnnnnnnnnnnnnnnnnnnnnnnnnnnnnnnnnnnnnnnnnnnnnnnnnnnnnnnnnnnnnnnnnnnnnnnnnnnnnnnnnnnnnnnnnnnnnnnnnnnnnnnnnnnnnnnnnnnnnnnnnnnnnnnnnnnnnnnnnnnnnnnnntgattggtaggaatgagaattgaatgttttgtggctgctgaggtctgtggcagagctggaaaggcggtttgctggyatacatcctgggcctgttttctgtgcaggaataaaagaagttggcctgatgtcgttaatgagcttctaatcccttgttgcttgattggccttcagtaggaaagtatctgaagtcacaggaccatagagtcaccaaggctgaaaaagacctccaagatcatccggtcaaaccgaccacctatcaccaacagttccccatcaaaccatagaatcacagaatcctagaatggcctgggttgcaaaggagcacagtgctcatcccattccagccccctgctatgtgcagggtcgccaaccagc

SEQ ID NO: 63231 - DNA, 465 bp, Chicken  19866894326095_2
aagtatctgaagtcacaggaccatagagtcaccaaggctgaaaaagacctccaagatcatccggtcaaaccgaccacctatcaccaacagttccccatcaaaccatagaatcacagaatcctagaatggcctgggttgcaaaggagcacagtgctcatcccattccagccccctgctatgtgcagggtcgccaaccagcagcccaggctacccagagccacatccagcctggccttgaatgcctgcagggatggggcatccacagcctccttgggcaacctgttcagtgcgtcaccaccytctgggggaaaaacttcctcctcatctccaacctaaacctcccctgtctcagtttaaaaccattcccccatgtcctatcaaaccatgtccctcagtacaacatcaaaatgtatcttgaacacctccaggggatggtgagcccaccaccttcctgggcagcccatt

SEQ ID NO: 63232 - DNA, 600 bp, Chicken  19866894326105_1
ggaaaacctactaagtattcatagaaggatacataaatcataggggatttaaatgaaggtgatcagaagtactacactgggtgtcatctttaaaacaaagaatggaagccttcaaataaaatatttgaaaagatcttactccacacagaattggggaaataaagagaaaatagtcctaatttgacaaggtgcagaacatgctggaacaacctaacataatgaaacaaaaaaaattaagctaaacatcaaaaattaactatgtaatcagttgggctagaggagcaccctcaaaagagaggratgaagcctcaagatcagcagctatgcaggagccagtaaggttagacaccacaggacatgaacacaaggcacggtcccaaaaatgtatgygacccccttctgtggatcacccaggctgatgttgtatttttccctacccactgatagaccaagcctgcttctgttgaagtcagtggggaattttgccaccaacttccaagggagtagcagcccttggatttggctatgtacaatttcgattaaaaagtctatgaatcacatcattctgctcttggcagctgaaagacaaagacagtggga

SEQ ID NO: 63233 - DNA, 600 bp, Chicken  19866894326105_2
taaaacaaagaatggaagccttcaaataaaatatttgaaaagatcttactccacacagaattggggaaataaagagaaaatagtcctaatttgacaaggtgcagaacatgctggaacaacctaacataatgaaacaaaaaaaattaagctaaacatcaaaaattaactatgtaatcagttgggctagaggagcaccctcaaaagagaggratgaagcctcaagatcagcagctatgcaggagccagtaaggttagacaccacaggacatgaacacaaggcacggtcccaaaaatgtatgygacccccttctgtggatcacccaggctgatgttgtatttttccctacccactgatagaccaagcctgcttctgttgaagtcagtggggaattttgccaccaacttccaagggagtagcagcccttggatttggctatgtacaatttcgattaaaaagtctatgaatcacatcattctgctcttggcagctgaaagacaaagacagtgggataggaaaaaaaacatctcaagcaaatggaaataatttttctattggacactttcttaaaggaagatactgagtataagttttttcctctt

SEQ ID NO: 63234 - DNA, 600 bp, Chicken  19866894326110_1
gcttggataattttcaattagctgcttgaaaatgctttgaagataaatctagccagattttcggagcttacttatttgttccagcttatctgtgcaaacgcaattggctgcagctgcctcagcccatcttcaaaaacttgccgtgccaatacacagagcagatttaaccaggcaacaatattctgctgcagcaaagattagccagacaaagggttcctttatgctataatgcctaactccctctccctaatgtcactcttgctttaatgtctttttccttcccctaagtttgatcagtgrtgagaaagtttccatgctagcaccacggatgcagcaccagtattttcccacaatttaggtctatgcaccttattttccagcatttggattcttaaggacatttaaggaagctcaatattcaggacaatgtttctgcatgaaccatgagtcagcttttctccatgactgtcacttagttcctatatatatcccttcttgcttccaagaaatgatgattcagacaaatcctgggtgagatgaccaaacggaatgagccaaattatggaaatgaaacaccattctttgctgtgtctaargata

SEQ ID NO: 63235 - DNA, 599 bp, Chicken  19866894326110_2
gtgrtgagaaagtttccatgctagcaccacggatgcagcaccagtattttcccacaatttaggtctatgcaccttattttccagcatttggattcttaaggacatttaaggaagctcaatattcaggacaatgtttctgcatgaaccatgagtcagcttttctccatgactgtcacttagttcctatatatatcccttcttgcttccaagaaatgatgattcagacaaatcctgggtgagatgaccaaacggaatgagccaaattatggaaatgaaacaccattctttgctgtgtctaargataagagcaattatattaaaaaaaccaacatcccatgctatgcaatacaaagatgctgagtgtaggataaatatcgtaccattatgtggacaccaccaccatttataggaacattttcttaatcttcctggttcgatgagtgcaaaggtaagaacacaaagaggaaacgataccatgaaactctggggaagccctgccacaaacaggtggattttgcatcagtaagatgaggtgtagatggtgtactagcattatatatcagtagtgcatcctcttcagaacagagggcaacagtcat

SEQ ID NO: 63236 - DNA, 599 bp, Chicken  19866894326111_1
  misc_feature (1)..(123): n is any nucleotide
nnnnnnnnnnnnnnnnnnnnnnnnnnnnnnnnnnnnnnnnnnnnnnnnnnnnnnnnnnnnnnnnnnnnnnnnnnnnnnnnnnnnnnnnnnnnnnnnnnnnnnnnnnnnnnnnnnnnnnnnnnntgattctatgatttggtagccttctacggtggagttacagcactggtggataaggaaagagaaactgacatcatctacttggatttgtgcaaaacacttgattctgtcccacacagcacccttgtctccaaattaaagaaccatgaatttggtagatgcactgctcagtggataagraactggtcagatgtctgcagtcgaagagttgtagtcaatccaggtggagaccagtgataagtggtatccctcaagggtctgtattgagactgatgttatttaacatgcttgtcattgacatggatagtggcattgagtacaccctcagaaagtttgctgacaacaccaagctgtgtggtgcaaccaatatgctggagggaaggtatccatctagagggactttgagaggcttgagaggttgacaaatgtcatgaagttcaataaggccagctacatggtcctgcagacgggctagggca

SEQ ID NO: 63237 - DNA, 600 bp, Chicken  19866894326112_1
cagctttttagagaactgctgttggaaacagcagtatgaagcaatgaaattagccctccggtaacatgcctctgaatggtttttcagaccacttatgtgatcaggttttgatgcctgtggacaaaccacacggtgattttgatgatggcagtctgaaagaagtgagtgtgaaaagtgatccaccaggtccccttgatagagggaagtcactgacttcagtggagttgttctaattcacttggggatctagcctgtgtttccctgtgctcatgataccagccatatacatactattttgcytctgtgtcttaaattcttattcttttctctgtcaagatttgctttaagattgctgtttaaatatatgrttgaatactaggaataagtgagctctgttcccagttggctccttttctgtgactttacaaacacctgtagtcatgctgttttcaacacgtgttactgtttcatgcaggccagcgtcttccaggagccaggcctggcagacagtgcctgtcccactggcccacaggagcaggcagctgggggcatgagggcagccccagacacaggtgttgggaatgtccctggtgatgggct

SEQ ID NO: 63238 - DNA, 600 bp, Chicken  19866894326112_2
cctctgaatggtttttcagaccacttatgtgatcaggttttgatgcctgtggacaaaccacacggtgattttgatgatggcagtctgaaagaagtgagtgtgaaaagtgatccaccaggtccccttgatagagggaagtcactgacttcagtggagttgttctaattcacttggggatctagcctgtgtttccctgtgctcatgataccagccatatacatactattttgcytctgtgtcttaaattcttattcttttctctgtcaagatttgctttaagattgctgtttaaatatatgrttgaatactaggaataagtgagctctgttcccagttggctccttttctgtgactttacaaacacctgtagtcatgctgttttcaacacgtgttactgtttcatgcaggccagcgtcttccaggagccaggcctggcagacagtgcctgtcccactggcccacaggagcaggcagctgggggcatgagggcagccccagacacaggtgttgggaatgtccctggtgatgggctacgtctggaccaagatgtaggcctgaaggtaggcccagattggcagggcaggattgtaggtagctcta

SEQ ID NO: 63239 - DNA, 600 bp, Chicken  19866894326116_1
gcaaaatgaaggagtggtgataaaataccatttgtgttctggctatttgtgagagcatgatgccccgtgtaaaatcaaagatagaacttacatgtggcacagatagtcagccctttgaaacttggattcattttcaggatttattctgaaatttcttttgttacctggggtaccttcaagcagagtttggtgggagttagcatctatctggcaccaagcccattagtgataaaccgtacttgattccagacttgacacttcctgtcttcactagagggagccacattcctactcatgtcrgtatgaattattgtaaaactgggttgtcttcctttgcatgggtacaaatggcagtgtgagtcgcagttcaaaggagagtcagaccccactgatgcttctctactaaaacattctgatttagatcttacagcaaagacacacttctgaaaggaaaaactctaaagatagctgtttccattgaagagagtgatgcttgaaaaactctatacataagattataaatcataatattctatgttcatgtttagcagtatattctttagttaggtgctgaacttgtagcaagcatgtaaaacaggc

SEQ ID NO: 63240 - DNA, 600 bp, Chicken  19866894326122_1
ctaacactgcaaatattagtggttaggcagagagatgaatttttttagcacatgtgcacagtgccacccactgttctacagaaatctctctctgctttgtgctgtaactcttatcctgcatttgtcaggcatttctatgctcttttctttatttgctgtaccataggtatataacacaaaatggtaatttatttctgataggtgttcacctcttttgagctatcagattagagcttgatagcatctatgacattaataagtattgcagatattgtatccatacacaaatccacaaatgarctgcagacagcttatggaaaagacgtctcaaatggtagcagctgcttgtattccaaatatgtaaagtctgtttaattccccttttttctcactgaaagcccaagtcaggcttcaggctgcagaggaagttgtgggatgatgcaggatgtttcaggtttgtgagaaataatcagttctattaggtatgatccaaaaattttgaaaggtaacaggatcttctrtaaccttgaatctgtgccttaaagtaatagcacaattacacatatatactctttttacctccttgtacaccaaaaagga

SEQ ID NO: 63241 - DNA, 600 bp, Chicken  19866894326122_2
atcagattagagcttgatagcatctatgacattaataagtattgcagatattgtatccatacacaaatccacaaatgarctgcagacagcttatggaaaagacgtctcaaatggtagcagctgcttgtattccaaatatgtaaagtctgtttaattccccttttttctcactgaaagcccaagtcaggcttcaggctgcagaggaagttgtgggatgatgcaggatgtttcaggtttgtgagaaataatcagttctattaggtatgatccaaaaattttgaaaggtaacaggatcttctrtaaccttgaatctgtgccttaaagtaatagcacaattacacatatatactctttttacctccttgtacaccaaaaaggagctattcagtgttcagcatgtaggcatctatcacattttctcttcctattactgcatgaaactgaaaaacttttctattctgtggaaagaaacctgacatatgctaaagaacaaatgaattactatgttaaagagaactgttgcttggcatccttttcacgttctttggacactatcagaaaagtacccatttaaacttgccaaacagtgatttgttcagc

SEQ ID NO: 63242 - DNA, 599 bp, Chicken  19866894326124_1
  misc_feature (1)..(42): n is any nucleotide
nnnnnnnnnnnnnnnnnnnnnnnnnnnnnnnnnnnnnnnnnntggaaacatcccatggatttggggtgaaggaaatgctcggtatgcaccaagatgcccaaagcagtgccatccccgatggctgcatgcagcaaacacatcctgtgggccaatcagctgtgccaaacacctgtgctttattttggttactccactctatttgcctttgcaaacaaacaaacacccaaaccaaaacaaacacacacaaccctactcctgcacatggagcgcacccaactcccagcagcagtgccacagcayggacacccagcagctggtggatcccacagtgggaaccacacgctccaacacgccccaacagcctctgcccatggctctgggcacaacagctttgtggagctgggtacattcagagcccaggcctgctgcccccacrctgcagccccgtgccctgccgggtgtctcactgcccacctctgctggctgccgccggacagcccacacactgctatttctgggmtcttgcacaagaggatgctccgaccacagacacgcggccctggggtggtggggacgggcagcgaggagaaaaagagggg

SEQ ID NO: 63243 - DNA, 600 bp, Chicken  19866894326124_2
acatcctgtgggccaatcagctgtgccaaacacctgtgctttattttggttactccactctatttgcctttgcaaacaaacaaacacccaaaccaaaacaaacacacacaaccctactcctgcacatggagcgcacccaactcccagcagcagtgccacagcayggacacccagcagctggtggatcccacagtgggaaccacacgctccaacacgccccaacagcctctgcccatggctctgggcacaacagctttgtggagctgggtacattcagagcccaggcctgctgcccccacrctgcagccccgtgccctgccgggtgtctcactgcccacctctgctggctgccgccggacagcccacacactgctatttctgggmtcttgcacaagaggatgctccgaccacagacacgcggccctggggtggtggggacgggcagcgaggagaaaaagagggggaggaggaatcagtgaagaacgcgcagccaaaagcagggcgagaggggctgagggagccccggcaccaacccggggggggttgcagaggagaagggagagagagatggtcgttggcaactcgggaagaaagcgcccg

SEQ ID NO: 63244 - DNA, 530 bp, Chicken  19866894326124_3
cacccaaaccaaaacaaacacacacaaccctactcctgcacatggagcgcacccaactcccagcagcagtgccacagcayggacacccagcagctggtggatcccacagtgggaaccacacgctccaacacgccccaacagcctctgcccatggctctgggcacaacagctttgtggagctgggtacattcagagcccaggcctgctgcccccacrctgcagccccgtgccctgccgggtgtctcactgcccacctctgctggctgccgccggacagcccacacactgctatttctgggmtcttgcacaagaggatgctccgaccacagacacgcggccctggggtggtggggacgggcagcgaggagaaaaagagggggaggaggaatcagtgaagaacgcgcagccaaaagcagggcgagaggggctgagggagccccggcaccaacccggggggggttgcagaggagaagggagagagagatggtcgttggcaactcgggaagaaagcgcccgccccgagcacaaag

SEQ ID NO: 63245 - DNA, 600 bp, Chicken  19866894326132_1
gtcacagtcagtatttgttgcatatatggaattaaaacagcaagcaagcacgtacacaaagagaagtacagctaggacacagcaacacggttttgaactaactggatgcagcaccaactgcttggagtttttcagggcgctgtggctatgccaccaacagtctgtgaggccgatacaaggcctctgcacatcgagctggtgggacgtcaccagctgcagacaggtaacaaaaataagagtggtctgagagcctctgtgtttgtctcagctactattaagaccacacaggcatttggcacrcaggcgctgggtgggggctgagcgacggcaagaagcgagaagtatacacatggccagtgctagtcattacttcgtggtggacctcacctccaccgctggcaaggaaggaggtaatttgagagaaggacacaccaaggaattaaaactgaaaatatgtatcctgtaatcagatgctctagaacagcaagcccagctctgccaagaaagtgaactgtgtggcaagggctaaacactgtatttaaatggtttgaagtgcttagtcccaaagctttccaggaarcacagaacaatgaaaataga

SEQ ID NO: 63246 - DNA, 600 bp, Chicken  19866894326132_2
ccacacaggcatttggcacrcaggcgctgggtgggggctgagcgacggcaagaagcgagaagtatacacatggccagtgctagtcattacttcgtggtggacctcacctccaccgctggcaaggaaggaggtaatttgagagaaggacacaccaaggaattaaaactgaaaatatgtatcctgtaatcagatgctctagaacagcaagcccagctctgccaagaaagtgaactgtgtggcaagggctaaacactgtatttaaatggtttgaagtgcttagtcccaaagctttccaggaarcacagaacaatgaaaatagaagtatttatgaaaaraacaaacaaacaaacaaaacaaaacaaaaacaggtagcattagcactgtctaaatattaacttgggagaggggacgctgctctttttgcactctgcatgtctcacgatcacctagtccaaccatccacctaccaccaatatttccagactaaaccatgtcctttagtacaacacctaaacgtttcttgaacacctccagggacagtgacttcacctccctgggcagaccattccaattctggataagaaattgttcctaatatcc

SEQ ID NO: 63247 - DNA, 600 bp, Chicken  19866894326132_3
ggctgagcgacggcaagaagcgagaagtatacacatggccagtgctagtcattacttcgtggtggacctcacctccaccgctggcaaggaaggaggtaatttgagagaaggacacaccaaggaattaaaactgaaaatatgtatcctgtaatcagatgctctagaacagcaagcccagctctgccaagaaagtgaactgtgtggcaagggctaaacactgtatttaaatggtttgaagtgcttagtcccaaagctttccaggaarcacagaacaatgaaaatagaagtatttatgaaaaraacaaacaaacaaacaaaacaaaacaaaaacaggtagcattagcactgtctaaatattaacttgggagaggggacgctgctctttttgcactctgcatgtctcacgatcacctagtccaaccatccacctaccaccaatatttccagactaaaccatgtcctttagtacaacacctaaacgtttcttgaacacctccagggacagtgacttcacctccctgggcagaccattccaattctggataagaaattgttcctaatatccaacctgaacctccccaagcacaactattccctctt

SEQ ID NO: 63248 - DNA, 600 bp, Chicken  19866894326138_1
cttaaacatttgctgtacggatcaggagcaattgatacagctccttggattagtgatcaacagcaacctttccctgtcaaaacacacaaactgtttgaggcaacaagaaccacaagagagacaaactgccagcgtccagtttgcaaacaaacaaacaaacgatgtgggaccacaggcaggaggaacccaacctggagccatcatcttgtatctctagtggggaagctgaagatcccccgcagatgtctttcttcccactaactgcagggcagctcagggtgacttgcgttggagggcacractttgagatgtttctgatgggttcttaggagtattcctgctaaccaatccagctcaggttcaggattcattttacaaaacatctcaaagctaaatgctcccacagaaccttggaagcctttggcttgccaaagtcaatagtgatgttactcaataatttactgtagccattcagctgaaataaaatcataacagagcactcacattacatgatgcaatacaatcttatttacactttaaaagaaatcatgaaggcacacggctaatgataaagcaagtattttctttgctgcttaagaa

SEQ ID NO: 63249 - DNA, 600 bp, Chicken  19866894326140_1
gaaaccaaacgtaatggaagtcggagcgttaaaaataaaataacaacaacaaaaaaaagtcagtcacaaccaaaacggtttggactgctgaggtctggagattttacaactaacgaccactttaaagtgaaaagaaagcccataaattctatttttaaagaacatttttctttggaaaaagagtaattttttttttcccctaaactacagcatgtggagttgccactacctagttttaatctattgtcactaagaggtagataaacaaaaatgacttggttatataggaggtcatgcccyggggctgacgtgstggagcgggcggacccccaactccagggcttcctctggggctttgcctcatgtagggtgaccccaaaagtcgtggggttccaatgcagccacccagagctgtgtccaaggcagcrtcaggggagggggaaggcacatrttgggtctgaggagcggatttttgcctcctgaagtcaacaaaagtttgatggtcaacactgaatccagatgtgcttcaaatgaaccaatatctgctgggaaatggaacacttcaccccattccagtgattctcacggtttccactctga

SEQ ID NO: 63250 - DNA, 600 bp, Chicken  19866894326140_2
atggaagtcggagcgttaaaaataaaataacaacaacaaaaaaaagtcagtcacaaccaaaacggtttggactgctgaggtctggagattttacaactaacgaccactttaaagtgaaaagaaagcccataaattctatttttaaagaacatttttctttggaaaaagagtaattttttttttcccctaaactacagcatgtggagttgccactacctagttttaatctattgtcactaagaggtagataaacaaaaatgacttggttatataggaggtcatgcccyggggctgacgtgstggagcgggcggacccccaactccagggcttcctctggggctttgcctcatgtagggtgaccccaaaagtcgtggggttccaatgcagccacccagagctgtgtccaaggcagcrtcaggggagggggaaggcacatrttgggtctgaggagcggatttttgcctcctgaagtcaacaaaagtttgatggtcaacactgaatccagatgtgcttcaaatgaaccaatatctgctgggaaatggaacacttcaccccattccagtgattctcacggtttccactctgattccagacaatcc

SEQ ID NO: 63251 - DNA, 600 bp, Chicken  19866894326140_3
gaaaagaaagcccataaattctatttttaaagaacatttttctttggaaaaagagtaattttttttttcccctaaactacagcatgtggagttgccactacctagttttaatctattgtcactaagaggtagataaacaaaaatgacttggttatataggaggtcatgcccyggggctgacgtgstggagcgggcggacccccaactccagggcttcctctggggctttgcctcatgtagggtgaccccaaaagtcgtggggttccaatgcagccacccagagctgtgtccaaggcagcrtcaggggagggggaaggcacatrttgggtctgaggagcggatttttgcctcctgaagtcaacaaaagtttgatggtcaacactgaatccagatgtgcttcaaatgaaccaatatctgctgggaaatggaacacttcaccccattccagtgattctcacggtttccactctgattccagacaatcccatctgttttctggggtgaccccagtggcagtggggggtgtgggaaggatggggccctgcgggatgctctgccccaagcgctgcatccccatggacaacagcctgtgctgcttta

SEQ ID NO: 63252 - DNA, 600 bp, Chicken  19866894326140_4
tttttaaagaacatttttctttggaaaaagagtaattttttttttcccctaaactacagcatgtggagttgccactacctagttttaatctattgtcactaagaggtagataaacaaaaatgacttggttatataggaggtcatgcccyggggctgacgtgstggagcgggcggacccccaactccagggcttcctctggggctttgcctcatgtagggtgaccccaaaagtcgtggggttccaatgcagccacccagagctgtgtccaaggcagcrtcaggggagggggaaggcacatrttgggtctgaggagcggatttttgcctcctgaagtcaacaaaagtttgatggtcaacactgaatccagatgtgcttcaaatgaaccaatatctgctgggaaatggaacacttcaccccattccagtgattctcacggtttccactctgattccagacaatcccatctgttttctggggtgaccccagtggcagtggggggtgtgggaaggatggggccctgcgggatgctctgccccaagcgctgcatccccatggacaacagcctgtgctgctttacagagaccatttcccaaatgggt

SEQ ID NO: 63253 - DNA, 600 bp, Chicken  19866894326144_1
acagcttacagcaggcactacgcttacttgcttatcaaagacgtggacaccaccttcccatgcctgaagcagcatcacaatgtgtaataaactatatagtgtgacactgaactagcttcctgggtatttcctaaaggcctaggagaagagacactatgagagtccatctgcttatcagcctggtggttgacctacatgttccctctaacctgccttgtccctgttctctcccagtctggatcccaaattcccacactggaacatcaatatcccaagtgacatacaagtctttcaaagccrcatgcagcccaaracaacgatgagctcygagggctgccaatgtgtctgcagctgctggtagtacccagatagtggtgggggaagaaaggaggaatggtgatgaygacgggcaatgacttacattatacagtcagcatggctgcaactacaggtctcctacaaaacyatgtccattttaaaggaaacaatactgaaacattttctccttagagcatacttcaaagtctgaaaggtcaaaaaatacatctccctatccttatccagtctcagaaggcagcctttgactttttctgtccctgg

SEQ ID NO: 63254 - DNA, 600 bp, Chicken  19866894326144_2
ggcactacgcttacttgcttatcaaagacgtggacaccaccttcccatgcctgaagcagcatcacaatgtgtaataaactatatagtgtgacactgaactagcttcctgggtatttcctaaaggcctaggagaagagacactatgagagtccatctgcttatcagcctggtggttgacctacatgttccctctaacctgccttgtccctgttctctcccagtctggatcccaaattcccacactggaacatcaatatcccaagtgacatacaagtctttcaaagccrcatgcagcccaaracaacgatgagctcygagggctgccaatgtgtctgcagctgctggtagtacccagatagtggtgggggaagaaaggaggaatggtgatgaygacgggcaatgacttacattatacagtcagcatggctgcaactacaggtctcctacaaaacyatgtccattttaaaggaaacaatactgaaacattttctccttagagcatacttcaaagtctgaaaggtcaaaaaatacatctccctatccttatccagtctcagaaggcagcctttgactttttctgtccctggtgtaaaagaatgt

SEQ ID NO: 63255 - DNA, 600 bp, Chicken  19866894326144_3
tgcttatcaaagacgtggacaccaccttcccatgcctgaagcagcatcacaatgtgtaataaactatatagtgtgacactgaactagcttcctgggtatttcctaaaggcctaggagaagagacactatgagagtccatctgcttatcagcctggtggttgacctacatgttccctctaacctgccttgtccctgttctctcccagtctggatcccaaattcccacactggaacatcaatatcccaagtgacatacaagtctttcaaagccrcatgcagcccaaracaacgatgagctcygagggctgccaatgtgtctgcagctgctggtagtacccagatagtggtgggggaagaaaggaggaatggtgatgaygacgggcaatgacttacattatacagtcagcatggctgcaactacaggtctcctacaaaacyatgtccattttaaaggaaacaatactgaaacattttctccttagagcatacttcaaagtctgaaaggtcaaaaaatacatctccctatccttatccagtctcagaaggcagcctttgactttttctgtccctggtgtaaaagaatgtttgaaaaaaagwagt

SEQ ID NO: 63256 - DNA, 600 bp, Chicken  19866894326144_4
cactgaactagcttcctgggtatttcctaaaggcctaggagaagagacactatgagagtccatctgcttatcagcctggtggttgacctacatgttccctctaacctgccttgtccctgttctctcccagtctggatcccaaattcccacactggaacatcaatatcccaagtgacatacaagtctttcaaagccrcatgcagcccaaracaacgatgagctcygagggctgccaatgtgtctgcagctgctggtagtacccagatagtggtgggggaagaaaggaggaatggtgatgaygacgggcaatgacttacattatacagtcagcatggctgcaactacaggtctcctacaaaacyatgtccattttaaaggaaacaatactgaaacattttctccttagagcatacttcaaagtctgaaaggtcaaaaaatacatctccctatccttatccagtctcagaaggcagcctttgactttttctgtccctggtgtaaaagaatgtttgaaaaaaagwagtaaaaataatttacagacataccacagatgaaagtgctaaaagaaagtgttagtatggcttgtgagaactgccactg

SEQ ID NO: 63257 - DNA, 600 bp, Chicken  19866894326144_5
tctgcttatcagcctggtggttgacctacatgttccctctaacctgccttgtccctgttctctcccagtctggatcccaaattcccacactggaacatcaatatcccaagtgacatacaagtctttcaaagccrcatgcagcccaaracaacgatgagctcygagggctgccaatgtgtctgcagctgctggtagtacccagatagtggtgggggaagaaaggaggaatggtgatgaygacgggcaatgacttacattatacagtcagcatggctgcaactacaggtctcctacaaaacyatgtccattttaaaggaaacaatactgaaacattttctccttagagcatacttcaaagtctgaaaggtcaaaaaatacatctccctatccttatccagtctcagaaggcagcctttgactttttctgtccctggtgtaaaagaatgtttgaaaaaaagwagtaaaaataatttacagacataccacagatgaaagtgctaaaagaaagtgttagtatggcttgtgagaactgccactgtattggcctggcagacatttcttctaaactcccttcctagaacatatgggatctttcctacc

SEQ ID NO: 63258 - DNA, 600 bp, Chicken  19866894326144_6
tcygagggctgccaatgtgtctgcagctgctggtagtacccagatagtggtgggggaagaaaggaggaatggtgatgaygacgggcaatgacttacattatacagtcagcatggctgcaactacaggtctcctacaaaacyatgtccattttaaaggaaacaatactgaaacattttctccttagagcatacttcaaagtctgaaaggtcaaaaaatacatctccctatccttatccagtctcagaaggcagcctttgactttttctgtccctggtgtaaaagaatgtttgaaaaaaagwagtaaaaataatttacagacataccacagatgaaagtgctaaaagaaagtgttagtatggcttgtgagaactgccactgtattggcctggcagacatttcttctaaactcccttcctagaacatatgggatctttcctaccaataagttcttaaaaaaaataatttccatctaacatgatgcctttctttgcaggttttgtacagactacacaatttatgccaataactagcattttaaagcattatgcaatactaactgattgtctgatattttttgagaccagagtgaaattagctga

SEQ ID NO: 63259 - DNA, 599 bp, Chicken  19866894326145_1
  misc_feature (1)..(203): n is any nucleotide
nnnnnnnnnnnnnnnnnnnnnnnnnnnnnnnnnnnnnnnnnnnnnnnnnnnnnnnnnnnnnnnnnnnnnnnnnnnnnnnnnnnnnnnnnnnnnnnnnnnnnnnnnnnnnnnnnnnnnnnnnnnnnnnnnnnnnnnnnnnnnnnnnnnnnnnnnnnnnnnnnnnnnnnnnnnnnnnnnnnnnnnnnnnnnnnnnnnnnnnnnnngaatgaatttcttggatcttctggttcagttttattggtttaatatgtgattatgctacaggctgcgatttgctcatcagaagtcatttatatgaaygctattagattagtataagctaattctacaaaaattcagatttatgaactcattcttctattttggtgttgaaagcatatgttctaaagcctttgcaagtcactctcagaatcttggtcaaaaccttgtcttaaccatgcaaataatcacacagatttaaataaaaatgtaaaaataattaatggataatattcttasaggaaaaaatagaaatacgtcttatgaagcccacttgggtatatttgaagaatgcaaacttctgagaccacttaaaagtgaaccacgacattaactgtggt

SEQ ID NO: 63260 - DNA, 599 bp, Chicken  19866894326145_2
  misc_feature (1)..(5): n is any nucleotide
nnnnngaatgaatttcttggatcttctggttcagttttattggtttaatatgtgattatgctacaggctgcgatttgctcatcagaagtcatttatatgaaygctattagattagtataagctaattctacaaaaattcagatttatgaactcattcttctattttggtgttgaaagcatatgttctaaagcctttgcaagtcactctcagaatcttggtcaaaaccttgtcttaaccatgcaaataatcacacagatttaaataaaaatgtaaaaataattaatggataatattcttasaggaaaaaatagaaatacgtcttatgaagcccacttgggtatatttgaagaatgcaaacttctgagaccacttaaaagtgaaccacgacattaactgtggtatgaaaaaacttcgtgaatttaaagcacatttccatctgcagatgttgcacccactaccagtataagtaattgcttgtactctgatgccataaatgtacacatagccaagcttttgagaagaacaaagctcgtccacctaagtgttcacagaaatatgggtacgatcactacagtaaataaatgaacatagaggaaaa

SEQ ID NO: 63261 - DNA, 599 bp, Chicken  19866894326150_1
  misc_feature (1)..(122): n is any nucleotide
nnnnnnnnnnnnnnnnnnnnnnnnnnnnnnnnnnnnnnnnnnnnnnnnnnnnnnnnnnnnnnnnnnnnnnnnnnnnnnnnnnnnnnnnnnnnnnnnnnnnnnnnnnnnnnnnnnnnnnnnnnatggggaatctgaagatatgtactgagaactgagaccactgggcattggcagggatcattaattcctcctttattttgataaacttccttgcaacttcattcctttggttgcagtaacttgcaactgagatcctaagatcctattttgtcttcagcaggagatggtttacatggcctygtacactacagttgagcttggtggtgatgaggaagaggggatagtagttcagtaggagctgtaaggcagccagaatgtctctctaccaccctcaccagtgctagcttcatcaatgtggatcattagctactcaggaaagcaggcaatggggcaaatatcctttagagattgactggatattgccaacagtcccagtggattttccaggctctatttatctaaattgcttttgtatagtaatgtgcaacagagagaaaaaagcatttacctagataccaccatatctctatcagcatctc

SEQ ID NO: 63262 - DNA, 600 bp, Chicken  19866894326150_2
ctacagttgagcttggtggtgatgaggaagaggggatagtagttcagtaggagctgtaaggcagccagaatgtctctctaccaccctcaccagtgctagcttcatcaatgtggatcattagctactcaggaaagcaggcaatggggcaaatatcctttagagattgactggatattgccaacagtcccagtggattttccaggctctatttatctaaattgcttttgtatagtaatgtgcaacagagagaaaaaagcatttacctagataccaccatatctctatcagcatctcagacamaacacaacccaaataccttatacaaaataaaattcaaagagatattagatcattcccagctcagtgaggcttagtctgactakctgaycttcctcaggctgtggctcctgacagaatggatttgtgtgaattctgacatctgggaaatgctggctcagcagctttcaattggcacctaattcacagaaggaatttacagatttcttatctgatccaccctcattcatgaggggcatgggaattttgtctgagaaagaggttcaagacaattctctactctaagcagtttgatccttcagt

SEQ ID NO: 63263 - DNA, 566 bp, Chicken  19866894326150_3
ccctcaccagtgctagcttcatcaatgtggatcattagctactcaggaaagcaggcaatggggcaaatatcctttagagattgactggatattgccaacagtcccagtggattttccaggctctatttatctaaattgcttttgtatagtaatgtgcaacagagagaaaaaagcatttacctagataccaccatatctctatcagcatctcagacamaacacaacccaaataccttatacaaaataaaattcaaagagatattagatcattcccagctcagtgaggcttagtctgactakctgaycttcctcaggctgtggctcctgacagaatggatttgtgtgaattctgacatctgggaaatgctggctcagcagctttcaattggcacctaattcacagaaggaatttacagatttcttatctgatccaccctcattcatgaggggcatgggaattttgtctgagaaagaggttcaagacaattctctactctaagcagtttgatccttcagttgtttggatacatgtcattgcatgcctaataggcttcctcaaggaattt

SEQ ID NO: 63264 - DNA, 561 bp, Chicken  19866894326150_4
accagtgctagcttcatcaatgtggatcattagctactcaggaaagcaggcaatggggcaaatatcctttagagattgactggatattgccaacagtcccagtggattttccaggctctatttatctaaattgcttttgtatagtaatgtgcaacagagagaaaaaagcatttacctagataccaccatatctctatcagcatctcagacamaacacaacccaaataccttatacaaaataaaattcaaagagatattagatcattcccagctcagtgaggcttagtctgactakctgaycttcctcaggctgtggctcctgacagaatggatttgtgtgaattctgacatctgggaaatgctggctcagcagctttcaattggcacctaattcacagaaggaatttacagatttcttatctgatccaccctcattcatgaggggcatgggaattttgtctgagaaagaggttcaagacaattctctactctaagcagtttgatccttcagttgtttggatacatgtcattgcatgcctaataggcttcctcaaggaattt

SEQ ID NO: 63265 - DNA, 600 bp, Chicken  19866894326152_1
tatctggaaggtgctcagtacagaggagctgatgggcagctggagaccgattgtcctggtgacaccacagcacacgggcagtctctgagctaaccaaagccttccttgctatcagagaagacaggtgtgtgtcatcagatgggtgaggtgccttcagtagacagcatggacatcaactgcagctattggctaaagtgggatttggaaactccttgcaaatttggcacatggagttgatatgtcctaattccttctgcagtgctggctgtttgatttgtgctgtgtttgttcagtagcaaygtttgaacaacaaaacatgagaattaaactcttcatggataaccctgacattgtaaaattttcttgttgcaaatagtggagaacagttgttatgtattgattggtgtagcagtgcccagggaggtggtggagtcaccaaccctggaggcgttcaaggaacatttagacattgcgatgagggacggttggactggatgaccctgtaggtcttttccaaccttggtgattctgtgattctgtaaataaagccattgttttataaactgtgtactggctgcaaatataagagaaaaattacag

SEQ ID NO: 63266 - DNA, 599 bp, Chicken  19866894326160_1
  misc_feature (1)..(141): n is any nucleotide
nnnnnnnnnnnnnnnnnnnnnnnnnnnnnnnnnnnnnnnnnnnnnnnnnnnnnnnnnnnnnnnnnnnnnnnnnnnnnnnnnnnnnnnnnnnnnnnnnnnnnnnnnnnnnnnnnnnnnnnnnnnnnnnnnnnnnnnnnnnnnacgggggggagcgggagagacaggggaacacatgcagcagaattgggaattccttggtcacacagatctaaagtttaaacccccctgacacaaacgttgctggacatgtcgtgcatgcaagatggccagacctggtgggaacagtgaactgtggagtgmgtgctgtgagacagcctgaatgccacctcccagcctcccggcgagctttcctcccagaacgaggagaatacagcatcggttgacaagagaatcataggatggcttaggttggaagggatcttacgtctagaagagtgggggaaaggtgaggcttgggcaayaaggaggaaattggacttgggrcaccaggcgtgctgatyggcgaccttcagccttcccacctctgggagatgcttccacctgggcccatacgatgtctccactgcaccatccagcaccaggtcctgggycagctctgc

SEQ ID NO: 63267 - DNA, 600 bp, Chicken  19866894326160_2
caggggaacacatgcagcagaattgggaattccttggtcacacagatctaaagtttaaacccccctgacacaaacgttgctggacatgtcgtgcatgcaagatggccagacctggtgggaacagtgaactgtggagtgmgtgctgtgagacagcctgaatgccacctcccagcctcccggcgagctttcctcccagaacgaggagaatacagcatcggttgacaagagaatcataggatggcttaggttggaagggatcttacgtctagaagagtgggggaaaggtgaggcttgggcaayaaggaggaaattggacttgggrcaccaggcgtgctgatyggcgaccttcagccttcccacctctgggagatgcttccacctgggcccatacgatgtctccactgcaccatccagcaccaggtcctgggycagctctgccattggtcttaagtgatagagaaggagcggaaaaaccccttgtaacaacatccttccatgtccacaccaagctctgtgctttgcctaccagcaccttcagtgcttttgagttgggctacccaagcaaaggcacattttcagacagccctccaaaaacctgag

SEQ ID NO: 63268 - DNA, 600 bp, Chicken  19866894326160_3
ttgggaattccttggtcacacagatctaaagtttaaacccccctgacacaaacgttgctggacatgtcgtgcatgcaagatggccagacctggtgggaacagtgaactgtggagtgmgtgctgtgagacagcctgaatgccacctcccagcctcccggcgagctttcctcccagaacgaggagaatacagcatcggttgacaagagaatcataggatggcttaggttggaagggatcttacgtctagaagagtgggggaaaggtgaggcttgggcaayaaggaggaaattggacttgggrcaccaggcgtgctgatyggcgaccttcagccttcccacctctgggagatgcttccacctgggcccatacgatgtctccactgcaccatccagcaccaggtcctgggycagctctgccattggtcttaagtgatagagaaggagcggaaaaaccccttgtaacaacatccttccatgtccacaccaagctctgtgctttgcctaccagcaccttcagtgcttttgagttgggctacccaagcaaaggcacattttcagacagccctccaaaaacctgaggttttatacccattcacaacrc

SEQ ID NO: 63269 - DNA, 600 bp, Chicken  19866894326160_4
acacagatctaaagtttaaacccccctgacacaaacgttgctggacatgtcgtgcatgcaagatggccagacctggtgggaacagtgaactgtggagtgmgtgctgtgagacagcctgaatgccacctcccagcctcccggcgagctttcctcccagaacgaggagaatacagcatcggttgacaagagaatcataggatggcttaggttggaagggatcttacgtctagaagagtgggggaaaggtgaggcttgggcaayaaggaggaaattggacttgggrcaccaggcgtgctgatyggcgaccttcagccttcccacctctgggagatgcttccacctgggcccatacgatgtctccactgcaccatccagcaccaggtcctgggycagctctgccattggtcttaagtgatagagaaggagcggaaaaaccccttgtaacaacatccttccatgtccacaccaagctctgtgctttgcctaccagcaccttcagtgcttttgagttgggctacccaagcaaaggcacattttcagacagccctccaaaaacctgaggttttatacccattcacaacrctttaatctgcctcactg

SEQ ID NO: 63270 - DNA, 600 bp, Chicken  19866894326160_5
tgtggagtgmgtgctgtgagacagcctgaatgccacctcccagcctcccggcgagctttcctcccagaacgaggagaatacagcatcggttgacaagagaatcataggatggcttaggttggaagggatcttacgtctagaagagtgggggaaaggtgaggcttgggcaayaaggaggaaattggacttgggrcaccaggcgtgctgatyggcgaccttcagccttcccacctctgggagatgcttccacctgggcccatacgatgtctccactgcaccatccagcaccaggtcctgggycagctctgccattggtcttaagtgatagagaaggagcggaaaaaccccttgtaacaacatccttccatgtccacaccaagctctgtgctttgcctaccagcaccttcagtgcttttgagttgggctacccaagcaaaggcacattttcagacagccctccaaaaacctgaggttttatacccattcacaacrctttaatctgcctcactgttcagatggctgccttgcaatcttatctctcaagatgatctagtgcaattttatttttcttgacttgtgaatatagattttgcagcactt

SEQ ID NO: 63271 - DNA, 599 bp, Chicken  19866894326160_6
rcaccaggcgtgctgatyggcgaccttcagccttcccacctctgggagatgcttccacctgggcccatacgatgtctccactgcaccatccagcaccaggtcctgggycagctctgccattggtcttaagtgatagagaaggagcggaaaaaccccttgtaacaacatccttccatgtccacaccaagctctgtgctttgcctaccagcaccttcagtgcttttgagttgggctacccaagcaaaggcacattttcagacagccctccaaaaacctgaggttttatacccattcacaacrctttaatctgcctcactgttcagatggctgccttgcaatcttatctctcaagatgatctagtgcaattttatttttcttgacttgtgaatatagattttgcagcacttaaaaaaaaagttgccagtaatcaaattcagagaaaacccccaaaggagacccacctctgcagttctttttaggggaaatggtctgcatttccccctgcgacagcgactcatgaactgggaagcacagatcactgtagacataggaagatccgtaaagctggcatctcattcccactgctggagcacgggat

SEQ ID NO: 63272 - DNA, 600 bp, Chicken  19866894326167_1
agtgtccagtcagtacagtcaattctgcagagctatacaaagcacgagtgcatttgggtgtcctagctgtaccggatcactaatacagaacaatacagaatcccaggaggtcagggagaaatcattctaacaatacaagaaatggaaaaaatggggatcatcagaccagcacatagctcctataactcccctacatggccagcacagaaacctggtggatgacagtagactatagagaattgaacaaagtcaccccccagttcacgtggtacacagtattatcacccttctggacacatygagtatggagctagaaacctatcattgtgacctagacttagctaacaagttctctagtattcccatcgctgaaggatcacaaattaattggcactcacaygggagggtaggcagtgaacctttcaggtcctactacaaggatacatacattcatcaacttattgccatmatttggtagcctatgacttgatggggtggaataaactagataacatcagattatatcattatattgatgatttagtgctaacttctctctctttggaaacacttggaaaagtggcagattcaayatcaaac

SEQ ID NO: 63273 - DNA, 600 bp, Chicken  19866894326167_2
tcccaggaggtcagggagaaatcattctaacaatacaagaaatggaaaaaatggggatcatcagaccagcacatagctcctataactcccctacatggccagcacagaaacctggtggatgacagtagactatagagaattgaacaaagtcaccccccagttcacgtggtacacagtattatcacccttctggacacatygagtatggagctagaaacctatcattgtgacctagacttagctaacaagttctctagtattcccatcgctgaaggatcacaaattaattggcactcacaygggagggtaggcagtgaacctttcaggtcctactacaaggatacatacattcatcaacttattgccatmatttggtagcctatgacttgatggggtggaataaactagataacatcagattatatcattatattgatgatttagtgctaacttctctctctttggaaacacttggaaaagtggcagattcaayatcaaactacctatgagaaaaagggcgggctatcaacacacaaaagtttcaagggcccagactatcagtgaaatttctgggagtcatctggtcagagcagacaaaag

SEQ ID NO: 63274 - DNA, 600 bp, Chicken  19866894326167_3
cacatagctcctataactcccctacatggccagcacagaaacctggtggatgacagtagactatagagaattgaacaaagtcaccccccagttcacgtggtacacagtattatcacccttctggacacatygagtatggagctagaaacctatcattgtgacctagacttagctaacaagttctctagtattcccatcgctgaaggatcacaaattaattggcactcacaygggagggtaggcagtgaacctttcaggtcctactacaaggatacatacattcatcaacttattgccatmatttggtagcctatgacttgatggggtggaataaactagataacatcagattatatcattatattgatgatttagtgctaacttctctctctttggaaacacttggaaaagtggcagattcaayatcaaactacctatgagaaaaagggcgggctatcaacacacaaaagtttcaagggcccagactatcagtgaaatttctgggagtcatctggtcagagcagacaaaagtcttacccagtgccattactgataagataaaggtggttccaatactaactacagcaaaacatctacaaa

SEQ ID NO: 63275 - DNA, 600 bp, Chicken  19866894326167_4
acacatygagtatggagctagaaacctatcattgtgacctagacttagctaacaagttctctagtattcccatcgctgaaggatcacaaattaattggcactcacaygggagggtaggcagtgaacctttcaggtcctactacaaggatacatacattcatcaacttattgccatmatttggtagcctatgacttgatggggtggaataaactagataacatcagattatatcattatattgatgatttagtgctaacttctctctctttggaaacacttggaaaagtggcagattcaayatcaaactacctatgagaaaaagggcgggctatcaacacacaaaagtttcaagggcccagactatcagtgaaatttctgggagtcatctggtcagagcagacaaaagtcttacccagtgccattactgataagataaaggtggttccaatactaactacagcaaaacatctacaaaaaaatttgggcaccctaggatacaggacaatcgtttgttacagttttatcatttttgttgtcagtattacacattataacatcacgtagtgctctgggagttaaacagttaacgctccagttcc

SEQ ID NO: 63276 - DNA, 600 bp, Chicken  19866894326170_1
gagatctctgcagtgcctgctgctcccagaaaagaaaatcgtggcagtgggcactccgtgcttacagaaccacacacagtaatcccatggctaaaggtgaccatgagaggacactgaattgagagagttgttgtttttgttttccaaaagatggaaagaaaggggaaatgcagaagtgctcaccttaaaggagctgaaggatctggtgcttcttactgaagagcgaataagaagcagtggcttacgcccaaagagaaaaccccaacagacactgaaacacaacttgtttttactcaaaaycataggagaatgacttttttatacctcagagacatctacacagagggatatctatgatgagagttaaccgtggatgctggggaaaccctatktargttaayccaggatacaaaaattgtgatattttgaatgaagatgaaatcagaacaatcatagggaccttgggcaaaatgaacagaaaatcacaacagagcaggactcaacaaatgtcagctatcttcaagggccaggtacattcattctccttctaatttacttggatccttctgcctttctctgcaattgcaaagtgccttttct

SEQ ID NO: 63277 - DNA, 600 bp, Chicken  19866894326170_2
aaaggtgaccatgagaggacactgaattgagagagttgttgtttttgttttccaaaagatggaaagaaaggggaaatgcagaagtgctcaccttaaaggagctgaaggatctggtgcttcttactgaagagcgaataagaagcagtggcttacgcccaaagagaaaaccccaacagacactgaaacacaacttgtttttactcaaaaycataggagaatgacttttttatacctcagagacatctacacagagggatatctatgatgagagttaaccgtggatgctggggaaaccctatktargttaayccaggatacaaaaattgtgatattttgaatgaagatgaaatcagaacaatcatagggaccttgggcaaaatgaacagaaaatcacaacagagcaggactcaacaaatgtcagctatcttcaagggccaggtacattcattctccttctaatttacttggatccttctgcctttctctgcaattgcaaagtgccttttctgcctccagctgacaagacaacctgtgcaagcatcctgagaaactgaaatgcacaaacctctgaaggtgcaaaaaccacatctgagtgcagag

SEQ ID NO: 63278 - DNA, 600 bp, Chicken  19866894326170_3
ggtgaccatgagaggacactgaattgagagagttgttgtttttgttttccaaaagatggaaagaaaggggaaatgcagaagtgctcaccttaaaggagctgaaggatctggtgcttcttactgaagagcgaataagaagcagtggcttacgcccaaagagaaaaccccaacagacactgaaacacaacttgtttttactcaaaaycataggagaatgacttttttatacctcagagacatctacacagagggatatctatgatgagagttaaccgtggatgctggggaaaccctatktargttaayccaggatacaaaaattgtgatattttgaatgaagatgaaatcagaacaatcatagggaccttgggcaaaatgaacagaaaatcacaacagagcaggactcaacaaatgtcagctatcttcaagggccaggtacattcattctccttctaatttacttggatccttctgcctttctctgcaattgcaaagtgccttttctgcctccagctgacaagacaacctgtgcaagcatcctgagaaactgaaatgcacaaacctctgaaggtgcaaaaaccacatctgagtgcagagaca

SEQ ID NO: 63279 - DNA, 600 bp, Chicken  19866894326170_4
catgagaggacactgaattgagagagttgttgtttttgttttccaaaagatggaaagaaaggggaaatgcagaagtgctcaccttaaaggagctgaaggatctggtgcttcttactgaagagcgaataagaagcagtggcttacgcccaaagagaaaaccccaacagacactgaaacacaacttgtttttactcaaaaycataggagaatgacttttttatacctcagagacatctacacagagggatatctatgatgagagttaaccgtggatgctggggaaaccctatktargttaayccaggatacaaaaattgtgatattttgaatgaagatgaaatcagaacaatcatagggaccttgggcaaaatgaacagaaaatcacaacagagcaggactcaacaaatgtcagctatcttcaagggccaggtacattcattctccttctaatttacttggatccttctgcctttctctgcaattgcaaagtgccttttctgcctccagctgacaagacaacctgtgcaagcatcctgagaaactgaaatgcacaaacctctgaaggtgcaaaaaccacatctgagtgcagagacatagcgc

SEQ ID NO: 63280 - DNA, 600 bp, Chicken  19866894326175_1
taacatgatttttacagggaaatgaatagatttcagtaaatggatacagaaagttaagatggataaatgcatataaattgatatatacatatctatctatgcatgtttatgcatatgcataccccaaacacttttgtgagcaaaagaaaacaccctaggtatacatggaattgacagtttattgttagcttaatcaaaagcttagcagtctaaatggaatatctcacaattttctcctgtccagctaggataaatctatcactcagcactcaaattaatatatcgcataatcaatagaayctttaaagcttgtcatgaaagaaaattttccagtatttacttctgttttactgttgttatgctgacttaccaatgtggctttggatcctgacggcagtggtgccatgaatgggaaagaaagctgttaacaggagtcttcaaccagatctgcagagaatcatggtatttattcacagagctcttcagggcttgtaagggattattgttttgcatcattgtctcaaagcttgctgagggtcacagatgaacaagtccaaacaagtcctgatcaagggttgagaagtcctttgtctggaggac

SEQ ID NO: 63281 - DNA, 600 bp, Chicken  19866894326181_1
tctgctgtaacattggtcccttgaaaaaagaaatcattgcagaacacccaagacattgatacatgtttgctgttttctccttattgtttgcagtttgagtcagtgtcacattctggaaagccttgataagaatatcagaatattgaatcaaaacgtgtaacttgcctgcttgagatagtcccttacctactttctctgcccttattggacttctgctcttcccttccccccacgtaccagctgagtatcctgtcacacagtgagaaacctaggtgggagaatatagatttttgcataggwtaaataggaaagccacattccaccactctcccatttaaatcagatttacatggggtgtaaatcccctcagaatagagccattcacaagggctcagaacgttcccctcacaacactgattacattaaatcagaagcaatcatgtttcttggattatatagttacagcaagagaagctctgcagtgtatttatatttgtgtgaaataagttaatgagaagccacctgtaccttatagcagtttacaagacaaacaggaacacaggtgtttcggtaatatacccatgtatttttataggaatt

SEQ ID NO: 63282 - DNA, 600 bp, Chicken  19866894326190_1
aatgcggaactaagacactgacaacaaatgcactgatggacctgtgctttctcctcttgggcctcccaaatactctaatctacccatggagggaaaagctgtctggctttggagctgagtaggaggtagcaattcaaagtctgtttctaatagtgtctgcctatggctggggatgataacactcagtcagagtgcctggtacagccttgttttgagaaacatctaaaaacaaagaaacatttactcagcagcagaatgaggattcctaccataatgccttgcaaagactgactgtgcctycagaggcagaagtgtctctgatctccacaatatgttaaccaacttactgtgcatatcccacattaaacccatcatttgttaattcacctttccaagctggggccagagccaaaggaatgactcaggcgtgtggagcaggtgtggcttcctgatttcattaatttagttaattgcatctcttcttcaacagcatcaatctcttctgtgaatcttaggcagtaagttcctagtttacatgttgcatcactggggctgcttgatcagttttaaaaactcttccttttccctcatgtatattga

SEQ ID NO: 63283 - DNA, 600 bp, Chicken  19866894326196_1
tcgatttaagtaggtgtttattcatcagataagcctgcagcttacagatgagtccatcaatgccacagataaaaacagtaggctccaattctccactaatcttgccttcagattgttcacagcaggacatggcaccacaggaaagagctgctgctctgtgacctttacacattgagctatgattaaggttagaaaaaataactttctgtcaccaagacaaaacacatcaatgtgggaccttcttgtgaatctgctccttccttttatacatacatataaccagactctattccatctcakcaaccaccctttagtgcttccaacagtttggacttttggcaatctgcatctctggccagatagtttgctttccttttgtcatgtggcaccaagaaaatcagagaacctattcctttctgcatgtattcactgacatggaatcataatgaggaagtcctgcagagaaatatctttgtcccaytgccaatctgcactggaggtgccaacctcctcatttgaagttctgccacayraccccatacttatattgccactacacygtacagcgcaaagggcagtggaatatctctttaatatctc

SEQ ID NO: 63284 - DNA, 600 bp, Chicken  19866894326196_2
attaaggttagaaaaaataactttctgtcaccaagacaaaacacatcaatgtgggaccttcttgtgaatctgctccttccttttatacatacatataaccagactctattccatctcakcaaccaccctttagtgcttccaacagtttggacttttggcaatctgcatctctggccagatagtttgctttccttttgtcatgtggcaccaagaaaatcagagaacctattcctttctgcatgtattcactgacatggaatcataatgaggaagtcctgcagagaaatatctttgtcccaytgccaatctgcactggaggtgccaacctcctcatttgaagttctgccacayraccccatacttatattgccactacacygtacagcgcaaagggcagtggaatatctctttaatatctcattttctctctgtttttcagcatttaaaactgaggtcctaaaaacatctgtctaatttgtctttttcagagaagtgcataacaggtagctaataaatctttttagagagcttgggaggagtagggggagatccttaaataaaaaggaatgtctgaataaagtctaccactgaccaagccat

SEQ ID NO: 63285 - DNA, 600 bp, Chicken  19866894326196_3
tgggaccttcttgtgaatctgctccttccttttatacatacatataaccagactctattccatctcakcaaccaccctttagtgcttccaacagtttggacttttggcaatctgcatctctggccagatagtttgctttccttttgtcatgtggcaccaagaaaatcagagaacctattcctttctgcatgtattcactgacatggaatcataatgaggaagtcctgcagagaaatatctttgtcccaytgccaatctgcactggaggtgccaacctcctcatttgaagttctgccacayraccccatacttatattgccactacacygtacagcgcaaagggcagtggaatatctctttaatatctcattttctctctgtttttcagcatttaaaactgaggtcctaaaaacatctgtctaatttgtctttttcagagaagtgcataacaggtagctaataaatctttttagagagcttgggaggagtagggggagatccttaaataaaaaggaatgtctgaataaagtctaccactgaccaagccattaaagtgccattaaataaacattttggccaacagcatgtagccttgcacag

SEQ ID NO: 63286 - DNA, 600 bp, Chicken  19866894326196_4
gggaccttcttgtgaatctgctccttccttttatacatacatataaccagactctattccatctcakcaaccaccctttagtgcttccaacagtttggacttttggcaatctgcatctctggccagatagtttgctttccttttgtcatgtggcaccaagaaaatcagagaacctattcctttctgcatgtattcactgacatggaatcataatgaggaagtcctgcagagaaatatctttgtcccaytgccaatctgcactggaggtgccaacctcctcatttgaagttctgccacayraccccatacttatattgccactacacygtacagcgcaaagggcagtggaatatctctttaatatctcattttctctctgtttttcagcatttaaaactgaggtcctaaaaacatctgtctaatttgtctttttcagagaagtgcataacaggtagctaataaatctttttagagagcttgggaggagtagggggagatccttaaataaaaaggaatgtctgaataaagtctaccactgaccaagccattaaagtgccattaaataaacattttggccaacagcatgtagccttgcacagc

SEQ ID NO: 63287 - DNA, 580 bp, Chicken  19866894326196_5
cttttatacatacatataaccagactctattccatctcakcaaccaccctttagtgcttccaacagtttggacttttggcaatctgcatctctggccagatagtttgctttccttttgtcatgtggcaccaagaaaatcagagaacctattcctttctgcatgtattcactgacatggaatcataatgaggaagtcctgcagagaaatatctttgtcccaytgccaatctgcactggaggtgccaacctcctcatttgaagttctgccacayraccccatacttatattgccactacacygtacagcgcaaagggcagtggaatatctctttaatatctcattttctctctgtttttcagcatttaaaactgaggtcctaaaaacatctgtctaatttgtctttttcagagaagtgcataacaggtagctaataaatctttttagagagcttgggaggagtagggggagatccttaaataaaaaggaatgtctgaataaagtctaccactgaccaagccattaaagtgccattaaataaacattttggccaacagcatgtagccttgcacagctggtctg

SEQ ID NO: 63288 - DNA, 599 bp, Chicken  19866894326206_1
  misc_feature (1)..(206): n is any nucleotide
nnnnnnnnnnnnnnnnnnnnnnnnnnnnnnnnnnnnnnnnnnnnnnnnnnnnnnnnnnnnnnnnnnnnnnnnnnnnnnnnnnnnnnnnnnnnnnnnnnnnnnnnnnnnnnnnnnnnnnnnnnnnnnnnnnnnnnnnnnnnnnnnnnnnnnnnnnnnnnnnnnnnnnnnnnnnnnnnnnnnnnnnnnnnnnnnnnnnnnnnnnnnnnacagctgaaattttgactgctatggagagtgccacaggtgatggcaaataatggtaggtatgaatgcatgattggaaggactgtgagtataaawtgatgtagaacatcctagtttgttttgtagaggctgttctttgaaatcacagtacatttgtattttagcttcctcttatgggatgatcaaattctacattgtgtcaatgctgacaaggcctggaacaactytcctatgaagaaagactgagggaactgggcttgtttagcttggagaagagaaggctctggggagacctcattgtggccttccagtactttaagggagcacataacgggggggraatggctgtttacatgagttgatagtgataaaayaagtgagaatggttttaaact

SEQ ID NO: 63289 - DNA, 599 bp, Chicken  19866894326206_2
  misc_feature (1)..(75): n is any nucleotide
nnnnnnnnnnnnnnnnnnnnnnnnnnnnnnnnnnnnnnnnnnnnnnnnnnnnnnnnnnnnnnnnnnnnnnnnnnnacagctgaaattttgactgctatggagagtgccacaggtgatggcaaataatggtaggtatgaatgcatgattggaaggactgtgagtataaawtgatgtagaacatcctagtttgttttgtagaggctgttctttgaaatcacagtacatttgtattttagcttcctcttatgggatgatcaaattctacattgtgtcaatgctgacaaggcctggaacaactytcctatgaagaaagactgagggaactgggcttgtttagcttggagaagagaaggctctggggagacctcattgtggccttccagtactttaagggagcacataacgggggggraatggctgtttacatgagttgatagtgataaaayaagtgagaatggttttaaactgagacaggggaggtttaagttggatattaggaggaagtttttcactcagagggtggtgacgtactggaacaggttgcccaaggaggttgtggatgctccatccctggaggcattcaaggccaggctggatg

SEQ ID NO: 63290 - DNA, 600 bp, Chicken  19866894326206_3
tgatggcaaataatggtaggtatgaatgcatgattggaaggactgtgagtataaawtgatgtagaacatcctagtttgttttgtagaggctgttctttgaaatcacagtacatttgtattttagcttcctcttatgggatgatcaaattctacattgtgtcaatgctgacaaggcctggaacaactytcctatgaagaaagactgagggaactgggcttgtttagcttggagaagagaaggctctggggagacctcattgtggccttccagtactttaagggagcacataacgggggggraatggctgtttacatgagttgatagtgataaaayaagtgagaatggttttaaactgagacaggggaggtttaagttggatattaggaggaagtttttcactcagagggtggtgacgtactggaacaggttgcccaaggaggttgtggatgctccatccctggaggcattcaaggccaggctggatgtggctctggacagcctggtctggtggttggtgaccctgcaaatagcagggggttggaactagatgatcattgttgtccttttcaacccaggccattctatgattgtttgacctg

SEQ ID NO: 63291 - DNA, 600 bp, Chicken  19866894326206_4
tggaaggactgtgagtataaawtgatgtagaacatcctagtttgttttgtagaggctgttctttgaaatcacagtacatttgtattttagcttcctcttatgggatgatcaaattctacattgtgtcaatgctgacaaggcctggaacaactytcctatgaagaaagactgagggaactgggcttgtttagcttggagaagagaaggctctggggagacctcattgtggccttccagtactttaagggagcacataacgggggggraatggctgtttacatgagttgatagtgataaaayaagtgagaatggttttaaactgagacaggggaggtttaagttggatattaggaggaagtttttcactcagagggtggtgacgtactggaacaggttgcccaaggaggttgtggatgctccatccctggaggcattcaaggccaggctggatgtggctctggacagcctggtctggtggttggtgaccctgcaaatagcagggggttggaactagatgatcattgttgtccttttcaacccaggccattctatgattgtttgacctggggaagcattctgtgacaccactgacacattgac

SEQ ID NO: 63292 - DNA, 600 bp, Chicken  19866894326206_5
atttattttattttagtcataacctaataagtatatgtgtaattttgtacacatttttaaaatctaagagtgaaaatgcagaagttacttgtaatgaggaggagattatcctcagagatgaggaaatctgagactgtaatcaggaattgacgacctatctgtgagcaagcaatcctgggtctcctcattgggttcagctgtgggatcaggtgtgcactctatctgggaagctataatagtagcttctgggaacctgtttgcaagatttgatggagctgatcaagtgggtcctctgagagrcagctggagaggaaggtaagaaagttttgctaaggagctcttgcttgaggctgaattatagtgctggtgggctttctctgctctgagtgttagaaggaaagtggttttgcattgagatatagggtaggtgaagaacttctaacttttctttcttgaacagtttctgaggactaaaaaatgcaacttgtcagccttcgttctaagtctctgttttgtatatttttgtattaattagaaagcatcttttgaatttctgttttctttcctttatttgcagtgtgtggctaacctgactccttt

SEQ ID NO: 63293 - DNA, 569 bp, Chicken  19866894326211_1
gagcagtagaggatgacttttaatttagaaaggcaaatatacaatttctttcaccctttctgaatgtagtttaaccccctcttctttggagacgtgtgtttcctgaccaagagttatgcctgtattgacttcacttaagaataataaaaaaatgtttttcttttgctgaatttatcgagacctttggcattccaggacaggatcttcatattcaagactatagcctacaatctagagcatccaaaggaaatgaagttgtgtatcagtatgtcacacacattcgtgggcaaggcttttgcratgcaaatagtgaatacttggtgaggcaggctggctggggcaaataggaaggttctggtatgcaagattcacagaaatgggcaaaaatgccagagtactgtgccctgtcagagcggcccgtttgcaagggtttgccaatagggtcaattytcctccccaagatgttcttaaaacagatgctaactcaggaaagtcacgctggctcttctctgtgcaaaaatcaggggaaaaatgtgtgtgtgaaaagcacaaacccaaggtaagaagtt

SEQ ID NO: 63294 - DNA, 419 bp, Chicken  19866894326211_2
aatgtttttcttttgctgaatttatcgagacctttggcattccaggacaggatcttcatattcaagactatagcctacaatctagagcatccaaaggaaatgaagttgtgtatcagtatgtcacacacattcgtgggcaaggcttttgcratgcaaatagtgaatacttggtgaggcaggctggctggggcaaataggaaggttctggtatgcaagattcacagaaatgggcaaaaatgccagagtactgtgccctgtcagagcggcccgtttgcaagggtttgccaatagggtcaattytcctccccaagatgttcttaaaacagatgctaactcaggaaagtcacgctggctcttctctgtgcaaaaatcaggggaaaaatgtgtgtgtgaaaagcacaaacccaaggtaagaagtt

SEQ ID NO: 63295 - DNA, 600 bp, Chicken  19866894326218_1
ataatttgctctatctataacactatcaagtagtgttattgtgctctttgtatctgttgtagattccatcaaaataaataggaggcattacttccagagtgacctatgtattgtggtatgcatcagcaaacacgcttctatagagattacaaagaaaatggtacgtgtgctatggactgtcaacgtccatagcacatttctaggtactatctgaagtatttccttttctaataatcaggtcagtaagaactgatatgagaagaaggacctaagaaaagaaatgggaatggagactcaaayttataaaggagaaaaacaacaagatcacatgaaaaacaggtcatgaagggatgtgaataagctgctttgcaggggtgcaaagaagagagagaaaatacttagaatgcagaacaacacagttactaaaataatagaataaatgagtacaaagtggccacaraaaaaaaaattagtctggaaactggaatgtttctctccatcagagggataaaattagtgtaggacagtaagaggaagagtgaactttagcttgaagagttacatacaagtatagtgaccctgcctcggagactgttgtag

SEQ ID NO: 63296 - DNA, 540 bp, Chicken  19866894326218_2
gtacgtgtgctatggactgtcaacgtccatagcacatttctaggtactatctgaagtatttccttttctaataatcaggtcagtaagaactgatatgagaagaaggacctaagaaaagaaatgggaatggagactcaaayttataaaggagaaaaacaacaagatcacatgaaaaacaggtcatgaagggatgtgaataagctgctttgcaggggtgcaaagaagagagagaaaatacttagaatgcagaacaacacagttactaaaataatagaataaatgagtacaaagtggccacaraaaaaaaaattagtctggaaactggaatgtttctctccatcagagggataaaattagtgtaggacagtaagaggaagagtgaactttagcttgaagagttacatacaagtatagtgaccctgcctcggagactgttgtaggtgaaccactgactccacctaagagctaacctgagcggcacaggtaatgatgttctggacttcaggtacacaccctatggctgcagcataaactcagcca

SEQ ID NO: 63297 - DNA, 600 bp, Chicken  19866894326220_1
cttttgaaatggtttttaacactagaaaaagaggaggaggtatagaggaaggcagagattaggccatctccaggggccacttcacgggttttttttaaacctacctgaaaactctgcattttcatcctccatttgataagcacatttttccacaagagaattttagtttgctggaacacactcagatttctcttaggtctcctcatctttgtacctagaaaaaaaaaaacaaaaaactaattgctttcagatacagcaacgctaaaacatcagtgactgcttttatttgcacagcatttrcatgtctgccagaaacactctctccttttcctgagaaggagctgaagccatttggtccctgactctgtcctacaccagaggccatcgttgtcatcagtgtgttcctcatccttgcagctcagcaatatgacaccgattgtartccagatttcatgcttccatgctttagcacagtaagtctgggaggagttaactccgtaatacaaaagggaaatcagactaattggtttgggtggcatgaatatccaagaaatgacaaaaacatagtcaagtaaaatcaacagattctagttgcatgtg

SEQ ID NO: 63298 - DNA, 578 bp, Chicken  19866894326220_2
catttttccacaagagaattttagtttgctggaacacactcagatttctcttaggtctcctcatctttgtacctagaaaaaaaaaaacaaaaaactaattgctttcagatacagcaacgctaaaacatcagtgactgcttttatttgcacagcatttrcatgtctgccagaaacactctctccttttcctgagaaggagctgaagccatttggtccctgactctgtcctacaccagaggccatcgttgtcatcagtgtgttcctcatccttgcagctcagcaatatgacaccgattgtartccagatttcatgcttccatgctttagcacagtaagtctgggaggagttaactccgtaatacaaaagggaaatcagactaattggtttgggtggcatgaatatccaagaaatgacaaaaacatagtcaagtaaaatcaacagattctagttgcatgtgattttaacatgctgtaggcttcacaccaagcgttgagaaactcttggccatagtacaagctgagctcagacagaaaacagaatcaactgaaggcaactgggagctacgagagaacaaatt

SEQ ID NO: 63299 - DNA, 599 bp, Chicken  19866894326222_1
  misc_feature (1)..(118): n is any nucleotide
nnnnnnnnnnnnnnnnnnnnnnnnnnnnnnnnnnnnnnnnnnnnnnnnnnnnnnnnnnnnnnnnnnnnnnnnnnnnnnnnnnnnnnnnnnnnnnnnnnnnnnnnnnnnnnnnnnnnnncaattacaggagactataaatggctgcattaaacatctaagggcactgtgtataggctgagcagaacaaaaaaacaacttctagcagacccattcccttgctttccaataggagaaacagatgctgtacgcacaagaatgaaagagctatacctgaaataacctttcccatcatcttctttkatttccagtgacacagagaaggtgaaaatatcactgtctggagtctgtggggtggcaatggctgagagcggagtttgtttggcagaacgacgaaaggcagtggcaaagctgtacagtattcggctcacctgcagttacacagcaccaaagaaagttcagaaacacagaagtgaacaaaaygtagcacagctgaaaactgatctgaatttttgcttgctaacacaacgagaaataactgtatagaagtgcttgcagctgctgtaggtctaattaacttttcctacacttcttagaaaaag

SEQ ID NO: 63300 - DNA, 600 bp, Chicken  19866894326222_2
agaacaaaaaaacaacttctagcagacccattcccttgctttccaataggagaaacagatgctgtacgcacaagaatgaaagagctatacctgaaataacctttcccatcatcttctttkatttccagtgacacagagaaggtgaaaatatcactgtctggagtctgtggggtggcaatggctgagagcggagtttgtttggcagaacgacgaaaggcagtggcaaagctgtacagtattcggctcacctgcagttacacagcaccaaagaaagttcagaaacacagaagtgaacaaaaygtagcacagctgaaaactgatctgaatttttgcttgctaacacaacgagaaataactgtatagaagtgcttgcagctgctgtaggtctaattaacttttcctacacttcttagaaaaagagaacattaaatatgcattctcatttcatatctgaggtatgaaaagtaatgaattgtattacctctaaagtgcctgatataattctgctctatcttggaaataacttttatgtttacataattacttgacaaaaagattcaactcacagcctcttgaatctcgcatcggaagacgtgaatc

SEQ ID NO: 63301 - DNA, 599 bp, Chicken  19866894326223_1
  misc_feature (1)..(107): n is any nucleotide
nnnnnnnnnnnnnnnnnnnnnnnnnnnnnnnnnnnnnnnnnnnnnnnnnnnnnnnnnnnnnnnnnnnnnnnnnnnnnnnnnnnnnnnnnnnnnnnnnnnnnnnnnnnggacaggacagtccaaggactgagaatgaaggacatgattgagaaggaggagaaatgaagcatagccaaagtttgtttcagttgaatgtaaaaaggtggcaaatcttaaaaaaaatatgaacattcaaaggctcccatggttgttttttaatcaagatgcttatgcagaacatggttctgaaagcaagtgtgwattatgggctgcctgcaggatgtcctgttacatgtaattgctctatcacacagaggctctcttaagaagattctgtgtgttctggtttagaaatgaaatttctacctaaaagaatttcccagtcttgaggttggtaagtgaaattacagatataaatgaagcaaaaggttctcctttttataagatttataagtggcaggtcaatttctttaagtgctgctggcatttagataagctcaaatcacgttcaaagtcattgagattttggatttgttctggcttgtagatagatggaaact

SEQ ID NO: 63302 - DNA, 563 bp, Chicken  19866894326223_2
tctggtttagaaatgaaatttctacctaaaagaatttcccagtcttgaggttggtaagtgaaattacagatataaatgaagcaaaaggttctcctttttataagatttataagtggcaggtcaatttctttaagtgctgctggcatttagataagctcaaatcacgttcaaagtcattgagattttggatttgttctggcttgtagatagatggaaactgttgaagagaagtcttaatttaaaaaaatgggacagatttttttaaagtaacttgaaataatagtactgagatacatgaayttttctgcttkgggcagatattacttctgagccttatttaatgctttaaatacatgcacaatgcttcaggactgaccttttagcttaaagatcaggttaatacacatatccacaactgtgcagcctcttgacgactttaggtctactatgtgtcattatgattttctaaagactatgaagaaatcttaatctcttctttaaccttaaaatcatcccttccacaaaatgaaagatttcccaaggaattatgttacaagttccta

SEQ ID NO: 63303 - DNA, 552 bp, Chicken  19866894326223_3
aatgaaatttctacctaaaagaatttcccagtcttgaggttggtaagtgaaattacagatataaatgaagcaaaaggttctcctttttataagatttataagtggcaggtcaatttctttaagtgctgctggcatttagataagctcaaatcacgttcaaagtcattgagattttggatttgttctggcttgtagatagatggaaactgttgaagagaagtcttaatttaaaaaaatgggacagatttttttaaagtaacttgaaataatagtactgagatacatgaayttttctgcttkgggcagatattacttctgagccttatttaatgctttaaatacatgcacaatgcttcaggactgaccttttagcttaaagatcaggttaatacacatatccacaactgtgcagcctcttgacgactttaggtctactatgtgtcattatgattttctaaagactatgaagaaatcttaatctcttctttaaccttaaaatcatcccttccacaaaatgaaagatttcccaaggaattatgttacaagttccta

SEQ ID NO: 63304 - DNA, 600 bp, Chicken  19866894326227_1
aatgagagaaagtatatttttattcaggtcccaggagcattcctccactgtttgtcccaatatgctgtgatttaaaagcttttcatccttgctctgcctttgtaaacaagctgtacatattcataaaagtcttttaatttttctactgaagtattataactgttgtcaacacgataatataagctgtttacttaaggctgtatggtagttaggacttctgtttactttcacaattttttctgtttcatttacgaaataaaatattcttgtatcaattattaaatcttctctactaatttytactgcagagttaaattgatgtgcatgtttgtgtgatataagcacaactattattttcacctagtacttctgggacttgtttcttggttccttttaagttaccacttggaattacagaaaatgaaatatttaatgttcggtgttttcttcgggacatttgtgaatgtcttttgttttaaatggaaagctgtaacgtataagttttcaaaattaaggctacgggaatacttagtgaaggaaaaatgaaactatttgtggaagatatagcagttcctggctggacttgaaatgcgttccata

SEQ ID NO: 63305 - DNA, 434 bp, Chicken  19866894326227_2
aagtcattgcaaaactctgtgtaaatgattttaaatcaagactatcttgtcatcaaaagtagtacaagtatcacttaagctttctagttgcagagatgtcaagtatttatgcaattaaatgttgatacctaaataaagtcttgtatgaattatattttgcagtcctgttgcaaggcttatgaatacatgggatacataatggaaaaggaacaagcgtataaagatgcagcaataaattatgagatggcctggagatatggaaaccaatcaaatccaacaataggcatgtttatataatgyatatatacaacgcactacagtaggaatgcataattttaccctttcctggagagactatatttctctttccatagtgagaatattactggtttttcttcacattagagccacagctgtctaaggatctacttaag

SEQ ID NO: 63306 - DNA, 594 bp, Chicken  19866894326228_1
acgaggaagctgcacgcctgtatttagctgaattttaatggggaaaaaaaaaagactccattaaaaaccttaactgcactattaaatgatccaaaaatattataggtggggctggcacaactgccaactgttaagactgccagatacctcctgttataagactgcgttttcaattgcttataaactttgccaaacataaactgtttggctgaaaatttctctcaccaggtgtgtgcctcagggataacttatctgcaaatctgcagcccagtggcttagacctttccaagaacaagcccrtggaagcaccaatcccttggtccacattgcaaatcacagaaaccttttctctgcgtccctgtgcttggcaaggagatgaggaagggagggagcctgttaggaagtgccttacgccacttcatttcagttaggttataaaggtttggaaatgccagttcatgtacgcttgctagaggcttgctgaaatttaagaggaaaaattcccaaagattccacctgcactgaacacatcacttcctcttgcgatgaaactgagcttcttggccagtggagcaaatgggagcaggcaaaaag

SEQ ID NO: 63307 - DNA, 600 bp, Chicken  19866894326233_1
cctgctgctcctggctgtgtcctgctttgtccctgcctatgctgtgcctccatgcccaccacagccaccaccacctcctcctgcacctgtctatggggagatgagtattttgttcatcacgctgccccacaatcccacatctccacggtcatttgcacagctgcattcttgcatgtctgtccacccatacatcccagcatcagggtgctgtggcaccccaagaccctcactgggggccctcttattaccacagccccacagcaaggacactgcagggatattgtggggacaccataggamtacagcggacagcagctcctggcagccccatgcccagctcggtgcccggttggccgcctccccccccgcctgccggggtcaggtttcccccctccccatacctgcctcagttcttgacttctgaactcttcagggaactcgctggcgccagctccatcaaccaaagtccttgtggttaggaggagctgggaagggagggagggagcaaaggctggggccagcgggtccggggggctgcgcccaagcagaggccttccaatcccccgaggctgcagctgccttcatccttctccagagatg

SEQ ID NO: 63308 - DNA, 549 bp, Chicken  19866894326233_2
acctgcctcagttcttgacttctgaactcttcagggaactcgctggcgccagctccatcaaccaaagtccttgtggttaggaggagctgggaagggagggagggagcaaaggctggggccagcgggtccggggggctgcgcccaagcagaggccttccaatcccccgaggctgcagctgccttcatccttctccagagatgggcctgagcctcttctccagccctctcacatatggggcagatggggtttgagacctctggaagtcgatgggaattattgatgagtttggggatgatgcrcaaccccaggatttaattcctgcgcaagccacagacctcacctgcagccttggggaagccatgcagctcatagcattgggagtttgggcactgcttgtctcagccccgtgacaacacctggttcagatgctccagctgaaactactcctggcctcagtttccccaagggctttttgtggctggggcttgaaagtgccatagagcacatggctctagaaatgccctgccttgtgagaactggcagctcat

SEQ ID NO: 63309 - DNA, 473 bp, Chicken  19866894326246_1
ttcctttgcatcctgattgctctgctctcgcgaaagctcaggcgctgctgctgtgaataatacctgcacagatctgtcttcagataactgccaaagtccttccagctgagtcctgcagcctacagtgtgagcagagctctcagcgagtctaaaagtgaagacatgaactgtgctgtccgggctgtgcaggggagagcagtggctgccgtggctccttctaacgagctgctggacttgggctggccgtgcgcatggcactgggggtgtgccacacgtgttgtcccagggccaaaaagatcygatagttggagttttattgggttccatggagagaggggtatgggtaaataaggacagttataggagtgtccctcgctatttttttttgtttcatttatagcactataaagtgctgtagcactcactataaagcgctataacaggaagatcaaagcatccccatttatgtgtta

SEQ ID NO: 63310 - DNA, 600 bp, Chicken  19866894326248_1
gcctcttctcctcctctgtcccaggagactgtgggcaatcagagcaaagccctgccccaaggaggagacggccacctagttccaggtgaggtgttgtcagctgctttgctcctgaagtgctattccagctgtcatttccatgtttcagaggcagcagagactctccaatggccctagaaagttgaagagcttaagtggtgtatttatatgactgatatttgaaaacaacaattttctctctgtctctctttcttttaatacaaataggagatgtaaaccatttcaaatgctaactgtaarcattggagtcctggatccactggctgttcattgartgttctgatcgtagataattctgctttcaacgctttggatgaattcaaggcaaacgtgtaacataatgtctttcccttttattacctttccagtgactcagacagtgaccaagagtggcaaaagtaccaggaggctgctgtgtcagcagcagacattctgaagcaaagtgcttttcctgmgttgtcccaggattccagccagaatatgtgtcagggttatgtggagcacagacagaagaaaaagaagaaaaagaaaattaaggga

SEQ ID NO: 63311 - DNA, 600 bp, Chicken  19866894326248_2
caatcagagcaaagccctgccccaaggaggagacggccacctagttccaggtgaggtgttgtcagctgctttgctcctgaagtgctattccagctgtcatttccatgtttcagaggcagcagagactctccaatggccctagaaagttgaagagcttaagtggtgtatttatatgactgatatttgaaaacaacaattttctctctgtctctctttcttttaatacaaataggagatgtaaaccatttcaaatgctaactgtaarcattggagtcctggatccactggctgttcattgartgttctgatcgtagataattctgctttcaacgctttggatgaattcaaggcaaacgtgtaacataatgtctttcccttttattacctttccagtgactcagacagtgaccaagagtggcaaaagtaccaggaggctgctgtgtcagcagcagacattctgaagcaaagtgcttttcctgmgttgtcccaggattccagccagaatatgtgtcagggttatgtggagcacagacagaagaaaaagaagaaaaagaaaattaagggagagaacaaaactgaagagaaaataatagacccagc

SEQ ID NO: 63312 - DNA, 600 bp, Chicken  19866894326248_3
tatttgaaaacaacaattttctctctgtctctctttcttttaatacaaataggagatgtaaaccatttcaaatgctaactgtaarcattggagtcctggatccactggctgttcattgartgttctgatcgtagataattctgctttcaacgctttggatgaattcaaggcaaacgtgtaacataatgtctttcccttttattacctttccagtgactcagacagtgaccaagagtggcaaaagtaccaggaggctgctgtgtcagcagcagacattctgaagcaaagtgcttttcctgmgttgtcccaggattccagccagaatatgtgtcagggttatgtggagcacagacagaagaaaaagaagaaaaagaaaattaagggagagaacaaaactgaagagaaaataatagacccagcagagcgtgaccaggtcagcaaagatttgccatggttggtttctgcaaatggacaacacaagagagaggacagcaatcatacagataacacagtgtcaccaggagctgtgatgaagaagaagaagaagaagaagaaagagagagaataaagattktgctctgcaaatgggcaggtggttgt

SEQ ID NO: 63313 - DNA, 600 bp, Chicken  19866894326248_4
attctgaagcaaagtgcttttcctgmgttgtcccaggattccagccagaatatgtgtcagggttatgtggagcacagacagaagaaaaagaagaaaaagaaaattaagggagagaacaaaactgaagagaaaataatagacccagcagagcgtgaccaggtcagcaaagatttgccatggttggtttctgcaaatggacaacacaagagagaggacagcaatcatacagataacacagtgtcaccaggagctgtgatgaagaagaagaagaagaagaagaaagagagagaataaagattktgctctgcaaatgggcaggtggttgtgatgaatgaaggatgctgggaaaaagctaacagagctgctgcagacggaaaactaattggcaaagcttttgttctaaaagctccgtggcctgggagtctaattaaagcgacttcctatgttgttgacctcccttggggagcacttttctcctagcacagcacttatctgtgctgctgcttgtgcaatcctggcgcgaaaggattaaatactgtacacagaccagtgtggtggaggggtgtaatcatagctgcatcccttctgatctgttctctc

SEQ ID NO: 63314 - DNA, 600 bp, Chicken  19866894326253_1
aggaggttgcacagaacagtatccagacccaaagaaggagactccacaacctctgtggtcagcctgtcacatttaagcagtttatagttatcatgatttaagattttcctcccaaagtcaattggtttcacagtagaccccaacaaatcagtatttttgttttgctgaaatggagtgtgatatcattttaatggctcctttctgaaaaccttgaaagctgcttaagaaacagattcacagtgtatgggctcgaaaactatcccattctggtgcacttgaagttgtcgagcacagagtgcrtaatttagaattgaaaagaaaaagatgtatctgtgaattaaggactgcaatacaggagctatcaaccaccaagaggctcttttaacctcagcagagctgtgctctttaatgtgtttttgtggggaagaagaataaaaaggaaatctgagaaaactgatctttatttttagaaaaataatttctttttgctaaggaggactttttattttctgtgctctaaataaagcagtgatatggtcctgttgtgcctcaggctatccgcttaaaagaaaaggctccaaagatggaccatctggaagc

SEQ ID NO: 63315 - DNA, 600 bp, Chicken  19866894326253_2
gttgcacattcttggccagatctgctctttccagggcacaacaagaacttcctcctcttcccatttttttttctgggatgcctgggatctccttggttcctgcgaggccaaaaaagttctctgttttgttgttgtggtggtgtttttttgttcaggactttgcctgatgtactttgtttcagtgctgcatctgagatgaggagaaattcacccctggttctgggataaggggttcacccccaccccatgcagtgtttctctgagcttatgttctcagatgttcaagtcccatccctgcayataccggtgcccttttggctcaacctgcacatctgacagcctatgcactttgccctcccattaagaggctactcgtgtaaggaattagggtcttgtagttacaagcttttgcagggaaacaaaaccactcttttctttagatgaatgttggacaactcttttttgtttgtttgttttgatggaaacttgtgaaataagcaagatcaactccacctcctaaaatgagctctcagtgtttygtgccgcctccaagagattacttttgtttttattttkgggggggagggtcagggatgtggg

SEQ ID NO: 63316 - DNA, 523 bp, Chicken  19866894326253_3
ccaccccatgcagtgtttctctgagcttatgttctcagatgttcaagtcccatccctgcayataccggtgcccttttggctcaacctgcacatctgacagcctatgcactttgccctcccattaagaggctactcgtgtaaggaattagggtcttgtagttacaagcttttgcagggaaacaaaaccactcttttctttagatgaatgttggacaactcttttttgtttgtttgttttgatggaaacttgtgaaataagcaagatcaactccacctcctaaaatgagctctcagtgtttygtgccgcctccaagagattacttttgtttttattttkgggggggagggtcagggatgtgggccaaagtgggacgtttgcragctggtgaatcttctgaaaaggacaagtgtaggcactttgtctcctctcagcatggccagcgtggaaagcagtgaaggactaaaggacatcgcagtgtcgtggacattcgtgccactaactgctgttgctttcaccagccat

SEQ ID NO: 63317 - DNA, 486 bp, Chicken  19866894326253_4
gatgttcaagtcccatccctgcayataccggtgcccttttggctcaacctgcacatctgacagcctatgcactttgccctcccattaagaggctactcgtgtaaggaattagggtcttgtagttacaagcttttgcagggaaacaaaaccactcttttctttagatgaatgttggacaactcttttttgtttgtttgttttgatggaaacttgtgaaataagcaagatcaactccacctcctaaaatgagctctcagtgtttygtgccgcctccaagagattacttttgtttttattttkgggggggagggtcagggatgtgggccaaagtgggacgtttgcragctggtgaatcttctgaaaaggacaagtgtaggcactttgtctcctctcagcatggccagcgtggaaagcagtgaaggactaaaggacatcgcagtgtcgtggacattcgtgccactaactgctgttgctttcaccagccat

SEQ ID NO: 63318 - DNA, 443 bp, Chicken  19866894326253_5
tcaacctgcacatctgacagcctatgcactttgccctcccattaagaggctactcgtgtaaggaattagggtcttgtagttacaagcttttgcagggaaacaaaaccactcttttctttagatgaatgttggacaactcttttttgtttgtttgttttgatggaaacttgtgaaataagcaagatcaactccacctcctaaaatgagctctcagtgtttygtgccgcctccaagagattacttttgtttttattttkgggggggagggtcagggatgtgggccaaagtgggacgtttgcragctggtgaatcttctgaaaaggacaagtgtaggcactttgtctcctctcagcatggccagcgtggaaagcagtgaaggactaaaggacatcgcagtgtcgtggacattcgtgccactaactgctgttgctttcaccagccat

SEQ ID NO: 63319 - DNA, 599 bp, Chicken  19866894326255_1
  misc_feature (1)..(178): n is any nucleotide
nnnnnnnnnnnnnnnnnnnnnnnnnnnnnnnnnnnnnnnnnnnnnnnnnnnnnnnnnnnnnnnnnnnnnnnnnnnnnnnnnnnnnnnnnnnnnnnnnnnnnnnnnnnnnnnnnnnnnnnnnnnnnnnnnnnnnnnnnnnnnnnnnnnnnnnnnnnnnnnnnnnnnnnnnnnnnnnnnntgatctatccagaaaataccactgggtctgttgcattcaatccatgttttaaaagtactttgtccctttgcttttctattctgagtgcttgccacgtgtgtcttcatttgaaagaaataatycttgttattttgtgaaagatctgacaagtatgaaagtatgaaacagcaaaatgtgaaagggatggagctttacaaagaaaaagtacttgagttattctctcctatacagtttcaaatccaactctttaaagggagatctatattttaatatatcattgattttcatatgatgaaaaattaaatagaacatggaagaaagaaaagggcagcattttatgattttgaatctttaaatacggatttagaactttaaagcaatacttccttaaaattccttgaggtcctcaggtgacattcta

SEQ ID NO: 63320 - DNA, 600 bp, Chicken  19866894326261_1
ccactagtatgtttattctgtgctacatcatgtgttttaaagaactttaaaagctgactttcagattttttttatcactgatttgaacagctgagggttttcacgggccttttcctggtctttgaaatgctaaagaaaagtaatatttcacaaactggaaacttatattccccttttgttgacagttcagcagtaactgaaaaattctccaggtaatgctcgttctttttttgtatgctgcaaggactactgtatagatccagtagttaccaaatcacaatgcttaatgcataagcaacrtggctttgtctaacaaacccatrtttaatatgaaaagctcgatgttaactggaatgtatctatattgtatatgttagtagtctccttgaagataaattcaataaccatcatctccattaggcttcacaaatgtgttgacttttttcttttcagttgacccgtgtgtgatagctgcagcccatttgttgccagattggtgcagtttgttttcaatgctaagacttgcaactggcagtaacttttagaacacgagaggttctgtaaagaaatgagatcaagtaatactgaaaagaataaaag

SEQ ID NO: 63321 - DNA, 577 bp, Chicken  19866894326261_2
tacatcatgtgttttaaagaactttaaaagctgactttcagattttttttatcactgatttgaacagctgagggttttcacgggccttttcctggtctttgaaatgctaaagaaaagtaatatttcacaaactggaaacttatattccccttttgttgacagttcagcagtaactgaaaaattctccaggtaatgctcgttctttttttgtatgctgcaaggactactgtatagatccagtagttaccaaatcacaatgcttaatgcataagcaacrtggctttgtctaacaaacccatrtttaatatgaaaagctcgatgttaactggaatgtatctatattgtatatgttagtagtctccttgaagataaattcaataaccatcatctccattaggcttcacaaatgtgttgacttttttcttttcagttgacccgtgtgtgatagctgcagcccatttgttgccagattggtgcagtttgttttcaatgctaagacttgcaactggcagtaacttttagaacacgagaggttctgtaaagaaatgagatcaagtaatactgaaaagaataaaag

SEQ ID NO: 63322 - DNA, 600 bp, Chicken  19866894326268_1
acattccctaacaaaaaaataaaagaaatcactccgaccactctggcaaatctcagcatctcagacttggacatacaaaggagcagagaaagtgctgcagcagaaacatgctgcaattacccaaattgataagaagtaagatttcacagtacctggacatatcaacactctaattacattccagattggagaaactgtaaacctttactctcacattgtgttctgaatatatccaaggacaaaagcacttaatgcaaacaattcattgccaataaaataaactagcttacttgtgatcayaacagtattacaagtgtatcattccccacaagtttcaacttctggtggaaataaaactaaattgttacttgycagytgcatctatttattctttcttcacaawttatgtaccaatttttaaaagtactcataatcaagtagtttgaaataggcaaactaatttaataacctagaagagttagaatgaaattgcagggcatgccatgaaacataagtctaccttccaaaggaactaaccaagatatgtactttgcattaggagactgctgctatccaccactggtattagttgctaatact

SEQ ID NO: 63323 - DNA, 600 bp, Chicken  19866894326268_10
aaatttaaagcaactgtttgttacaataataacactctgttaacaatccattttaaaacaatgccagatattaccagaaaacaagaaaygctaggttttacaacagcattctaaatagaacaagactggtaagccaggagccaggtgtgatttcatgtcccagatcaggtcagtaagcccattagctaccaatcgtgcaacatgcctccacaggaatattcacaaaacacatctaagcataaacacccatcccttacctcttccacatttatgctggattttgcacttgtctccaaaaayttgattccatagtcaattgctaactgaaagagagattaaaatttttcagttgttctgaagttcctttgcaaaygaatattctacggtaagttcataatacaacaggtgttacagactgcagcaggctttgcaaacaaatgaagctttatttctacttttcttttactaaagcattagagttactggacaaacagaagaatgttagaacaggctgtatctccatgtaaatgcaaacccctcagaaagattaactgctcacagaggacttaaaatttaagacccaaaatcactgaattaaaa

SEQ ID NO: 63324 - DNA, 533 bp, Chicken  19866894326268_11
ccagaaaacaagaaaygctaggttttacaacagcattctaaatagaacaagactggtaagccaggagccaggtgtgatttcatgtcccagatcaggtcagtaagcccattagctaccaatcgtgcaacatgcctccacaggaatattcacaaaacacatctaagcataaacacccatcccttacctcttccacatttatgctggattttgcacttgtctccaaaaayttgattccatagtcaattgctaactgaaagagagattaaaatttttcagttgttctgaagttcctttgcaaaygaatattctacggtaagttcataatacaacaggtgttacagactgcagcaggctttgcaaacaaatgaagctttatttctacttttcttttactaaagcattagagttactggacaaacagaagaatgttagaacaggctgtatctccatgtaaatgcaaacccctcagaaagattaactgctcacagaggacttaaaatttaagacccaaaatcactgaattaaaatcatta

SEQ ID NO: 63325 - DNA, 600 bp, Chicken  19866894326268_2
atacaaaggagcagagaaagtgctgcagcagaaacatgctgcaattacccaaattgataagaagtaagatttcacagtacctggacatatcaacactctaattacattccagattggagaaactgtaaacctttactctcacattgtgttctgaatatatccaaggacaaaagcacttaatgcaaacaattcattgccaataaaataaactagcttacttgtgatcayaacagtattacaagtgtatcattccccacaagtttcaacttctggtggaaataaaactaaattgttacttgycagytgcatctatttattctttcttcacaawttatgtaccaatttttaaaagtactcataatcaagtagtttgaaataggcaaactaatttaataacctagaagagttagaatgaaattgcagggcatgccatgaaacataagtctaccttccaaaggaactaaccaagatatgtactttgcattaggagactgctgctatccaccactggtattagttgctaatactcacactcctactggctgccagaagaatcattatgatactgaaaatcaggtccagcactcttcctaatgcagc

SEQ ID NO: 63326 - DNA, 600 bp, Chicken  19866894326268_3
aaaggagcagagaaagtgctgcagcagaaacatgctgcaattacccaaattgataagaagtaagatttcacagtacctggacatatcaacactctaattacattccagattggagaaactgtaaacctttactctcacattgtgttctgaatatatccaaggacaaaagcacttaatgcaaacaattcattgccaataaaataaactagcttacttgtgatcayaacagtattacaagtgtatcattccccacaagtttcaacttctggtggaaataaaactaaattgttacttgycagytgcatctatttattctttcttcacaawttatgtaccaatttttaaaagtactcataatcaagtagtttgaaataggcaaactaatttaataacctagaagagttagaatgaaattgcagggcatgccatgaaacataagtctaccttccaaaggaactaaccaagatatgtactttgcattaggagactgctgctatccaccactggtattagttgctaatactcacactcctactggctgccagaagaatcattatgatactgaaaatcaggtccagcactcttcctaatgcagcacaa

SEQ ID NO: 63327 - DNA, 600 bp, Chicken  19866894326268_4
aaacatgctgcaattacccaaattgataagaagtaagatttcacagtacctggacatatcaacactctaattacattccagattggagaaactgtaaacctttactctcacattgtgttctgaatatatccaaggacaaaagcacttaatgcaaacaattcattgccaataaaataaactagcttacttgtgatcayaacagtattacaagtgtatcattccccacaagtttcaacttctggtggaaataaaactaaattgttacttgycagytgcatctatttattctttcttcacaawttatgtaccaatttttaaaagtactcataatcaagtagtttgaaataggcaaactaatttaataacctagaagagttagaatgaaattgcagggcatgccatgaaacataagtctaccttccaaaggaactaaccaagatatgtactttgcattaggagactgctgctatccaccactggtattagttgctaatactcacactcctactggctgccagaagaatcattatgatactgaaaatcaggtccagcactcttcctaatgcagcacaatgcctccaatctgagtgaataaatctt

SEQ ID NO: 63328 - DNA, 600 bp, Chicken  19866894326268_5
aaactaatttaataacctagaagagttagaatgaaattgcagggcatgccatgaaacataagtctaccttccaaaggaactaaccaagatatgtactttgcattaggagactgctgctatccaccactggtattagttgctaatactcacactcctactggctgccagaagaatcattatgatactgaaaatcaggtccagcactcttcctaatgcagcacaatgcctccaatctgagtgaataaatcttaatgtacctgccttctgatatcatactattttcttgttcacatttttcgygaagttaacagactcacacaatactccytgagatgataatagtgattcatggtacagtagatttgacttgagctactctttcttcccagcttatttcctaatgctctcacaaatactgagctggtgtttttagcatggaacttgtttgcaagaaaacagactgcaggtctatactctagtagtattagctttcttctttcactaacatcagtttatgacagtctgtgctgatgttccgtgtctaaaagaaaactcccagtctcatctgcatagcatacttagtagtaacctgaagactcc

SEQ ID NO: 63329 - DNA, 600 bp, Chicken  19866894326268_6
gaatgaaattgcagggcatgccatgaaacataagtctaccttccaaaggaactaaccaagatatgtactttgcattaggagactgctgctatccaccactggtattagttgctaatactcacactcctactggctgccagaagaatcattatgatactgaaaatcaggtccagcactcttcctaatgcagcacaatgcctccaatctgagtgaataaatcttaatgtacctgccttctgatatcatactattttcttgttcacatttttcgygaagttaacagactcacacaatactccytgagatgataatagtgattcatggtacagtagatttgacttgagctactctttcttcccagcttatttcctaatgctctcacaaatactgagctggtgtttttagcatggaacttgtttgcaagaaaacagactgcaggtctatactctagtagtattagctttcttctttcactaacatcagtttatgacagtctgtgctgatgttccgtgtctaaaagaaaactcccagtctcatctgcatagcatacttagtagtaacctgaagactccttggcacagcagcatgttgttctgaaaa

SEQ ID NO: 63330 - DNA, 600 bp, Chicken  19866894326268_7
cagcttatttcctaatgctctcacaaatactgagctggtgtttttagcatggaacttgtttgcaagaaaacagactgcaggtctatactctagtagtattagctttcttctttcactaacatcagtttatgacagtctgtgctgatgttccgtgtctaaaagaaaactcccagtctcatctgcatagcatacttagtagtaacctgaagactccttggcacagcagcatgttgttctgaaaataaagaatctcaaaggcaattttctccacagagcttggttctaaaattctacctattycctgtccaagagcacttgcwattgaaatttaaagcaactgtttgttacaataataacactctgttaacaatccattttaaaacaatgccagatattaccagaaaacaagaaaygctaggttttacaacagcattctaaatagaacaagactggtaagccaggagccaggtgtgatttcatgtcccagatcaggtcagtaagcccattagctaccaatcgtgcaacatgcctccacaggaatattcacaaaacacatctaagcataaacacccatcccttacctcttccacatttatgctg

SEQ ID NO: 63331 - DNA, 600 bp, Chicken  19866894326268_8
tcacaaatactgagctggtgtttttagcatggaacttgtttgcaagaaaacagactgcaggtctatactctagtagtattagctttcttctttcactaacatcagtttatgacagtctgtgctgatgttccgtgtctaaaagaaaactcccagtctcatctgcatagcatacttagtagtaacctgaagactccttggcacagcagcatgttgttctgaaaataaagaatctcaaaggcaattttctccacagagcttggttctaaaattctacctattycctgtccaagagcacttgcwattgaaatttaaagcaactgtttgttacaataataacactctgttaacaatccattttaaaacaatgccagatattaccagaaaacaagaaaygctaggttttacaacagcattctaaatagaacaagactggtaagccaggagccaggtgtgatttcatgtcccagatcaggtcagtaagcccattagctaccaatcgtgcaacatgcctccacaggaatattcacaaaacacatctaagcataaacacccatcccttacctcttccacatttatgctggattttgcacttgtctccaa

SEQ ID NO: 63332 - DNA, 600 bp, Chicken  19866894326268_9
cactaacatcagtttatgacagtctgtgctgatgttccgtgtctaaaagaaaactcccagtctcatctgcatagcatacttagtagtaacctgaagactccttggcacagcagcatgttgttctgaaaataaagaatctcaaaggcaattttctccacagagcttggttctaaaattctacctattycctgtccaagagcacttgcwattgaaatttaaagcaactgtttgttacaataataacactctgttaacaatccattttaaaacaatgccagatattaccagaaaacaagaaaygctaggttttacaacagcattctaaatagaacaagactggtaagccaggagccaggtgtgatttcatgtcccagatcaggtcagtaagcccattagctaccaatcgtgcaacatgcctccacaggaatattcacaaaacacatctaagcataaacacccatcccttacctcttccacatttatgctggattttgcacttgtctccaaaaayttgattccatagtcaattgctaactgaaagagagattaaaatttttcagttgttctgaagttcctttgcaaaygaatattctacggtaa

SEQ ID NO: 63333 - DNA, 600 bp, Chicken  19866894326270_1
cctgtgctccctaggccagccaccaccccttaccaggtgctcaatcaccagttcaagccttttacctagcagttactctgtaaactgtatccagtttttgtatgcatggaatctttcaggacaaattcttctgtattcagtgcagatgaagagttcttaacctgaaacaaacattaagggatggattgctgatgttctattaaatgctcggttgtcattttatgttgtcagtcattgttgcggagcctaaaaacaacaccatttgacactgtctgtcaccctactcatcttcacctcttygtgttgaatatgaagttacgtatgctgttgggtttctacgtttagtgtgtggcggtgtgttgtatttttaaatgggtaaaagacttgagagaagttttaygtgctgcattggcagctatggatggggtggctcaggcagtccagtgaaggagaaaatgtatgtttacaactgctattggtagcattggtgttgtaattcctactgttataattactgttgtaattcctatctatgtggcagactagtgtggtttcatgtttattgttcataactcttggagtgtcatcttctaggtgtag

SEQ ID NO: 63334 - DNA, 600 bp, Chicken  19866894326270_2
tatgcatggaatctttcaggacaaattcttctgtattcagtgcagatgaagagttcttaacctgaaacaaacattaagggatggattgctgatgttctattaaatgctcggttgtcattttatgttgtcagtcattgttgcggagcctaaaaacaacaccatttgacactgtctgtcaccctactcatcttcacctcttygtgttgaatatgaagttacgtatgctgttgggtttctacgtttagtgtgtggcggtgtgttgtatttttaaatgggtaaaagacttgagagaagttttaygtgctgcattggcagctatggatggggtggctcaggcagtccagtgaaggagaaaatgtatgtttacaactgctattggtagcattggtgttgtaattcctactgttataattactgttgtaattcctatctatgtggcagactagtgtggtttcatgtttattgttcataactcttggagtgtcatcttctaggtgtagggatgtgattccctgtctgcttggcactcgctgggcttctcagcactgtgaggccagtggagccagcatggccaggcctgtggcagggaaggctggagtg

SEQ ID NO: 63335 - DNA, 600 bp, Chicken  19866894326272_1
agggattccattaagattagggaaactggcctcatgttagctcagtcagccggcacagcctggccagggagataagagggtttccctagctaatcagccactggattgtgactcacaggggtaattggcaagagtggtgaggccttggtacagaaggcgttacatcaacgatcttgtccttttgttgtgagcttcctaatgcatccaccttttgcccctccctcactcttcttgggaggggtgaaggcatctgttttctaatggtagccattcaggttcctcgagagaggcactagaacygggggctttgcttttctcgaggttcttgagcttttgttccagccaccagtaaactaatttctctaacctgactgtgggtaatccattcatcaagtctcatggaacacccttttgccagcccagagtccagaggccattatgtttatgattggtgttttgcctatctgtttttactgggaacaaaaccctttcagttccattgagttttgggctagatggcctgaggacaaggctgactgctgcaagcctgtcccactccaatttatcagagggagatgttgtagtaggcgtcttgcaggg

SEQ ID NO: 63336 - DNA, 600 bp, Chicken  19866894326279_1
ctacatgaagatcagacacgtagtgaatcacaatgggtagttgagctactgttcagatagccctaatctgtagggcagcctgtgagaacatgaatcaactgtgtgagccaaagttgtctataatctttcagaaattctgcagcagttctgctgcaaacttgcattcacacaattagtccttaatgcaaataagaatacaaatctgacttgtacacttaagtatacttaaaagtacaagtgaaagttttcttctttataaagttagtaaaactaaaaggtaaagacaggtttaaattgaawcttcctttgattttttttttcctaaactatgcttatctatgaaagataaccaaaacactttttacacaatttgctgtaagaggggatgaatggatgagttgttttacagctattaccgtttttcccctgcactatagagagcagaatactgcttcattgaagccgggctttttgcaaggttttattcttacctgcaagttacaggtagtgcctcagtgaagtagtttgcttgcttgagtgcatcactggttgccaagaactgttgttttctttgaaagctttgcttaacaatggctgaaa

SEQ ID NO: 63337 - DNA, 600 bp, Chicken  19866894326282_1
tgtggtttctactgcttacaacagcataaattagtgactttctcaaccttaaagtaatgtaaagtatttatgggtgatttttggaaagggaaaaatattggtagtggtgctgttcttctgagggttctttctatcactgtctttctagattccataaaacctccctgaaatggactttcctggaggtcttctactgacctattgacttttcattatgcctattatatattgacttttcatatagccttccttaatgaaggaaggctactgtgcagtactactggattgatttgtttgtgytaggtttcttgccttgcttattttaaaatatgatccagctttttcattcctttacggaaaacgttcattagcaatattgcattttaatttcaggcaacattgtcatatattttaggttagatttctgtgagttactgcctgaggagaattaaaactaagatcccatgggcagttcctgtagttttgttaaagagttgaaagtaagatactaaatcacagtagctgcgtattattaatgtaacttaaatgttggtttgttttccttcaaacattcatcacgctcaacttttccatatttgc

SEQ ID NO: 63338 - DNA, 600 bp, Chicken  19866894326283_1
gagttgctcgggttaatgggtatgtgacacagcaaggtggattcactcacacatcccttaattaacacatttataaatattcataggttaactagctctctaattattcccagagacttagggaggcctaatcttctattagaaccttgcccttttatctttttatctactagcttctttttgaccgaatgttaaatctggcatttgaaaaactgtgaattagagagtgctcattagaatttggagaactcatttcaatgcaaagttaatttaattaaaacaaagggcaatataaacagygtggtgcaacaagctgagcaaggaacactgaagacgtacttcactgtattatttcaggtgtaataccatgctgtgttggtattcttcatacaacagtaaagcttgaggcaaaaactgaaagagcactcactagtccattgtacagataaatgaatatgtctcacgagtatgcatacgtttcagcacattgtgcattgcatacagattactgccatctcactttcttcctgtgtaatggttggaccatgctgtccctctaccctcctaacatcttcaggtcaccatgggacctacctgatc

SEQ ID NO: 63339 - DNA, 600 bp, Chicken  19866894326289_1
acctcattacaactccaaagaccacagaatccagctcctgaccttctccagagcagagatgacaaagtgtttcctgttatttatagcagctggagagtctgatgggaaaaccccacttgtgcaacgcgggccgcttgccatcatcgctccgcggagaagtgttgggctgctgtgcgttcctgctccatcctgtaatggtctcaccgtgggcaagaccacgccacgaggctgcacaagaggaatgatcaggcgtcttgctcccacttgctcgttggcacagcgtaacttgaattaaggaakaaaaacaaaaactgcatataccaagcaaggggggttcaggtgggagactacagggacctcgaggagcacacttcacccacatggggcacaatytcaatgtgcttgaccttgcctaggagatgatctcagcctttcgaggagactgaggggagtgcacggcccctctatcaggtgctacccacctcttcaaagcatggtggcatgtgcgtgagcacatttgttcactggcagccctacttccaccacctgggcatgtaccaaaggtgctttccagcacrcttagtcactcaggtgcaggaa

SEQ ID NO: 63340 - DNA, 600 bp, Chicken  19866894326289_2
agagtctgatgggaaaaccccacttgtgcaacgcgggccgcttgccatcatcgctccgcggagaagtgttgggctgctgtgcgttcctgctccatcctgtaatggtctcaccgtgggcaagaccacgccacgaggctgcacaagaggaatgatcaggcgtcttgctcccacttgctcgttggcacagcgtaacttgaattaaggaakaaaaacaaaaactgcatataccaagcaaggggggttcaggtgggagactacagggacctcgaggagcacacttcacccacatggggcacaatytcaatgtgcttgaccttgcctaggagatgatctcagcctttcgaggagactgaggggagtgcacggcccctctatcaggtgctacccacctcttcaaagcatggtggcatgtgcgtgagcacatttgttcactggcagccctacttccaccacctgggcatgtaccaaaggtgctttccagcacrcttagtcactcaggtgcaggaattctggcagcccaaggcaggttcttcctgaaacaggatgggctttgctgctggctcggcaggcgagagcctcccagcaccggccctgtgtgag

SEQ ID NO: 63341 - DNA, 600 bp, Chicken  19866894326289_3
agcgtaacttgaattaaggaakaaaaacaaaaactgcatataccaagcaaggggggttcaggtgggagactacagggacctcgaggagcacacttcacccacatggggcacaatytcaatgtgcttgaccttgcctaggagatgatctcagcctttcgaggagactgaggggagtgcacggcccctctatcaggtgctacccacctcttcaaagcatggtggcatgtgcgtgagcacatttgttcactggcagccctacttccaccacctgggcatgtaccaaaggtgctttccagcacrcttagtcactcaggtgcaggaattctggcagcccaaggcaggttcttcctgaaacaggatgggctttgctgctggctcggcaggcgagagcctcccagcaccggccctgtgtgagacaagcatttgctgtcacgctgttgaggaggaatcccatagcttctgttctgggccagtgccagcactgctttcagcttgctttttgagccgagggaagcaagcagatgggctgttcgctgccgtgcgatcctgtgaatcaacttgccagccactataggaacagacggctcctgctctacagat

SEQ ID NO: 63342 - DNA, 600 bp, Chicken  19866894326293_1
ttacttgggcctcacattgcttgtaagtgcatatttcttttttatttagcaatttatcagatgtggtgttgatcttcataatctatggcgttttctcaggaaagcagagttcatataatcattgctatttgttttgtctatttaggaaggtgattaatgagtgtgacatttaccctgattgttatgctctttaaagatctcttagtaatgaacttcatttttggaggctccagctgtgactggcagtattattggcaaattaagtagactccagttttcctgagaggattttcaaccaargagtcctatcgctgctgatattatcaaggcatcaaagaagttacaaacatgctttgaagcacaccggttccccaagtgctgagagctatatgactatttctgagttcattgaagatgctaatgttctgcctcaaattaaagtcaaattatttgaaaagttccaggaaaccatttctggagcagcttcaaagcttgaaatggggctgaaattagtgaactaagatatgaatttctgaaggcacacagacttatctgccccacaaagacaactattgtattactgctttaaacaacacgcct

SEQ ID NO: 63343 - DNA, 599 bp, Chicken  19866894326296_1
  misc_feature (1)..(84): n is any nucleotide
nnnnnnnnnnnnnnnnnnnnnnnnnnnnnnnnnnnnnnnnnnnnnnnnnnnnnnnnnnnnnnnnnnnnnnnnnnnnnnnnnnnntgattgttttcctgaaaatgtgtatagatttcttctacctcagagattcatagatgttattaaaaatgaatggcaggcctgatttaaattgaaatgtcagatggttggtttcctactagttaaaaagtaatgacacctgcatgagaagtaagcaaaacacacatacgcacaaaattcactagaattggtgttaaatatgatatgaataacaaaccrtaagaactgaaaggatactatgcatctaaaatgtgtatttacacacacatatggatttaataatgcagccatatgaaggcccccatgaactaattctgttttttttcattaatcataccatacctcttgtttcattgttcctgtttcagcatcacacctcagaggggaagtatgttaattacaccagctctgccttggcggctgcagtcactgagcacactggggggtagcaagcacaagctagcactcccttaagatactggtttgcttccccactgttcctgataagggtagaaatt

SEQ ID NO: 63344 - DNA, 600 bp, Chicken  19866894326298_1
cacatacgcagataccactgtgactgctatgttagcaaaggtttcctccacatatacattctcagataaagaaattaagagtccaatagaatcatcaaaggacctgtgggcctgagtacctctttctttaatcatgtcttgcctagactgaaaccacagaagctcaaaagatagaaattcatctcaacaatgggaagcatcagaaatcaatttagaggcgccaaggagcgcagcagcagcacatgtgggactgtgcaggccccagtggcactcacagcagtgtccacactagcaaccatyaccagatggccgtcccttcccaggcccatggcatgatctctgccagaacagaccactgctgttctggatctgaaagagcaggaggaacttcttggtttttttctgttttttttttaatgttaaaatctttttcagcattttaaaagtgagatacaaaagtgatttgtttttcctaaatataactttctaaaatgaaaatgcatcatgactgcaaaaagatacttattaaaacaagaggaaaaaaaatccaaaaatacttaatcctttttctttggatggagaataaaatgctttttttcc

SEQ ID NO: 63345 - DNA, 600 bp, Chicken  19866894326307_1
tctcttaaacggctattagctatcattcacgtcaagagcagttcccaccactattgtcgttttggtctctgaatggagtaatccaggcactagcactgttcatttttcatgcagtgtaattttctgcctagcatttgacacccacgacacgtgttggtcccatatctcaaaggactgtggtgactcattggtgagttgccactggtaaaacatgggctatggtgcagtgaaaaataagggtttctcttgactttgtgcccactctttgttgcctgatgccaggatctgccaccacagtgrcttcactgcaaacyctcatacagccagaatccaacagaaaagtcctttaacagccaatacccgcaaatcctcttaattttggggttttgtggctcagctatgtagatgattaacatatgtacagacctatttaaacacaaatctggaataaaaagcaatggtcaaatgatcggwagcaagttacaggtttggtggaaccaaggtgaccgcagtggagwgtcacgagacaagagcctccttgtctccatgtcttatgttaattttgatgcaggcgagatcaatttcgagatgacttttcaa

SEQ ID NO: 63346 - DNA, 600 bp, Chicken  19866894326307_2
attagctatcattcacgtcaagagcagttcccaccactattgtcgttttggtctctgaatggagtaatccaggcactagcactgttcatttttcatgcagtgtaattttctgcctagcatttgacacccacgacacgtgttggtcccatatctcaaaggactgtggtgactcattggtgagttgccactggtaaaacatgggctatggtgcagtgaaaaataagggtttctcttgactttgtgcccactctttgttgcctgatgccaggatctgccaccacagtgrcttcactgcaaacyctcatacagccagaatccaacagaaaagtcctttaacagccaatacccgcaaatcctcttaattttggggttttgtggctcagctatgtagatgattaacatatgtacagacctatttaaacacaaatctggaataaaaagcaatggtcaaatgatcggwagcaagttacaggtttggtggaaccaaggtgaccgcagtggagwgtcacgagacaagagcctccttgtctccatgtcttatgttaattttgatgcaggcgagatcaatttcgagatgacttttcaaagcaccaagtactt

SEQ ID NO: 63347 - DNA, 483 bp, Chicken  19866894326307_3
ctgtggtgactcattggtgagttgccactggtaaaacatgggctatggtgcagtgaaaaataagggtttctcttgactttgtgcccactctttgttgcctgatgccaggatctgccaccacagtgrcttcactgcaaacyctcatacagccagaatccaacagaaaagtcctttaacagccaatacccgcaaatcctcttaattttggggttttgtggctcagctatgtagatgattaacatatgtacagacctatttaaacacaaatctggaataaaaagcaatggtcaaatgatcggwagcaagttacaggtttggtggaaccaaggtgaccgcagtggagwgtcacgagacaagagcctccttgtctccatgtcttatgttaattttgatgcaggcgagatcaatttcgagatgacttttcaaagcaccaagtacttagaataaatgattggagcagattattttccttttggcattagt

SEQ ID NO: 63348 - DNA, 439 bp, Chicken  19866894326307_4
atggtgcagtgaaaaataagggtttctcttgactttgtgcccactctttgttgcctgatgccaggatctgccaccacagtgrcttcactgcaaacyctcatacagccagaatccaacagaaaagtcctttaacagccaatacccgcaaatcctcttaattttggggttttgtggctcagctatgtagatgattaacatatgtacagacctatttaaacacaaatctggaataaaaagcaatggtcaaatgatcggwagcaagttacaggtttggtggaaccaaggtgaccgcagtggagwgtcacgagacaagagcctccttgtctccatgtcttatgttaattttgatgcaggcgagatcaatttcgagatgacttttcaaagcaccaagtacttagaataaatgattggagcagattattttccttttggcattagt

SEQ ID NO: 63349 - DNA, 600 bp, Chicken  19866894326311_1
acccttcccatgtcgtagttcttgtgcttgttttcagttgtgttttaatcagactcagcagatagagaataagggatgactaaaatacactgtcatggagcagtatgaatgttgcatttatattagagatagcataaaatgtgtctatctccatttcaatattaaaaatagataaacagcattgaaagtagcacctaactgtgttggcccttgtggaagtccaactacttccttatgaacaactgctgccctctacattcttggcctttcacgtgcagaagtcagaacaaattttagagrgagccatctgagaaatttctgccgtttgcattwatttcttcctccagtttcagtatgctaatgttttatggtgatgttgaatggcagtggatgcactttgtacagttttcatgtgaattactggcatctaatggaactctaagtaggtatagaactggcatttattccctatgaccatttaaaattattcttgcttctttcatcaacaaggaactaaaataatttaaaacaaatacataaaacagcgaaattcactgttgttgctgaagatctcccgtgatcttcaactaggacatcact

SEQ ID NO: 63350 - DNA, 600 bp, Chicken  19866894326311_2
tcagttgtgttttaatcagactcagcagatagagaataagggatgactaaaatacactgtcatggagcagtatgaatgttgcatttatattagagatagcataaaatgtgtctatctccatttcaatattaaaaatagataaacagcattgaaagtagcacctaactgtgttggcccttgtggaagtccaactacttccttatgaacaactgctgccctctacattcttggcctttcacgtgcagaagtcagaacaaattttagagrgagccatctgagaaatttctgccgtttgcattwatttcttcctccagtttcagtatgctaatgttttatggtgatgttgaatggcagtggatgcactttgtacagttttcatgtgaattactggcatctaatggaactctaagtaggtatagaactggcatttattccctatgaccatttaaaattattcttgcttctttcatcaacaaggaactaaaataatttaaaacaaatacataaaacagcgaaattcactgttgttgctgaagatctcccgtgatcttcaactaggacatcactgtttatgaagtaaagcaacacatcaaatccctt

SEQ ID NO: 63351 - DNA, 600 bp, Chicken  19866894326315_1
aaaaggtatccacgtgtcagcagcttttacccatccgctgctactccaagctgcacttctgctctgagtgcacacactgaacagagggggaaataatgacagagggcaaaagggacgtgaaaaaatacctccctaaaatccagacctggatatcaaatccgatataggcggagaaaggcaacagaggagattaagagcaaaggcagagagaaaccgggtggcttctcatcatttcatacctgacaccccctgtctgagcagatgactgcagacctttggagcagcagaggaatcacatcrggctctgacaagctccgtctttattcagtgcagtgacggggtgagaaaacatcagctctcatcaatgattcatggagccttttcttctgctaatctgtaaataaattttaaaaagcagcttctttttgatgagtctattctgctgttcgtaagaacatatcagcctttacaggcaacatgggtgtgctcgggggctgctgtcagcactgggaagcacagggctggctctgctgagctctacacacagatgggcagcgcgggcgcctgccctcacctccagccccagctccttccattggg

SEQ ID NO: 63352 - DNA, 600 bp, Chicken  19866894326318_1
tcactcagaaccatcataagcttctttccttttactcttgttatattggcttgaaagtgaaatttgttccaactactatttgtaaagattacttgctttgcttctgcttgaaaacacagccagagaaatttaacttctatttttctatgccaaaactgttttcagaaatgaagctcagcagagcgaagtacaataattcagggcaacttaagcccaggaatttgttcttctgcttccagcttcctcagcctcccttacaataatcagtagggagggttatcttcctgagccagccagatyggcgctggtaagagtatatatatgtataaaaagtgagcaatcaaagagaactgtaaagaacacaacaggctggagttagctacaacccttgtgatccttcccagtgactgaggatgcccaggccctacgccagcaagcaccaaaccagcaatggcgatcagctgtatgctgccatctccacattgggttcatggtgttggttacagaactgttgctgtatcacgcaaataaattaaaaccccacgcaacaccaagtggctacaaataactaaatttgatattgctcaagtggagtgtcca

SEQ ID NO: 63353 - DNA, 600 bp, Chicken  19866894326318_2
agaactgtaaagaacacaacaggctggagttagctacaacccttgtgatccttcccagtgactgaggatgcccaggccctacgccagcaagcaccaaaccagcaatggcgatcagctgtatgctgccatctccacattgggttcatggtgttggttacagaactgttgctgtatcacgcaaataaattaaaaccccacgcaacaccaagtggctacaaataactaaatttgatattgctcaagtggagtgtccaagcacatggtcacagagcactgaactctgccaggtagaatcaccgwctccaaacagcagctcctggatgcacagcccgtttgaagatgagggcactgctttcaaaacctaaacataggctaaagatcctaactgcaggctcctatttttgaaagtccttggtctttaattttcatagcatggtgaaaaagaaaaccttcctttttcttccccgctagaaagtattctgggttcagaagtttattggaaacatagctgacatccaaatcaacacagactgcaaaaacaacagggctgacaagacagaatactttcaaaacatcaccctgatcattagaacagcagag

SEQ ID NO: 63354 - DNA, 600 bp, Chicken  19866894326321_1
aagggggccggaggtacctcagggccccctggcatccctactcacccggccggacgcatcgaagtacgcggtgcccaaggacttgtcgtagtccgcgtacgggttgggtagcgcccgctgcgccatcatggtgccgccgcgcgccgcctcacctcacctcgccccgccctgaaagctgccgccgccgccggaaggccgcgccgcaccgcccctccacagcgctgagaacttcgggcgccattttggctcctcctgcggggttcgagtagacgccgtgctgttgtccctgtgggaattcargtttccctctggctggccctgcgggtttgcttgctaacctgcccacacagagcggggaatgaaggcaggcaatgagtttgcgagggaagctgctcccacgttccctcctcggttccagtcagctggggtgtgagggtgggaaggcgcgggcgccatgctggtgtgctcgcagcgtgtggaaagggtcgtgctggattgcctggggaaaaataaaggtgagcaagttattcagaacgcatatagaggctgtttttgtgtggaagcagcccgaaagtaaatggatgaaatggttagaaagca

SEQ ID NO: 63355 - DNA, 600 bp, Chicken  19866894326325_1
gctggcttttagtggagtcatgccaacctgcactgtgggacgtggtggggttctgaacctttccccagtgaaaatgggatccatgttttcaatttagggcttctacaacttctgcagctacgtgacttggcttgtgttcagacggaagcatttccaagtgattcgggaagaaatcggcaggctcctttgctccgacatgttcaatcttgccttaagagacaggcaccgtgtttctttgcaggatgcagctgaccagactaccgatgcaaatgcagtgatattaccatgtcagaggtacayatttgacatgctgatgagcccttaggtaacctgcagatgtccgaatacactaagataacatctgtgtttgttttctttcaagacaagtcygtgccaagcatccacccataaacagcatggttcaccagcactcgcctgcacttagcacactgctgcccttaccgaaggagcgtgctcaataccgygcccagagccactactgtcggggcaggggccaacagccctgctcatgtgacaacctaccagacttctcagaattgttcactaccaagtaagggatatttcttgacataaatatat

SEQ ID NO: 63356 - DNA, 600 bp, Chicken  19866894326325_2
aatttagggcttctacaacttctgcagctacgtgacttggcttgtgttcagacggaagcatttccaagtgattcgggaagaaatcggcaggctcctttgctccgacatgttcaatcttgccttaagagacaggcaccgtgtttctttgcaggatgcagctgaccagactaccgatgcaaatgcagtgatattaccatgtcagaggtacayatttgacatgctgatgagcccttaggtaacctgcagatgtccgaatacactaagataacatctgtgtttgttttctttcaagacaagtcygtgccaagcatccacccataaacagcatggttcaccagcactcgcctgcacttagcacactgctgcccttaccgaaggagcgtgctcaataccgygcccagagccactactgtcggggcaggggccaacagccctgctcatgtgacaacctaccagacttctcagaattgttcactaccaagtaagggatatttcttgacataaatatattttgtagtgctattagagaggctgccagacaactaagtcttccttgttgagagagggaccattggacaactctatgattctatgactggg

SEQ ID NO: 63357 - DNA, 600 bp, Chicken  19866894326325_3
tttgctccgacatgttcaatcttgccttaagagacaggcaccgtgtttctttgcaggatgcagctgaccagactaccgatgcaaatgcagtgatattaccatgtcagaggtacayatttgacatgctgatgagcccttaggtaacctgcagatgtccgaatacactaagataacatctgtgtttgttttctttcaagacaagtcygtgccaagcatccacccataaacagcatggttcaccagcactcgcctgcacttagcacactgctgcccttaccgaaggagcgtgctcaataccgygcccagagccactactgtcggggcaggggccaacagccctgctcatgtgacaacctaccagacttctcagaattgttcactaccaagtaagggatatttcttgacataaatatattttgtagtgctattagagaggctgccagacaactaagtcttccttgttgagagagggaccattggacaactctatgattctatgactgggaatttgcctacgggaacaggcttcagtgagcctgaaacttgcagtcatagtactctttgttaagtgattgaagcaactgctgtccatcctaccac

SEQ ID NO: 63358 - DNA, 546 bp, Chicken  19866894326328_1
aactctaaccagcctaactcttgttttcacctgctttttaattatattttgtggtgatatttgaaagagacacactttaaccattttatcaaatataggataaataagagattgtgctttttggaaatgcactgcatatcaaatgattgactctgttccacaactagtttttctatggccccatcacatctacttccaaaaagagactttatgtcaagagcctggcaaaaatgagcatacatcacaactacctaaacaatacagaattttaatgagaaatcaaacagtgtcaggacactwttcattgtctggtttaaatgtattcatttgaatttctaaatgtgtgtktatgctttttatagcatcaaaagaaaaagaagtaataataattcatgaattgtgggtatttragggagacagtaaagaaaactggctcattcacttctttgttacagcagataaatataatgcagaatacagtctggtttccttgaaactcaataggcatgtgatggttcttgaataagggagtgcacactttcaaca

SEQ ID NO: 63359 - DNA, 498 bp, Chicken  19866894326328_2
ttgtggtgatatttgaaagagacacactttaaccattttatcaaatataggataaataagagattgtgctttttggaaatgcactgcatatcaaatgattgactctgttccacaactagtttttctatggccccatcacatctacttccaaaaagagactttatgtcaagagcctggcaaaaatgagcatacatcacaactacctaaacaatacagaattttaatgagaaatcaaacagtgtcaggacactwttcattgtctggtttaaatgtattcatttgaatttctaaatgtgtgtktatgctttttatagcatcaaaagaaaaagaagtaataataattcatgaattgtgggtatttragggagacagtaaagaaaactggctcattcacttctttgttacagcagataaatataatgcagaatacagtctggtttccttgaaactcaataggcatgtgatggttcttgaataagggagtgcacactttcaaca

SEQ ID NO: 63360 - DNA, 436 bp, Chicken  19866894326328_3
attgtgctttttggaaatgcactgcatatcaaatgattgactctgttccacaactagtttttctatggccccatcacatctacttccaaaaagagactttatgtcaagagcctggcaaaaatgagcatacatcacaactacctaaacaatacagaattttaatgagaaatcaaacagtgtcaggacactwttcattgtctggtttaaatgtattcatttgaatttctaaatgtgtgtktatgctttttatagcatcaaaagaaaaagaagtaataataattcatgaattgtgggtatttragggagacagtaaagaaaactggctcattcacttctttgttacagcagataaatataatgcagaatacagtctggtttccttgaaactcaataggcatgtgatggttcttgaataagggagtgcacactttcaaca

SEQ ID NO: 63361 - DNA, 600 bp, Chicken  19866894326333_1
gggcacatgtgggatccagcactgcttaagaagatgaaggacgtaataacatccatctatcttacactgagcttataattttctttaagaatctgtaaaaagctgcattttttttaaagcacctgaatggcagataaagcaagacctaatataaatctccttccatccctttgagaagattttcctttctctctttctgtgggattgatttcccctcctcgatacaagtcactccattatgctctgccttccttctgcaagtgcttcggtttggcactgatacttcaaccgctggtctcrggaacccaggctatctccttcttctgtgcctctrcagtgcaatagcataacaggatcctaatataccgcaggtggtccgctatacttttaaagtataataaaaataaaatgctatgtcatgtagcttgaatttgggaaaggctttgtcatacaagatgctaaaactgagctcttttgtttatttctgtctgaaatagtttgagctttgtgcagcacaaggacaaaattgcaatatatagtcttctgaaacgaagacagaaaatagaaaattaactaagagaacttttgcagctgtcttgg

SEQ ID NO: 63362 - DNA, 600 bp, Chicken  19866894326333_2
tgaaggacgtaataacatccatctatcttacactgagcttataattttctttaagaatctgtaaaaagctgcattttttttaaagcacctgaatggcagataaagcaagacctaatataaatctccttccatccctttgagaagattttcctttctctctttctgtgggattgatttcccctcctcgatacaagtcactccattatgctctgccttccttctgcaagtgcttcggtttggcactgatacttcaaccgctggtctcrggaacccaggctatctccttcttctgtgcctctrcagtgcaatagcataacaggatcctaatataccgcaggtggtccgctatacttttaaagtataataaaaataaaatgctatgtcatgtagcttgaatttgggaaaggctttgtcatacaagatgctaaaactgagctcttttgtttatttctgtctgaaatagtttgagctttgtgcagcacaaggacaaaattgcaatatatagtcttctgaaacgaagacagaaaatagaaaattaactaagagaacttttgcagctgtcttggattcatttctctattgctctaagcctgtttttcc

SEQ ID NO: 63363 - DNA, 599 bp, Chicken  19866894326335_1
  misc_feature (1)..(25): n is any nucleotide
nnnnnnnnnnnnnnnnnnnnnnnnngcataaatcatactgaggaagagatgagggaaaaatacattccagagaatacagttcagcacccatatgttattcacgtaaacatatttgtgtattgagatattgggaatcaacaagtatggcaagaaaaaaaaacaacaacaacaacaacaacaacaaaagccctgagtacatgctattaaaaaaaaaaaaaaaacatattcaaagaaaagtggattcgtattggatcagatcaataaagtagaaagaaaagcaaatattcagtggcattctgrggtttttaaagacatgattaaaacacaacataaaatgattcaagtgatttaatataagaagcagagatgacatgtacatttgcttatgctgtggcctaatttgtgatacagcttcatagaatcatagaatacttagagttgaaatggtcctttaaaggtcatatagttcaacttccctgcaatgaacaggaatatgcacagctatatcaggttgcccagggccttatccagccttgcattgaaagcctccagggacagggcttccaccacctcttggcaacctgttccagtgcctcacc

SEQ ID NO: 63364 - DNA, 600 bp, Chicken  19866894326336_1
ggagatgttctgctggtatcaacccaaaggtaaagctgccacatgccttcttcacactttcccatactgtcctcagcccctgtcagtattacataactatttccattattactgttctcccttattttaagcttctgattacttttagttttcattgtggttcagggaaatgtaaggttgctgatgagcactggggtccagagggactggctgtgactgcaaacagctgcacgtcgtgtccatgctgctgctattatggtctgaatgggaatgggtggtgaagaagactggatctctacrccctccccagggtccaagacctgcctttccttgggcaagccatgtccggcttgggtggagagtaccagatatacacamcaaaggacagaatgaccactggctgtatctcttcttggccagctcttcagtttatattatagctycttatctacacctcacttaaagaagtcattactcttctttttatctcctaacaatacagacaatttcaccttctgcattttatatggtactgtcagtaccctctcatatttttgatttcaagagctttctctgaaccttttaatttccaagactgga

SEQ ID NO: 63365 - DNA, 600 bp, Chicken  19866894326336_2
cctgtcagtattacataactatttccattattactgttctcccttattttaagcttctgattacttttagttttcattgtggttcagggaaatgtaaggttgctgatgagcactggggtccagagggactggctgtgactgcaaacagctgcacgtcgtgtccatgctgctgctattatggtctgaatgggaatgggtggtgaagaagactggatctctacrccctccccagggtccaagacctgcctttccttgggcaagccatgtccggcttgggtggagagtaccagatatacacamcaaaggacagaatgaccactggctgtatctcttcttggccagctcttcagtttatattatagctycttatctacacctcacttaaagaagtcattactcttctttttatctcctaacaatacagacaatttcaccttctgcattttatatggtactgtcagtaccctctcatatttttgatttcaagagctttctctgaaccttttaatttccaagactggaaatcttattcagacaataattcactctttaaatctctctacccatatattcactgctgtaatccagtgtatcccattt

SEQ ID NO: 63366 - DNA, 600 bp, Chicken  19866894326336_3
tttagttttcattgtggttcagggaaatgtaaggttgctgatgagcactggggtccagagggactggctgtgactgcaaacagctgcacgtcgtgtccatgctgctgctattatggtctgaatgggaatgggtggtgaagaagactggatctctacrccctccccagggtccaagacctgcctttccttgggcaagccatgtccggcttgggtggagagtaccagatatacacamcaaaggacagaatgaccactggctgtatctcttcttggccagctcttcagtttatattatagctycttatctacacctcacttaaagaagtcattactcttctttttatctcctaacaatacagacaatttcaccttctgcattttatatggtactgtcagtaccctctcatatttttgatttcaagagctttctctgaaccttttaatttccaagactggaaatcttattcagacaataattcactctttaaatctctctacccatatattcactgctgtaatccagtgtatcccatttttgcatctcttcctagatcttccttcagagcttatcttttcttttaccggtagccagttacttta

SEQ ID NO: 63367 - DNA, 599 bp, Chicken  19866894326337_1
  misc_feature (1)..(111): n is any nucleotide
nnnnnnnnnnnnnnnnnnnnnnnnnnnnnnnnnnnnnnnnnnnnnnnnnnnnnnnnnnnnnnnnnnnnnnnnnnnnnnnnnnnnnnnnnnnnnnnnnnnnnnnnnnnnnnncatataaaagaatttttataatgacttagaccatggtccagtatccttcaatcttatttatggtatcacaacatgggtatataataattccttttagggtaagaaaatttataaagtaaacatggaatggcaaactattgtcttattttcttgttcatttgttacaattcaggaaggttttattttgtktttcatatatccttcagttaagaaaaccaataatttaaaatgtgttcagtaatatttttcagtaagtagtaagtagattcaaaaacatgtctgatcacatgtttaacamaaagcatgtgagttgtaataatgaattcagtgggatttaagcaygtactttmaattgtagctgctttcttgctttcccaaattggaatgagattatttttatgttcttagtttgagagctacatttgactgggttagcataatttttcaaccttcatctttaaaggtgttgtaccgtaacctatatactt

SEQ ID NO: 63368 - DNA, 599 bp, Chicken  19866894326337_2
  misc_feature (1)..(2): n is any nucleotide
nncatataaaagaatttttataatgacttagaccatggtccagtatccttcaatcttatttatggtatcacaacatgggtatataataattccttttagggtaagaaaatttataaagtaaacatggaatggcaaactattgtcttattttcttgttcatttgttacaattcaggaaggttttattttgtktttcatatatccttcagttaagaaaaccaataatttaaaatgtgttcagtaatatttttcagtaagtagtaagtagattcaaaaacatgtctgatcacatgtttaacamaaagcatgtgagttgtaataatgaattcagtgggatttaagcaygtactttmaattgtagctgctttcttgctttcccaaattggaatgagattatttttatgttcttagtttgagagctacatttgactgggttagcataatttttcaaccttcatctttaaaggtgttgtaccgtaacctatatacttcatattgtcacatcttagaagaatatattagattttcatttagttgttaattaagagctttgaagagtaacacttttatttgtttcagaattgatgaggatgacaagaa

SEQ ID NO: 63369 - DNA, 600 bp, Chicken  19866894326337_3
atccttcaatcttatttatggtatcacaacatgggtatataataattccttttagggtaagaaaatttataaagtaaacatggaatggcaaactattgtcttattttcttgttcatttgttacaattcaggaaggttttattttgtktttcatatatccttcagttaagaaaaccaataatttaaaatgtgttcagtaatatttttcagtaagtagtaagtagattcaaaaacatgtctgatcacatgtttaacamaaagcatgtgagttgtaataatgaattcagtgggatttaagcaygtactttmaattgtagctgctttcttgctttcccaaattggaatgagattatttttatgttcttagtttgagagctacatttgactgggttagcataatttttcaaccttcatctttaaaggtgttgtaccgtaacctatatacttcatattgtcacatcttagaagaatatattagattttcatttagttgttaattaagagctttgaagagtaacacttttatttgtttcagaattgatgaggatgacaagaattccctaatcctaatctattgaatttatgattattgattagtaaa

SEQ ID NO: 63370 - DNA, 600 bp, Chicken  19866894326337_4
atcttatttatggtatcacaacatgggtatataataattccttttagggtaagaaaatttataaagtaaacatggaatggcaaactattgtcttattttcttgttcatttgttacaattcaggaaggttttattttgtktttcatatatccttcagttaagaaaaccaataatttaaaatgtgttcagtaatatttttcagtaagtagtaagtagattcaaaaacatgtctgatcacatgtttaacamaaagcatgtgagttgtaataatgaattcagtgggatttaagcaygtactttmaattgtagctgctttcttgctttcccaaattggaatgagattatttttatgttcttagtttgagagctacatttgactgggttagcataatttttcaaccttcatctttaaaggtgttgtaccgtaacctatatacttcatattgtcacatcttagaagaatatattagattttcatttagttgttaattaagagctttgaagagtaacacttttatttgtttcagaattgatgaggatgacaagaattccctaatcctaatctattgaatttatgattattgattagtaaaaacccaag

SEQ ID NO: 63371 - DNA, 599 bp, Chicken  19866894326349_1
  misc_feature (1)..(129): n is any nucleotide
nnnnnnnnnnnnnnnnnnnnnnnnnnnnnnnnnnnnnnnnnnnnnnnnnnnnnnnnnnnnnnnnnnnnnnnnnnnnnnnnnnnnnnnnnnnnnnnnnnnnnnnnnnnnnnnnnnnnnnnnnnnnnnnnnaattagattctgaaagatactagattaaatgtgtactgagcggcagtgtgacacactgaattcaactccctgtggaatacaaagaagctttatatttcttatatcaatacaggattgaccataagcagcattctaaaaaatctcagcacaaaaactggcgtggatcgaaaytgttcaaggtctattcccacttcacaataagggaatgggtcatggctaaacggaagagacaccgactgttctaaggtacgacagacacagccgcacaatttgttttacagttagttatccactgcgtgttgcataatcagaaattgtttgctacggacacaaacacaggaatgcttctgttcagccatatgtcataaaccccaggaaacaaattagtgactgaaccatactctccttccccttttgttctggtacgtgtttgggagaagcagtactcagaacttcatgctattaataag

SEQ ID NO: 63372 - DNA, 600 bp, Chicken  19866894326350_1
tttgaagcaatttgtgatgggtcacatatagaaccacacataaatcctgaaatctactattatttcccattcctctaataagcaatcactgggaaaaaagattactctacgggatatctcgaaaatggataataagtctggccacaagagaaagatattcctcctaaaggcaaaaagtattttagcacaggatacagaaacagataaccatgactttatagccctttagtattccccctcagcataatgaattttacttcaaaaggtctgtgagcttttcagagtagttcatttgcaggractgaccttcatgagctaagtgggaatgctttcacagaaggctgatggtacaagaaggctcaaaaacacaaaattcaatggaaataatawccatgacagccacattaataggatcacaatatgtgtatttaattgtataccaatacatccattctccatccwttctagtcctttttttaagtactgaacttgctcatggggtatactgactcactttagtcttttgtcatatttacattacaaaagctattttatgctgttaatattataatagtttgcttgcttttgtatttgaaaact

SEQ ID NO: 63373 - DNA, 600 bp, Chicken  19866894326350_2
gggaaaaaagattactctacgggatatctcgaaaatggataataagtctggccacaagagaaagatattcctcctaaaggcaaaaagtattttagcacaggatacagaaacagataaccatgactttatagccctttagtattccccctcagcataatgaattttacttcaaaaggtctgtgagcttttcagagtagttcatttgcaggractgaccttcatgagctaagtgggaatgctttcacagaaggctgatggtacaagaaggctcaaaaacacaaaattcaatggaaataatawccatgacagccacattaataggatcacaatatgtgtatttaattgtataccaatacatccattctccatccwttctagtcctttttttaagtactgaacttgctcatggggtatactgactcactttagtcttttgtcatatttacattacaaaagctattttatgctgttaatattataatagtttgcttgcttttgtatttgaaaactaacatccagaagaagtgccagaagtgaaaggacaaacagcctttgcagcaatttatgaacgtgctgcaaactgcacataagaatcctcca

SEQ ID NO: 63374 - DNA, 600 bp, Chicken  19866894326350_3
cctaaaggcaaaaagtattttagcacaggatacagaaacagataaccatgactttatagccctttagtattccccctcagcataatgaattttacttcaaaaggtctgtgagcttttcagagtagttcatttgcaggractgaccttcatgagctaagtgggaatgctttcacagaaggctgatggtacaagaaggctcaaaaacacaaaattcaatggaaataatawccatgacagccacattaataggatcacaatatgtgtatttaattgtataccaatacatccattctccatccwttctagtcctttttttaagtactgaacttgctcatggggtatactgactcactttagtcttttgtcatatttacattacaaaagctattttatgctgttaatattataatagtttgcttgcttttgtatttgaaaactaacatccagaagaagtgccagaagtgaaaggacaaacagcctttgcagcaatttatgaacgtgctgcaaactgcacataagaatcctccacagtgctaagatgacacactggcacttccagggtcagagaggctattagcaggaataaacttgtgacataag

SEQ ID NO: 63375 - DNA, 599 bp, Chicken  19866894326364_1
  misc_feature (1)..(57): n is any nucleotide
nnnnnnnnnnnnnnnnnnnnnnnnnnnnnnnnnnnnnnnnnnnnnnnnnnnnnnnnntatagggaaggattacggatgcaaagagatttgcatttgatatataagtaaatccccagtgatctggattaaagcaggaaagcctactccagacatccagaaaggctgcagaaaaaaagaacgagtaggaagtttacagggcggtaattcagcccatagggcaaacaaagccatgactccagcagtcataaggaactgagtaacatgaaaagaggtgtctggaaatatcagaaatgggagaaytggcttttctgaagaaattcaaggctgtaacgagggaggtcggcgaggagaggcccggtgggatgctcgccaccagcagctcctacagtaaaaggatgttttaattaacacagtgtcaggcaatggaagaaaaacatatttagaccaggatcagcatatgcttcgcttagcaataacagtcgtgttgacaaagggcttgacagctgaagttacgccggtctaggtctaagcaggtttttctgtaaagctttgtatggcaacagaaaaaaggtaggaattaagaagagtaggccttagcc

SEQ ID NO: 63376 - DNA, 600 bp, Chicken  19866894326364_2
gatgttttaattaacacagtgtcaggcaatggaagaaaaacatatttagaccaggatcagcatatgcttcgcttagcaataacagtcgtgttgacaaagggcttgacagctgaagttacgccggtctaggtctaagcaggtttttctgtaaagctttgtatggcaacagaaaaaaggtaggaattaagaagagtaggccttagccagctcgggtgcatttcaagtcactgggctcacacatctgtggagaaaagctctcctatcctgctcacataacggaggtgaagacaaaccctgacygcccttctacaaactgtgtcctcactgtgacaaccactgctttgttccccatcagaataaacctggttctgcctccattttaaagcagaagagactgcagcactgttactcgaggatgctagagggggcttcagagagaggggccttcagcctctctcagcccctgccccagtgcctaaccaccgaccaactggcaagcaaacagagagctgacagacaggaaataccctgatttggtactcagtcaaatcctgaattaaagaagaattagaagttgttagataacggcatcaaccaatg

SEQ ID NO: 63377 - DNA, 600 bp, Chicken  19866894326364_3
agactgcagcactgttactcgaggatgctagagggggcttcagagagaggggccttcagcctctctcagcccctgccccagtgcctaaccaccgaccaactggcaagcaaacagagagctgacagacaggaaataccctgatttggtactcagtcaaatcctgaattaaagaagaattagaagttgttagataacggcatcaaccaatgcagtgctcaactgctgacagtaaaagggaactaagtcagcatctcacacagggaaaaccccaattctttaacacgaggagggggggaaggyaaaaaaaaaaagcatcaatcacaatctgtcatgatatcccattgttcagcactgttagcattagaaaacagtcaccagggattaagccagcagagtctgtatagtagttactgactgttaggcaaacgcgtgctgcccggtaacactcggtgcaaggctgtgattaatcattacgatgcgacagaaggcgtactactgtgcaacagcgacaggagctgaactgtgccctgcctctaatgacaacctgcttatcctgacgtgctccgtgcttgtacgacttgctcatttgctggtggctga

SEQ ID NO: 63378 - DNA, 600 bp, Chicken  19866894326364_4
aatctgtcatgatatcccattgttcagcactgttagcattagaaaacagtcaccagggattaagccagcagagtctgtatagtagttactgactgttaggcaaacgcgtgctgcccggtaacactcggtgcaaggctgtgattaatcattacgatgcgacagaaggcgtactactgtgcaacagcgacaggagctgaactgtgccctgcctctaatgacaacctgcttatcctgacgtgctccgtgcttgtacgacttgctcatttgctggtggctgaagcccgaaggacacaggtgcartgctcagggtttgatccccagtggtgcttggccaaaaagcaactttgagaggggccggagttgagcatttcttcaggaagccacctaaaagcctccttaccccacaccacactgctgcaggtgctgctctggagttacagcaacagtattggtaagacggactgcagaggtgggaggctgtggtggcaacaatagcaatcctggcattgttacgctggtttttacataaaaagcagcaagaaacccaagtttcagacttcagtgagtccaccttcataaagtacctgaagaaacaaagtt

SEQ ID NO: 63379 - DNA, 600 bp, Chicken  19866894326366_1
agaatattttctatttatgtaagagatgcaaagccttgtcacccactttgtttgcactggtagaattcaagggaaacttcactaaacaagtggtgcaagtgggagctgagctaggagttacgtttttcatttcttctttgtgcagtgctttggagttactaatgaacttcatataattttacaaaaacttcaagatcactatcaagggctgtgattctgaaatatctgtgatatcaaaagttgcagtgaaaatggggttctaatcctagaagtgggattatggtgggaaaagcttaggawtccctacattaggaccagctgaagtctgaactccttcaactactattcattcaacttttcttcctcacttcacctcctttgccctctgaaaaaggccatctgctttctagggctgcctggcatcacagaatggcttatattgtcgaggttatacagtctccgcgtctgggtttgtaagggttttgtgctgtcagattatcggaacttacatacaaacatacgttagctcaaaggctaactgttttgatgcacagagaaagaagcgctgtctctcagtgcactgtgtaagtctgtagaaat

SEQ ID NO: 63380 - DNA, 600 bp, Chicken  19866894326366_2
tgtatgttctcattcatttgccctcagtaaggactggggagacctaggctactggcagggtgtgttattatttctttcatttttttagctttctaaaatttcttagttttgaggtgatatgaatgtaactaaaaattttgactcttccttaaaaaagttattcttgaaacacgtgttttattttatacctgagctttgttacagaagcattgaagagcatgctagtggttatgctgaactttccaattacgtatattaatcatggaagatcctggcgggcctgggaggacaagaaaggargaaaaaaatagccagcaatgcatgaatatttcacttgtgatccaaagttcagcatcagtgtcccttataacccaatgaaagtcattatctcctgtgatgagactatgtcatgtccacagaagttcttttcccacagcaactcaccaggaaatcatggagaaagatgtgcagatcctggacagttttctcaaattgtgaaattgcagactcctttttttcaccaaaactctcttaccctgtttttagcttarttgatagtcactttctaatgaatttaatacaagcatgttcagagccaca

SEQ ID NO: 63381 - DNA, 600 bp, Chicken  19866894326366_3
tatattaatcatggaagatcctggcgggcctgggaggacaagaaaggargaaaaaaatagccagcaatgcatgaatatttcacttgtgatccaaagttcagcatcagtgtcccttataacccaatgaaagtcattatctcctgtgatgagactatgtcatgtccacagaagttcttttcccacagcaactcaccaggaaatcatggagaaagatgtgcagatcctggacagttttctcaaattgtgaaattgcagactcctttttttcaccaaaactctcttaccctgtttttagcttarttgatagtcactttctaatgaatttaatacaagcatgttcagagccacatctgctttgcaggacttctttgtagcatcctgagtaagctggcaagatctacatgagattgcagaataccagagaggcagctaactgctgtttaatagaaaggtctagaagacatatttttctgcttttggtgattgtatttcaacatctgtactcaaatattgaatttagaaagtaccacagagagttaacctgctctccgatatccacctttgtctttggtttttggagctcaccagttgaaagcagtt

SEQ ID NO: 63382 - DNA, 600 bp, Chicken  19866894326366_4
accagagaggcagctaactgctgtttaatagaaaggtctagaagacatatttttctgcttttggtgattgtatttcaacatctgtactcaaatattgaatttagaaagtaccacagagagttaacctgctctccgatatccacctttgtctttggtttttggagctcaccagttgaaagcagttttttctcaagatccttcaaatttagattaattccactcattacctttaaccctgacattacattttacccctggtatgactgtatttctaaaaatgtagataatgtaaaatatttrctcattctggacaaaaaaaaaaaaagccaactgcttggcctttggtaggggcattaaatcagagcagcagtgttccattttattatgcagtagtacgtgcttttgatgttgactttcatacgcagctgttgatgacccagattttgttttcagctttcagtttctgtagagttcactgcatcacgttaggcgaaccagcataaaggaataactgttacactaatgggggaaaatgagacagcagactgacttttttgattcttcctagtcgaaagacaaacaaatcaacacaaatatgtt

SEQ ID NO: 63383 - DNA, 600 bp, Chicken  19866894326367_1
ggtcagatgttctgttctcttcgtaatggattgaccggggacatgtttttatctttcgtgcaaccgctggattgtaaaacttaattagcaagtcacttctctcccctatctgaaggcatgtgtatgatgattacacatagatcactttttatggacatgtcatgttttcatttgagagtaacagcctgcatgagggacgttcttgccacctatttacatcaatagtttagagaagagccagtaggacaaaaatgaaatctatccttgacatcagatgtgtcagttcagcttccaacaacrtctactgatgtggagctgcagttgctcagactgcatctgctgtgtggtgtggtgacaaaggaggcgttacaaacacaagtgaagaagagccagcaggtttaatgctgaatgcatggacaaggattatgatgtgagagaaaatatagaaagaggcagaaaaacaaaggggggggggaggaggggtttccccatagtaaagaaaaatatgcaaaaatacagtgaaaaatacaacagtgtttgagttcaaagaacaagaaggctgcccatatatcctgcctggaaaacaatgcttttggagtt

SEQ ID NO: 63384 - DNA, 600 bp, Chicken  19866894326368_1
ggagttgtggtttaaggctttgggtggttctttctgagcttagttcttgtactggctgctgcaagcagagtatgttaattccctgtttacttgcattttgccttgtgtgaaattgaagcctcccttgaaagggagttgagagacaatgctgttgctccctttttccagaaagcgttggagctgtgagttatgattttaaagagctttgtagcttctgccaggtggggaatatcctgcctgtgtctgaaggctgagctgtgccttgggagggtaggggacgtttggattttttagtggggyagtgttagcaaagagccatgtgttgttaccacgctttgggctgttcctactgcctcctttctcttgcagatgctgtctggaccacccctgttctctttctgtccccaggactctaaacctctctgcatgaggtagggaggacagccactaccatgcctgattcttcctgccttgttctttttctgcagctggtcagcgaaaaggttggaggggcagaagggaccaaacttgacgatgacttcaaggaaaggaaaaggtgagtaagggataggagaaatccctaaaatcgcccatgtaagc

SEQ ID NO: 63385 - DNA, 600 bp, Chicken  19866894326369_1
cattgcagctgcagggaaagaaggaaattctgatgagcatcaagtctgcagcttacctgccattcctgacccaaatgagaatgagcagaaagccacagtctgatcagcccagctgcaacagttcagggaaaggtcaggcaggaatctagtctggttggcatacatttctgtgcctgtgtttcaggggctctaaatacagctcttttacagcagtgcaaatgggtaattgcactcataccagcatcggtctgggatatcaagtctcaggtgttcacaggactattttgtgttcgtaaaacrcgaggttcacccacggggaccagaaaaacctccttctaagtaggctgtatctatttttttctgctgtttaaagagatgctgtcaacacagaagccatactgctcatgtggaagaaaatcacctgcaagaaaccacaatactttgaagagattagaggattaaaggagctttccctctgttcttcatcttatacgatcccgaactcacagaaaccactggaaagattccttctgctttcagggggctcatgatcagaacctttggtgcactgaagagccctgaaataactggcagcctgcg

SEQ ID NO: 63386 - DNA, 600 bp, Chicken  19866894326370_1
tgtgatgtaatggagtgaaaataataatgaaaacatacaatttggcatacattttgagaaaattcagtctcccagaatgaagacaaatgtcatgggcttcattcctcgctgtcttctgcttcctctcatgttgcttccaggggccaaactgtgctcaggactttatggttcctgttctagagattgcaaacgatcagctcagctgttagctcattgtttatggcctatgccaaagcatgaggaatggaaacgccatagaagcaggctagctgctgagatttctagtccagatttgtaagyccaagaggtttagataaggtaagtaaagcaccagcatttgacattgcatagaactaaggatgaaaaattaaatgtcttcttccatgttgagttagacaggagatgcattacaaaataattcttctatatcagtttatctttgtgtataaacaaatccagtttttctgtttcatttaattgaagaaggtcataatataatctttataacctggttgtttggaatggcaataaaaagacctttaaactctgctctgtggatagctaaacaggttctgccattaagttcagtgtgaccataat

SEQ ID NO: 63387 - DNA, 600 bp, Chicken  19866894326370_2
cactgaagattgatctagtatctatttattagtgtagttctatgtactctaactaatggctctctaagccttcagacagactaatggtttcttcatgtggtctcatgaaggagtatttgccactaacttcacagaaaaataggttcatgaaataagtgtataatacaatgagagaaaagtgaaaaatcagtgcggataaaacaactgcataatttaaaggtctccactgctatggaaattcatgctttatatggataggtaaatgaatatgatgtgagcaaaagagatggatttctaacyttttttttgtctgctttacaaatgagaaatgaattagatattttgattcacacagcatttttcttattttwatttctagacactctggcatcactcagactcactgacaattgcttcacacaatccctccctggctgctccagtgggcagaaagacaaccagcattatttcaataccaaaatgtgcccctcaatatataagctagaaagcactggttgatttaaacctccatcataacagaatgatgacattttattcttcgtttacagagatcaagatgaccatacccaagtgatgacg

SEQ ID NO: 63388 - DNA, 600 bp, Chicken  19866894326370_3
tcagacagactaatggtttcttcatgtggtctcatgaaggagtatttgccactaacttcacagaaaaataggttcatgaaataagtgtataatacaatgagagaaaagtgaaaaatcagtgcggataaaacaactgcataatttaaaggtctccactgctatggaaattcatgctttatatggataggtaaatgaatatgatgtgagcaaaagagatggatttctaactttttttttgtctgctttacaaatgagaaatgaattagatattttgattcacacagcatttttcttattttwatttctagacactctggcatcactcagactcactgacaattgcttcacacaatccctccctggctgctccagtgggcagaaagacaaccagcattatttcaataccaaaatgtgcccctcaatatataagctagaaagcactggttgatttaaacctccatcataacagaatgatgacattttattcttcgtttacagagatcaagatgaccatacccaagtgatgacgatgatggaccactctgatggtagtatgtgatcttagagctgccagttagcaatggtgtttactaatataca

SEQ ID NO: 63389 - DNA, 599 bp, Chicken  19866894326374_1
  misc_feature (1)..(75): n is any nucleotide
nnnnnnnnnnnnnnnnnnnnnnnnnnnnnnnnnnnnnnnnnnnnnnnnnnnnnnnnnnnnnnnnnnnnnnnnnnntgagttatttttaattatctgctgtaaatgaacaaaatcaatttgttgtgaactcagagtacaaggagggaagttgagaaaccaaaatgcagtaaggcatagtcacatagcgcagggatgacgttttcattgtcatgtctggttgctgtcatgctgcctcatgacagagctttcttgtcacacagtggaaagctgatccagtgtcatacttgtactatctcagtraaagtgctgatgcatgagaaatagtttatgtgagaaaagctgactactcctaaggtgtctcttagtagcaggatttttcaggtgtaatgtctggaagacaggaagatcagaaataattcattttggtgagttaattttacctctttgtgaaatacaaacgcccaggttatcactcttgaagtctgtttactccttttcagcctaactttttgtgtgcagggagcagcaagatagaactgtcctgtcattatcagtcactgaggggcagatgattgtgtgactccagttttcttagctgg

SEQ ID NO: 63390 - DNA, 600 bp, Chicken  19866894326374_2
ccttttcagcctaactttttgtgtgcagggagcagcaagatagaactgtcctgtcattatcagtcactgaggggcagatgattgtgtgactccagttttcttagctggagcatctgccctaggtaattacaggacactgtaatatgtgaaggatgaaccagaaatgaaagcaagtggttttcagtattgttttcccattgaacactagaaagatcaagtctagtttctagtcaattttataagagacttgtgtgttttcttggggaaaaaaagtactgtacaatggtaagacagaactgraagataagactgcttacagggtttgtatgtctgtatagactgcatattgtaaagacagtagggaaacctagttaatgagttgacacagttttgttcttagccaccatctcccatgtttttcagcatagtattttatttgacttgcaggtgaacggaaaacaattgtgtcctgtactcgaattattaacaagaccatgacagtggtgaatgacagtgactgccaacgagtgaatcgccctgagccccaggtcaggaaatgtaacacacacccctgccagtcacggtaaggagttaaaaata

SEQ ID NO: 63391 - DNA, 600 bp, Chicken  19866894326378_1
ctttagaggtgctcatttccttaaagcaagaatattaagggccaaagatctctttcctacaaattttccattgcagtgctttcctatttaacttcctccatggtttgcagtcccaacagccctgaaaacaaaactacgagcaaacgcagagcccaaaaagctcatgcagacagcaccggacccacagccacatagggttcacgtcagaggcaaacttacacccttcccccccccaaaaaagaataaacttgactaaaatgcttttaaaattcaacccccaacttcccaacccaacaccarccccccccccccccmaaaaaaaaatctgtctctaatttcaaactcaaataagctcgcagcatggtggcctttgttttgttttcttctccccaactcctccctgcaattgcataacaaaagtgtctaaattcacaccatctggccgataaagccacgggccccagcggccgcctggcccagctgattagagctgctgtctgctccgagccttgtggcgaaagtcacagctgtggggctcgcctgcgctcaatgcagctctgttattagccagctgtagaccctgagactacttctgttcga

SEQ ID NO: 63392 - DNA, 600 bp, Chicken  19866894326378_2
tttagaggtgctcatttccttaaagcaagaatattaagggccaaagatctctttcctacaaattttccattgcagtgctttcctatttaacttcctccatggtttgcagtcccaacagccctgaaaacaaaactacgagcaaacgcagagcccaaaaagctcatgcagacagcaccggacccacagccacatagggttcacgtcagaggcaaacttacacccttcccccccccaaaaaagaataaacttgactaaaatgcttttaaaattcaacccccaacttcccaacccaacaccacrcccccccccccccmaaaaaaaaatctgtctctaatttcaaactcaaataagctcgcagcatggtggcctttgttttgttttcttctccccaactcctccctgcaattgcataacaaaagtgtctaaattcacaccatctggccgataaagccacgggccccagcggccgcctggcccagctgattagagctgctgtctgctccgagccttgtggcgaaagtcacagctgtggggctcgcctgcgctcaatgcagctctgttattagccagctgtagaccctgagactacttctgttcgaa

SEQ ID NO: 63393 - DNA, 600 bp, Chicken  19866894326378_3
tttccttaaagcaagaatattaagggccaaagatctctttcctacaaattttccattgcagtgctttcctatttaacttcctccatggtttgcagtcccaacagccctgaaaacaaaactacgagcaaacgcagagcccaaaaagctcatgcagacagcaccggacccacagccacatagggttcacgtcagaggcaaacttacacccttcccccccccaaaaaagaataaacttgactaaaatgcttttaaaattcaacccccaacttcccaacccaacaccacccccccccccccccmaaaaaaaaatctgtctctaatttcaaactcaaataagctcgcagcatggtggcctttgttttgttttcttctccccaactcctccctgcaattgcataacaaaagtgtctaaattcacaccatctggccgataaagccacgggccccagcggccgcctggcccagctgattagagctgctgtctgctccgagccttgtggcgaaagtcacagctgtggggctcgcctgcgctcaatgcagctctgttattagccagctgtagaccctgagactacttctgttcgaattataatacctttt

SEQ ID NO: 63394 - DNA, 600 bp, Chicken  19866894326393_1
cagtatgcaagacacagtacgtacagagtgtgatgagtatgatgttgtattagcgtagactacctgacctgctgttcgtctgcctaaaacagcttatattaaattcaaaagtcaggccatgttaattacggtaagatactttttaagcttgtaagtataacaagttaagagatcggacacaaaacaacaaaatacatgaaaaattgtttatataaacaactgtaatttgagaatcagaaaggatcctaagtacaactacaaaaatagtgcgttgtaaggcttattttgaaaataatctcwatacattgaatatttactctgtggagaaatctagtaggtagatttagaaggctaacatccgctgcaactactaaatccttggagaaaaggccatttttaacaatactacatgtaaacatgcaacacttcagctctgtttccatggagttgaaagatgaactatatcatatttaattttatgagataaagatctacagaaactgacgtagtgattattttttttccaattacctgccccagcaatgccataagacgagatggaggcaccacgctgacctctccagctaaagcttgtgcaat

SEQ ID NO: 63395 - DNA, 599 bp, Chicken  19866894326400_1
  misc_feature (1)..(77): n is any nucleotide
nnnnnnnnnnnnnnnnnnnnnnnnnnnnnnnnnnnnnnnnnnnnnnnnnnnnnnnnnnnnnnnnnnnnnnnnnnnnnactaattataagagatccattctcccttcctgccaaggtatcaccacaacctgctgaattacccccatattttagactgctggtcggaaaccctgaggaatgagagatgggagcaggctgaaaggcgagagaaaggggagaaacagatttatttgatttagatagaggagagatttcactgccagccgtaaatgtgttgtttcatgctctctatgaacctgcrgctttgtactgggaatgagaaggccgagaggttaatggtgtggagagctcctttccctgctttccagggctgctctggctgcactgaaccgaacaaggaacaggggatgaagtatcagtgctaagcaaattgcagtaacctcagcagcccaagtgcccacgctctcagctgctttgtttttacggggatatcttaatcaaaacatcatgccagctttgttttccatgacaataacgagayaaaactcgttcccttcaaactatcagctgttaaattaagccatattcaatacacaagga

SEQ ID NO: 63396 - DNA, 600 bp, Chicken  19866894326400_2
agaggagagatttcactgccagccgtaaatgtgttgtttcatgctctctatgaacctgcrgctttgtactgggaatgagaaggccgagaggttaatggtgtggagagctcctttccctgctttccagggctgctctggctgcactgaaccgaacaaggaacaggggatgaagtatcagtgctaagcaaattgcagtaacctcagcagcccaagtgcccacgctctcagctgctttgtttttacggggatatcttaatcaaaacatcatgccagctttgttttccatgacaataacgagayaaaactcgttcccttcaaactatcagctgttaaattaagccatattcaatacacaaggagtaactcaggacttacattgatgtcttccaggtcaaggaagttaaggatgatgccgttgcgcttccagatgatgggtggccgcagcgccccgcggatgctgcacgtcaggatggtgctgaggcccactgtgatggtggtgatgctgacccgctgctcctcgggcaggctgagctggaccacctctgcaaaggaacaacaccaaatagcaccaaggttccctttcttccccattccaggaat

SEQ ID NO: 63397 - DNA, 600 bp, Chicken  19866894326407_1
tccaagctctctgtgcatatttagacatagagctgtgacattatataagcatagtgacaaactgaagtcttgctggctctcacgtaacactcacaggctcacccctagcttccctggcagttgcttattgcctggaatccctacagcacattctgccaagaatcaaagtgaaagaaacagatttcaaagcaaaagctagggatggcctaaccagctcagcttaaagatgtgcctcctttggtaccttgtgtctggtgatcattggtaggaaatgcatagcaaagggcataggagcagaaygatgacgtgatgctttcctgttgtaagttggaaaaaggatctcaaataattcagtctaaaaacagtcctttaaagaggacttagaaaaaaatgggatcttggattgtatgctaacaatctgtgttccamttggtttgcaagacctgtaactgttttctacatgtttaactgcccctgagaaagaagcaaacactttgccaggtctgtctttaaatagatacccttgtctgctttctgttaatactaaagctgtcatggttttccttatgagatctgatgtttccgtggctcttggatttt

SEQ ID NO: 63398 - DNA, 600 bp, Chicken  19866894326407_2
gcctggaatccctacagcacattctgccaagaatcaaagtgaaagaaacagatttcaaagcaaaagctagggatggcctaaccagctcagcttaaagatgtgcctcctttggtaccttgtgtctggtgatcattggtaggaaatgcatagcaaagggcataggagcagaaygatgacgtgatgctttcctgttgtaagttggaaaaaggatctcaaataattcagtctaaaaacagtcctttaaagaggacttagaaaaaaatgggatcttggattgtatgctaacaatctgtgttccamttggtttgcaagacctgtaactgttttctacatgtttaactgcccctgagaaagaagcaaacactttgccaggtctgtctttaaatagatacccttgtctgctttctgttaatactaaagctgtcatggttttccttatgagatctgatgtttccgtggctcttggattttctctcccattcgtcgttataaggtgcttgttggtatgttctgtgccaggtgtagctttgattcagtaccactgagtagttcaatgaagatcctcaaatgctttagaaaaagtgagataaaaggcctcat

SEQ ID NO: 63399 - DNA, 436 bp, Chicken  19866894326407_3
ggcgttgcattcaggtgcacagaaagcattcaaggactgaattaaggagccagcacagtaggtgttactgtagccgtagctctgagcttctgacagtgctgggaggagcaggagcatgatgctatccaaaaaattggaaggatgtttgcagacttctttttgcatcctgcctttgtgaatgacacctgttacacagaacatagtctctactttccaatggccagaaggtaataaaatctgtccaagtttaacaactctgtctacagttggctttgggcagaaatctaaactttgctccaktgygaggagctttgtgtgagacagctttccttagcaaagggctgcaaattcattcagatgcttttcaaattaatgatgcagtgggagtgtttggtgttagtgggggcttgctctgctgcataccaagcttcaggag

SEQ ID NO: 63400 - DNA, 433 bp, Chicken  19866894326407_4
gttgcattcaggtgcacagaaagcattcaaggactgaattaaggagccagcacagtaggtgttactgtagccgtagctctgagcttctgacagtgctgggaggagcaggagcatgatgctatccaaaaaattggaaggatgtttgcagacttctttttgcatcctgcctttgtgaatgacacctgttacacagaacatagtctctactttccaatggccagaaggtaataaaatctgtccaagtttaacaactctgtctacagttggctttgggcagaaatctaaactttgctccaktgygaggagctttgtgtgagacagctttccttagcaaagggctgcaaattcattcagatgcttttcaaattaatgatgcagtgggagtgtttggtgttagtgggggcttgctctgctgcataccaagcttcaggag

SEQ ID NO: 63401 - DNA, 600 bp, Chicken  19866894326409_1
agccttcatggaatcgagtctcatttttcagcacagtaacttgcaaaacagcaaacattttgtaaaaggtaggtgataagaactgactggcattctcgtatgttatggatgaacacgctctaatgctacttaaaagatttaacgtctgatattctcctaatgagattaaggggacaaagaattgaaaacaagggatgtttacaattactggcacctgaagagcagtgatgtcaagtagaaaaataaactttccaccacagatgaacgatgtaaacacactcatctccagtctgtctaacrgtaccataggccatttctacagcacaaccaagagcagaaaygaatacaacaaagcgtatggtcaattgccagcaattaaatgtcacagtttacgggggtgctttctctgcctccaaactgtactgctggagtacagttttacctggaaaccacctttaaagttaccttctgtcactactgcctcgctataatgtcagcacggttctattgctaagcagtattagatggaacaatatttggacaatggcttttcttattaaaaccagaaataaaggtccatcttccttcagcaaagcagta

SEQ ID NO: 63402 - DNA, 600 bp, Chicken  19866894326409_2
tgcaaaacagcaaacattttgtaaaaggtaggtgataagaactgactggcattctcgtatgttatggatgaacacgctctaatgctacttaaaagatttaacgtctgatattctcctaatgagattaaggggacaaagaattgaaaacaagggatgtttacaattactggcacctgaagagcagtgatgtcaagtagaaaaataaactttccaccacagatgaacgatgtaaacacactcatctccagtctgtctaacrgtaccataggccatttctacagcacaaccaagagcagaaaygaatacaacaaagcgtatggtcaattgccagcaattaaatgtcacagtttacgggggtgctttctctgcctccaaactgtactgctggagtacagttttacctggaaaccacctttaaagttaccttctgtcactactgcctcgctataatgtcagcacggttctattgctaagcagtattagatggaacaatatttggacaatggcttttcttattaaaaccagaaataaaggtccatcttccttcagcaaagcagtatttcatttctyatctttaccactaaaacactgtggaactct

SEQ ID NO: 63403 - DNA, 600 bp, Chicken  19866894326409_3
catttctacagcacaaccaagagcagaaaygaatacaacaaagcgtatggtcaattgccagcaattaaatgtcacagtttacgggggtgctttctctgcctccaaactgtactgctggagtacagttttacctggaaaccacctttaaagttaccttctgtcactactgcctcgctataatgtcagcacggttctattgctaagcagtattagatggaacaatatttggacaatggcttttcttattaaaaccagaaataaaggtccatcttccttcagcaaagcagtatttcatttctyatctttaccactaaaacactgtggaactctgctccttctgacattttcttgcctctttttgtctttcctatsacaccaaataacctgctgatccttcttgactcgttgctactttagcatctgattcaaagacctctaaaatgtggggaaaaacaycctattcatctcagctctgagtaacattaatttatctttatgacctactaaaacttcctgtcctcactgtagccacgacatttcccaawgcattgtgtctgcaactctcatattcctccttcaaattgccactcttgttctgct

SEQ ID NO: 63404 - DNA, 600 bp, Chicken  19866894326409_4
cacagtttacgggggtgctttctctgcctccaaactgtactgctggagtacagttttacctggaaaccacctttaaagttaccttctgtcactactgcctcgctataatgtcagcacggttctattgctaagcagtattagatggaacaatatttggacaatggcttttcttattaaaaccagaaataaaggtccatcttccttcagcaaagcagtatttcatttctyatctttaccactaaaacactgtggaactctgctccttctgacattttcttgcctctttttgtctttcctatsacaccaaataacctgctgatccttcttgactcgttgctactttagcatctgattcaaagacctctaaaatgtggggaaaaacaycctattcatctcagctctgagtaacattaatttatctttatgacctactaaaacttcctgtcctcactgtagccacgacatttcccaawgcattgtgtctgcaactctcatattcctccttcaaattgccactcttgttctgctctgctattttcaaaaggcaaattctgaaaagggataaaatttcacattccctaaatggcagagaaaggggca

SEQ ID NO: 63405 - DNA, 600 bp, Chicken  19866894326409_5
tctgtcactactgcctcgctataatgtcagcacggttctattgctaagcagtattagatggaacaatatttggacaatggcttttcttattaaaaccagaaataaaggtccatcttccttcagcaaagcagtatttcatttctyatctttaccactaaaacactgtggaactctgctccttctgacattttcttgcctctttttgtctttcctatsacaccaaataacctgctgatccttcttgactcgttgctactttagcatctgattcaaagacctctaaaatgtggggaaaaacaycctattcatctcagctctgagtaacattaatttatctttatgacctactaaaacttcctgtcctcactgtagccacgacatttcccaawgcattgtgtctgcaactctcatattcctccttcaaattgccactcttgttctgctctgctattttcaaaaggcaaattctgaaaagggataaaatttcacattccctaaatggcagagaaaggggcaatacagttttaaaaattagcaatttgcctgaataaactttacaaaattcaactgaaaagttggattacattgtttcccttattt

SEQ ID NO: 63406 - DNA, 600 bp, Chicken  19866894326409_6
ttaaaaccagaaataaaggtccatcttccttcagcaaagcagtatttcatttctyatctttaccactaaaacactgtggaactctgctccttctgacattttcttgcctctttttgtctttcctatsacaccaaataacctgctgatccttcttgactcgttgctactttagcatctgattcaaagacctctaaaatgtggggaaaaacaycctattcatctcagctctgagtaacattaatttatctttatgacctactaaaacttcctgtcctcactgtagccacgacatttcccaawgcattgtgtctgcaactctcatattcctccttcaaattgccactcttgttctgctctgctattttcaaaaggcaaattctgaaaagggataaaatttcacattccctaaatggcagagaaaggggcaatacagttttaaaaattagcaatttgcctgaataaactttacaaaattcaactgaaaagttggattacattgtttcccttatttcagtttactcagtggtacaatatctacaaaatctatctgaatgttactcaaagggggtagttccaccaatatcctgagaactcgacagc

SEQ ID NO: 63407 - DNA, 600 bp, Chicken  19866894326410_1
taaaaggactgagtacaaattgagtacatccctgctgaaaaagacctgggggaactggtggatgggaagcaggtcatgagccagtaatgtgccctcacagcctgcaaagccaacagtatcctgggctgcatcaaaagaagtgtgaccagcaggttgagggaggtgatcctgcccctctgctctttgctggtgaggcctcacctgaagtactgtgtccagatatggagtcctcagtacaggagagacacagacctgttggggttcatccaaaggagagccacagaaatgatctaagggacrgaacacctctcctacaagaacaggctgagagagctatagctatagatacctattactacctccagcgagtacaacatatcagtgttaaattctcttgcaggttggatgctgcatgcttaaaaaataataataataatccaaattacgtagcaatgatttggaaaactatctatggatctagtgtaacttaacagtctttaatgaattttgaagtaaaattatgtaatgagttttagcactagggattggtagaattaatttgaatgaatgacacataccctgggattaagagtgcacata

SEQ ID NO: 63408 - DNA, 600 bp, Chicken  19866894326422_1
acagagattctccttggtcctcttactgttgatatatttgtaaaagagtttcttgttcctttttaccccagcggtcaggttgagttcaaactgggcttttgtctttctgattttctctctgcacatcttaacaacttctttgcatcctttctgagttgcccgtcccttcttccacaggaggaagattctctttttcacctggagcctcaagaatagcttcctgttcatccacgccagtcttctcccccgccggctcattttgtggctcagggggacagtctgctcctgtggctttaacaytaccttcttgaagagcgaccagccatcttgtgcccttttgctctctgagactgaatgccaggggacttcccctactagtcttctgaacaattcaaagtccaccctctggaagtccaaggtagcagtttttctgttccccctcctggctccaccaagaactgagaactctactatttcatggtcactctatccaagacagccccgacctccacaactcccaccagaccttctctgtgaacagcaggtctagtggggcagctcctctcataggctctctcaccagctgcatgaggaagttat

SEQ ID NO: 63409 - DNA, 600 bp, Chicken  19866894326422_2
cctgcttttatccccttcccccttctagtttatagctccctctagaagtcctgccagctcctgtaaaaagagtttctttctacagctctcccattggcagacctcaggccaggtgccaagtagactgccccatgatcaaagaacccaaaattcttgtgtttgctctagtctctcagccatgtgtttataagatgggctttcctgctcatctcagtgtccttccctgccacggtaggaatacaggcaaatactacttgtatgcctgctccatcaactaacctccccagtcccctaaaatcmttttttatagtcctcaggcttctgtcagtgacctcatcactgccgacctaaactatcagtaaaggataataaacaaaggggtggatcagactgggaagttttctagaaatattcctgacccaggccccasggaggcagcacacctccctacgggtagggtcaggccaacatcttgggcattctgttcctctcaggaggggagacatctataactatcaccctccattcttttctggaggaggcactcttcaactgtggagctgaccacctcaccttggacaagcttggaggtagtcctcc

SEQ ID NO: 63410 - DNA, 600 bp, Chicken  19866894326422_3
catgatcaaagaacccaaaattcttgtgtttgctctagtctctcagccatgtgtttataagatgggctttcctgctcatctcagtgtccttccctgccacggtaggaatacaggcaaatactacttgtatgcctgctccatcaactaacctccccagtcccctaaaatcmttttttatagtcctcaggcttctgtcagtgacctcatcactgccgacctaaactatcagtaaaggataataaacaaaggggtggatcagactgggaagttttctagaaatattcctgacccaggccccasggaggcagcacacctccctacgggtagggtcaggccaacatcttgggcattctgttcctctcaggaggggagacatctataactatcaccctccattcttttctggaggaggcactcttcaactgtggagctgaccacctcaccttggacaagcttggaggtagtcctcccacctcatcctcaaacctattacatagaggcacctggggaatcaaggtaggttggggtggaggttgcctgcattgccgagctgggacctgctgccattcctcctctcctctcaagttggctctctctgct

SEQ ID NO: 63411 - DNA, 599 bp, Chicken  19866894326432_1
  misc_feature (1)..(224): n is any nucleotide
nnnnnnnnnnnnnnnnnnnnnnnnnnnnnnnnnnnnnnnnnnnnnnnnnnnnnnnnnnnnnnnnnnnnnnnnnnnnnnnnnnnnnnnnnnnnnnnnnnnnnnnnnnnnnnnnnnnnnnnnnnnnnnnnnnnnnnnnnnnnnnnnnnnnnnnnnnnnnnnnnnnnnnnnnnnnnnnnnnnnnnnnnnnnnnnnnnnnnnnnnnnnnnnnnnnnnnnnnnnnnnnnacaagtgagtatctctcttgataagtagtgccagcaggaatagcatttgatatgcaattgcttgttcattggtaamtataaacaaaagtattaatatgaataatttgaaaatatatatatttaagtgtatgggcagcttcactccatactttttggaccttctgaagtattgttctgggagtacatgaagccaatatgctatctggcaaatatagaagaatttaacctgaaaactaaacagtaattcagatgaaggcaatgaaagcttgaaaactcatcttctagcacgagactgattaattttaagataatgtttgaaagcagctagaaatcttattactttttccatcatgagctcatcagttaacactcacc

SEQ ID NO: 63412 - DNA, 600 bp, Chicken  19866894326441_1
tggacaagcctcgatctaacacgatgctgatcctgcttatagcagaggatcagctggagcctgtgtttctttaatgcattcctgtggtgagaatgcccgtgggacttcaggaactaaagagtgaccacatcagtcactaacagtccagatggtgaactcagtggaaaatgcttcaggaacagtttatggttctgttctgtggtgtttgcatgcaaggagcacttctgtcccaccctcacccagctcctcagcttgcagaagtacctgctgcagttcagcacgggaatagccaacatcccrtgcatgcccagatggaaacacttctgattgcatgttaaatactgtatgctgtatgcactgtgagttcaataggtaaaactgcagtcagagttatctcctatactttgctttttagattggcagtaagtgggagttttggcttacgggtagcaacagtctttgaaaaaaagcctgccacaccttttgtctctgtgtttgcttctaattagatttgttttgtatcaggcaactgcttttccttcggaagtcaaagatttgacgaagaggatccgtacagtgcttatggccactgcccaaatg

SEQ ID NO: 63413 - DNA, 599 bp, Chicken  19866894326445_1
  misc_feature (1)..(111): n is any nucleotide
nnnnnnnnnnnnnnnnnnnnnnnnnnnnnnnnnnnnnnnnnnnnnnnnnnnnnnnnnnnnnnnnnnnnnnnnnnnnnnnnnnnnnnnnnnnnnnnnnnnnnnnnnnnnnnncaataactggcaggcatgttcatttgggtgtttttgtttggtttgcttcaaggaatgtgtttttagcccgaccataaaatgaatattttctgatgtgctgtcagtagggactgttgcttgttttgtacttgacctggagctcactcatttgtcactcacagcacacacccctctatatgtgcttccttmcgatgacttgtgttgtatacatgcagtgtcagaatatgaaggttgagctttccattcagtggaactttttgactttttgacttytcactttgtgtcaatcctcttcttcccttaaattccagtcttccttaccctgataggaaaattcagactggttattaggaaaaaaaaatgttcaccttggaggagtgaagcactgggacaggttgctcagggactgtaggctgcactcttggagatttcagagcctgactgaacaaggccagctgttggctctgctttgstaaragcctgatctg

SEQ ID NO: 63414 - DNA, 599 bp, Chicken  19866894326445_2
  misc_feature (1)..(27): n is any nucleotide
nnnnnnnnnnnnnnnnnnnnnnnnnnncaataactggcaggcatgttcatttgggtgtttttgtttggtttgcttcaaggaatgtgtttttagcccgaccataaaatgaatattttctgatgtgctgtcagtagggactgttgcttgttttgtacttgacctggagctcactcatttgtcactcacagcacacacccctctatatgtgcttccttmcgatgacttgtgttgtatacatgcagtgtcagaatatgaaggttgagctttccattcagtggaactttttgactttttgacttytcactttgtgtcaatcctcttcttcccttaaattccagtcttccttaccctgataggaaaattcagactggttattaggaaaaaaaaatgttcaccttggaggagtgaagcactgggacaggttgctcagggactgtaggctgcactcttggagatttcagagcctgactgaacaaggccagctgttggctctgctttgstaaragcctgatctgcacggcctccggaagtccctatatcctaattattttatggctctgtttagtacccagttcctgttctgattcagccgtgctgat

SEQ ID NO: 63415 - DNA, 600 bp, Chicken  19866894326445_3
aatgtgtttttagcccgaccataaaatgaatattttctgatgtgctgtcagtagggactgttgcttgttttgtacttgacctggagctcactcatttgtcactcacagcacacacccctctatatgtgcttccttmcgatgacttgtgttgtatacatgcagtgtcagaatatgaaggttgagctttccattcagtggaactttttgactttttgacttytcactttgtgtcaatcctcttcttcccttaaattccagtcttccttaccctgataggaaaattcagactggttattaggyaaaaaaaatgttcaccttggaggagtgaagcactgggacaggttgctcagggactgtaggctgcactcttggagatttcagagcctgactgaacaaggccagctgttggctctgctttgstaaragcctgatctgcacggcctccggaagtccctatatcctaattattttatggctctgtttagtacccagttcctgttctgattcagccgtgctgatgcacgtgtcattatctcctggtgaaggtcagtgaagtcacataggttttactcatgggtgatcaaagtcaaacctccaatg

SEQ ID NO: 63416 - DNA, 600 bp, Chicken  19866894326445_4
tatatgtgcttccttmcgatgacttgtgttgtatacatgcagtgtcagaatatgaaggttgagctttccattcagtggaactttttgactttttgacttytcactttgtgtcaatcctcttcttcccttaaattccagtcttccttaccctgataggaaaattcagactggttattaggaaaaaaaaatgttcaccttggaggagtgaagcactgggacaggttgctcagggactgtaggctgcactcttggagatttcagagcctgactgaacaaggccagctgttggctctgctttgstaaragcctgatctgcacggcctccggaagtccctatatcctaattattttatggctctgtttagtacccagttcctgttctgattcagccgtgctgatgcacgtgtcattatctcctggtgaaggtcagtgaagtcacataggttttactcatgggtgatcaaagtcaaacctccaatgagggtagtaggtgaaattcaggtatctctgtgattagttcaagcagccttgaagagagtgctggggtatctgggatttagtggtcaccagcagcccttgctctgccggtacgtgccgccc

SEQ ID NO: 63417 - DNA, 600 bp, Chicken  19866894326445_5
tgtgcttccttmcgatgacttgtgttgtatacatgcagtgtcagaatatgaaggttgagctttccattcagtggaactttttgactttttgacttytcactttgtgtcaatcctcttcttcccttaaattccagtcttccttaccctgataggaaaattcagactggttattaggaaaaaaaaatgttcaccttggaggagtgaagcactgggacaggttgctcagggactgtaggctgcactcttggagatttcagagcctgactgaacaaggccagctgttggctctgctttgstaaragcctgatctgcacggcctccggaagtccctatatcctaattattttatggctctgtttagtacccagttcctgttctgattcagccgtgctgatgcacgtgtcattatctcctggtgaaggtcagtgaagtcacataggttttactcatgggtgatcaaagtcaaacctccaatgagggtagtaggtgaaattcaggtatctctgtgattagttcaagcagccttgaagagagtgctggggtatctgggatttagtggtcaccagcagcccttgctctgccggtacgtgccgccctcct

SEQ ID NO: 63418 - DNA, 599 bp, Chicken  19866894326447_1
  misc_feature (1)..(98): n is any nucleotide
nnnnnnnnnnnnnnnnnnnnnnnnnnnnnnnnnnnnnnnnnnnnnnnnnnnnnnnnnnnnnnnnnnnnnnnnnnnnnnnnnnnnnnnnnnnnnnnnnnaggacacaaacattacatctaacaaagggaagaaattagtttattatttttaggcaatagatttcttaatttcctcatacaggagcacgttatatggaaatctacagcaagtgcccacagaaagaagtgtcagaagctgtaattacaaagcaggacatgacaaaacaaattttattcagtatttaagactgatgggcacagwagtcagaaaaagaccattttatgagagatgcccatcagacagcctgrtttattctacgmaataactcacttgcagctgcaaggcagagcccagcagccctcatttctctatccaccttctcctggctttgcacccaagttcccaccgcctctctccctcacagaccacggatccagcaaacattcagctgtgcaagacctgctttaagacaggtaagcagcctggaaatgcaaaacacgtcactgattggctttgtcttttgtgcagcctgctcccttccccagaaatggtgcccagga

SEQ ID NO: 63419 - DNA, 599 bp, Chicken  19866894326447_2
  misc_feature (1)..(51): n is any nucleotide
nnnnnnnnnnnnnnnnnnnnnnnnnnnnnnnnnnnnnnnnnnnnnnnnnnnaggacacaaacattacatctaacaaagggaagaaattagtttattatttttaggcaatagatttcttaatttcctcatacaggagcacgttatatggaaatctacagcaagtgcccacagaaagaagtgtcagaagctgtaattacaaagcaggacatgacaaaacaaattttattcagtatttaagactgatgggcacagwagtcagaaaaagaccattttatgagagatgcccatcagacagcctgrtttattctacgmaataactcacttgcagctgcaaggcagagcccagcagccctcatttctctatccaccttctcctggctttgcacccaagttcccaccgcctctctccctcacagaccacggatccagcaaacattcagctgtgcaagacctgctttaagacaggtaagcagcctggaaatgcaaaacacgtcactgattggctttgtcttttgtgcagcctgctcccttccccagaaatggtgcccaggagatatggagcagcacagcagccctgcagcacccactgcctgctccac

SEQ ID NO: 63420 - DNA, 599 bp, Chicken  19866894326447_3
  misc_feature (1)..(39): n is any nucleotide
nnnnnnnnnnnnnnnnnnnnnnnnnnnnnnnnnnnnnnnaggacacaaacattacatctaacaaagggaagaaattagtttattatttttaggcaatagatttcttaatttcctcatacaggagcacgttatatggaaatctacagcaagtgcccacagaaagaagtgtcagaagctgtaattacaaagcaggacatgacaaaacaaattttattcagtatttaagactgatgggcacagwagtcagaaaaagaccattttatgagagatgcccatcagacagcctgrtttattctacgmaataactcacttgcagctgcaaggcagagcccagcagccctcatttctctatccaccttctcctggctttgcacccaagttcccaccgcctctctccctcacagaccacggatccagcaaacattcagctgtgcaagacctgctttaagacaggtaagcagcctggaaatgcaaaacacgtcactgattggctttgtcttttgtgcagcctgctcccttccccagaaatggtgcccaggagatatggagcagcacagcagccctgcagcacccactgcctgctccactccaaacccaca

SEQ ID NO: 63421 - DNA, 600 bp, Chicken  19866894326448_1
gatgaacaaccaccaatgtcctgcccagcttgggcaggtgggctgagcttcttcagacagttccacagtatggagagcaggtacaggtcagggaagcatttattatagggtttctagctatgagttcaagataaaactattgatggttatgtgcactctcagtaagtgcacaagaatctggtgccaatgagagcaagacaggaagaaagaagcagcagcagcttagtttccatgaatgtaaacatttgcacgtgatatttaaggatagctcacagtggctggtatgtactttaagtactraaaggtgctcagagagctcacagactgcaagaagtgtttaccatgaattggaatctgggaaaggtttgttatcgtgaaagatatcaagattatttccaaagtaaccctcgatgcaaccctgtgaaagggaggctgtgaagtctaattaaaaagcatatatatgcatatatatagaaagaaatatgcatgtaaaaacatttctatatatatgcatatagggactggaggtgccctcttcatgagaatgctgaggacaaagctgtttcccatactttcccaagctctcttgcatagcggtga

SEQ ID NO: 63422 - DNA, 600 bp, Chicken  19866894326448_2
atcaagattatttccaaagtaaccctcgatgcaaccctgtgaaagggaggctgtgaagtctaattaaaaagcatatatatgcatatatatagaaagaaatatgcatgtaaaaacatttctatatatatgcatatagggactggaggtgccctcttcatgagaatgctgaggacaaagctgtttcccatactttcccaagctctcttgcatagcggtgagagaactgaaccaaaggaacagggaaacttcatttcacaggaaaacatctctgctgaactgaacctctgtcctcttgccccmaggtaaatgctccatccagctatatggttgaatggcctttgctcagcctttccagctgacactgttctgttctgcgtgaaataattaaacatagatctctacttgtttcagacctgataaaaaactgcagacctgcttttgcatccaggtgtttggtgctttgtttttcattctgctgtcataaagccacttaaatatgcattatttatcatcaatatagtgagattatctccagtattaaagtactgtacagcagcagagttcactcccttccctgttgattctcaacagacaaagaaa

SEQ ID NO: 63423 - DNA, 600 bp, Chicken  19866894326450_1
gcgttctcagaaaaaaaatggtttatttaattatttttttctaggcatttctacatatccctgtgtagatttgcaagtccagtgtctttaaccctatgtgtattgcaggagaacttgattttaaataagtggactgagcttcttggttgtgtaagatttcatggtgatttctaaaacacagtacaacagaccatccccttcatcagcccgatggtcacagttctgtactgtttcatatcacttcttcagtactcaaatgaggcaaagaccctgtcattctccactgggaaatgggccctsatgcatattgttagtratgtacatgtagccagaagttgttccaataaaacggatgagttctaaactacgttgtatttaaacaagatacatgcatttattctattatttaagcggttttcttgggcaagwgctgatttatactcaccgaatattaaaagatttttgcaaactctcaaatccaattcgcatcaaaattaatatacaacaaaataatacagaaattgatatacaaaattagtatacaacgaggttctaaagattacgcgttattctgcttacttcagcatggttatacttcca

SEQ ID NO: 63424 - DNA, 600 bp, Chicken  19866894326450_2
aatggtttatttaattatttttttctaggcatttctacatatccctgtgtagatttgcaagtccagtgtctttaaccctatgtgtattgcaggagaacttgattttaaataagtggactgagcttcttggttgtgtaagatttcatggtgatttctaaaacacagtacaacagaccatccccttcatcagcccgatggtcacagttctgtactgtttcatatcacttcttcagtactcaaatgaggcaaagaccctgtcattctccactgggaaatgggccctsatgcatattgttagtratgtacatgtagccagaagttgttccaataaaacggatgagttctaaactacgttgtatttaaacaagatacatgcatttattctattatttaagcggttttcttgggcaagwgctgatttatactcaccgaatattaaaagatttttgcaaactctcaaatccaattcgcatcaaaattaatatacaacaaaataatacagaaattgatatacaaaattagtatacaacgaggttctaaagattacgcgttattctgcttacttcagcatggttatacttccatgcaaagtaaactcta

SEQ ID NO: 63425 - DNA, 600 bp, Chicken  19866894326450_3
tggactgagcttcttggttgtgtaagatttcatggtgatttctaaaacacagtacaacagaccatccccttcatcagcccgatggtcacagttctgtactgtttcatatcacttcttcagtactcaaatgaggcaaagaccctgtcattctccactgggaaatgggccctsatgcatattgttagtratgtacatgtagccagaagttgttccaataaaacggatgagttctaaactacgttgtatttaaacaagatacatgcatttattctattatttaagcggttttcttgggcaagwgctgatttatactcaccgaatattaaaagatttttgcaaactctcaaatccaattcgcatcaaaattaatatacaacaaaataatacagaaattgatatacaaaattagtatacaacgaggttctaaagattacgcgttattctgcttacttcagcatggttatacttccatgcaaagtaaactctacctggaaaacacaatcatcaatgtttaaatgcttttcatctctacttccaagtatgttcttcataagacaaaatggcacccaaggacgagaagcagttttgttactctgtttt

SEQ ID NO: 63426 - DNA, 599 bp, Chicken  19866894326451_1
  misc_feature (1)..(146): n is any nucleotide
nnnnnnnnnnnnnnnnnnnnnnnnnnnnnnnnnnnnnnnnnnnnnnnnnnnnnnnnnnnnnnnnnnnnnnnnnnnnnnnnnnnnnnnnnnnnnnnnnnnnnnnnnnnnnnnnnnnnnnnnnnnnnnnnnnnnnnnnnnnnnnnnnnccagaagtaattagtgagagaaaaaggctgtaagagccgtgctggctcacagtcagcagttcccgctgactttgaataaggcagagctgagccaatgctgagcactgctggaattacgacaccaaatgtccaacctatttatggagcagctgcrgggcttggggatggctctctgcagcaggacttgcactgctgagctcacaccactttggtaccaatctgcaaatgccaaaaaataccaagcgttcaggtgctgtggctgaactaatcaccttatcacacctgtgctgccttccccttcatccagaggtggctatagggtctgcttcccttaacagaacaagttgaaggaagagcagcatggtaacaagcatgargaataatgaggacttcacttgggaattctccatccccacctcctgctccaagaagggratgttcccaatgccagat

SEQ ID NO: 63427 - DNA, 600 bp, Chicken  19866894326451_2
aaggcagagctgagccaatgctgagcactgctggaattacgacaccaaatgtccaacctatttatggagcagctgcrgggcttggggatggctctctgcagcaggacttgcactgctgagctcacaccactttggtaccaatctgcaaatgccaaaaaataccaagcgttcaggtgctgtggctgaactaatcaccttatcacacctgtgctgccttccccttcatccagaggtggctatagggtctgcttcccttaacagaacaagttgaaggaagagcagcatggtaacaagcatgargaataatgaggacttcacttgggaattctccatccccacctcctgctccaagaagggratgttcccaatgccagatcctaaaccctgcacatagcatagaaagaggcaaacagatgggacagtgagctgtttttrgggcagaatgctaaaaatcccaggacagttttccaacagtgaattcagattcacacaacaacatttracttgcaggaaaactttgattttgagagagttggacagtaawccttcagaaatttgaagccaagaactttactgcagctttctcacatacattttcct

SEQ ID NO: 63428 - DNA, 600 bp, Chicken  19866894326451_3
tatttatggagcagctgcrgggcttggggatggctctctgcagcaggacttgcactgctgagctcacaccactttggtaccaatctgcaaatgccaaaaaataccaagcgttcaggtgctgtggctgaactaatcaccttatcacacctgtgctgccttccccttcatccagaggtggctatagggtctgcttcccttaacagaacaagttgaaggaagagcagcatggtaacaagcatgargaataatgaggacttcacttgggaattctccatccccacctcctgctccaagaagggratgttcccaatgccagatcctaaaccctgcacatagcatagaaagaggcaaacagatgggacagtgagctgtttttrgggcagaatgctaaaaatcccaggacagttttccaacagtgaattcagattcacacaacaacatttracttgcaggaaaactttgattttgagagagttggacagtaawccttcagaaatttgaagccaagaactttactgcagctttctcacatacattttcctttcattctgacactcacrttatctttcattcacgtttcctttcattctgactctacgt

SEQ ID NO: 63429 - DNA, 600 bp, Chicken  19866894326451_4
taccaatctgcaaatgccaaaaaataccaagcgttcaggtgctgtggctgaactaatcaccttatcacacctgtgctgccttccccttcatccagaggtggctatagggtctgcttcccttaacagaacaagttgaaggaagagcagcatggtaacaagcatgargaataatgaggacttcacttgggaattctccatccccacctcctgctccaagaagggratgttcccaatgccagatcctaaaccctgcacatagcatagaaagaggcaaacagatgggacagtgagctgtttttrgggcagaatgctaaaaatcccaggacagttttccaacagtgaattcagattcacacaacaacatttracttgcaggaaaactttgattttgagagagttggacagtaawccttcagaaatttgaagccaagaactttactgcagctttctcacatacattttcctttcattctgacactcacrttatctttcattcacgtttcctttcattctgactctacgttactttacatggcattgcacggccaaagaaggcaaagacagtaccttcaaatgggatacaggcactatggaacaaca

SEQ ID NO: 63430 - DNA, 600 bp, Chicken  19866894326451_5
cacctgtgctgccttccccttcatccagaggtggctatagggtctgcttcccttaacagaacaagttgaaggaagagcagcatggtaacaagcatgargaataatgaggacttcacttgggaattctccatccccacctcctgctccaagaagggratgttcccaatgccagatcctaaaccctgcacatagcatagaaagaggcaaacagatgggacagtgagctgtttttrgggcagaatgctaaaaatcccaggacagttttccaacagtgaattcagattcacacaacaacatttracttgcaggaaaactttgattttgagagagttggacagtaawccttcagaaatttgaagccaagaactttactgcagctttctcacatacattttcctttcattctgacactcacrttatctttcattcacgtttcctttcattctgactctacgttactttacatggcattgcacggccaaagaaggcaaagacagtaccttcaaatgggatacaggcactatggaacaacagcaggtaataaaagaaggaaaattgactcaccgtttctgatgaccagtagcagctcaaggagaagtg

SEQ ID NO: 63431 - DNA, 600 bp, Chicken  19866894326451_6
tctgcttcccttaacagaacaagttgaaggaagagcagcatggtaacaagcatgargaataatgaggacttcacttgggaattctccatccccacctcctgctccaagaagggratgttcccaatgccagatcctaaaccctgcacatagcatagaaagaggcaaacagatgggacagtgagctgtttttrgggcagaatgctaaaaatcccaggacagttttccaacagtgaattcagattcacacaacaacatttracttgcaggaaaactttgattttgagagagttggacagtaawccttcagaaatttgaagccaagaactttactgcagctttctcacatacattttcctttcattctgacactcacrttatctttcattcacgtttcctttcattctgactctacgttactttacatggcattgcacggccaaagaaggcaaagacagtaccttcaaatgggatacaggcactatggaacaacagcaggtaataaaagaaggaaaattgactcaccgtttctgatgaccagtagcagctcaaggagaagtgccatctctatctggagaaactctgctccctccagtgctaaac

SEQ ID NO: 63432 - DNA, 537 bp, Chicken  19866894326451_7
ttgggaattctccatccccacctcctgctccaagaagggratgttcccaatgccagatcctaaaccctgcacatagcatagaaagaggcaaacagatgggacagtgagctgtttttrgggcagaatgctaaaaatcccaggacagttttccaacagtgaattcagattcacacaacaacatttracttgcaggaaaactttgattttgagagagttggacagtaawccttcagaaatttgaagccaagaactttactgcagctttctcacatacattttcctttcattctgacactcacrttatctttcattcacgtttcctttcattctgactctacgttactttacatggcattgcacggccaaagaaggcaaagacagtaccttcaaatgggatacaggcactatggaacaacagcaggtaataaaagaaggaaaattgactcaccgtttctgatgaccagtagcagctcaaggagaagtgccatctctatctggagaaactctgctccctccagtgctaaaccttaatggggg

SEQ ID NO: 63433 - DNA, 600 bp, Chicken  19866894326459_1
aacagcatggtcttgagagagaggaagggagcataagagctgtaaccccagagtaaaactctccatgagaacacaggtgttcttacagttattattcagctcttatccagcagaactgctgctctgaagccagtgtttaggtgagtgagttacaaagagggacagtggtgctggtaggtggggtatgtatatatttttctttctaaaattcatttattggtgggagccatagtaattttttaagaagtcagcagtcttctcactatggtctgtggtgatttccaccaccacctgccccarcaatccacaatccaaaatatagttggaatagtgtgaaggtgttcatatggaaaattcaaaaagtgagcaacagaagaactggaaaatcagtactgtacaatatgcagaaagcagtaatgttacttcagcgttagaaagtcctgtagatgtgttctggagagttacatcaattaaagtgcactgttcagaaggcatggaactcacttctctgttttctgtcagcctgagaaatgggaatccagaggctgcttccaagtgcctcctgagtggaagtacgttgtacttatcagtctaacccat

SEQ ID NO: 63434 - DNA, 600 bp, Chicken  19866894326461_1
tcctgctctctgtactctgcgctggtgaggctgcaagcaagacattgaggtactggagcacgttcagagaagggcaacaaagctgtgaaggatctggaacacaagtcttaaggaggaggctcaggggagaccttattgctctctgcacctccctggaaggaggtggtagtgacatggggcttggcctcctctcccccgtaacagcaacaggacaaggggtctcaatgtgcaccaggggagtttcaggttggatattaggaacaatgtcttctccataagagtgaccaggcactggaccargctgcccagggaactggtggagtcgccatccctggaggtgttcaagaaatgcattgatgtggtacttagggacacggtttagaggacagtattggtggcaagtggatggttgaactaggtggtcttagaggtcttttccraccataatgattctaggatcagttgaggaaagaatctttcttctttgtgaagctgtgctcaccttcctgccaggtattattgctgaccatttccattttaaccatttaacacaactttaacactttttctgccatcagttcctctcaccagttgtttccc

SEQ ID NO: 63435 - DNA, 600 bp, Chicken  19866894326461_2
ctctgcacctccctggaaggaggtggtagtgacatggggcttggcctcctctcccccgtaacagcaacaggacaaggggtctcaatgtgcaccaggggagtttcaggttggatattaggaacaatgtcttctccataagagtgaccaggcactggaccargctgcccagggaactggtggagtcgccatccctggaggtgttcaagaaatgcattgatgtggtacttagggacacggtttagaggacagtattggtggcaagtggatggttgaactaggtggtcttagaggtcttttccraccataatgattctaggatcagttgaggaaagaatctttcttctttgtgaagctgtgctcaccttcctgccaggtattattgctgaccatttccattttaaccatttaacacaactttaacactttttctgccatcagttcctctcaccagttgtttcccatgctgcatggaagcagtgctagctttctctcttgtggcagagggagagatgaacatggtcagcatgcatcattgctgccttgtctaacccccttctgcaggcattgatgtaatagtgccttgttcctgcaaaacaggtg

SEQ ID NO: 63436 - DNA, 599 bp, Chicken  19866894326472_1
  misc_feature (1)..(100): n is any nucleotide
nnnnnnnnnnnnnnnnnnnnnnnnnnnnnnnnnnnnnnnnnnnnnnnnnnnnnnnnnnnnnnnnnnnnnnnnnnnnnnnnnnnnnnnnnnnnnnnnnnnntcgaaagctagctagttcttaagccacacaactgcatatagctgccagcacagacagctggtgttcctgagccctgctggggaggacagtgtacagtttgggtacagcagcttgagggggaccgaatgcagcctgtggtgtctgggggtgtgtgctcttcacctgctcaacaccacggcttggcttcatttctttcaccrtgctgcctgaggcaggtggatgaacagcagtgcataaagctggaaaatactgcgagagtgagcacaaagatgagggtggcaatgaactaaagtgtaaggctacacagaaaacacaggatgcgttttgtggaagggctgtgctaattctaaggcagagttgggagcaggttccttcacatgaaccagccctgacatccttctaagctctgggaggcaaaaggagtatcagcacacactctgcacaatccatcactacacgcaccactgtttgaatcctccaggctctgaagcactgaagt

SEQ ID NO: 63437 - DNA, 599 bp, Chicken  19866894326476_1
  misc_feature (1)..(71): n is any nucleotide
nnnnnnnnnnnnnnnnnnnnnnnnnnnnnnnnnnnnnnnnnnnnnnnnnnnnnnnnnnnnnnnnnnnnnnnttaaaaatgattaattttgcctgttgtattgagagtgctgaattctatgcattcttttctactttcttgcaataaagactcctattgttgagttccagtgatgtgatgaggctgtcaacagaaataaattgttggatatttttcatagcatgcatcacaaggtagacagtcacatccattggcttcttttaacctcctgtgattgatactgatgtggaactacttggcrttgtagatcaggaatccttgcctgcagccgaaacgctgctcagcgtatcgttttgtaaaaccctggtgattgtagttgtgccagagcattatatagcctgacaggcccctttctgttttattccagggcactagagctagcagtaaagcacaagacacatgttgacaccgtcctggcttatcgacagaagttcctagaggactttggtaaaaaagaaacaaacaaaagattcttgcaatatgcagaaggtgtaagtattccttggaattattcctacagccttaggtcagatggttctt

SEQ ID NO: 63438 - DNA, 600 bp, Chicken  19866894326476_2
tgtgcatgtgttttatttgaaggcacagatacggaatgtatatatttagtatctggcaaggattatgcaaatgaaggcacagttgttttctataaacagggagctagatcttagaatggctgaatgcaaacctcttaaacatcttcaacatttttacatacttttatggatagcagcaatagcaaactttgaaggtaaccagatatgtattaaacgtgaactataaactgttctgtcaaatatgataaatagctatatatattattttataaacctctggaaagcctctttataatcatyaggttatttyaatgcaccagcatctcacagatcttgaagaccgaggagatatcttactgttcataagctgaatgcaccttagatttcaccagggtatcttctgtgcctaacagaataacaggtactacatatgcactttagacagcaatttcattcagaagcctttatgctcttyctcttggtgttcctaagcactctgagggtgcaactgtgaaaagagacatgtacttcagtgcatcctttcatccactgtagctgatggatcaggaaatgcatcttagctgctagctcacatccttt

SEQ ID NO: 63439 - DNA, 600 bp, Chicken  19866894326476_3
ttttatttgaaggcacagatacggaatgtatatatttagtatctggcaaggattatgcaaatgaaggcacagttgttttctataaacagggagctagatcttagaatggctgaatgcaaacctcttaaacatcttcaacatttttacatacttttatggatagcagcaatagcaaactttgaaggtaaccagatatgtattaaacgtgaactataaactgttctgtcaaatatgataaatagctatatatattattttataaacctctggaaagcctctttataatcatyaggttatttyaatgcaccagcatctcacagatcttgaagaccgaggagatatcttactgttcataagctgaatgcaccttagatttcaccagggtatcttctgtgcctaacagaataacaggtactacatatgcactttagacagcaatttcattcagaagcctttatgctcttyctcttggtgttcctaagcactctgagggtgcaactgtgaaaagagacatgtacttcagtgcatcctttcatccactgtagctgatggatcaggaaatgcatcttagctgctagctcacatcctttaattggacag

SEQ ID NO: 63440 - DNA, 600 bp, Chicken  19866894326476_4
gcaatagcaaactttgaaggtaaccagatatgtattaaacgtgaactataaactgttctgtcaaatatgataaatagctatatatattattttataaacctctggaaagcctctttataatcatyaggttatttyaatgcaccagcatctcacagatcttgaagaccgaggagatatcttactgttcataagctgaatgcaccttagatttcaccagggtatcttctgtgcctaacagaataacaggtactacatatgcactttagacagcaatttcattcagaagcctttatgctcttyctcttggtgttcctaagcactctgagggtgcaactgtgaaaagagacatgtacttcagtgcatcctttcatccactgtagctgatggatcaggaaatgcatcttagctgctagctcacatcctttaattggacagtgcccattacactttcaataaagcttgatttttaatgtaagtcattagcttttagcgcttctgaggatgtttcatgtcataaasaagaatgaaagtctgcacagtatctatgtacttattgaacagtacagttcttcagtactttacctaggaaatgtagaaaaa

SEQ ID NO: 63441 - DNA, 600 bp, Chicken  19866894326476_5
tatcttctgtgcctaacagaataacaggtactacatatgcactttagacagcaatttcattcagaagcctttatgctcttyctcttggtgttcctaagcactctgagggtgcaactgtgaaaagagacatgtacttcagtgcatcctttcatccactgtagctgatggatcaggaaatgcatcttagctgctagctcacatcctttaattggacagtgcccattacactttcaataaagcttgatttttaatgtaagtcattagcttttagcgcttctgaggatgtttcatgtcataaasaagaatgaaagtctgcacagtatctatgtacttattgaacagtacagttcttcagtactttacctaggaaatgtagaaaaataacagtggatttcaagcactgttattacgcagcattttcagctgctgagctgaaattgtcttctaccacactgagatccatggctgagcaagaaatcatgttaatcccctgatgcttctgaaagagcctttttggatagtactgtcttacctttaaatcattgagaaagctggaagggttcctaagcagtcagkgtcaaggtgtgagcagagcctgtg

SEQ ID NO: 63442 - DNA, 600 bp, Chicken  19866894326476_6
ctgaggatgtttcatgtcataaasaagaatgaaagtctgcacagtatctatgtacttattgaacagtacagttcttcagtactttacctaggaaatgtagaaaaataacagtggatttcaagcactgttattacgcagcattttcagctgctgagctgaaattgtcttctaccacactgagatccatggctgagcaagaaatcatgttaatcccctgatgcttctgaaagagcctttttggatagtactgtcttacctttaaatcattgagaaagctggaagggttcctaagcagtcagkgtcaaggtgtgagcagagcctgtgtacaggggttcactttgcactcagtcatgaaaattgagtgtcgagtktgggaagttccttgagttctattccacatccactctggatgttccatacgtgttccattctggtggtcttatctgctggatctgaagctagtaggggacctacctaatgaagtcagtttgatgctgttgggtaccgtgatatctaaattcttaacgcagcctctcagactcaaacagcaattgagaagaacatgatcagcacatcaaagtgaaaaaaaatcatgttgtt

SEQ ID NO: 63443 - DNA, 600 bp, Chicken  19866894326476_7
ttcttcagtactttacctaggaaatgtagaaaaataacagtggatttcaagcactgttattacgcagcattttcagctgctgagctgaaattgtcttctaccacactgagatccatggctgagcaagaaatcatgttaatcccctgatgcttctgaaagagcctttttggatagtactgtcttacctttaaatcattgagaaagctggaagggttcctaagcagtcagkgtcaaggtgtgagcagagcctgtgtacaggggttcactttgcactcagtcatgaaaattgagtgtcgagtktgggaagttccttgagttctattccacatccactctggatgttccatacgtgttccattctggtggtcttatctgctggatctgaagctagtaggggacctacctaatgaagtcagtttgatgctgttgggtaccgtgatatctaaattcttaacgcagcctctcagactcaaacagcaattgagaagaacatgatcagcacatcaaagtgaaaaaaaatcatgttgttgttccctcctggggataagaatgatctctcactttccatctcaccaccaaaaactgtgtcagccttaaata

SEQ ID NO: 63444 - DNA, 600 bp, Chicken  19866894326482_1
tcaagcaaaactacacgccctcagtgaggctatgttagatgtctccattaacctccctattttacacatgcattaatatgctttccaggaggatgtgctgcacgaccttacagggcacagaggtgaggctgaccagtctgtagtcccctttgtccttctccacacccttttaaaaatggctgttctggttctccttttccattcaatgggggcttcacctgactgccataacttttcaaaggtgatggacagtggcatagcaacttcatccagcagttcccttgggaccctgcgatgcayccctttggtcacacagacttytgcacattcgggttccttagactgtatcaaacctgatcttctcccacggtatgtgggacagttgctgctcactattactttatgtatttttttcttcaactgctgagctcctttgcagcagcayttaaaggacttctaggaatcttgttggtatttagaaagaaaagccagtgttaaaaaacaattctgcatgtatctaaggacacagaagaagctctatgatgttaaacagyacacaaggactaggcaaccaagcaattaaaggatgtattatgtgat

SEQ ID NO: 63445 - DNA, 600 bp, Chicken  19866894326482_2
cagtgaggctatgttagatgtctccattaacctccctattttacacatgcattaatatgctttccaggaggatgtgctgcacgaccttacagggcacagaggtgaggctgaccagtctgtagtcccctttgtccttctccacacccttttaaaaatggctgttctggttctccttttccattcaatgggggcttcacctgactgccataacttttcaaaggtgatggacagtggcatagcaacttcatccagcagttcccttgggaccctgcgatgcayccctttggtcacacagacttytgcacattcgggttccttagactgtatcaaacctgatcttctcccacggtatgtgggacagttgctgctcactattactttatgtatttttttcttcaactgctgagctcctttgcagcagcayttaaaggacttctaggaatcttgttggtatttagaaagaaaagccagtgttaaaaaacaattctgcatgtatctaaggacacagaagaagctctatgatgttaaacagyacacaaggactaggcaaccaagcaattaaaggatgtattatgtgatggaacactgacaagtcatgga

SEQ ID NO: 63446 - DNA, 600 bp, Chicken  19866894326482_3
ccctttgtccttctccacacccttttaaaaatggctgttctggttctccttttccattcaatgggggcttcacctgactgccataacttttcaaaggtgatggacagtggcatagcaacttcatccagcagttcccttgggaccctgcgatgcayccctttggtcacacagacttytgcacattcgggttccttagactgtatcaaacctgatcttctcccacggtatgtgggacagttgctgctcactattactttatgtatttttttcttcaactgctgagctcctttgcagcagcayttaaaggacttctaggaatcttgttggtatttagaaagaaaagccagtgttaaaaaacaattctgcatgtatctaaggacacagaagaagctctatgatgttaaacagyacacaaggactaggcaaccaagcaattaaaggatgtattatgtgatggaacactgacaagtcatggacgcgtgttcacttttcagctgcacagttgctgacttctgagagtttaaacatatcaaatgtaatactgtgttagcagtcatyattcttggattttcagttttcactgggagatccccttgtgct

SEQ ID NO: 63447 - DNA, 600 bp, Chicken  19866894326482_4
gcatagcaacttcatccagcagttcccttgggaccctgcgatgcayccctttggtcacacagacttytgcacattcgggttccttagactgtatcaaacctgatcttctcccacggtatgtgggacagttgctgctcactattactttatgtatttttttcttcaactgctgagctcctttgcagcagcayttaaaggacttctaggaatcttgttggtatttagaaagaaaagccagtgttaaaaaacaattctgcatgtatctaaggacacagaagaagctctatgatgttaaacagyacacaaggactaggcaaccaagcaattaaaggatgtattatgtgatggaacactgacaagtcatggacgcgtgttcacttttcagctgcacagttgctgacttctgagagtttaaacatatcaaatgtaatactgtgttagcagtcatyattcttggattttcagttttcactgggagatccccttgtgctccttcagacattccagtttaatggaagaccgaatgcactgatattgctagtgacaactgagagttaacacagatgctcccacaaatctgacacacagatactgctcaac

SEQ ID NO: 63448 - DNA, 600 bp, Chicken  19866894326482_5
tgtatttttttcttcaactgctgagctcctttgcagcagcayttaaaggacttctaggaatcttgttggtatttagaaagaaaagccagtgttaaaaaacaattctgcatgtatctaaggacacagaagaagctctatgatgttaaacagyacacaaggactaggcaaccaagcaattaaaggatgtattatgtgatggaacactgacaagtcatggacgcgtgttcacttttcagctgcacagttgctgacttctgagagtttaaacatatcaaatgtaatactgtgttagcagtcatyattcttggattttcagttttcactgggagatccccttgtgctccttcagacattccagtttaatggaagaccgaatgcactgatattgctagtgacaactgagagttaacacagatgctcccacaaatctgacacacagatactgctcaactcaggtgaaagaaaatacaagcactgaaaagctcctgatgtagctgcaagtgcccatggttctgaaatttcagatacacactaattgtacaaaacagtsaagcaagactttcccacctctgcagttaagtaacttgggactggccaggc

SEQ ID NO: 63449 - DNA, 600 bp, Chicken  19866894326482_6
acttctgagagtttaaacatatcaaatgtaatactgtgttagcagtcatyattcttggattttcagttttcactgggagatccccttgtgctccttcagacattccagtttaatggaagaccgaatgcactgatattgctagtgacaactgagagttaacacagatgctcccacaaatctgacacacagatactgctcaactcaggtgaaagaaaatacaagcactgaaaagctcctgatgtagctgcaagtgcccatggttctgaaatttcagatacacactaattgtacaaaacagtsaagcaagactttcccacctctgcagttaagtaacttgggactggccaggcttacagagaatttacataaaataaagtaaaaatcgcttctgactgagcataagacatttcatgcaaacgacacatttggaaagtgacctcagcaggggcatgggggtgatttycagcatcattttgatgtgtacctgacaacacaggggcatcaccactgcctacacaaagcaagatacccaactgagcaacctgtgctatgggcatccagaaattgtaactgacatcagcaccttgtatgttttacyac

SEQ ID NO: 63450 - DNA, 600 bp, Chicken  19866894326482_7
gatgctcccacaaatctgacacacagatactgctcaactcaggtgaaagaaaatacaagcactgaaaagctcctgatgtagctgcaagtgcccatggttctgaaatttcagatacacactaattgtacaaaacagtsaagcaagactttcccacctctgcagttaagtaacttgggactggccaggcttacagagaatttacataaaataaagtaaaaatcgcttctgactgagcataagacatttcatgcaaacgacacatttggaaagtgacctcagcaggggcatgggggtgatttycagcatcattttgatgtgtacctgacaacacaggggcatcaccactgcctacacaaagcaagatacccaactgagcaacctgtgctatgggcatccagaaattgtaactgacatcagcaccttgtatgttttacyacgtgtaatccacttttataaataaaagtgaccctctgagcctatacgaacatcctgaagtcctgaagtytgcctgaactgtttgcctcagactgtgactgtcctccactcacgcactgcagggatgaaccagaacacctcaggcagatgtgcacccctggggct

SEQ ID NO: 63451 - DNA, 600 bp, Chicken  19866894326482_8
tsaagcaagactttcccacctctgcagttaagtaacttgggactggccaggcttacagagaatttacataaaataaagtaaaaatcgcttctgactgagcataagacatttcatgcaaacgacacatttggaaagtgacctcagcaggggcatgggggtgatttycagcatcattttgatgtgtacctgacaacacaggggcatcaccactgcctacacaaagcaagatacccaactgagcaacctgtgctatgggcatccagaaattgtaactgacatcagcaccttgtatgttttacyacgtgtaatccacttttataaataaaagtgaccctctgagcctatacgaacatcctgaagtcctgaagtytgcctgaactgtttgcctcagactgtgactgtcctccactcacgcactgcagggatgaaccagaacacctcaggcagatgtgcacccctggggctggaatgagactttgtccgctgggagagccttgtgacctgcagctctgccagcacacagcactgccccaaagagccccatgcagtaaatactgtggttaccccagtgctcccagcacagcagctgatcacaatttc

SEQ ID NO: 63452 - DNA, 600 bp, Chicken  19866894326482_9
aaataaagtaaaaatcgcttctgactgagcataagacatttcatgcaaacgacacatttggaaagtgacctcagcaggggcatgggggtgatttycagcatcattttgatgtgtacctgacaacacaggggcatcaccactgcctacacaaagcaagatacccaactgagcaacctgtgctatgggcatccagaaattgtaactgacatcagcaccttgtatgttttacyacgtgtaatccacttttataaataaaagtgaccctctgagcctatacgaacatcctgaagtcctgaagtytgcctgaactgtttgcctcagactgtgactgtcctccactcacgcactgcagggatgaaccagaacacctcaggcagatgtgcacccctggggctggaatgagactttgtccgctgggagagccttgtgacctgcagctctgccagcacacagcactgccccaaagagccccatgcagtaaatactgtggttaccccagtgctcccagcacagcagctgatcacaatttcactgctggaacataaagctgcagagttcagccagttgccaagcttaccctatgcacaggccacccaacag

SEQ ID NO: 63453 - DNA, 599 bp, Chicken  19866894326489_1
  misc_feature (1)..(206): n is any nucleotide
nnnnnnnnnnnnnnnnnnnnnnnnnnnnnnnnnnnnnnnnnnnnnnnnnnnnnnnnnnnnnnnnnnnnnnnnnnnnnnnnnnnnnnnnnnnnnnnnnnnnnnnnnnnnnnnnnnnnnnnnnnnnnnnnnnnnnnnnnnnnnnnnnnnnnnnnnnnnnnnnnnnnnnnnnnnnnnnnnnnnnnnnnnnnnnnnnnnnnnnnnnnnnnatgctccaaacagcgacctgtttggttttttttcatcttttttactccatatttttaggctgtacaggggcacgttcccagcataactcaaaaytgcytctaaaacaaatctactttaatattctgctatcatgggcccgtagatgttgcccaggaaacacacatgtggtttatggtttggattaggatttttcatggaatcatagagccacagaacattcctaattggaaggaacccacaagggctgtttttggctcctggcttcacacagcaccacccaaaatccttcactctctgcttgcccacagcttcaccccacatcctttgtcccatacccttcatcctttcatccttyaccctgcaccattcatcccattcctgccaccatgtcc

SEQ ID NO: 63454 - DNA, 599 bp, Chicken  19866894326489_2
  misc_feature (1)..(202): n is any nucleotide
nnnnnnnnnnnnnnnnnnnnnnnnnnnnnnnnnnnnnnnnnnnnnnnnnnnnnnnnnnnnnnnnnnnnnnnnnnnnnnnnnnnnnnnnnnnnnnnnnnnnnnnnnnnnnnnnnnnnnnnnnnnnnnnnnnnnnnnnnnnnnnnnnnnnnnnnnnnnnnnnnnnnnnnnnnnnnnnnnnnnnnnnnnnnnnnnnnnnnnnnnnatgctccaaacagcgacctgtttggttttttttcatcttttttactccatatttttaggctgtacaggggcacgttcccagcataactcaaaaytgcytctaaaacaaatctactttaatattctgctatcatgggcccgtagatgttgcccaggaaacacacatgtggtttatggtttggattaggatttttcatggaatcatagagccacagaacattcctaattggaaggaacccacaagggctgtttttggctcctggcttcacacagcaccacccaaaatccttcactctctgcttgcccacagcttcaccccacatcctttgtcccatacccttcatcctttcatccttyaccctgcaccattcatcccattcctgccaccatgtcctgca

SEQ ID NO: 63455 - DNA, 600 bp, Chicken  19866894326489_3
aggctgtacaggggcacgttcccagcataactcaaaaytgcytctaaaacaaatctactttaatattctgctatcatgggcccgtagatgttgcccaggaaacacacatgtggtttatggtttggattaggatttttcatggaatcatagagccacagaacattcctaattggaaggaacccacaagggctgtttttggctcctggcttcacacagcaccacccaaaatccttcactctctgcttgcccacagcttcaccccacatcctttgtcccatacccttcatcctttcatccttyaccctgcaccattcatcccattcctgccaccatgtcctgcacagcaagatgacaaggttttgaggtagytgttagggccctggggtagccctgatgatgcctggctgcactaacaaagcaacaacccccaggagctgtgggctggggctgtctgagcacagctgtgccttgttgggggcccagggcaggtcctgacccaaagcctcttaaaccctgctaggagtctttaggggcattgctgggagttattggaagtgcctgggggctttctgcctgcagcaggaggctgctcagctcaca

SEQ ID NO: 63456 - DNA, 600 bp, Chicken  19866894326489_4
gctatcatgggcccgtagatgttgcccaggaaacacacatgtggtttatggtttggattaggatttttcatggaatcatagagccacagaacattcctaattggaaggaacccacaagggctgtttttggctcctggcttcacacagcaccacccaaaatccttcactctctgcttgcccacagcttcaccccacatcctttgtcccatacccttcatcctttcatccttyaccctgcaccattcatcccattcctgccaccatgtcctgcacagcaagatgacaaggttttgaggtagytgttagggccctggggtagccctgatgatgcctggctgcactaacaaagcaacaacccccaggagctgtgggctggggctgtctgagcacagctgtgccttgttgggggcccagggcaggtcctgacccaaagcctcttaaaccctgctaggagtctttaggggcattgctgggagttattggaagtgcctgggggctttctgcctgcagcaggaggctgctcagctcacaccctgatttttgggggccaccgcagtgatggtgctgggcttctaatctgatttttttggttgctggttt

SEQ ID NO: 63457 - DNA, 599 bp, Chicken  19866894326491_1
  misc_feature (1)..(70): n is any nucleotide
nnnnnnnnnnnnnnnnnnnnnnnnnnnnnnnnnnnnnnnnnnnnnnnnnnnnnnnnnnnnnnnnnnnnnntaagtgccccagtttaattcccactgatacaaagggtagattgaaaacaggtcctgagtacaaaaattaccctccaactttaaagctagactgaattcaggtgcttccattccccatgctctcatctgcccctgtgccaacatcctgtgtgcagattcgggtcatcttcagtgcattacagcagagctgcaccctccaaaatctttcatgggttttttccaacaagcccrtcaaagagctcagctaaagtattcctttcctgagcttcccattcaccatcactctgtccaagcaagcttttcagctcaacacaattcctgtttcaaagttatagaggccaagcctagctaatctttctttataattcattccccaaatccctgaataactttggttgccctacactgctcctgctgcattctcaaatgtgcggcacgcttcccataataaggtaactaaaactgcacacaatagcctacgtgttttatttcacattccccactgattaatgctgaatgcttccatacag

SEQ ID NO: 63458 - DNA, 600 bp, Chicken  19866894326491_2
tccccaaatccctgaataactttggttgccctacactgctcctgctgcattctcaaatgtgcggcacgcttcccataataaggtaactaaaactgcacacaatagcctacgtgttttatttcacattccccactgattaatgctgaatgcttccatacagcatatccacacgccttacacttaatgcttcaatatatatatagtgcaataacctcgctacttttactttacagctgccaatttgtgcagatggccgtggtgtattagtcaccaccagctctcccctcctcctccttccarcagccttgttctcggtcagcatttcacatggtatttcctttcaaggtatctatggctatttttggcccaagagttcctggtacataaaacgcaacgagccacatcctcagctggtgcaaatccgcactgccctcattcagtcggtggagctgtgccaattcacgagtggaaagcatcccataaatcagttatcagacccatacgttaaggcagcctattcctaccacttctacattgttttaattcatttacagatgacccacaacgcataaaggatgatggacccacaccacagagccc

SEQ ID NO: 63459 - DNA, 600 bp, Chicken  19866894326497_1
agaaaaaaagctaaggagtgaagctgagcatgtttatatggtgtaaaatgtttgagcatgttggtgtgctgtaaaattaaagtcctgcaggttgattcctatactgtgttcttggttctgcttaagttttctttatcactgttggcagtacaattacatcaaactgttaatatagcacgtatgtgtctgtaagatgcttttattcctagaaaagcaaaaagcagaaatagggtaagatgcagtctgattgattgattgattttcagacaaagcactttagaaaaggggtgtgtgtgtgcrcataaagacttgaaggaagattttattgaatgcacttgcataatgagtattctttttcaggtttcagtcaggatagagatgtgtttattcatccttgctttatgaggttgtaagagatatatttaacagtggaatacacaaatgatgcttctcaaggataatggcacagtggtaaatgcacatcacttctattttcctccctaatgtgacaggaggtataactgtgaatgaaattttagaatgagttgcacttaagattactgtatcttaacatctatgccccaaatgtttattcggtcc

SEQ ID NO: 63460 - DNA, 600 bp, Chicken  19866894326497_2
aactttgttttgattagaaaaagagcaaatagcatcttacaaaaagtaaatgacagtgttatatactcaataggattgaataggaatcagtgatagacatacacaatagatacacatgaaacttgaaaggaaagctgagagatgtgcaagcaaaaacaaagaaatattcttccttgtcatttccttcattttgcacatcataaatgtgttttggctgtgaagtactgaatgtgttttaaaaatactttgcatatatttatcatttgtgaagcagaataaatggttatctggtactgggcwtgtgtgttatcagaagctatggaaacttacttcaataactgtatatataaaggaagtgaactacatttgtgtaagtagggttgcagcttcaactcttccaacatgctgaagtctggaatggtggtatataactatatataataactaactatatataaagaactgctttttttcttcgtatgtcgtaattagtcatgattgtagaaagaagtagcatcttactcttgtagccatgaatgtaatgcagtaatacttctgtattttatatgacataggagaaaattaagtaaaagtgaagtg

SEQ ID NO: 63461 - DNA, 600 bp, Chicken  19866894326505_1
atttgctcacataagatcagaaaacttcaatcaagaaaaaaacccgtaggatcagacatggagctgaagattcagaatagaaacagctgttctctgtgaggaacataataatgatgcatgagtttttaaaagtgaaaagagaactttatgaaagggcctcaaagcagataaaaagggaatggcaaaaggaatggcaaaggtgggtgtacaaaaggcttcctgaattcttagatcacatttgaaaatgctgccactcacacaaatgctgcattcactttctgtgggatatttgagcaaccwacttacacgaagacatggaaaagtcagatcataaacataaaacttctatttttcagataggaaagggcctcagaagagcagactcgctttggtgctactgcatggctccctcccactggcatggggcaacttctccttccctgccttctccacttctgaagggcagcagccataaggaccctcagggcatgtgcagatttatcaagcatctctggcatttgtacactggtgacctggctcagttccctgccctgggacctgtctctcattgccaggttcatccccagctctatgtggata

SEQ ID NO: 63462 - DNA, 600 bp, Chicken  19866894326508_1
ttgcccaatcctggaaactggggccagcgttttcttctcgaccctccctgctcagagccctctgagccactccaagagcctgctcatgataaacacctccctgctctttgtggagacatcagcattaaggaaaacgctgccattaacatgcaaatgtacctgtgattaacgcaaatagaaacactgcctcataaataatatggggggattggaacagtatcagctaccagtagccaggttactgagaccattcatggacaggcactaccaaaaccgtgccataactcagctcacgtttcyatctgcctgctctgcctccaccaaatccaccacgtgaagaacagcctgcrggtttgggctcttggacagcccagctcacagcttactgcccctggctgggcacaaacagcacctttttatccacctttccttccaccctggaggcagaaggagctgctcagctcctggtctcaagctgcaaggggctgcaagcaaagctgatggcctttgccagcagtgttggcctctcagatgggtgcttctccccattctggagaaggacaaagcagaagatgctcgtgagctgtcagttggatcttg

SEQ ID NO: 63463 - DNA, 600 bp, Chicken  19866894326508_2
ctcagagccctctgagccactccaagagcctgctcatgataaacacctccctgctctttgtggagacatcagcattaaggaaaacgctgccattaacatgcaaatgtacctgtgattaacgcaaatagaaacactgcctcataaataatatggggggattggaacagtatcagctaccagtagccaggttactgagaccattcatggacaggcactaccaaaaccgtgccataactcagctcacgtttcyatctgcctgctctgcctccaccaaatccaccacgtgaagaacagcctgcrggtttgggctcttggacagcccagctcacagcttactgcccctggctgggcacaaacagcacctttttatccacctttccttccaccctggaggcagaaggagctgctcagctcctggtctcaagctgcaaggggctgcaagcaaagctgatggcctttgccagcagtgttggcctctcagatgggtgcttctccccattctggagaaggacaaagcagaagatgctcgtgagctgtcagttggatcttgctgcagacctgggaacatggggagagaaaatatttcaacctcccaaggaa

SEQ ID NO: 63464 - DNA, 600 bp, Chicken  19866894326508_3
ctgctcagctcctggtctcaagctgcaaggggctgcaagcaaagctgatggcctttgccagcagtgttggcctctcagatgggtgcttctccccattctggagaaggacaaagcagaagatgctcgtgagctgtcagttggatcttgctgcagacctgggaacatggggagagaaaatatttcaacctcccaaggaagatgatgctttctgtacggtgcagggattggtgcataggatctgccgaagccttccatggccctggggatgcaaagcctgaccgggtcccaccgccaacccartgctcctgctgataacacagggagcagagcagcccctgcaccaacacagccagagccagtgggatgggaggggaacactggggccggggatgcctagattatgtgtctgatttcttcactcccttatctaagtggctgatctctggaatctggctccagaaacacaaccacagaccacgtggcctatattcaataagccaactgcaaatgaaatgtgccatcagctcatgccttgggcccattctcttccctccagccttggaagctcactgctcactgtcagatggtcacaggtttggg

SEQ ID NO: 63465 - DNA, 600 bp, Chicken  19866894326510_1
actgggatataggagcctccttctgaagcacaaagtcagtggggtagtgtagactgcaaaaaaaaaaaaaaaaaaggtagaaaagaagatatttacccccaaaggagtcaatgttttgctcagcagcaaacacgctaagacagcaggttgcagaatgggatataaggcagccagaagacttaattcatgcatgatattgtatggccttcctccacacgtgttctgtatagccctaaaacagcgactatagtacacagcagagtttgaaatttctgatgataatgcagtggagtacagatragacagaggtatgtgtttccaaatgagccaggacgtacagttcagccagcaaacacccgcagtgggcaagtgagtgagatgaaggcagccattgcctcctggagacctgaaggaatctctcttaggagcacaaagccagagcatgaccagccagaagagtgaagcaatagggttgagcagggaaatgagacatctacagaacatgttcctccttcggggaagtgttgcagtccttccatgacagtaatgatggtcatcaactatttccaaacaaaagctataattggaattggaaatatc

SEQ ID NO: 63466 - DNA, 600 bp, Chicken  19866894326514_1
aaagaaataccaaattggagaaactgagaggctatgcagtgcttttgtagaaaaggatttgtggcttatgaacacgtcggctgatcatgaactgaatataactcaactttgctatacagctgcaaagaaggtgagcaccacattggaagttatgaagaagagcactgtgtaaacaaggaaatcagttatcctccacttgatgttacttaccatctgagctggggtaaaacattcaattttgacagttgcaattcagaactgatataaactccagactagagaaatgaggcaaaccacaarctggaggtcctcaagctaaaagaatgcattaataaggactgcatctcaagaaaaagaaacaggaagatagggcacagccttcatgtttgaaggctactgcaatgtaaacatagtcacctccatgctctaggtatgtgtagaactcaataaaaagtaatagggttagagttttaaagattcagattagacagaggagaaaactttctaatagtaaaactagtgaagcactagacttttatttggaaaggctgtgagttctccaccactggatagccaaaaaatcttttaggcaatcaagaa

SEQ ID NO: 63467 - DNA, 600 bp, Chicken  19866894326514_2
agattcagattagacagaggagaaaactttctaatagtaaaactagtgaagcactagacttttatttggaaaggctgtgagttctccaccactggatagccaaaaaatcttttaggcaatcaagaaaaatagacactgttgattcttccttggtgtagagaagatggaattgtacttcatacgcatatttactgttccaagatatcaaagatgataaagaagttaaacactaaattagtaacaatgttccagtttacaaagctaaagggtggtatatcaagttgtcacctattacatcakaattaaaaaggaaactaaaagctctcttgcatgcatatctcttctgaccaattatcaatctgctttgttaaaggaaggtgtgtaagtcaatccttgcactgccttcaagacctctagcctcttcatgcccttacaaccaaatcactgctcagcctaattactgatgacagtgaatgattcatatctgaatcatttaaacagaacaactttcagaaacaccacaatttcataagataaaggcttagcttttcctccacagtattaaaactttagactgtacttgattcctaagcatctcaa

SEQ ID NO: 63468 - DNA, 551 bp, Chicken  19866894326516_1
tgctgttttagctccacgtcgtgcaggcagtgctgccatcacccccacccttctgcctacagcctcagacccagcaactctgaagctaaccaggaatgtgatagctgttgggctgggagtgtaactaaagagttttaaagacaaaaaacgcagccaccagcttggaggcaagtttgggccatgatgtccatctctctcacagaaagggtggtgaggtgctggaacagctgcccagagaggctgtggatgccccatcccttgaggtgttcaggaccaggttggatggagccatgggcaatygggtctagtaccagatatggaggttagcagccctgccagtggcacggagggttggagcttgatgatccttgggrtcccttccaacccaagccattctatgattctaggattcctttattacactgtcagtggaagtgcacagtgtgcctccatctygggtgaaagaagagatgtgagggcatttttgtcttctcccccgctccctaatttcgttgaagtggtaagtgtatatctgctattcaaaaaaatgg

SEQ ID NO: 63469 - DNA, 477 bp, Chicken  19866894326516_2
caactctgaagctaaccaggaatgtgatagctgttgggctgggagtgtaactaaagagttttaaagacaaaaaacgcagccaccagcttggaggcaagtttgggccatgatgtccatctctctcacagaaagggtggtgaggtgctggaacagctgcccagagaggctgtggatgccccatcccttgaggtgttcaggaccaggttggatggagccatgggcaatygggtctagtaccagatatggaggttagcagccctgccagtggcacggagggttggagcttgatgatccttgggrtcccttccaacccaagccattctatgattctaggattcctttattacactgtcagtggaagtgcacagtgtgcctccatctygggtgaaagaagagatgtgagggcatttttgtcttctcccccgctccctaatttcgttgaagtggtaagtgtatatctgctattcaaaaaaatgg

SEQ ID NO: 63470 - DNA, 395 bp, Chicken  19866894326516_3
ccagcttggaggcaagtttgggccatgatgtccatctctctcacagaaagggtggtgaggtgctggaacagctgcccagagaggctgtggatgccccatcccttgaggtgttcaggaccaggttggatggagccatgggcaatygggtctagtaccagatatggaggttagcagccctgccagtggcacggagggttggagcttgatgatccttgggrtcccttccaacccaagccattctatgattctaggattcctttattacactgtcagtggaagtgcacagtgtgcctccatctygggtgaaagaagagatgtgagggcatttttgtcttctcccccgctccctaatttcgttgaagtggtaagtgtatatctgctattcaaaaaaatgg

SEQ ID NO: 63471 - DNA, 600 bp, Chicken  19866894326520_1
ctcgccgtggggccatctgtgccgtgcagctgagagccgcagcggccgtgccgtgccgtgccgtgccgtgccgtgccgtgccctcccggggctgcagccacttctgcggtgctttccccatcgcggctgccctgggatgggttgggatgggctgaaacggggtaggttgggatgggctggggcttggctgcggccttggaaccatcgtgagcagtgggctatcgccgtgtcacggccccactgcccccggcccatgctcccctccgcgccgtgccctgtgcctccctgcgctcccgattrccgtcttgttttgagcctctacagcggctgtaatttgatgctctcaaagttggtgtttacaggggacgaggcagccatcagagggctcttcttgttctcccggtgaaagaatattcctccctccgagcgtgtgccctcaccgcgtgccaagcactgctgggttacacccggcaccttccagacgcgctcacggggtcaacgcctccggatctgcagagcagagcctgacagcaccgcacggctccgggcggaggccgggaaccacggggtgctcggcacggtgggtggcactgagcccca

SEQ ID NO: 63472 - DNA, 521 bp, Chicken  19866894326520_2
agagggctcttcttgttctcccggtgaaagaatattcctccctccgagcgtgtgccctcaccgcgtgccaagcactgctgggttacacccggcaccttccagacgcgctcacggggtcaacgcctccggatctgcagagcagagcctgacagcaccgcacggctccgggcggaggccgggaaccacggggtgctcggcacggtgggtggcactgagccccacagcacccggccacgtgctctgagccgcccaccgggcagggggagcgcagggcagccctgcgggactcatcagctcccygctgacaaatcccttcacccgcaatagggcagagcgcgacgcagctccgtgcggggccccccagcatggctgcagccckgcattgctaccccttcaccggggctccacggggctgggcagctgccccccaccacagcccccagacccctcagtgactcatccacaggcctggggggggaccctcctgctctgcccgcgactgaagaggaggcggggatcgg

SEQ ID NO: 63473 - DNA, 442 bp, Chicken  19866894326520_3
gggttacacccggcaccttccagacgcgctcacggggtcaacgcctccggatctgcagagcagagcctgacagcaccgcacggctccgggcggaggccgggaaccacggggtgctcggcacggtgggtggcactgagccccacagcacccggccacgtgctctgagccgcccaccgggcagggggagcgcagggcagccctgcgggactcatcagctcccygctgacaaatcccttcacccgcaatagggcagagcgcgacgcagctccgtgcggggccccccagcatggctgcagccckgcattgctaccccttcaccggggctccacggggctgggcagctgccccccaccacagcccccagacccctcagtgactcatccacaggcctggggggggaccctcctgctctgcccgcgactgaagaggaggcggggatcgg

SEQ ID NO: 63474 - DNA, 600 bp, Chicken  19866894326521_1
cacagaaaaaatagcaatagcatagcataacatctgttgctgactttgttttcttctgtcaagaggtaatgaaaatgtaaacaatataaaagtgaaattgataattagatatgtacttcaaacttctgacccaatccattgtcagtctgattgtttatacagttttgtttctggcctatatactgcttttgagtcaggaaactacttttggtttatctgtacttattaaatctatcccacttagtatgtttcaaattgatttagtgtttaaaattatattcttaccttattttcaacatrtatgaaaacatcatgttcaaatttgctgaggtccatcacaagttagaaatgaggttaaaatcagattaaatgcgctgtggtctttaaaattggataacaatatgacatycaatttctcttcttcatataatagaatgaattgttaatatttggtattctaaaaaaaaaaagttcatttagaaatgcctttaaaatgatttcctatttttayttasgacaagttttaaaacaagtttttcttcctatttaaagtgttctgacctgtttttgctgtttgggtacttggagtttgcaggattg

SEQ ID NO: 63475 - DNA, 600 bp, Chicken  19866894326521_2
tatgtacttcaaacttctgacccaatccattgtcagtctgattgtttatacagttttgtttctggcctatatactgcttttgagtcaggaaactacttttggtttatctgtacttattaaatctatcccacttagtatgtttcaaattgatttagtgtttaaaattatattcttaccttattttcaacatrtatgaaaacatcatgttcaaatttgctgaggtccatcacaagttagaaatgaggttaaaatcagattaaatgcgctgtggtctttaaaattggataacaatatgacatycaatttctcttcttcatataatagaatgaattgttaatatttggtattctaaaaaaaaaaagttcatttagaaatgcctttaaaatgatttcctatttttayttasgacaagttttaaaacaagtttttcttcctatttaaagtgttctgacctgtttttgctgtttgggtacttggagtttgcaggattgtcttttttgtgtgttgtgccaaattgccatgctgtgtatcacaacactgggtattactattagagacactgggcgtgacatcgcatgctttaactgtaatgttgatgtg

SEQ ID NO: 63476 - DNA, 600 bp, Chicken  19866894326521_3
tttatctgtacttattaaatctatcccacttagtatgtttcaaattgatttagtgtttaaaattatattcttaccttattttcaacatrtatgaaaacatcatgttcaaatttgctgaggtccatcacaagttagaaatgaggttaaaatcagattaaatgcgctgtggtctttaaaattggataacaatatgacatycaatttctcttcttcatataatagaatgaattgttaatatttggtattctaaaaaaaaaaagttcatttagaaatgcctttaaaatgatttcctatttttayttasgacaagttttaaaacaagtttttcttcctatttaaagtgttctgacctgtttttgctgtttgggtacttggagtttgcaggattgtcttttttgtgtgttgtgccaaattgccatgctgtgtatcacaacactgggtattactattagagacactgggcgtgacatcgcatgctttaactgtaatgttgatgtgcaaaaatggttttgtaaggctggcagtgagagccagcatgagttgcactgggagtatcccattatgtgaactttacataagggccacagctactttagtgga

SEQ ID NO: 63477 - DNA, 600 bp, Chicken  19866894326521_4
tctgtacttattaaatctatcccacttagtatgtttcaaattgatttagtgtttaaaattatattcttaccttattttcaacatrtatgaaaacatcatgttcaaatttgctgaggtccatcacaagttagaaatgaggttaaaatcagattaaatgcgctgtggtctttaaaattggataacaatatgacatycaatttctcttcttcatataatagaatgaattgttaatatttggtattctaaaaaaaaaaagttcatttagaaatgcctttaaaatgatttcctatttttayttasgacaagttttaaaacaagtttttcttcctatttaaagtgttctgacctgtttttgctgtttgggtacttggagtttgcaggattgtcttttttgtgtgttgtgccaaattgccatgctgtgtatcacaacactgggtattactattagagacactgggcgtgacatcgcatgctttaactgtaatgttgatgtgcaaaaatggttttgtaaggctggcagtgagagccagcatgagttgcactgggagtatcccattatgtgaactttacataagggccacagctactttagtggagatg

SEQ ID NO: 63478 - DNA, 599 bp, Chicken  19866894326522_1
  misc_feature (1)..(170): n is any nucleotide
nnnnnnnnnnnnnnnnnnnnnnnnnnnnnnnnnnnnnnnnnnnnnnnnnnnnnnnnnnnnnnnnnnnnnnnnnnnnnnnnnnnnnnnnnnnnnnnnnnnnnnnnnnnnnnnnnnnnnnnnnnnnnnnnnnnnnnnnnnnnnnnnnnnnnnnnnnnnnnnnnnnnnnnnnncttactcatttttcaatacagcctatgtattgccctcacttccaattaaaattttctcccagcaactgacgtagcatggtgttgctgataggatttgtaataactcatttcttttgatctgtgttctaaratgtgcctggagtggttatattacctaagtgctctgtcattacagtttacattttaggatgcaaaactatgaggctttcagcatggtttagttggtttaataccttgaaatagtttgtaagtggcctcttattgtccatttakttggaagcttaatgcgcaaatgaactacatgatgtcataaaaactgcacagtcagggtgcccttcttgtcttcctccaccctatttttcttcagagcactcccttctacatgcatatttgtaggcactgcatttgtcagttgtaccaaagaatagc

SEQ ID NO: 63479 - DNA, 599 bp, Chicken  19866894326522_2
  misc_feature (1)..(27): n is any nucleotide
nnnnnnnnnnnnnnnnnnnnnnnnnnncttactcatttttcaatacagcctatgtattgccctcacttccaattaaaattttctcccagcaactgacgtagcatggtgttgctgataggatttgtaataactcatttcttttgatctgtgttctaaratgtgcctggagtggttatattacctaagtgctctgtcattacagtttacattttaggatgcaaaactatgaggctttcagcatggtttagttggtttaataccttgaaatagtttgtaagtggcctcttattgtccatttakttggaagcttaatgcgcaaatgaactacatgatgtcataaaaactgcacagtcagggtgcccttcttgtcttcctccaccctatttttcttcagagcactcccttctacatgcatatttgtaggcactgcatttgtcagttgtaccaaagaatagcatttatttgttgyccttaaatccttagtcagagtgctcaggtttgacctttactggtcattcttctagctgtgtgttcctgaacaaaatactaaagtgtgttcaacttcatgcacttaactgttaggtgttttggctacataa

SEQ ID NO: 63480 - DNA, 600 bp, Chicken  19866894326522_3
tggttatattacctaagtgctctgtcattacagtttacattttaggatgcaaaactatgaggctttcagcatggtttagttggtttaataccttgaaatagtttgtaagtggcctcttattgtccatttakttggaagcttaatgcgcaaatgaactacatgatgtcataaaaactgcacagtcagggtgcccttcttgtcttcctccaccctatttttcttcagagcactcccttctacatgcatatttgtaggcactgcatttgtcagttgtaccaaagaatagcatttatttgttgyccttaaatccttagtcagagtgctcaggtttgacctttactggtcattcttctagctgtgtgttcctgaacaaaatactaaagtgtgttcaacttcatgcacttaactgttaggtgttttggctacataagcacgtagaaaagagcttcactgagtagggattgatctgtgcacacacttaaaattaagcacattgtggaatcaaattatctgctacattgtaagaggatttttatggaatgtaaaggcaatttatgagatattaaatatgacagataaggcttgtgttacatgtggtga

SEQ ID NO: 63481 - DNA, 600 bp, Chicken  19866894326525_1
tcctctgtttcagtttacatgagggcatctttccctttacccttttttttttctgtacagaggtgaagtaggatttcccaagcgcacaggctttgtacaggcacacagagcaatgatggtctggggtttgcagctctttcccacattagtcacaggctgctctgtcagcccaaggacaggtttggtcaggatatgaccattaagaaatcagaagccttcaaatctattaatctgtcagtaatttccctcagtaagttctgacttaagttcagctggaagatttataaggttttcaccctrctgatgttgcatctctgacaaaataaaagtggcatatttcatgttcagcttaatcagaaaaaaagccaatgacctctatgtgcctgtaaagggcaaaagctggttggttgttacttgtaacagtgaaatctctctggtgggcacatcactcatctttgttagcattgctctgtgtacgaccagagcaggtcaacaccaggtcctcaggtgtcttctctctctgctatgctgttcccagtctcactgtgacgctcataacttccctcctctgctttactgtacctgcagtgttggctattt

SEQ ID NO: 63482 - DNA, 600 bp, Chicken  19866894326527_1
cagatgcgaagatcacactgccaattctgggtagactctgggcagtttcatgcggagagatggaacgctttttattccagagctttggtttttggcagcctacatcctcttgatgtggaaataaagaaaaaaaaaattaaaaaggagtcctcttgcaaaatagacaaaaatatagtgaaaaaatgtccgaggatggggaaagtacctcttaccgctgtgttttcccagcaacttatctgatgcttttcttgcgactctgaaaacacccattaatgtctgacttctttttctgatctttcytggtcccgattgcttgcaggctacgctttcatctgctgagcacagcagcttctgtgtccgtacggccagcccagagtgccaccagcccccaaatgatgggtgtgagttctgtctcctgctcccaggagacacatggtctacagaagcatatgtatgtgtggttcagccagtaccyaggagcgacaaagaagtctcggagaacaggacacctccctttctccctttcagcagcctccctgccctgctccccctcctctatcctccctcaaagcttcctgtgccacacatcatgagcagtgt

SEQ ID NO: 63483 - DNA, 600 bp, Chicken  19866894326527_2
tgaaaaaatgtccgaggatggggaaagtacctcttaccgctgtgttttcccagcaacttatctgatgcttttcttgcgactctgaaaacacccattaatgtctgacttctttttctgatctttcytggtcccgattgcttgcaggctacgctttcatctgctgagcacagcagcttctgtgtccgtacggccagcccagagtgccaccagcccccaaatgatgggtgtgagttctgtctcctgctcccaggagacacatggtctacagaagcatatgtatgtgtggttcagccagtaccyaggagcgacaaagaagtctcggagaacaggacacctccctttctccctttcagcagcctccctgccctgctccccctcctctatcctccctcaaagcttcctgtgccacacatcatgagcagtgtgtggcacatgcgtagggagacacatgaagccaggcacggactgtgggtgcctgtagcgtgcggtgatgggtgctctctccacccactgccccaaacgcagtgtgaagccactgcctctgagcattggaacatgccacctgtcagtgctcacagacgtgctttcagggtctttgcc

SEQ ID NO: 63484 - DNA, 600 bp, Chicken  19866894326533_1
cttagctggtagaaatttggcatagcttccttgactgcattaaggtaaagtcaatattcatcagctgtatatctggccctagaagctgatgtatcatttagtacattagcgtaggtcagaaactatcacatgtgtacataatcgcatgtgcagaacagtcgacaaagagaaaatgtgttctaaagaacactgaatgcttgcttaaaaagccacgagaccattcctggctgtttttacagagcgtaagacaaattgctgatctgctaaccacctgtgaaggcaacactagttcccttcagytggaaaggcatccacttggtctttgtctttacggccaaagatttcaaggacacagcttgcttcttaattcttttgatcctattggctagctgtcaacaaaagtgacaatcctgtacttgtaacgtcataaacttccaagtgcgatgttgtaaactgaggaccatgactttgacttaagggcaggagcagatggcttgggcacttatgatcttgtttttcaggaagtgagaccttgccatagtaaaactaaaaagttacttcgttggaaaagacrgcaagaaatcattttgctgaagtgcc

SEQ ID NO: 63485 - DNA, 600 bp, Chicken  19866894326533_2
tgaaggcaacactagttcccttcagytggaaaggcatccacttggtctttgtctttacggccaaagatttcaaggacacagcttgcttcttaattcttttgatcctattggctagctgtcaacaaaagtgacaatcctgtacttgtaacgtcataaacttccaagtgcgatgttgtaaactgaggaccatgactttgacttaagggcaggagcagatggcttgggcacttatgatcttgtttttcaggaagtgagaccttgccatagtaaaactaaaaagttacttcgttggaaaagacrgcaagaaatcattttgctgaagtgcccctgctgtttctccaagtcttcctgaaaaacataattgatttctaagctctgtgcaagactgcatatttattgcactgaatgaaatatggatcgcatgaatcccgttggtgtgactttcaacccactcgaatattatgagtttgacagtttgactctaactcagtttatttcccacttgagagactgcaaaggaacagatggggatgtgcgaatgaagagggggggggatgagcatgcagcagcttgagccgctgggcccgtgtcagcaaacct

SEQ ID NO: 63486 - DNA, 600 bp, Chicken  19866894326533_3
agcaaggctcagttactgcaatcccctcctagaaggagttcgccgtaactcagcttgttcacgaggctcgcttgccgatttgacagcttgagtgatgttgctcccacctcgctttccttgatttttgccagcatttgcatcacgggccgcacgctgttcatctctccctgctgtcatagcatgtcccaagcagccatctcgaaagaaatgcaggcagtgtggaaatgctccatgaaaatatcccttcctgaaactcccaacagagacattaagtcctctgcaagtcccagtgcctctccraggataagagggaaggatggtggggtctgtgggtttgttttcatgttacaaaagcagtaagagcacacaggctgcagaaagtggatacacaccaccacatctcttagatcaggagcactgctgttattcagtactacatccaaacgaaatggcttttaagtatttgcttcctccaacgagtgatgcctttctaggatgtatcatccacttaccaagcagaacaaaaggtacagtatgcacatattcataggtaacattactgaggaaggaacaactagtccctccatgagaggcttatct

SEQ ID NO: 63487 - DNA, 600 bp, Chicken  19866894326543_1
ttccactttggatctgataacacagcccgaacgcagcctttcatacaccttctttcctcaaggcacaggtggcatggagcatgcatttccttgtcagcaggctatgactttcttcatagcgttgggtatgatgctatgttttggctttaggagaaaagcagcactgataacacacccatgttttagctgttgctgagcagtactgcacagagccaaggacgtttcagtatttcagcttcttgtactgtcccaccagcgaggagctgggggggtcaccagggagggaaatagatgaacaasgggaaagcaagcttttatgaaatgaaatggctgaaatcttctcgcatatctcacagctcacccatggttaggagtcagatactgaacagagcaaatcacacaggcacaggacttgctgttcttaagaaatattaaaatctgggtgttctcttctgcactgtaggttcctcctgccgtactgattgtcagggagaatcagagtcatcccagcatgaaggaacagtctcatgacttgaaaaatcttgaatctgacattttaacatccttcagcccctttcatttatgtcaggaaacctctat

SEQ ID NO: 63488 - DNA, 599 bp, Chicken  19866894326545_1
  misc_feature (1)..(117): n is any nucleotide
nnnnnnnnnnnnnnnnnnnnnnnnnnnnnnnnnnnnnnnnnnnnnnnnnnnnnnnnnnnnnnnnnnnnnnnnnnnnnnnnnnnnnnnnnnnnnnnnnnnnnnnnnnnnnnnnnnnnngctgtcacatgctgtgtttagtccagcgcgattcattgcgagctgcaacgtgccttgcgccgcagcgctttcaccttggttgtatgcatttgaggcactctttgttggtgcacatccctttcccctccctctaatttggaagtgcaaatgtggacgagcagtcaacaagaggcagttctggcygtcctgctgggctctgaaatgtacaggcatgtttgaaacaacatggaaagagctggtgtagggggagcggatgagtcacttttaaagcaaagcagcaaactggaaaaagaaaagaaaaagatctgtgtcttgactcagtgcccaaaaccttcagctgatgcttcactgcagactctgaagttcagctcatttttcctctcatttgttcttatttttatgccttacataatggagctttgattcatagaaatctatttatacagtctaggatttgggccaaactctgggagtcctaactc

SEQ ID NO: 63489 - DNA, 600 bp, Chicken  19866894326545_2
ttatttttatgccttacataatggagctttgattcatagaaatctatttatacagtctaggatttgggccaaactctgggagtcctaactctgtccttactcaggcaagatggccattgtggttactggtatgaatgaggtttgcttatttgttcaggggtggattcctgggggcaaagccggataaccctgcaattccttgtattcttgccagggaattgatttagtgtgaggaaatctggtcagcactgcagccacaggggaaagcacaccttttgctctgggtgggtgggtttgacrgggcacagtgtgccaggtctgtctaaggagctcgctgacctttatctgacaggctggcagagaggggacagctgccagtgagagagctccccgctgacatcagagctattcctggggctagctgcaaaacagcacgagagcgtgcgctgctgcagtgctgaggctggtttcaaatcctccccatgaaaagaacagctcaagccctgctaaatgagttagaggggcagacctgaggcagaccccaggggctgggagcttttcacccagataaaaatgtgcaccccaaaagaagctccttct

SEQ ID NO: 63490 - DNA, 588 bp, Chicken  19866894326548_1
gaagcactgctgcaagcccagcatgagtgattgctgcagcaatccaggacgtgtcatcagcttgctggaaagcatgctcaccccgttagcagggggctgtgtttgcagcaattcacacgttgctctgcagataaatctagcaggtgctgctggagttagacaggaatatgatgtgctctgcccttaggagagacaggtgcagagagagagagcgcatccggtggtgtttgcagcacctcagcaaggaggttgttctgcctccattgggttgctccttattagggcctggggagctcccargtgaggtggggggaagtatttggacatgtagggccagtgggagctctgctccttggttcctctcctcccttataggatcacagaatggttggtgttggaagggaaccttaaaggccatctggtccaactccctgcagtgaacacccacagctctgtcaagtggcagggcagttggatggacttcccacttcatgaagctggggagaagccagtctgggttagaggagaagcaggctttgggttaaaggagctctggtgccttccaacccatacatgtctaaaagggtg

SEQ ID NO: 63491 - DNA, 599 bp, Chicken  19866894326551_1
  misc_feature (1)..(168): n is any nucleotide
nnnnnnnnnnnnnnnnnnnnnnnnnnnnnnnnnnnnnnnnnnnnnnnnnnnnnnnnnnnnnnnnnnnnnnnnnnnnnnnnnnnnnnnnnnnnnnnnnnnnnnnnnnnnnnnnnnnnnnnnnnnnnnnnnnnnnnnnnnnnnnnnnnnnnnnnnnnnnnnnnnnnnnnnatatttagcctttttagttcctttcttcatcatataccattatttaatttttttttttttgtatttttttaatggaagcaatatttccctgtaccttatgctccactatctttcttcttctctatctatcgwtttaaaataataaacacagcttgtctcatagttggaattaggtgtttgaaaatatctatgaaggcttattttatctcgtgctcatttgtagtgacttatttcagttgcaatttcctaaattttctatgtgttatgttagtatggacttgttattttgaaaatcttttgtacaatacataatgactgcaggcacacaaaatgaacttccaaaagacctttcattgcacttcaaaaaactaattcaacctgttgttattgacgatgcatcgtgtgagtgtgcacaaaccatcaggcagtgt

SEQ ID NO: 63492 - DNA, 600 bp, Chicken  19866894326562_1
tttttttcagccttgctgatttctcctaggatgttgtatttgctgtcctctttgttgggaaaaagagcaatgtgcattcaaaagtacatatttttttttactggaactggacttttaatcagtcagaattctgtgttaaagacatgagcagttaattaatctaatctgatgtattcatatactattactctgtcattagcatgtcattatccttcctgcgctgtgctattagtcacaacagcatttctatttttcaaagactccatttgtaaatgttttttcaaaagaaaatctgcttayragagagaacgcacacawaacagattcaattattgtctaaaaggtattttgattggtgagttgaagtatcgcttttatggattaatcgcaagtacttattaactagtttttaagccatagacaagtttgagttgcctttctacagcatgggattaatctgaatgtttcatctgtattggtctatgggtatcaacacgtaggaacaatacatcctgtggttttcccttacaagggtactggaaatgaacacgttgcaaacttacaygtyacaaagaattgtgtttatttgaatttggatat

SEQ ID NO: 63493 - DNA, 600 bp, Chicken  19866894326562_10
gaactgcagattttagcgtttggtctgcagccagcttgcaaaagtttgtcacccactgttgtgattttgtatgcagccactcttgtacttctctctcygtcagaaagagtgatgtcataacatcagtatgtatacattaaaataaaaatttgtttaaagyaaagctgcaaaataaagctaaaacttgaagagtcaaccaggcaaataatgcttttttcctttagaaaccaataaacraacaaatatgcttgaagcctcaattattggcaagatgtgtattyagcagagaaatctgacagraaaagagaagacatcttcaaggcgaagtgtttaaaagataaatttcagtttcttcatctgatgtttaatagcaaatacataaatattggtcatgctcagttattctttccagccaaactaagctgatayggctttgttgctgtggaagtacagctagagtgacttttcagggtcaactctccagggagcagctttctactgatttcaaacttctctagttatgaacatactaaaactattattttatgtatgttaaagccatgcacattaaagccttgttgtgttaaagcacaaggtcac

SEQ ID NO: 63494 - DNA, 600 bp, Chicken  19866894326562_11
gtatacattaaaataaaaatttgtttaaagyaaagctgcaaaataaagctaaaacttgaagagtcaaccaggcaaataatgcttttttcctttagaaaccaataaacraacaaatatgcttgaagcctcaattattggcaagatgtgtattyagcagagaaatctgacagraaaagagaagacatcttcaaggcgaagtgtttaaaagataaatttcagtttcttcatctgatgtttaatagcaaatacataaatattggtcatgctcagttattctttccagccaaactaagctgatayggctttgttgctgtggaagtacagctagagtgacttttcagggtcaactctccagggagcagctttctactgatttcaaacttctctagttatgaacatactaaaactattattttatgtatgttaaagccatgcacattaaagccttgttgtgttaaagcacaaggtcacctgtgcaggtgacagcagcacctgttagttgtgtgtgagctgctgcatccaggtgtgccaagggagcaggcagtgctggcgaaatgcaatgctagtcagagaaggctccaagccattttatgaaagtgg

SEQ ID NO: 63495 - DNA, 600 bp, Chicken  19866894326562_2
ttttttcagccttgctgatttctcctaggatgttgtatttgctgtcctctttgttgggaaaaagagcaatgtgcattcaaaagtacatatttttttttactggaactggacttttaatcagtcagaattctgtgttaaagacatgagcagttaattaatctaatctgatgtattcatatactattactctgtcattagcatgtcattatccttcctgcgctgtgctattagtcacaacagcatttctatttttcaaagactccatttgtaaatgttttttcaaaagaaaatctgcttayragagagaacgcacacawaacagattcaattattgtctaaaaggtattttgattggtgagttgaagtatcgcttttatggattaatcgcaagtacttattaactagtttttaagccatagacaagtttgagttgcctttctacagcatgggattaatctgaatgtttcatctgtattggtctatgggtatcaacacgtaggaacaatacatcctgtggttttcccttacaagggtactggaaatgaacacgttgcaaacttacaygtyacaaagaattgtgtttatttgaatttggatatg

SEQ ID NO: 63496 - DNA, 600 bp, Chicken  19866894326562_3
atttctcctaggatgttgtatttgctgtcctctttgttgggaaaaagagcaatgtgcattcaaaagtacatatttttttttactggaactggacttttaatcagtcagaattctgtgttaaagacatgagcagttaattaatctaatctgatgtattcatatactattactctgtcattagcatgtcattatccttcctgcgctgtgctattagtcacaacagcatttctatttttcaaagactccatttgtaaatgttttttcaaaagaaaatctgcttayragagagaacgcacacawaacagattcaattattgtctaaaaggtattttgattggtgagttgaagtatcgcttttatggattaatcgcaagtacttattaactagtttttaagccatagacaagtttgagttgcctttctacagcatgggattaatctgaatgtttcatctgtattggtctatgggtatcaacacgtaggaacaatacatcctgtggttttcccttacaagggtactggaaatgaacacgttgcaaacttacaygtyacaaagaattgtgtttatttgaatttggatatgatccttgggctaagaga

SEQ ID NO: 63497 - DNA, 600 bp, Chicken  19866894326562_4
tttgtaaatgttttttcaaaagaaaatctgcttayragagagaacgcacacawaacagattcaattattgtctaaaaggtattttgattggtgagttgaagtatcgcttttatggattaatcgcaagtacttattaactagtttttaagccatagacaagtttgagttgcctttctacagcatgggattaatctgaatgtttcatctgtattggtctatgggtatcaacacgtaggaacaatacatcctgtggttttcccttacaagggtactggaaatgaacacgttgcaaacttacaygtyacaaagaattgtgtttatttgaatttggatatgatccttgggctaagagaactgcagattttagcgtttggtctgcagccagcttgcaaaagtttgtcacccactgttgtgattttgtatgcagccactcttgtacttctctctcygtcagaaagagtgatgtcataacatcagtatgtatacattaaaataaaaatttgtttaaagyaaagctgcaaaataaagctaaaacttgaagagtcaaccaggcaaataatgcttttttcctttagaaaccaataaacraacaaatatgct

SEQ ID NO: 63498 - DNA, 600 bp, Chicken  19866894326562_5
gtaaatgttttttcaaaagaaaatctgcttayragagagaacgcacacawaacagattcaattattgtctaaaaggtattttgattggtgagttgaagtatcgcttttatggattaatcgcaagtacttattaactagtttttaagccatagacaagtttgagttgcctttctacagcatgggattaatctgaatgtttcatctgtattggtctatgggtatcaacacgtaggaacaatacatcctgtggttttcccttacaagggtactggaaatgaacacgttgcaaacttacaygtyacaaagaattgtgtttatttgaatttggatatgatccttgggctaagagaactgcagattttagcgtttggtctgcagccagcttgcaaaagtttgtcacccactgttgtgattttgtatgcagccactcttgtacttctctctcygtcagaaagagtgatgtcataacatcagtatgtatacattaaaataaaaatttgtttaaagyaaagctgcaaaataaagctaaaacttgaagagtcaaccaggcaaataatgcttttttcctttagaaaccaataaacraacaaatatgcttga

SEQ ID NO: 63499 - DNA, 600 bp, Chicken  19866894326562_6
ccatagacaagtttgagttgcctttctacagcatgggattaatctgaatgtttcatctgtattggtctatgggtatcaacacgtaggaacaatacatcctgtggttttcccttacaagggtactggaaatgaacacgttgcaaacttacaygtyacaaagaattgtgtttatttgaatttggatatgatccttgggctaagagaactgcagattttagcgtttggtctgcagccagcttgcaaaagtttgtcacccactgttgtgattttgtatgcagccactcttgtacttctctctcygtcagaaagagtgatgtcataacatcagtatgtatacattaaaataaaaatttgtttaaagyaaagctgcaaaataaagctaaaacttgaagagtcaaccaggcaaataatgcttttttcctttagaaaccaataaacraacaaatatgcttgaagcctcaattattggcaagatgtgtattyagcagagaaatctgacagraaaagagaagacatcttcaaggcgaagtgtttaaaagataaatttcagtttcttcatctgatgtttaatagcaaatacataaatattggtcatgctca

SEQ ID NO: 63500 - DNA, 600 bp, Chicken  19866894326562_7
tggtctatgggtatcaacacgtaggaacaatacatcctgtggttttcccttacaagggtactggaaatgaacacgttgcaaacttacaygtyacaaagaattgtgtttatttgaatttggatatgatccttgggctaagagaactgcagattttagcgtttggtctgcagccagcttgcaaaagtttgtcacccactgttgtgattttgtatgcagccactcttgtacttctctctcygtcagaaagagtgatgtcataacatcagtatgtatacattaaaataaaaatttgtttaaagyaaagctgcaaaataaagctaaaacttgaagagtcaaccaggcaaataatgcttttttcctttagaaaccaataaacraacaaatatgcttgaagcctcaattattggcaagatgtgtattyagcagagaaatctgacagraaaagagaagacatcttcaaggcgaagtgtttaaaagataaatttcagtttcttcatctgatgtttaatagcaaatacataaatattggtcatgctcagttattctttccagccaaactaagctgatayggctttgttgctgtggaagtacagctagagt

SEQ ID NO: 63501 - DNA, 600 bp, Chicken  19866894326562_8
gcaaacttacaygtyacaaagaattgtgtttatttgaatttggatatgatccttgggctaagagaactgcagattttagcgtttggtctgcagccagcttgcaaaagtttgtcacccactgttgtgattttgtatgcagccactcttgtacttctctctcygtcagaaagagtgatgtcataacatcagtatgtatacattaaaataaaaatttgtttaaagyaaagctgcaaaataaagctaaaacttgaagagtcaaccaggcaaataatgcttttttcctttagaaaccaataaacraacaaatatgcttgaagcctcaattattggcaagatgtgtattyagcagagaaatctgacagraaaagagaagacatcttcaaggcgaagtgtttaaaagataaatttcagtttcttcatctgatgtttaatagcaaatacataaatattggtcatgctcagttattctttccagccaaactaagctgatayggctttgttgctgtggaagtacagctagagtgacttttcagggtcaactctccagggagcagctttctactgatttcaaacttctctagttatgaacatactaaaact

SEQ ID NO: 63502 - DNA, 600 bp, Chicken  19866894326562_9
tatgatccttgggctaagagaactgcagattttagcgtttggtctgcagccagcttgcaaaagtttgtcacccactgttgtgattttgtatgcagccactcttgtacttctctctcygtcagaaagagtgatgtcataacatcagtatgtatacattaaaataaaaatttgtttaaagyaaagctgcaaaataaagctaaaacttgaagagtcaaccaggcaaataatgcttttttcctttagaaaccaataaacraacaaatatgcttgaagcctcaattattggcaagatgtgtattyagcagagaaatctgacagraaaagagaagacatcttcaaggcgaagtgtttaaaagataaatttcagtttcttcatctgatgtttaatagcaaatacataaatattggtcatgctcagttattctttccagccaaactaagctgatayggctttgttgctgtggaagtacagctagagtgacttttcagggtcaactctccagggagcagctttctactgatttcaaacttctctagttatgaacatactaaaactattattttatgtatgttaaagccatgcacattaaagccttgttg

SEQ ID NO: 63503 - DNA, 600 bp, Chicken  19866894326564_1
gcccacaggggctgttttttgctgatggaatggagtatgcctcgcgccgaacataaaaagctaaaattaggactcaattcaatattgtaaaaaagaaattggttaaaagttatagatcaataactgttaacgtgactctatttttcaggcaggtcatgtttactgctgctggtgatggctccttcccacctgctgacggcactctgctgtccctttggagcagtctgtcgtggctcagccatcctgagcaaccctgtgagctcgctgcaaactctggagttggtcatgaatgtttgctgygctgtgaaaggccgtgcatggctgcacccagctccagggctcttctccaccttcctgcgtgacacctggcatcgagcggtgagtgatgctggcagcrtccctctgagatggaccgtgcctcacacctcagtgccccagatccccagtgctcagtgcccaagagcaactcttcttgatgcccttgatcgccgccctctgctcctccgtgcccwctatctctgcttcttgcttacctacatctcagctccttgattaccaacacctctgctcctccatgccctgcatctctgattctcctca

SEQ ID NO: 63504 - DNA, 600 bp, Chicken  19866894326564_2
attggttaaaagttatagatcaataactgttaacgtgactctatttttcaggcaggtcatgtttactgctgctggtgatggctccttcccacctgctgacggcactctgctgtccctttggagcagtctgtcgtggctcagccatcctgagcaaccctgtgagctcgctgcaaactctggagttggtcatgaatgtttgctgygctgtgaaaggccgtgcatggctgcacccagctccagggctcttctccaccttcctgcgtgacacctggcatcgagcggtgagtgatgctggcagcrtccctctgagatggaccgtgcctcacacctcagtgccccagatccccagtgctcagtgcccaagagcaactcttcttgatgcccttgatcgccgccctctgctcctccgtgcccwctatctctgcttcttgcttacctacatctcagctccttgattaccaacacctctgctcctccatgccctgcatctctgattctcctcatcctggctctctgttccttgatgatctagatctctgctctttgatgccctagatttacacttatcagtgccctagatctctgcctgctgcaaagact

SEQ ID NO: 63505 - DNA, 569 bp, Chicken  19866894326564_3
ctttggagcagtctgtcgtggctcagccatcctgagcaaccctgtgagctcgctgcaaactctggagttggtcatgaatgtttgctgygctgtgaaaggccgtgcatggctgcacccagctccagggctcttctccaccttcctgcgtgacacctggcatcgagcggtgagtgatgctggcagcrtccctctgagatggaccgtgcctcacacctcagtgccccagatccccagtgctcagtgcccaagagcaactcttcttgatgcccttgatcgccgccctctgctcctccgtgcccwctatctctgcttcttgcttacctacatctcagctccttgattaccaacacctctgctcctccatgccctgcatctctgattctcctcatcctggctctctgttccttgatgatctagatctctgctctttgatgccctagatttacacttatcagtgccctagatctctgcctgctgcaaagactgctcctctcccagcagacgattcttgcactacttccaccaatgtgagagtaactggatgctttcacccctggctcttggtcttg

SEQ ID NO: 63506 - DNA, 600 bp, Chicken  19866894326565_1
gatatctgtacctttctgttgcccattgccaaagcaacagtggatgtgaaagtgtaagttgcttttatactcagtattataattactcactgaaatcagcattgtactgctacaatattagcttttgaatttcttaatcagtgccagctaataagtaagtaaataaagataaaacaaaatgaaacaaaaagcaacaaaccaaccaaaaaaaaaaaaaaccaaaaaaaaaaccaaccctctaaaactacatttagcaaccttaaagaaatcagcatggttgtctttaaaaagagagaaccrttacaacaatttattctcatgccaaaatcatccagatagtcactcctttagtggatatattatttgcttgctccttaatcaaaatacgtgattctcagtaaagatgcacattgtaaatagcttcccttgataacagaatcacgttgggtccgggatttcagacatcctgcctttacatcctacggaaacagaagcttctggcatccagcagatgatgaagcattgcatgcaatagctgcacagatttcttctcattctttttttttctgccagttaactgttttcagtttgcttttgtgg

SEQ ID NO: 63507 - DNA, 600 bp, Chicken  19866894326576_1
gggagctgggctggcagggaggtggcagctggcctgggagcagaacctcaggctgtcatcccatagagcagtctgggagctgtgggacgtcaggtgtgactttggcagagacagagctggtggtgagagcagggctctgcttctgtgctctcatcctgcccatccccaaacttgccactaaaatacaacagcctctttttcccgtgctttgctgggatggttttgtctctgatctggagcaagcggcatccctttttcctgactcagtttccccaggtgggttgcagagatgatgctcarcactgcaggggataaggaaactgaactgccctgctgggtaccatgggaggatccacccaccctgcaatggaaagggagctgcagtggaaccttcagctccatgactccttgggggttctgtgttatatgggcccaggtttggccctgacatggcctcgagaaggatgcagacacaggtktgtgtctctgggggtgatcagccagggggtctgatgctgctgagtagtgctcagccttgtgtggagcacaaataaaggcaaaagacgtctgccagtagctcagtgcccttgtgtctggtgg

SEQ ID NO: 63508 - DNA, 600 bp, Chicken  19866894326576_2
aaaatacaacagcctctttttcccgtgctttgctgggatggttttgtctctgatctggagcaagcggcatccctttttcctgactcagtttccccaggtgggttgcagagatgatgctcarcactgcaggggataaggaaactgaactgccctgctgggtaccatgggaggatccacccaccctgcaatggaaagggagctgcagtggaaccttcagctccatgactccttgggggttctgtgttatatgggcccaggtttggccctgacatggcctcgagaaggatgcagacacaggtktgtgtctctgggggtgatcagccagggggtctgatgctgctgagtagtgctcagccttgtgtggagcacaaataaaggcaaaagacgtctgccagtagctcagtgcccttgtgtctggtggtgatttcccatgttgggctgtctcctcttgcagcacccggtgggtagcctggaagagaggttcaagctgcatgtgtagcctggtgatgctgcttgatgtctgcaggacagccctgttgtcctcagcacccagttaacatctgctgctggctaacagggctcctgcttcccttgcagagg

SEQ ID NO: 63509 - DNA, 600 bp, Chicken  19866894326584_1
attttggaagcctaaactagggcagatgaaactcagccattgggtctctatacagtgaataatatttgcaatacaattaggccattcttctctttgtctttcattccagaacagacatttttattattttattcattttcttatcttactttaaaattacttcatgtagagagtcagttgcttgtgctgtgttctcactgtcggtctggcttgatggaattgccatgaaggcagcccatagctccaggagcagcgtgaggctgagcagtgcagctctggtgccataggaaggtgcagtaycagcctggcatgcacttcacctgccctcaggaagaaagcggcagaattgtattccctttaaaaattacaaattcttcaggctttgattgattctgtaagttcttataaaactggcaaataagtcaccttctaatactgcctgcgatgtctgagggcacttggacatttgaaggcaaaagggtcagtattttgctccctgttttggggctattatgtcattttagcccattaactttcacgactttgtttctgttgtttaaaaatgttttgggtgagtgttttgacctcataaacaggggc

SEQ ID NO: 63510 - DNA, 600 bp, Chicken  19866894326584_2
ggcaaataagtcaccttctaatactgcctgcgatgtctgagggcacttggacatttgaaggcaaaagggtcagtattttgctccctgttttggggctattatgtcattttagcccattaactttcacgactttgtttctgttgtttaaaaatgttttgggtgagtgttttgacctcataaacaggggcctgcattactccctgtggcttcagaggtgggtggaggagaactgttttctgtgattattatgaaagtttattacttgagtacaattcacatctggctaatgcacatttcacyccatagctaccacttccagagcatcctttaaatgtgtcagggttcctcttccctaagcagtgtgctcaggggtttctttccatgccttctgtttcccagttgctgttcaggccagttctcaaaacacagagaggtacccagtgcactctgctgaacatacagatctccgactctgggtcgtgttgcctaagaacagtcaatgaaattagtcaagaaagtggaaactgcatctttccattttggttatttttttcaccaaacacagtcaaggatgtctgcatgtgcctaaaattcaggctt

SEQ ID NO: 63511 - DNA, 599 bp, Chicken  19866894326589_1
  misc_feature (1)..(48): n is any nucleotide
nnnnnnnnnnnnnnnnnnnnnnnnnnnnnnnnnnnnnnnnnnnnnnnnagagatggattgggaagaaagcagaaagaagacacttctggatgaataaatatacctcagagtgctcactagaattcacatggcttccagacttaaagatttcttacgttctttgagtacaatgttccttaagcacacttcaaggcctcacaggtgccactgtcctacagcagcacagtgcagcactgagatactcctcataacctcatcctgatcagctttccaactctgcatcccagcaatgtcaacctytgtcgcaccactctgtttgccaagttttaggtagtttctaacacagtttatggtgggttcctttgttgataaatatatctgtatttgaatatttatgaatacatcatacttacggaacatgtcattcctgaaatgaaactatacttcactgtactaactggaaagaacaaagtaggactcctttttggaaaaattcaccccagctatttattaccatggatctgtgatgaaatgtcagtgggaacagtgctttacagacttttccaacaaaagtagccaacaatatgcwttttgtctct

SEQ ID NO: 63512 - DNA, 503 bp, Chicken  19866894326589_2
atgtcaacctytgtcgcaccactctgtttgccaagttttaggtagtttctaacacagtttatggtgggttcctttgttgataaatatatctgtatttgaatatttatgaatacatcatacttacggaacatgtcattcctgaaatgaaactatacttcactgtactaactggaaagaacaaagtaggactcctttttggaaaaattcaccccagctatttattaccatggatctgtgatgaaatgtcagtgggaacagtgctttacagacttttccaacaaaagtagccaacaatatgcwttttgtctcttatctgaaatacacacataggagggtaaaaaccacatttaaatctatcaagtaagagtacatctttgtatgagtcttctaatagcttaagtgtaaatacctttggctcttaagagttaattttttaattaacactaacagtatggggttgatccaagacaccgggatttttggatatgtattttttaattagt

SEQ ID NO: 63513 - DNA, 600 bp, Chicken  19866894326591_1
gttacatccacacaggtcttgagtatctccagagaaggagaccttcccacctctctgctgcctgttccggtgttccgtccccctcatagtaaagaagttttttctcattttcagatggaacttcctacattctggtgtgttcccatttccccttgttctgtcactgggtaccactgaaaagagcctggccccattcactagacccctgctcattagacagttataagcattgataagatccccttcttctccagatacctgctttggtctcgtatcattggcaacaggagtccactcacrctacattttaagtccattagagacaggacaaaactattctgctgccaacaggtttacatccataccttaacagtcaaaactgtaagcaatttagccattcaagcactgcctgccctacaaaacaaagcaaatgaagagggctgattaaaagaactggcatgttatacgtaagcctgcctgctacaagtgtaactaataacattcctttatttctcagaaaattggaagcatttgatatatgatttcactgtttctctcagccatggagagggcaaatcccagaatatcaagtcaagtcaa

SEQ ID NO: 63514 - DNA, 600 bp, Chicken  19866894326603_1
aagcgacggaatgagagccgaagatggcggataaaggattatcggggaaaaccatatggagatgggctcctttgaaagccgcccacgagcggtgcttctgtggaccgcggggaaagggccgcgctggtgggcagggaaaatgagcgcactgacaccggggcctaaagagagacccttagggaggggtccgaggcacacagaaaactgcattatgtccgcgacaagcaaatccctggaaaatcccctccacaagcaacaggggagaactcagcagcagcaacaagtagtcctgtctgcaayacgacttgcagaagtaccaaatcatgaccaaatcatagactgatagaatcgttaagcttggaaaaggccastaagatcgtctagtccaatcatcaacaaatggcatagatgggcttgtagctgtttgtcattgcaaaagaagaactgttatagccattcataactacattttctcatgcagatgctgtcaccttaaacagtgacgctatgctgaccaatgcttctgcgcacactcgctaccatacacatgggttgcagcttcctgctccagccagatgcgatggattgcaccacaacacc

SEQ ID NO: 63515 - DNA, 600 bp, Chicken  19866894326603_2
ttgaaagccgcccacgagcggtgcttctgtggaccgcggggaaagggccgcgctggtgggcagggaaaatgagcgcactgacaccggggcctaaagagagacccttagggaggggtccgaggcacacagaaaactgcattatgtccgcgacaagcaaatccctggaaaatcccctccacaagcaacaggggagaactcagcagcagcaacaagtagtcctgtctgcaayacgacttgcagaagtaccaaatcatgaccaaatcatagactgatagaatcgttaagcttggaaaaggccastaagatcgtctagtccaatcatcaacaaatggcatagatgggcttgtagctgtttgtcattgcaaaagaagaactgttatagccattcataactacattttctcatgcagatgctgtcaccttaaacagtgacgctatgctgaccaatgcttctgcgcacactcgctaccatacacatgggttgcagcttcctgctccagccagatgcgatggattgcaccacaacacctataaaacccttcctccagtcagctctggttgaagtctatcaattgagtcaatgccaccgggagccttggg

SEQ ID NO: 63516 - DNA, 600 bp, Chicken  19866894326606_1
gccgcgttattagctgccttccctggggcaccggggcgttgctggagtccagggacatcacaagggcacctttgcctaacgaggccgacggcggcgtggggacgctcggggtgcctgcgctggggtcggtggtgtagcagggtgagagccaccgggcaaagccagaaggtgaccagagcaggggaaaaaatcagggcccagctgacgtcctcgctccagtccctcattttccctgtgctgtcatgcagggcttgcagaccccgtgccacacagccatgcccttcacctggaccggatgcyggccaagggcagcagcwggggacagccaagtgacacgggaacayggcacaagcagtgctacagcagcaaacacgcgtggggggatggcgccttgggagctgccccacgtcccacaggccaggaggaacaacccacagctactccagggatgatgggtgggccacggtgcctcgtccccttgttctccacagtagggttcctgaccccgctcggcagtggcctgcagcrttttggagagcactgggaagtgctggcgtgccgctgccctttagcctcacaccgcattgcccacatccccac

SEQ ID NO: 63517 - DNA, 600 bp, Chicken  19866894326606_2
cttccctggggcaccggggcgttgctggagtccagggacatcacaagggcacctttgcctaacgaggccgacggcggcgtggggacgctcggggtgcctgcgctggggtcggtggtgtagcagggtgagagccaccgggcaaagccagaaggtgaccagagcaggggaaaaaatcagggcccagctgacgtcctcgctccagtccctcattttccctgtgctgtcatgcagggcttgcagaccccgtgccacacagccatgcccttcacctggaccggatgcyggccaagggcagcagcwggggacagccaagtgacacgggaacayggcacaagcagtgctacagcagcaaacacgcgtggggggatggcgccttgggagctgccccacgtcccacaggccaggaggaacaacccacagctactccagggatgatgggtgggccacggtgcctcgtccccttgttctccacagtagggttcctgaccccgctcggcagtggcctgcagcrttttggagagcactgggaagtgctggcgtgccgctgccctttagcctcacaccgcattgcccacatccccacgaagccacggtgacttc

SEQ ID NO: 63518 - DNA, 600 bp, Chicken  19866894326606_3
gagtccagggacatcacaagggcacctttgcctaacgaggccgacggcggcgtggggacgctcggggtgcctgcgctggggtcggtggtgtagcagggtgagagccaccgggcaaagccagaaggtgaccagagcaggggaaaaaatcagggcccagctgacgtcctcgctccagtccctcattttccctgtgctgtcatgcagggcttgcagaccccgtgccacacagccatgcccttcacctggaccggatgcyggccaagggcagcagcwggggacagccaagtgacacgggaacayggcacaagcagtgctacagcagcaaacacgcgtggggggatggcgccttgggagctgccccacgtcccacaggccaggaggaacaacccacagctactccagggatgatgggtgggccacggtgcctcgtccccttgttctccacagtagggttcctgaccccgctcggcagtggcctgcagcrttttggagagcactgggaagtgctggcgtgccgctgccctttagcctcacaccgcattgcccacatccccacgaagccacggtgacttcctgctgtgtgacacttccctgagcaat

SEQ ID NO: 63519 - DNA, 600 bp, Chicken  19866894326606_4
ttccctgtgctgtcatgcagggcttgcagaccccgtgccacacagccatgcccttcacctggaccggatgcyggccaagggcagcagcwggggacagccaagtgacacgggaacayggcacaagcagtgctacagcagcaaacacgcgtggggggatggcgccttgggagctgccccacgtcccacaggccaggaggaacaacccacagctactccagggatgatgggtgggccacggtgcctcgtccccttgttctccacagtagggttcctgaccccgctcggcagtggcctgcagcrttttggagagcactgggaagtgctggcgtgccgctgccctttagcctcacaccgcattgcccacatccccacgaagccacggtgacttcctgctgtgtgacacttccctgagcaatgtcacctcgttcccagggatccggagtttcccattccagccccacgcccagcagcagccctgaaaccaggatcggctccggccgagctgatggagcaggagcgtgcgggatcccagcccgtggcagaggcctttgtcccagcagcagcatcccctgcagcaggagccatctcctgccccgtccc

SEQ ID NO: 63520 - DNA, 599 bp, Chicken  19866894326608_1
  misc_feature (1)..(116): n is any nucleotide
nnnnnnnnnnnnnnnnnnnnnnnnnnnnnnnnnnnnnnnnnnnnnnnnnnnnnnnnnnnnnnnnnnnnnnnnnnnnnnnnnnnnnnnnnnnnnnnnnnnnnnnnnnnnnnnnnnnngctctcttgctctaatgatgtaacaaagcctgtaagaacttcaaattttctttgcacattccttaggctaccgagcaatttatccttcaggaggtacaacattaaatgctgccacgctgttccctattatcttctgacaacaagcactggggtcccacgtgcataagccaagcaaaaaccgtgygctctgaagtgaagcgatagatttatgtttcacctggttctgtgatttacaagttactgagattgacagaatttgagcttgttttcttcctctcatacacagcagacaggagagcttaagctcataccaatctacgcaatttttctgattggaatgaataaatccgatgttttcttattgaatcagcacaggtaaaagggtctcattttcctccctgtaagcgtatgagatttgcaaggaaaggaaacatgcagatttcaaagtaaatcttcagacagaaacactgataattacctaag

SEQ ID NO: 63521 - DNA, 600 bp, Chicken  19866894326608_2
atttatgtttcacctggttctgtgatttacaagttactgagattgacagaatttgagcttgttttcttcctctcatacacagcagacaggagagcttaagctcataccaatctacgcaatttttctgattggaatgaataaatccgatgttttcttattgaatcagcacaggtaaaagggtctcattttcctccctgtaagcgtatgagatttgcaaggaaaggaaacatgcagatttcaaagtaaatcttcagacagaaacactgataattacctaagaaaggcaacctagaaaagtamgttgttccatccagctgcatttccacactccaaagagatggcaaattctctaggatttacaatctgacagcaatcagaatgtttgggatatttcagctctgggactggtttgacaaaaaataycaagtctgcacagttgtgataagcacaggggccctcccaggccttatcacctggtcacacaaagttcacccttcgttcccagcctgataattccataattctatcccttgtctcatgatgtatgattttatatagacgcaagcacccagaaccagaccttacttacagctgcttata

SEQ ID NO: 63522 - DNA, 600 bp, Chicken  19866894326608_3
tctgattggaatgaataaatccgatgttttcttattgaatcagcacaggtaaaagggtctcattttcctccctgtaagcgtatgagatttgcaaggaaaggaaacatgcagatttcaaagtaaatcttcagacagaaacactgataattacctaagaaaggcaacctagaaaagtamgttgttccatccagctgcatttccacactccaaagagatggcaaattctctaggatttacaatctgacagcaatcagaatgtttgggatatttcagctctgggactggtttgacaaaaaataycaagtctgcacagttgtgataagcacaggggccctcccaggccttatcacctggtcacacaaagttcacccttcgttcccagcctgataattccataattctatcccttgtctcatgatgtatgattttatatagacgcaagcacccagaaccagaccttacttacagctgcttataagccttgctgtttgtaagagatgcccagaaaacctgaacaaaagtaacccacctgcagtgcagacttgctgcacctgtaggctggtcacctccaggactttggctccactttgctcagctctc

SEQ ID NO: 63523 - DNA, 600 bp, Chicken  19866894326609_1
ttttgctagagcataagataactagactgtttgcttttcaaagaaactacactttcgttcatattctattgaacaattaagtaccatgctaagtctgagagcaataaaacccagtagatacaactgaatactctatgaacagttggcaacaaatagctttacgaaggaggtggagaggcctatgaccgtcaggcacaagaataacttcaatcacattctttaatcctacctctttcagtaagaaagtgtggataatgaaacatgattgttcacaaggtccctactcaggacctttaagcrtcctttaaacagaaacttaagaaatatttactattttttcttctattcttgcactattatcttttaatgaaaatataacagccagccattcacatctgttgcaatgccatatcttccccaaataaatgagttcatttgttctcaagcacatgacaatgtaatagagtgagtaggtggtttgtataattgcttcatttctcatagcattgaaataagtcagttacttgyggactgagaaacactgacatcagactgaatgacaacagaaagatacatggatgggaaagcaagtatctgaaa

SEQ ID NO: 63524 - DNA, 600 bp, Chicken  19866894326609_2
cctctttcagtaagaaagtgtggataatgaaacatgattgttcacaaggtccctactcaggacctttaagcrtcctttaaacagaaacttaagaaatatttactattttttcttctattcttgcactattatcttttaatgaaaatataacagccagccattcacatctgttgcaatgccatatcttccccaaataaatgagttcatttgttctcaagcacatgacaatgtaatagagtgagtaggtggtttgtataattgcttcatttctcatagcattgaaataagtcagttacttgyggactgagaaacactgacatcagactgaatgacaacagaaagatacatggatgggaaagcaagtatctgaaataagagaagattgttttaaaattttcttacaatcaaagaatcatttgagttggaagggacccttttgtctgatttttgtaccttactgctgatctgtaatctcagctttctaaaaggcactttctacaaaaacactctttgaaatacgataaaatctttgatatctacagcagacaatctccagaaaaattatgtgataacttcagcttatctggtcaagaagtcttt

SEQ ID NO: 63525 - DNA, 600 bp, Chicken  19866894326610_1
ctacagtatcacacaccgaggtctcaaatgggtgagaaatcacagtgtgacatttactgcagtaatggcactggctgcaaagtaggacaggatcctttctgcttaatttgaaggcagaacataatgttttggatatcctagcctcagagttatctagaaacgttgccaccactgagctttggaatgcctttagaacccctgctaaccttacctcttcttgctgccactcatgtatgcaaccttcttgcccccagtcctccacgtgctctgcacacaatttctttgcattgctctcgtaaycattgcttgagcttagaatggatttctctgtgatgggttactgtgttctcacagctgaacccctaaatcaggtccaaactccctaaaacaggcaatctacgttgtagagctgcaagtgcttttcacagggtggctaccactaatgcttgaacctacccttacagagagggcagctttctgtcctgccgagacaccaggttagcagtgaacaaattagctcaggccttagatcctgtgtagctgtgcagaacacacagtagcatcctggctctcargggaagctatgataatgtgactgta

SEQ ID NO: 63526 - DNA, 585 bp, Chicken  19866894326610_2
aatttctttgcattgctctcgtaaycattgcttgagcttagaatggatttctctgtgatgggttactgtgttctcacagctgaacccctaaatcaggtccaaactccctaaaacaggcaatctacgttgtagagctgcaagtgcttttcacagggtggctaccactaatgcttgaacctacccttacagagagggcagctttctgtcctgccgagacaccaggttagcagtgaacaaattagctcaggccttagatcctgtgtagctgtgcagaacacacagtagcatcctggctctcargggaagctatgataatgtgactgtatgaggataatgctacataatgaacaataatgaggcagttttcagcctctgaatacagggagggctgggtcactaaccagacctttgttcatcgcatactaaagagcatggagggaatatgccacaaggttgctgatgttacaagtgctgctgctggttgagtttacccatccatgtccctggcattatttctcttagaagatatgacgtcaccttccagtaactgccctcaggtcagagatgccttcagtgtccaagcca

SEQ ID NO: 63527 - DNA, 600 bp, Chicken  19866894326612_1
gtaactcacaaagccagcaagcaaaaattgacccttagtttgggctaagacattgcatagctgaagaggtttactgtcagatactgtttgctttgtacacgtgcaacccagtatagcaaaatggatggcttccttttgcctggtgcccgcacatgcttttgctccaatacgcaattggagtccggagcatccctttgcactcccaaaaacaaagagtggatgtgactgtgcaggaatgagagcaaaaggcacagcttcttgccatgtgcactgcagaggatactctggcagcacagatcstgccctctggcacagctccccttgccttcaacactgcggactgcagcaggaaagtagccagctaacagccacattttccattaagtaaagagcatttattttggatgcagtcagacgatgagaaaagtggatgaggtatttatttttaaaaacacgatgccttgaaaagtttcctttccaaagcattcggtatcccaagttacccaactccagaaacaaccagaaaggctacttgcacattcctctgcagcagccctcaatattaaagtagttacaaattagcagcactacagggtagag

SEQ ID NO: 63528 - DNA, 579 bp, Chicken  19866894326613_1
tttagcatgcagtgtcattaaaaagccattaattttgacatacactgatgtcaatacacaattaaattaatccaataaaacaacgcataatctgtttcagaccaatgtgataaattcaacttgtgccaacaggaataataaaacagatgaacctgccaaaaatttctagttacttaaagctggaggctttgtggtatgaaaagtttgaggcagtgtggaagaaaaccatgcttgacctatacataatgtgtaactgttagcaccctttcctcttgttcttgttttgatctaatttcttamacatgcaaacataggttctaatctcaaaattgtaacatatatttaagctctgactctgtaaagataagatatcagattttttgaggaatgtaktaaatctgtgtgcctgctagagattaaaggacaaaaagaacagtatattgcttgttataatgaaaagttttatttactacagaaatgtgttaatatttgctttgctgcatagtttgattccctctactccccccctccatgtagtctagggctgcattaattcatctcatcattgctaaatgcatc

SEQ ID NO: 63529 - DNA, 486 bp, Chicken  19866894326613_2
gtttcagaccaatgtgataaattcaacttgtgccaacaggaataataaaacagatgaacctgccaaaaatttctagttacttaaagctggaggctttgtggtatgaaaagtttgaggcagtgtggaagaaaaccatgcttgacctatacataatgtgtaactgttagcaccctttcctcttgttcttgttttgatctaatttcttamacatgcaaacataggttctaatctcaaaattgtaacatatatttaagctctgactctgtaaagataagatatcagattttttgaggaatgtaktaaatctgtgtgcctgctagagattaaaggacaaaaagaacagtatattgcttgttataatgaaaagttttatttactacagaaatgtgttaatatttgctttgctgcatagtttgattccctctactccccccctccatgtagtctagggctgcattaattcatctcatcattgctaaatgcatc

SEQ ID NO: 63530 - DNA, 600 bp, Chicken  19866894326614_1
cagggcaagcagagagatgtcaccatgacaatctgagaatatcccagtttttattctctttctttaagcaacatagtaacttactatcatgatcctgaattagttttccaggcttttctaggagaatttcagtctgtagttctttcatgtgcttttgactttttaaattgcacactccctagctatggggtgaatctgaccgattcacaaatgtcatggtgaaagaggattaaaagtttgtgcaattctattttgtaaagaaatgataattttattaatttcatttaccaccctcccttyccccyaccccctttttttagatactacatcaaacatgaaatacctacaaacctagaaatgtatgcattctttctggattaggagagacgttagaaaattatatttacatgactcagtgaattttagttgaaagtatgcatttctttaccatttgtgttctaacctattgtttaygttctaatttctactaagcatttcaaaacattttaaattaaattcagtgtgtggcacttagagtgcacctaataattttatatacttacactaaytgtaaaataatcttcgatgtaatcttgtttt

SEQ ID NO: 63531 - DNA, 600 bp, Chicken  19866894326614_2
caagcagagagatgtcaccatgacaatctgagaatatcccagtttttattctctttctttaagcaacatagtaacttactatcatgatcctgaattagttttccaggcttttctaggagaatttcagtctgtagttctttcatgtgcttttgactttttaaattgcacactccctagctatggggtgaatctgaccgattcacaaatgtcatggtgaaagaggattaaaagtttgtgcaattctattttgtaaagaaatgataattttattaatttcatttaccaccctcccttyccccyaccccctttttttagatactacatcaaacatgaaatacctacaaacctagaaatgtatgcattctttctggattaggagagacgttagaaaattatatttacatgactcagtgaattttagttgaaagtatgcatttctttaccatttgtgttctaacctattgtttaygttctaatttctactaagcatttcaaaacattttaaattaaattcagtgtgtggcacttagagtgcacctaataattttatatacttacactaaytgtaaaataatcttcgatgtaatcttgttttgtatt

SEQ ID NO: 63532 - DNA, 600 bp, Chicken  19866894326614_3
ctccctagctatggggtgaatctgaccgattcacaaatgtcatggtgaaagaggattaaaagtttgtgcaattctattttgtaaagaaatgataattttattaatttcatttaccaccctcccttyccccyaccccctttttttagatactacatcaaacatgaaatacctacaaacctagaaatgtatgcattctttctggattaggagagacgttagaaaattatatttacatgactcagtgaattttagttgaaagtatgcatttctttaccatttgtgttctaacctattgtttaygttctaatttctactaagcatttcaaaacattttaaattaaattcagtgtgtggcacttagagtgcacctaataattttatatacttacactaaytgtaaaataatcttcgatgtaatcttgttttgtatttgacttcttcagaaatcagatactgaatgtacaattctgacatttttatctaaaaatttaactctttgctataattacctatcttattttcttctaaaatagtaactgcgtatccattttctagttgtcacagaaaacagtaaagagataatacatgaaaaataatttt

SEQ ID NO: 63533 - DNA, 559 bp, Chicken  19866894326614_4
ttttattaatttcatttaccaccctcccttyccccyaccccctttttttagatactacatcaaacatgaaatacctacaaacctagaaatgtatgcattctttctggattaggagagacgttagaaaattatatttacatgactcagtgaattttagttgaaagtatgcatttctttaccatttgtgttctaacctattgtttaygttctaatttctactaagcatttcaaaacattttaaattaaattcagtgtgtggcacttagagtgcacctaataattttatatacttacactaaytgtaaaataatcttcgatgtaatcttgttttgtatttgacttcttcagaaatcagatactgaatgtacaattctgacatttttatctaaaaatttaactctttgctataattacctatcttattttcttctaaaatagtaactgcgtatccattttctagttgtcacagaaaacagtaaagagataatacatgaaaaataatttttcaaggtattttgattcttttcctaacctctttcttaacctcaaaaatgcttct

SEQ ID NO: 63534 - DNA, 600 bp, Chicken  19866894326619_1
aaatgagaaatttcatatactatttgttcaaagcaagcgagatgcttttgtttttgaacgatttctaattttctcattgaagtaacaaatgtttgatgtgatttcactacccgttatataaaatgtgacacgttttttaaccactttttgtaaagcatactttaaaagatttaaaaacataggcttgcacgtgaagtccatgtgaagcataggtgttgaatattttattcaggttgttgttcttgttcccatatgaatatatgtatacatacacatatatgtagaaggttaatgggtagyctgaatgttcaaatatcgcatttccaagtgtaacttaaggctcagcatgtctctcacattctgtcccaaagccatagaaaagtcattgtccaatgatgtgtatacatttatggagggcgtgagggttttcttttttccattgcaatttccttggcaactcaacaatatttacaccatcacagttttcctaagcagtaaacattcgcttttgagctggctaggacagctctgatctcttcctttgagctgagtgagttggttaccccacattacacttctgtttactggatatatgcrtgg

SEQ ID NO: 63535 - DNA, 600 bp, Chicken  19866894326619_2
agyctgaatgttcaaatatcgcatttccaagtgtaacttaaggctcagcatgtctctcacattctgtcccaaagccatagaaaagtcattgtccaatgatgtgtatacatttatggagggcgtgagggttttcttttttccattgcaatttccttggcaactcaacaatatttacaccatcacagttttcctaagcagtaaacattcgcttttgagctggctaggacagctctgatctcttcctttgagctgagtgagttggttaccccacattacacttctgtttactggatatatgcrtggacaaaggacccgtctggtttttcttgcatagaagtgcaagcagtaattctgtgtattcctgaggagaagaaaaaagggaagatgagtttaacagcaaactgatcttatagcgttatatattatatcagcaaaatactaattttgtctgtggcttttcctgctccttttcctgaacttctttggccttcatacttgtgatcactctgtgcatctcaaaggaacggcagtaaattattctttctggagggaaaatatgttattatttgggatgcacaaaggatagggtatgcctcagct

SEQ ID NO: 63536 - DNA, 600 bp, Chicken  19866894326626_1
ctgtgcagaagaagaaggtttaggaacagacgttgatttctttttctttggtttagttgaagtagaactttgccctttggaaagggcctatgttatcaacagggtttattttttttcttagttagggtgacttgtgatttatggtggagtgatggattttgcttagaaaaacatggatgtgttcaaaggagaggctcctaaatggtttgcttcttggttttatagacttttcttttttctgtcctggaggatgaagaggtggcttaaaatgtacaagagaggcaatgaatgccatttgarggaagtcatggagatgctgcttttcaaagcagcctttgctcctttttgcatgaaggcgttttgtggaaacatatccagtacactcactgctgtgagcaatgtgtcatgtttttgttggcatcagaaggctgaggctggagaactaaatcgtgtggctgggaaacaccaggcacactcgtatgggtccaaatatctggaggagacaatgtgggtgtagttctgtttgtatatttttttggatggtgtagaggaaggagagggtgagtagaaagaatgattgcagtttagccagacgatcct

SEQ ID NO: 63537 - DNA, 545 bp, Chicken  19866894326632_1
ccaacttccctgcaatgaacaaggacacctacagctagatgaggctgctcagtgccctgtccagcctgaccttgaatgtctccagggatgaggcatccaccacctctctgggcaaactcattccagtgctttactatccttactgtaaaaaaaaaaccaaacatttttcttatatcaaaactaaatctcccctctttttagtttgaaaccattacccttgtcctgttacaacagattgctaaagagtctgtccctgtctttcttatagcccccatttagatactgcaaagctgttatcasatctccctagagttctcttctccagtctgaacagcttcagctctctcatcctgtcctcacaagaaaagtgttccatcccttggatcatttttgtggccctcctcaggatgtgatccagaaggtccatgtctctcctgtactgaggactacacatctggacacagtactccagatgaggtctcaccagcacagagaacagagacaggatcaactcccttcacctgctggccacacttcttttaatg

SEQ ID NO: 63538 - DNA, 600 bp, Chicken  19866894326635_1
taaccctcagcacagaccagcttggagcttacaggatgccttgctaaggaaagagcttggtagtacaagggggaggggtgtaaagaggaaaagaaagtgcttaacttggaggagaagttttgaaaaacaattatataatttataatatacaactatgtatctataaatagagctattgctagtggtctgctgtaacaaaatggaatctttctttaagagaatggaggaaaatcagcacgtgccatagtgataccaattcctttgtaggcaagctgtgttactggctgtagccaccttggygtccatgctgcatgaatcagaagggaggcagggaaggaccaagttatcaataagaggcttccaatttactactaagaatactgcttcaggctggctcttatttcttctctaacaaatcttatctcaaggaaaaataaacttcttaaaacatgtgtatctcttgctgctttagcgcccacaagttttgagtcgaggggtgaagggcagagcacccaaagtgacggagttacaaaggttaaacccmcatgaggtggtaccgaaggaacctctcctcgcagccagtggggaaggttaggttgc

SEQ ID NO: 63539 - DNA, 600 bp, Chicken  19866894326635_2
tagtgataccaattcctttgtaggcaagctgtgttactggctgtagccaccttggygtccatgctgcatgaatcagaagggaggcagggaaggaccaagttatcaataagaggcttccaatttactactaagaatactgcttcaggctggctcttatttcttctctaacaaatcttatctcaaggaaaaataaacttcttaaaacatgtgtatctcttgctgctttagcgcccacaagttttgagtcgaggggtgaagggcagagcacccaaagtgacggagttacaaaggttaaacccmcatgaggtggtaccgaaggaacctctcctcgcagccagtggggaaggttaggttgcctgtaacaacgaatgtagcccagcatggtatgcacgaaagctatttgcctgtcctgagtgctccaaaggaaataactgggaaaggaaataactttttttttcttttttttttgtttttttggaaccgagagtcacccaaagcaagactcaatgactcagcaccccttttcttcctttttaatctgtccctgcaaagaactgcaggctctgaatacagctcacgctgctaaatgagcttcctctt

SEQ ID NO: 63540 - DNA, 600 bp, Chicken  19866894326639_1
tttttgtgacattatactatttagggcctagacatgcaaaaaagaggtatgtttgctggagaaaacacaaaggcacaaaacatgctcttaaccacgattttccaacagagggcttccttgcagttgtgtcatcagctttctctgtccagaacagttgacaagaagaccaacactgctcaggcaggatgaggtaccaagtccatccaactatctgtggtgccagagcggcagcattcaggcaaggcagaagttttgtgttgatcattaggtagttagctaaatggctgcagttctgtgggstactcccaaatgctgtcagctgcagcttggctcatgggctggagctccccacactttctgcaagatatgscattgccctcgcagcagtgcaaaggatttggtttatctctgacacctcccatggctgtgagaaaatttctcttctctcttctgccagcttctttgattgttgctgccacctgctatttgctgttcaatctaggagctattttgatgctttggtggtgggaaagaagtctttacagaggacttataagccttaaagttagtactgttctccttctggagcatgtcacagag

SEQ ID NO: 63541 - DNA, 600 bp, Chicken  19866894326639_2
aggcacaaaacatgctcttaaccacgattttccaacagagggcttccttgcagttgtgtcatcagctttctctgtccagaacagttgacaagaagaccaacactgctcaggcaggatgaggtaccaagtccatccaactatctgtggtgccagagcggcagcattcaggcaaggcagaagttttgtgttgatcattaggtagttagctaaatggctgcagttctgtgggstactcccaaatgctgtcagctgcagcttggctcatgggctggagctccccacactttctgcaagatatgscattgccctcgcagcagtgcaaaggatttggtttatctctgacacctcccatggctgtgagaaaatttctcttctctcttctgccagcttctttgattgttgctgccacctgctatttgctgttcaatctaggagctattttgatgctttggtggtgggaaagaagtctttacagaggacttataagccttaaagttagtactgttctccttctggagcatgtcacagagtctaaaggctaaattcttctttggtttattgtgaatgcatgaagtaacgctacctcctttcccttttcca

SEQ ID NO: 63542 - DNA, 600 bp, Chicken  19866894326641_1
tgatgtctgcagcaggcacctgagagctcagatcctcgggaccagcccatggaagatgcatcctccacagaggcatctggatgtggattaaaaggcaatgttgagagctccgtgatttgagtttgctgggtctcattgcaatccctagtgaacaagcctgttgtcagcaacacagcaaggagcagacagggactggtgctttaattagtaaagacaggaccaaataaacaaggagactggcatcatgttctttcccagatgttcccccatttcaggagccttgacaacacagcatgtggraagggatggggctgctcctggccaccatgtacctgccccacatcacatgcagcaagccaccttcctcggagttgtcagcttgcagagctcatttagagacaccaagcaattaaataccctgttggttccctcgtccccctctgagcctgacatctcaggagagacagggaccgcattgcaggtctctccccagcagagtgagcggctcatctctgtcttggccgatgcaggcagtgctcagtgggtctcatttgtttgcatttgcctggtgccttgacatgatgaagtaaaaagttttaa

SEQ ID NO: 63543 - DNA, 544 bp, Chicken  19866894326646_1
ctccatatggactaaatgaatgttactgacaggactctgcttttattggcataattcatttccccacaaaacattcctgtaccagctaagtccataggaaaatttctattaactgaagaattaggtcattgcgtatgtcttcagacagccatcacatcagtgacatctgggaatacagaggtgcaggactacctggaagtcaggcattttgaagtgagagacatggagctgttggagtgcgtccagaggagggccgcaaaatggctccaagggacggaacacttctcctacaaggacagrctgtgagaactggggctgttcagcctggagaagagaatgctccggggagacctgagagtggcctttcagtacctaaaggggagctacaggaaagaagaggacagactctttaacagggtctgtggtgactgaacaaagggaaatggtagtgaagcactggcacagcttgcccagagaggtggaaaatgctctgtccccggagacactaaggtaagtcggactggctctgaacaccgtatcgagc

SEQ ID NO: 63544 - DNA, 599 bp, Chicken  19866894326647_1
  misc_feature (1)..(203): n is any nucleotide
nnnnnnnnnnnnnnnnnnnnnnnnnnnnnnnnnnnnnnnnnnnnnnnnnnnnnnnnnnnnnnnnnnnnnnnnnnnnnnnnnnnnnnnnnnnnnnnnnnnnnnnnnnnnnnnnnnnnnnnnnnnnnnnnnnnnnnnnnnnnnnnnnnnnnnnnnnnnnnnnnnnnnnnnnnnnnnnnnnnnnnnnnnnnnnnnnnnnnnnnnnnaaggtccctgagaacacccccctcttctcctcttagcgctgggctggtgctgctgctcaccggggctctgcagggctccccgtcctctgctcccatsctttggtggctgtgggaccctccgtgtgggctgtgggacccttcttggctgggcatttcccatggcgagccttgagctggaggtgtgtgtctgggggggccggaggggctctcacatcctgcactgtaggtatgcaaagatgaaaccaccgagcgctgtgctgcgagggacagccccgatgttcccataacgcrggcgcttctcgtgtggctccttcccagggctcatgctgggactcgaggctcaggctgggaaaaaaatgcaaccctctgtagaggattggctctccactctctgaa

SEQ ID NO: 63545 - DNA, 599 bp, Chicken  19866894326647_2
  misc_feature (1)..(9): n is any nucleotide
nnnnnnnnnaaggtccctgagaacacccccctcttctcctcttagcgctgggctggtgctgctgctcaccggggctctgcagggctccccgtcctctgctcccatsctttggtggctgtgggaccctccgtgtgggctgtgggacccttcttggctgggcatttcccatggcgagccttgagctggaggtgtgtgtctgggggggccggaggggctctcacatcctgcactgtaggtatgcaaagatgaaaccaccgagcgctgtgctgcgagggacagccccgatgttcccataacgcrggcgcttctcgtgtggctccttcccagggctcatgctgggactcgaggctcaggctgggaaaaaaatgcaaccctctgtagaggattggctctccactctctgaagtacctcttctgggggcttcgggagggatgtgaaaggtgttctgtgcgctgagatggaggtttgtgcgctgctgattgctttcttgcagtccgttctcgtggacgtgtagaggctgagctgttgggctgcatggctgctccttggtcgggctgcagagctgtgctggtgcttgagaaggaaacagaggggtgct

SEQ ID NO: 63546 - DNA, 600 bp, Chicken  19866894326647_3
tgctgggactcgaggctcaggctgggaaaaaaatgcaaccctctgtagaggattggctctccactctctgaagtacctcttctgggggcttcgggagggatgtgaaaggtgttctgtgcgctgagatggaggtttgtgcgctgctgattgctttcttgcagtccgttctcgtggacgtgtagaggctgagctgttgggctgcatggctgctccttggtcgggctgcagagctgtgctggtgcttgagaaggaaacagaggggtgctggcagccgtgctgggccttgcagtgcaggtggckgtgctggtgggcacacagtgggctctacagctgctggagcagccacagcacatcccagctgaggcgttctgccccggccatgctactgtctcctggttctcatctcctcctcggcggagtgaaggaaatgatctgcaaatgcctgtgttaatgaacaccccccgccctgagctgaaatgctctgtgcttcctttgctccagcttgctgccagggctttgcagcaagacgcccagggagggacaaaccacttcccaccatctgctccccttcctctgctagcacagggctgcactctgccc

SEQ ID NO: 63547 - DNA, 600 bp, Chicken  19866894326650_1
agataccttttattcttcctgcattatgttggacatgtgggaagatcttcccataaatggacagttgttttctctattactttctgacttaggcagtcagcataagatgccagtgctcttgtaagtgatatcatctcagcccagtcttcttgattttccccatatctaaacatagttggatatggtttttacttgggtagcagctaccccaactgtgttgccaccagagtgcaaagctattaacagctcttctgtgcttcttcctttactgcacataccaatcacttgctgagctagagytgggcacaygtagctggggtctcagccattcatgaggcattctcaggtaggctgtaccacacagtaagaagagattgtatgtttctttctcaagatagtgccccagtgcttggaagccattaaaatgggtacccgagagttgacagaaaaatcacaagcccatacgcatatattcacttataaaatcagttacgtatatagcatttctaaaatggtccacagtggcagtggaaaatatctaggtgtccacaatgattcattagcttctactaacaaaatcaggagataatgttcctaaat

SEQ ID NO: 63548 - DNA, 600 bp, Chicken  19866894326650_2
ttattcttcctgcattatgttggacatgtgggaagatcttcccataaatggacagttgttttctctattactttctgacttaggcagtcagcataagatgccagtgctcttgtaagtgatatcatctcagcccagtcttcttgattttccccatatctaaacatagttggatatggtttttacttgggtagcagctaccccaactgtgttgccaccagagtgcaaagctattaacagctcttctgtgcttcttcctttactgcacataccaatcacttgctgagctagagytgggcacaygtagctggggtctcagccattcatgaggcattctcaggtaggctgtaccacacagtaagaagagattgtatgtttctttctcaagatagtgccccagtgcttggaagccattaaaatgggtacccgagagttgacagaaaaatcacaagcccatacgcatatattcacttataaaatcagttacgtatatagcatttctaaaatggtccacagtggcagtggaaaatatctaggtgtccacaatgattcattagcttctactaacaaaatcaggagataatgttcctaaatgactcctgc

SEQ ID NO: 63549 - DNA, 600 bp, Chicken  19866894326655_1
aggaaagttaaacagtgaaggaagagagaatggaagggagggagggagaacaagggagaaagagaggtaaggaagaaggaatttaaaatgaaggatagtaaatccaaatatattctctccaaataaaaggtagttgtacatcctaatattcacagataagctaatgtctcgaaaataagcaatgcctgattaagaatgtcttggctaacataccaaggcacagtgggagatttattcttgttcatcttccttttacctcctaggaagccagggagcaaggcaaattgcaataatttgtgwctgtaaagcaaacatggagatctaattatactgtttttcaccaatagtcactttaaatacagtgtcctggcctgcatttgcttttctaaagcccattaattctgtcagttgtgtttttcttggaggaaaacgttattcttgctgagtagactttgattattttcattataatctgagacgctggtatgaattccaaagcattcactatgccccttggccacttcaaatgctactgtctctcttcagcatagcttgattaggtttgagagacttacatgtgattcagacgacagggaaatg

SEQ ID NO: 63550 - DNA, 600 bp, Chicken  19866894326663_1
ttgttgttttacttttatcaccttaaggaaaacgtacacgtactctccccaagttaagtaagccagataaacatagtgcaactatgtttaacgaccgaataaaagttaggttcagccaagcaagactcaagaagctagaagacaaatttcaacccaaaggagagaaattctgttgcgcaaaataccccgatgttgaggaaggacttcagagggctggctaaatgctcggctcctgacagactgtgcttcacccggctgtgtggatgagcagggccactgctcctcacactgttttctccycgcgttctcccaggcagtttcacatttggctcagggcaagcaaacgtgaaataggtcaggtagctcctatcccgagagccaagcgtcctgctcctgcaggcacctcccaggtcactcagggtacagcaggctgtgtggcacgtgtcaaagcatttacgaatgctgtcagttacctacacggaaccatcgggtccgctgaggttttttatcaagcctgtagatacgtgctttgcccgcagagcatttctcctccttgctgcagcaggtcaagggactccaactcgtttctgcgttctttct

SEQ ID NO: 63551 - DNA, 599 bp, Chicken  19866894326668_1
  misc_feature (1)..(168): n is any nucleotide
nnnnnnnnnnnnnnnnnnnnnnnnnnnnnnnnnnnnnnnnnnnnnnnnnnnnnnnnnnnnnnnnnnnnnnnnnnnnnnnnnnnnnnnnnnnnnnnnnnnnnnnnnnnnnnnnnnnnnnnnnnnnnnnnnnnnnnnnnnnnnnnnnnnnnnnnnnnnnnnnnnnnnnnncattcatttacttagaaagcttacattgatgtatgaagtgcaagctacccgtgaacacgaaaactaacaattgtcagtggatttgtagcaatttcaaaactggaaatgattaatgagatgatttaatgaatytttgattgctctcaagagtctttttcaaaatggaaactggtaaaatatgaaaaatataccagagattatgtattttccccaaagtcacaaattcaaaaaattaagcctaaacatatttgagcgagcggtagaaaacagccatccaagaactgaagatttcctattagaaacagagctgtcgactgcttttcccaactagcagattgagcacagatcttgaggttccttttcatgtgcaatttcaaactgatgcaaaatgccaacttatataaactggataaatacgtgcagtgctggga

SEQ ID NO: 63552 - DNA, 600 bp, Chicken  19866894326668_2
aactgaagatttcctattagaaacagagctgtcgactgcttttcccaactagcagattgagcacagatcttgaggttccttttcatgtgcaatttcaaactgatgcaaaatgccaacttatataaactggataaatacgtgcagtgctgggaaacccaagttttactactcagtgcacccgcagtggtgcatttcgaacaagggataaattaaacagatgttacagctccacctactgaaccaataagaaaggatgagaaggggtataattagccattgtaacaaactggagcaactgargatctatgcagaccctgraacagattttttggttgttttattatattttgacacagccatctgatctacccttgcactcttgctcaagatcatgtattgtcagatactttaagccaccctaaagaagtggggggctatcaacttggccgattggaagcagcagcctggtttggaaactcgcctaagttgtaatggtctcattcctacatttacttactctttggctagcacaaaagccaggtttgtgtgtagccttcacttcagaaggagcttgctgcagatgctgtgtctattctaacg

SEQ ID NO: 63553 - DNA, 600 bp, Chicken  19866894326668_3
agaaacagagctgtcgactgcttttcccaactagcagattgagcacagatcttgaggttccttttcatgtgcaatttcaaactgatgcaaaatgccaacttatataaactggataaatacgtgcagtgctgggaaacccaagttttactactcagtgcacccgcagtggtgcatttcgaacaagggataaattaaacagatgttacagctccacctactgaaccaataagaaaggatgagaaggggtataattagccattgtaacaaactggagcaactgargatctatgcagaccctgraacagattttttggttgttttattatattttgacacagccatctgatctacccttgcactcttgctcaagatcatgtattgtcagatactttaagccaccctaaagaagtggggggctatcaacttggccgattggaagcagcagcctggtttggaaactcgcctaagttgtaatggtctcattcctacatttacttactctttggctagcacaaaagccaggtttgtgtgtagccttcacttcagaaggagcttgctgcagatgctgtgtctattctaacgctcatgaacgcaaacagg

SEQ ID NO: 63554 - DNA, 600 bp, Chicken  19866894326673_1
tttccatccaaaccaatgtactctagaaacagccaatgccttggtaggaagaaaaagagaggtgttgctctgattcagcctgcacaaacatttcagaagtgggttgcatcttctttcaggtgggagagccaccacagcaaccaccagtttctcttttgcccaccctgttttacatccacaaatatgaaggaacgggtcctgcaaaacccagtctcctcagccctgctctccagcaggcaggagctgctaagagaaatgtggccttggtgaagatcctggagaggcagaagttaaccttgmtttaaatgttctcataataattattataaaggacacattcagcttgttctgtttgtgggccactgttccaccttgattgccctgtgtcccatgactggctgctgttttacactgcctgcaaaagtaatacttccccaagccactgctaaagggctgtgctgggctgaggcatactgggtgctcactatccttcctgaatgcaaacactgcaaatgtctgaaacatcattcccgaatttttgcagagataccaaatgcaagtacatgagagtgagtgtgaatatggggggaatccggttcc

SEQ ID NO: 63555 - DNA, 447 bp, Chicken  19866894326678_1
ttaacagaggtagggagtttggcacctgaacaggaaacagctccttgcaagagagcaggactaaatatagaactcccctgcaacaccaagctcagtcactactgcctttcaaatgtatgtggtgaaagctctggggatgtattgcagaacttggacgataaattgacctgaagccaactaccactctccctgcatccatcccaggttgactgaattccaatcttatccataaataagaatctggccaaggacttatgatgaaaaatgtaggccaggcatccatctcaacaagatgacttyaaaagttgtcaataaaattaaaaaagaagaagaagaagaaaaaaaaagtgccattgaaaaaaaaacctggcaggagtgctggggattttttttttatagatgtccttttgagacattagtttttaaaaggcaccttttcaatgctgt

SEQ ID NO: 63556 - DNA, 598 bp, Chicken  19866894326682_1
gcagtagattagtccatattaactaaaccatattaactaaatgagcagtgaaaacattatattttacattcagatttctagctgacatccagtcggaagtaggtatataccaatttacagcatactgaaggctagctgggcatgaactgtgacctacgactagctcatgtgtagttaaagaagacagaagtgccttatactgaaaaaaaaatgaattaagaaaaacattatcacagaataatttaggttggaaggagtccatgaaggtgtccagttcaatcttagaatcatagaatccasagagttggaagggacctctgaaggccatccctgcaactctcctggaatgaacaggaacaccacagctagatcaggttgcccagggcctgatgcagccttgccttgaaagtctccagggatggggcatcaaccacatctctgagcaacctgttccagggcctcaccatcctcactataaacattttccttatatccaacctaaattaccctctttaaggttgaagctatttccctttgttctatcaccacagaccctgctagagagtctgtcctcttctttacgatagctcctctttag

SEQ ID NO: 63557 - DNA, 599 bp, Chicken  19866894326683_1
  misc_feature (1)..(259): n is any nucleotide
nnnnnnnnnnnnnnnnnnnnnnnnnnnnnnnnnnnnnnnnnnnnnnnnnnnnnnnnnnnnnnnnnnnnnnnnnnnnnnnnnnnnnnnnnnnnnnnnnnnnnnnnnnnnnnnnnnnnnnnnnnnnnnnnnnnnnnnnnnnnnnnnnnnnnnnnnnnnnnnnnnnnnnnnnnnnnnnnnnnnnnnnnnnnnnnnnnnnnnnnnnnnnnnnnnnnnnnnnnnnnnnnnnnnnnnnnnnnnnnnnnnnnnnnnnnnnnnnnnncataaaatctatttacacatttgtgaataatgtatataccwaatctcagtatgctgatgtggtgatgagcattgtataaaatgcatatgcagactaaaataagaagaaattatattaaaaaaaaaaacagtactagtttttaagtctttgcatatgcctgatgaagaacaaaacttttgttgtttgctttttctcactagaaatactgatattttcacatatggctttgtgaactcacacgtcagcccactgtgttgamtgtatctgctactgatgcatctttcctttcctttgctcaaagaactttttacaccatttcatagtggtaggacaaagggga

SEQ ID NO: 63558 - DNA, 599 bp, Chicken  19866894326683_2
  misc_feature (1)..(41): n is any nucleotide
nnnnnnnnnnnnnnnnnnnnnnnnnnnnnnnnnnnnnnnnncataaaatctatttacacatttgtgaataatgtatataccwaatctcagtatgctgatgtggtgatgagcattgtataaaatgcatatgcagactaaaataagaagaaattatattaaaaaaaaaaacagtactagtttttaagtctttgcatatgcctgatgaagaacaaaacttttgttgtttgctttttctcactagaaatactgatattttcacatatggctttgtgaactcacacgtcagcccactgtgttgamtgtatctgctactgatgcatctttcctttcctttgctcaaagaactttttacaccatttcatagtggtaggacaaaggggaatggctttaaactagaaaaggggagactgaaattagatgtttattcagaaggtggtgaggcactggcacagctgcccagagaagctgtggtgccccatccctggaggcacacaaggccaagttggatggggccctgggcagtctgagctggtgggaggcagctctacccatggcaaagggtggggctgagtgggctttgaactcccttcaaacataag

SEQ ID NO: 63559 - DNA, 600 bp, Chicken  19866894326686_1
ctagaaacctgtacctgtaaattttctttccctcaatgtgttgaggatttcatttctattgatgacaaatgctattacacagtaagggattataggaattgatttagtacaaaaaaaaaaaaaaaagagaaagattatatatgcaaataggggaaggaataacgaaacagtagtttagtatgcaagaaataatggaatgaaaagcagaaataggaatgtatctacaaaaaaatggatagcatttctgataatgacaattaggctgtgtgacagacatcatctgaaagtgaatatgttcartgacttaatcatctttggcacatctgtaacagtttgatgaaaaagaaaaatcatttgaagacttctagggttttatgtatatgacttgtatgtgaccttccaggccatatcttctaacacagaagttcttaaatctatttatttggatcttagatatgagttttccccttctattggacatctctcttaaacttcttcatcaccatatagctagataaaataactgcatttcattgtgctattttaccaatatatctgcttatgtatttgaatggctgcacaatgagacctgagatacct

SEQ ID NO: 63560 - DNA, 600 bp, Chicken  19866894326686_2
tatagagaaatccacatctacctaaactgtatgaatttccttgggctgatgaaatgaaactaatatctcagacaacaatacaagggacaaaaaattttagaatgtcttattaggttgtctctccttatcctttcttggtttaaaataaatattttccttaaaaatataaatttcttttgttctgctaaactgcatctccagtcacaaatctcctctactttcctgagaacaaatttttttgtgacacactgcaaccagtctggttggatggcaacagtagtggtgaagtatttgagaagraaaaaaggaagaaaagaaaaaagaatgaagaaaatacttcttaacagagattgctttcctcctccaactaaatgcatcgagaaagtacatactattatgtagatgaaagctaatttttacatgtctattttctgatttcctcctttgttcagcagtactgaacaaagaaaaatagaaggagatgccatcttttttgtgcatatggtgacacttaaagttcccatgtgcagtatttcacaatgaaacatatggcactcaccgattcactctaaaagcatgtaaagccaatatagagactgg

SEQ ID NO: 63561 - DNA, 599 bp, Chicken  19866894326691_1
  misc_feature (1)..(66): n is any nucleotide
nnnnnnnnnnnnnnnnnnnnnnnnnnnnnnnnnnnnnnnnnnnnnnnnnnnnnnnnnnnnnnnnnnctctctcagcctgtccttgtaggagaggtgttccatactttggatcatttttgttgacttcctctggatgtgctccaacaggtctgtgtctctcctgtactgaggactttacatctggaccaacagtccagttgaggtctcaccagcacagagtagaggggcaggatcacctccctcaacctggtcatgcttcttttgatgcagaccaggacatggttggctttctgggctgtraaggcacactaatggctcatgtccagcttcccatccaccaggactcccaggtcttttctggcaggtctgctctcaaccctttcatcctccagcttgtattggtagtgagagttgccttgacctaggtacagaatcttgcatttgggtttgttaaacctcatgaagtttgcctgggcccactgcttgagcctgtctagggccctctggatggtgtcctatctctttggtgtgttgactgcatcccacagcctagtgtcatctgcaaacttgctgagagtgcacttgaccccgctgtcagt

SEQ ID NO: 63562 - DNA, 474 bp, Chicken  19866894326695_1
tcaacaaaagaaacgcagggcactgcacttcagagagagcaatggcagacatacacacacgggagtggctggagagcaggtcagcaggaagggatctgggtgtgctggtgatggcagctcagcacaagccagcagtgtgcctggacagccaaatggacaatcacactgttggggacactgaacacagcacagccagccagaagtgattctcctgcttcagtgttggtgtggcctcaccttgaatattgtgtgcagttctgaactccacaataaagaaaggtacttcagtatgacagagcwggagggtatgtcctgtgagaaaytgctgaaggcacctgggttgtccagactggagaagaggaggccaggaggtgacctcattgcagtctataacttctggaggaggggaagtggagaggggggtgcttgggctctgcttctgagatgacaggatgggaagggcacaaatctgtg

SEQ ID NO: 63563 - DNA, 451 bp, Chicken  19866894326695_2
tgcacttcagagagagcaatggcagacatacacacacgggagtggctggagagcaggtcagcaggaagggatctgggtgtgctggtgatggcagctcagcacaagccagcagtgtgcctggacagccaaatggacaatcacactgttggggacactgaacacagcacagccagccagaagtgattctcctgcttcagtgttggtgtggcctcaccttgaatattgtgtgcagttctgaactccacaataaagaaaggtacttcagtatgacagagcwggagggtatgtcctgtgagaaaytgctgaaggcacctgggttgtccagactggagaagaggaggccaggaggtgacctcattgcagtctataacttctggaggaggggaagtggagaggggggtgcttgggctctgcttctgagatgacaggatgggaagggcacaaatctgtg

SEQ ID NO: 63564 - DNA, 600 bp, Chicken  19866894326696_1
cgtttagccaaagtaaggggcacagcctgcctgcagctgacctcccctggcattgagttttgaatgcatttgaagagttatcagggagttccaatgagtccccattgcagctgctgcccctgctctgtgctggggaaaggatgcatgcctgaactgagcaggggatgggcagctgaaggggcagagcaaggagggatgtcgtgcagggcactgcttgcctccccatcactgaccctatcacaccaccatcctcagcaaatttgctattcatttgccccctttgctttttgcttattactyttatcctctggtttcttgcagcccagggaaaactctttcaaagttccagtccttaatcttgtaactaccrttaatctaccagtgtttccagggctatagaagagccctgagatctgctggaaagcatgcaatctgcagatcagagtgccctgtctcctttggaggggaagccgatatgctgtcacacaagtctcatccaggtgcactgtggaaatagatacatgataagagaatacaagccagatccagtcctcccagtgaataatggtgcttaatgatgtaagagcttagctgaagcat

SEQ ID NO: 63565 - DNA, 600 bp, Chicken  19866894326696_2
tgaagagttatcagggagttccaatgagtccccattgcagctgctgcccctgctctgtgctggggaaaggatgcatgcctgaactgagcaggggatgggcagctgaaggggcagagcaaggagggatgtcgtgcagggcactgcttgcctccccatcactgaccctatcacaccaccatcctcagcaaatttgctattcatttgccccctttgctttttgcttattactyttatcctctggtttcttgcagcccagggaaaactctttcaaagttccagtccttaatcttgtaactaccrttaatctaccagtgtttccagggctatagaagagccctgagatctgctggaaagcatgcaatctgcagatcagagtgccctgtctcctttggaggggaagccgatatgctgtcacacaagtctcatccaggtgcactgtggaaatagatacatgataagagaatacaagccagatccagtcctcccagtgaataatggtgcttaatgatgtaagagcttagctgaagcatccctgaactcacactgaaaagtgctccacagagctaccagtaactgtatgctggaggtttttgttaatag

SEQ ID NO: 63566 - DNA, 600 bp, Chicken  19866894326696_3
tgaggtgggaaggcgtgtgcttcttgagagcttttcatccttccattcccaagagcaaagcagaggagcaaatgtgcatttgaagtagtgaggttgctttggagccagagctccaacctttccatccctctgctaaaaccactgaaataacagacctcttcgtgcagttctctgcctttttcctagtgcagcaaaacagccagtctgttccttcagctttgtagggtgtgttaaggggtctgagtggcgctgagcagcagtgcaatgtactggattgcatgatgtcgttggtgtaaatgratgtctcacactggcagatctgtaagggagttgcagtgtttgttcagtaggctgtttccattagtgaacccagtcatctgtctgggttaaatgtgcattcgcagtataatataaatgtagagaatggtttctacttcgttatcaagcacacatttacctgtccaaatcctgtggcgtacagtgaagcagcagaaattcagagtagcaaaaattactctggtttgaagtcagtgatgatattttcaagcttggcaacattccatcgcagcgctgctcagctcaggggccactgaccgtttt

SEQ ID NO: 63567 - DNA, 600 bp, Chicken  19866894326697_1
ggctgataaaactctgtaactaactaacaaaactcagaacagtgcagtaaaacttgtctttaaaataaaagaaacaacataaaaattatctagatcttttgatctttttaatatgacctttcctcaccatggaattgctctttaactgcaactgtgcagaggcttgaagcaagagcagatgttgggctgctgtctgcaacagaagttttgtgtcttctcttgcactctatcacaatcaggtctttgcattgcttgtgacaattcattccacagtctgtaaacaaatcaaagtttacacarttcagcayctctgttgtagtatttaagatcaacwctcacactgagtttcctgcccaagaagcagggaaatgtttgtcatctctacatgcattacctgaaacaacacagactaagaaatcagctgtatcctttcgctatatacatctcaaaagccttttcattttgaaaacatccaacagcaacagtcggttgcaacagatttctgactgtagagttgcagagaaagcagatacgtgcatgagatacctgcaaattattctgagtctgttatacagttctcacagggagttgatgttctca

SEQ ID NO: 63568 - DNA, 600 bp, Chicken  19866894326697_2
aaactctgtaactaactaacaaaactcagaacagtgcagtaaaacttgtctttaaaataaaagaaacaacataaaaattatctagatcttttgatctttttaatatgacctttcctcaccatggaattgctctttaactgcaactgtgcagaggcttgaagcaagagcagatgttgggctgctgtctgcaacagaagttttgtgtcttctcttgcactctatcacaatcaggtctttgcattgcttgtgacaattcattccacagtctgtaaacaaatcaaagtttacacarttcagcayctctgttgtagtatttaagatcaacwctcacactgagtttcctgcccaagaagcagggaaatgtttgtcatctctacatgcattacctgaaacaacacagactaagaaatcagctgtatcctttcgctatatacatctcaaaagccttttcattttgaaaacatccaacagcaacagtcggttgcaacagatttctgactgtagagttgcagagaaagcagatacgtgcatgagatacctgcaaattattctgagtctgttatacagttctcacagggagttgatgttctcattcattgg

SEQ ID NO: 63569 - DNA, 600 bp, Chicken  19866894326697_3
cagaacagtgcagtaaaacttgtctttaaaataaaagaaacaacataaaaattatctagatcttttgatctttttaatatgacctttcctcaccatggaattgctctttaactgcaactgtgcagaggcttgaagcaagagcagatgttgggctgctgtctgcaacagaagttttgtgtcttctcttgcactctatcacaatcaggtctttgcattgcttgtgacaattcattccacagtctgtaaacaaatcaaagtttacacarttcagcayctctgttgtagtatttaagatcaacwctcacactgagtttcctgcccaagaagcagggaaatgtttgtcatctctacatgcattacctgaaacaacacagactaagaaatcagctgtatcctttcgctatatacatctcaaaagccttttcattttgaaaacatccaacagcaacagtcggttgcaacagatttctgactgtagagttgcagagaaagcagatacgtgcatgagatacctgcaaattattctgagtctgttatacagttctcacagggagttgatgttctcattcattggaatagaaggggtctgttcctcagccc

SEQ ID NO: 63570 - DNA, 600 bp, Chicken  19866894326700_1
aatgccgagaactgccaacagaactgtatgggttaataggtggtttttagaaagccttttcagacacagcctccaaggttattgtgttatctatggattagttggtaaaatgtcttgccaatgaatataaggaagtttaaagctgttggctttcgcctaccgtaccaagatcagtcttaagatctgttggcagacttaactttcttgatcctttaactgaaacaacagaaaaaggagaaaggcagttgttaatagttaacaaagaaaaaggagcgagggtaaacaacatgccaccttctsgttaacatcatgctgaaagtttgtagcatacatatttttaaatcagcacgtaaaacagaataatggtttaaatattttcatgtayaccattcagaagaackaatgtagctagacaaaaaagtcctggaaaaaacattaatccagctctcaataaatgaatggtgctatacatagctttggctgtgcgctgcaatatcttaccttgagatgactggaatggtaaagaaaaatcacaaatgagattgaggcagatattgcaattgctggttatacagcatatcacaaatatttaaacatctg

SEQ ID NO: 63571 - DNA, 600 bp, Chicken  19866894326700_2
gttatctatggattagttggtaaaatgtcttgccaatgaatataaggaagtttaaagctgttggctttcgcctaccgtaccaagatcagtcttaagatctgttggcagacttaactttcttgatcctttaactgaaacaacagaaaaaggagaaaggcagttgttaatagttaacaaagaaaaaggagcgagggtaaacaacatgccaccttctsgttaacatcatgctgaaagtttgtagcatacatatttttaaatcagcacgtaaaacagaataatggtttaaatattttcatgtayaccattcagaagaackaatgtagctagacaaaaaagtcctggaaaaaacattaatccagctctcaataaatgaatggtgctatacatagctttggctgtgcgctgcaatatcttaccttgagatgactggaatggtaaagaaaaatcacaaatgagattgaggcagatattgcaattgctggttatacagcatatcacaaatatttaaacatctggaaaccaatttatttaagagggcacaatgaaattatgagttctgatgagatcatactcaagatatcatttgaaaaagagagggca

SEQ ID NO: 63572 - DNA, 600 bp, Chicken  19866894326700_3
ttggtaaaatgtcttgccaatgaatataaggaagtttaaagctgttggctttcgcctaccgtaccaagatcagtcttaagatctgttggcagacttaactttcttgatcctttaactgaaacaacagaaaaaggagaaaggcagttgttaatagttaacaaagaaaaaggagcgagggtaaacaacatgccaccttctsgttaacatcatgctgaaagtttgtagcatacatatttttaaatcagcacgtaaaacagaataatggtttaaatattttcatgtayaccattcagaagaackaatgtagctagacaaaaaagtcctggaaaaaacattaatccagctctcaataaatgaatggtgctatacatagctttggctgtgcgctgcaatatcttaccttgagatgactggaatggtaaagaaaaatcacaaatgagattgaggcagatattgcaattgctggttatacagcatatcacaaatatttaaacatctggaaaccaatttatttaagagggcacaatgaaattatgagttctgatgagatcatactcaagatatcatttgaaaaagagagggcatattgtagtggtaatg

SEQ ID NO: 63573 - DNA, 599 bp, Chicken  19866894326701_1
  misc_feature (1)..(185): n is any nucleotide
nnnnnnnnnnnnnnnnnnnnnnnnnnnnnnnnnnnnnnnnnnnnnnnnnnnnnnnnnnnnnnnnnnnnnnnnnnnnnnnnnnnnnnnnnnnnnnnnnnnnnnnnnnnnnnnnnnnnnnnnnnnnnnnnnnnnnnnnnnnnnnnnnnnnnnnnnnnnnnnnnnnnnnnnnnnnnnnnnnnnnnnnnctaacagcccatcagatgggagtgcggcacacaaagagcgagcgcggattggtgccacatgtggctcccacacccgtgttatttaggtcagcatcttctgcgctgcgtcgtggcrgggagcgagaggcattactgctcattagggattaagcccagatttacggctcttcttagcgcggccgtgctggccgccagacgctccccgccaccagatcggaggttttggaggagaacggcgagctaaggggcttagggaggtgaattaatgcaccgggcctccacagctcatccagaataaaaatcccttataaaagtataattttcctcttgttactcatgattgcaaaataataagattgtttaaaaatccaatagaatggatgtcaatattggcaggagacgcaatggcgaagt

SEQ ID NO: 63574 - DNA, 600 bp, Chicken  19866894326701_2
attaatgcaccgggcctccacagctcatccagaataaaaatcccttataaaagtataattttcctcttgttactcatgattgcaaaataataagattgtttaaaaatccaatagaatggatgtcaatattggcaggagacgcaatggcgaagtgcgcgccagccttccgtggcttttcttaattttaattaggataaaatttactaatctgacagggtttacagaagtaggtttgccaagaggccatcaattgatctgaatgatattggcttcctcttcagagccctttgctgactgctwtgcaaagcctgggcttttagctcctttctcagatcgtctccgcagcttttttggcatgtcaaaaggccagatgttttttatttgagagcaaattgacacgttaaattacattgtgcaaacagtaaagccagccatgagtaaacaggcgacgaggattcattgaattttatgggtcgcaataatgtttatgtaatttaacaaatttatgcttcgtgtcagctttaccacaagagttattcgttccaaaaggaaaagcaacttacatcgcagcccccatgttattctgcctgggagccaatc

SEQ ID NO: 63575 - DNA, 600 bp, Chicken  19866894326705_1
tgtattacgccttcctgaatagctgggcctcgtgtttcctattaagagtaggtaatgtgtacacatttctgatgtgtattggcagactataatattatgcctgtatagctgctgacttcagccagtgataaaactgtaacttgaacacagttgaacttatacatttgtctgcactggatttagattactcgttttccttggcatctgtacttgaactatgcgctaaaatgaagaggaaataattgtgctggcttttgtttttctcagtcctcttttttttttttcctcctccagagaaayggaattgagcattcatttttattggaaataaaaacctaccacaggtaaccttgactgcaagtaaaacctcaatgtaagcctttgcaaagtgttactggtgacgtcagtttttatttaaagtttaactgaacagaacaatctacttcctagtgaaaattgaaggtattgtcagattttctttgctgttaatagggccacaagctgtgttagtctttatactatagaagttttgacttttccagtagttgacagatgatgctttcatgttcaaaccatctgtttaatctctgaactttgtta

SEQ ID NO: 63576 - DNA, 600 bp, Chicken  19866894326707_1
gaatgtccagtattttattgaattgaaatccaacacaaacctcctgaaggaggggaccagaactaaaataactgattttagttaacccactttgctgctggccaaatagaagtgaccgcaacagttgtctcataaatacttgaaacaatttcactgtccttgaatttgaatttgaaagaatgtttctcactcataaacactgaggtgttagcaactgcagcaaaaaggaaaagaataaaaatagtaaaactaatacagaatgtagtacctgttaactggggttcataacaaggtttaagrgtttgaatataattctctataatctactgaaactgttgattttctattgaaaattcttagtctacaatgaaaagttttgcatattaatacaggaaaagtaagatttctcccaggcttaattacaaagaaagataactttttctttaagttaaacagtctctgtagcacatgaaaaatgaagaacaatacatattgaactttaacagtaaacaatagcagtgttcaccaaagagtcttcaatctgttgtgttgtcatatactatatgttctggggactgcctgcactgttgtggagcacag

SEQ ID NO: 63577 - DNA, 599 bp, Chicken  19866894326712_1
  misc_feature (1)..(83): n is any nucleotide
nnnnnnnnnnnnnnnnnnnnnnnnnnnnnnnnnnnnnnnnnnnnnnnnnnnnnnnnnnnnnnnnnnnnnnnnnnnnnnnnnnnctgcgtgagttgcctaaatgtgggctggtttccgacaagggtcagtcccttattgctgttgtgacttgcttctgtgcaggacttctcttcaattgctgttttatctccagtaatgagtttgtttcagatgaacttttcttcgcataatttgttgaacaccccaagccacaatagaaacggagctgaaaaacaatccacagagttttaacaggtgatwgtggttatcatgtagtgttatcatggacctgtcagcctgatagtacaaagtaggtacgatcctacaagctcatgtaacgttacatttcttctcccctcaaattactggataaattgcatttctttagttagcagagaataagtcccacacaaaacaatgttttgtcccaatgcagaaatgaaggctcttttacttagaaaagactgaagactatggcgcttctcttactgtgtcacataactgcttttcagtttcacttgcttattctactttgcttctttaccctgtagatttattta

SEQ ID NO: 63578 - DNA, 600 bp, Chicken  19866894326712_2
cccacacaaaacaatgttttgtcccaatgcagaaatgaaggctcttttacttagaaaagactgaagactatggcgcttctcttactgtgtcacataactgcttttcagtttcacttgcttattctactttgcttctttaccctgtagatttatttaagacatctagtgttatatctgattaatgttataataaacacttcctgggcatgtttcagagagtactgagtgaatccaaactggtaactctaaaagctcagagcaaaagtatctgtgaaagagcccaaaagctggtttaagttyrggaagaatctgctgggacyattaaattcagcaataaaggaagtaggagtcagatcttgaaacatattatcacttgcatcaccatagtgcccaggagtgctaggtcctggtgcagagcccaaatgatcccaaccaacagaacacattaaagtcagcctcccaagggtgagataagaaccagcagatttgacacaaggcagggcacgggcaacagcctgctggtctatcaggagctccctccaagtctctgaggagacaacccaaaggtgcctcattgaaaattatcaagtacacagggga

SEQ ID NO: 63579 - DNA, 600 bp, Chicken  19866894326712_3
ccacacaaaacaatgttttgtcccaatgcagaaatgaaggctcttttacttagaaaagactgaagactatggcgcttctcttactgtgtcacataactgcttttcagtttcacttgcttattctactttgcttctttaccctgtagatttatttaagacatctagtgttatatctgattaatgttataataaacacttcctgggcatgtttcagagagtactgagtgaatccaaactggtaactctaaaagctcagagcaaaagtatctgtgaaagagcccaaaagctggtttaagttyrggaagaatctgctgggacyattaaattcagcaataaaggaagtaggagtcagatcttgaaacatattatcacttgcatcaccatagtgcccaggagtgctaggtcctggtgcagagcccaaatgatcccaaccaacagaacacattaaagtcagcctcccaagggtgagataagaaccagcagatttgacacaaggcagggcacgggcaacagcctgctggtctatcaggagctccctccaagtctctgaggagacaacccaaaggtgcctcattgaaaattatcaagtacacaggggaa

SEQ ID NO: 63580 - DNA, 600 bp, Chicken  19866894326712_4
gtcccaatgcagaaatgaaggctcttttacttagaaaagactgaagactatggcgcttctcttactgtgtcacataactgcttttcagtttcacttgcttattctactttgcttctttaccctgtagatttatttaagacatctagtgttatatctgattaatgttataataaacacttcctgggcatgtttcagagagtactgagtgaatccaaactggtaactctaaaagctcagagcaaaagtatctgtgaaagagcccaaaagctggtttaagttyrggaagaatctgctgggacyattaaattcagcaataaaggaagtaggagtcagatcttgaaacatattatcacttgcatcaccatagtgcccaggagtgctaggtcctggtgcagagcccaaatgatcccaaccaacagaacacattaaagtcagcctcccaagggtgagataagaaccagcagatttgacacaaggcagggcacgggcaacagcctgctggtctatcaggagctccctccaagtctctgaggagacaacccaaaggtgcctcattgaaaattatcaagtacacaggggaagaagctgtagtagggaaat

SEQ ID NO: 63581 - DNA, 600 bp, Chicken  19866894326719_1
ttttctttatctttctttttcctcaacagcaccataatattatttcttacggttattatatcagcaaaagttaactttttattctagttagaaataaactgtgaaggaggatggtgccaacttgaacttgctgcccagctttatatcattagcaaccctgctggttgggtattctgtcccttctctgacgtcactgatgaagattttgagcaagaccggacctgatatcaatctctggggaacactgctagctgtgggccttcaaccagactctgcactgcttttaacaattctctgaaytctgcagtcagacattttgtcccattttgccagctgtacacttagccagtaaaagtggggcagaatctgatactccaggatttgacctaaagtactgaattgcttcagtaataggctgtatacactggagcacaaaatttgcatgccacaagactaggatggctgcttattgagtaacaagcctccagtagcatgtgactgggcttgataatcttgacggtcttttgcaacctaaatgatttttagattgtccctaagacttcagatcaaaaattctcaaattcttggtattctcagtgt

SEQ ID NO: 63582 - DNA, 600 bp, Chicken  19866894326720_1
ccactccgggaagcgctggtggtaattcaggaggtgttgtttttccagagcctatgtctgctctgctttatttttaccctcaagttctctgctattgcttggacacatcactgctttggtcttcacagctgggaagtcactcagaatcaaagtgccctgtagtcttgtggagagaaggaatgagggatattttccaaagaaggtcaaaggaccacaatcagtgctatcatgtatatgttttttgtttgtttgtttgtttgttttccatgggacaagcagtgcattgacaattactctgcyctctcttgccatgccccaggtgaccartggaggatatattgagagctgcggagctgataagggatttatctccaaggtgcacgctttcatttcataatcacacacagatgtttttgaagctattcccctcacagatcccttagcaaaacagttctattctagaaagtrtaactacattggaagctccccaggtactgggaggttcatattaatgccattgagagaggaaactaaggagaagtgagaaaacatttttactgggggaaaagaagttgaagttgtttctcagttgcaggcagc

SEQ ID NO: 63583 - DNA, 600 bp, Chicken  19866894326720_2
caggaggtgttgtttttccagagcctatgtctgctctgctttatttttaccctcaagttctctgctattgcttggacacatcactgctttggtcttcacagctgggaagtcactcagaatcaaagtgccctgtagtcttgtggagagaaggaatgagggatattttccaaagaaggtcaaaggaccacaatcagtgctatcatgtatatgttttttgtttgtttgtttgtttgttttccatgggacaagcagtgcattgacaattactctgcyctctcttgccatgccccaggtgaccartggaggatatattgagagctgcggagctgataagggatttatctccaaggtgcacgctttcatttcataatcacacacagatgtttttgaagctattcccctcacagatcccttagcaaaacagttctattctagaaagtrtaactacattggaagctccccaggtactgggaggttcatattaatgccattgagagaggaaactaaggagaagtgagaaaacatttttactgggggaaaagaagttgaagttgtttctcagttgcaggcagcacagatcaatgtttgttgttctccagc

SEQ ID NO: 63584 - DNA, 600 bp, Chicken  19866894326720_3
ggagagaaggaatgagggatattttccaaagaaggtcaaaggaccacaatcagtgctatcatgtatatgttttttgtttgtttgtttgtttgttttccatgggacaagcagtgcattgacaattactctgcyctctcttgccatgccccaggtgaccartggaggatatattgagagctgcggagctgataagggatttatctccaaggtgcacgctttcatttcataatcacacacagatgtttttgaagctattcccctcacagatcccttagcaaaacagttctattctagaaagtrtaactacattggaagctccccaggtactgggaggttcatattaatgccattgagagaggaaactaaggagaagtgagaaaacatttttactgggggaaaagaagttgaagttgtttctcagttgcaggcagcacagatcaatgtttgttgttctccagctctcccagcatattctgagacaaattttcatatttcaaaacagagatgatttcctgtgacattcactttcattgcttcaagtgttttacataaaatattgacacagaaattcggacccacttaagtacctcctayggtatt

SEQ ID NO: 63585 - DNA, 600 bp, Chicken  19866894326720_4
aaagtrtaactacattggaagctccccaggtactgggaggttcatattaatgccattgagagaggaaactaaggagaagtgagaaaacatttttactgggggaaaagaagttgaagttgtttctcagttgcaggcagcacagatcaatgtttgttgttctccagctctcccagcatattctgagacaaattttcatatttcaaaacagagatgatttcctgtgacattcactttcattgcttcaagtgttttacataaaatattgacacagaaattcggacccacttaagtacctcctayggtattccaaattcatttctgctagatagttaattttgtttagaagagaaggatgattctcagtggaaatgtgtaaaaaatattttcagcagtactaccagaaagtgctgagaaaagttcaatggagacatgaccatgggagatgccttgctgcaacgatgcactgtggaacttagttgatggaaaggaagcctgaagggtgagataggagcatgaacctacagtactttaaaataagtaatcaaaacctttggactgactctgcctgcaataccaggtgttacaccaggctcattccag

SEQ ID NO: 63586 - DNA, 600 bp, Chicken  19866894326723_1
gatttgtagcatttctgacatttaaacaaataattacacaaaagcaacgtttagagaaacaagtcataacacaaggagaggaaaaagcactccagagcacttcgcacagttaaagcagggggtctattcttctatcagcatgcaagaaatttatgcaattaaattataatcattaatgaaacttgcctacaaactcagcccatacataagagaaaaaaagcacagctacttaagctgcaatattactgtaagaatgcaagggcaatggaaggtgctctgctaccctgttctatgggatgrggagatgctgcagcctggttttttttgcttatcagtccactgacccctcaaaatactcaaggcagtttactttctttctatttgaaacttccaagggaaacaatttcctcctctaggagccttcttcaatccgagtgcctctgtcctgtgcccacacacctaacacagcactcagggatgtaggcctattgggtacaatgcaagttgtgtctgaaatctgcagaygttagcccrttcagtgagcatcagttaagaaagcctctcctgagcgcttgccatctcctgctggttaattaaagc

SEQ ID NO: 63587 - DNA, 600 bp, Chicken  19866894326723_2
ctacttaagctgcaatattactgtaagaatgcaagggcaatggaaggtgctctgctaccctgttctatgggatgrggagatgctgcagcctggttttttttgcttatcagtccactgacccctcaaaatactcaaggcagtttactttctttctatttgaaacttccaagggaaacaatttcctcctctaggagccttcttcaatccgagtgcctctgtcctgtgcccacacacctaacacagcactcagggatgtaggcctattgggtacaatgcaagttgtgtctgaaatctgcagaygttagcccrttcagtgagcatcagttaagaaagcctctcctgagcgcttgccatctcctgctggttaattaaagcacatgcagatgcaacacccttgattcctgggagtgctcagcctggctgcctgccctcacctgagctggtggagcatcagctgctgaaatgtcactgcctgcagcacagcagtcccatgtcacccagcagcgccttccagcactttgctgctccctgcagtggttcagcagagagctcacttgccgggggctggggcagagcaatgcatgggcagctgggagcctt

SEQ ID NO: 63588 - DNA, 600 bp, Chicken  19866894326723_3
ctgcaatattactgtaagaatgcaagggcaatggaaggtgctctgctaccctgttctatgggatgrggagatgctgcagcctggttttttttgcttatcagtccactgacccctcaaaatactcaaggcagtttactttctttctatttgaaacttccaagggaaacaatttcctcctctaggagccttcttcaatccgagtgcctctgtcctgtgcccacacacctaacacagcactcagggatgtaggcctattgggtacaatgcaagttgtgtctgaaatctgcagaygttagcccrttcagtgagcatcagttaagaaagcctctcctgagcgcttgccatctcctgctggttaattaaagcacatgcagatgcaacacccttgattcctgggagtgctcagcctggctgcctgccctcacctgagctggtggagcatcagctgctgaaatgtcactgcctgcagcacagcagtcccatgtcacccagcagcgccttccagcactttgctgctccctgcagtggttcagcagagagctcacttgccgggggctggggcagagcaatgcatgggcagctgggagccttcacttcaag

SEQ ID NO: 63589 - DNA, 600 bp, Chicken  19866894326726_1
tgaactggttttctttaactggtacaaatagtaaggccttcttccagtaacaaggagggttctaaataaatgcctctaccttaaacagaaagaaagagagaaaaacaaagtgagtctaaattgtacctatatttaaaattagtgggatcattcagatacacaacaaaacagtaagaagtccccagtgtttactgtaatattgagttgagacctgaccttttcagaaattcattgtttgaattgaatgtaaaattcagacattggtacttatgtcctgtgtttgtccctagagtgcattcraagacacaccaggattttgtgcttagatgttaatataaagaggtgaatggactacaataatcagaatggagaataaataaagagcaagtcttccctgaaacctcattggtttacataatgctcccgtctggctttaggtaatccactcttacctaatctaaagaggtcatataatttcttccagttaactcctactctgaaatccgcagtctgcttttaaataaaggatatattccaggaatatgttcacttttgatttaaaggctttggaaatgaaggacatagtactttcctggacag

SEQ ID NO: 63590 - DNA, 599 bp, Chicken  19866894326739_1
  misc_feature (1)..(60): n is any nucleotide
nnnnnnnnnnnnnnnnnnnnnnnnnnnnnnnnnnnnnnnnnnnnnnnnnnnnnnnnnnnnctgcctttaacaaaatctgagagtcttttttgaaatggctttgaatggttgacataaatcttacccaaaagtaagaaagtaatttttacatgaaagcatacaaccgcaacagagaacttcaaaaactaggacgaaatgtagtacaaacctttcatttctaattgcacaactcatttctttaagttagctttgcctaaataattcaaacccatacaaagtgcctacacacagtttcttaamaactgatgcttatttctgctacaatttgtaagaaaagagttaacagttaccctgttttaaatatttgagaggttcttatacataacagcagagctaactctataaccaaracagacagaaatttatctattmtttgtaaaggacttcttaattatggttttgtgcccaagctcccttcttcccttccacaacccaggtagctgagcaattaggttacctcagtcacactacctggaaataaggacatcaagaagcagctatgccactatygtgtattattgtgtttatgacacgcttgg

SEQ ID NO: 63591 - DNA, 600 bp, Chicken  19866894326739_2
gacataaatcttacccaaaagtaagaaagtaatttttacatgaaagcatacaaccgcaacagagaacttcaaaaactaggacgaaatgtagtacaaacctttcatttctaattgcacaactcatttctttaagttagctttgcctaaataattcaaacccatacaaagtgcctacacacagtttcttaamaactgatgcttatttctgctacaatttgtaagaaaagagttaacagttaccctgttttaaatatttgagaggttcttatacataacagcagagctaactctataaccaaracagacagaaatttatctattmtttgtaaaggacttcttaattatggttttgtgcccaagctcccttcttcccttccacaacccaggtagctgagcaattaggttacctcagtcacactacctggaaataaggacatcaagaagcagctatgccactatygtgtattattgtgtttatgacacgcttggtgaaaagagaaataaataccagaagatctttatctttctgtagttataatttgcatttttctaaaaccagtaataaatcggatgtttcaaatctcaaaagagatacagatg

SEQ ID NO: 63592 - DNA, 600 bp, Chicken  19866894326739_3
aagaaagtaatttttacatgaaagcatacaaccgcaacagagaacttcaaaaactaggacgaaatgtagtacaaacctttcatttctaattgcacaactcatttctttaagttagctttgcctaaataattcaaacccatacaaagtgcctacacacagtttcttaamaactgatgcttatttctgctacaatttgtaagaaaagagttaacagttaccctgttttaaatatttgagaggttcttatacataacagcagagctaactctataaccaaracagacagaaatttatctattmtttgtaaaggacttcttaattatggttttgtgcccaagctcccttcttcccttccacaacccaggtagctgagcaattaggttacctcagtcacactacctggaaataaggacatcaagaagcagctatgccactatygtgtattattgtgtttatgacacgcttggtgaaaagagaaataaataccagaagatctttatctttctgtagttataatttgcatttttctaaaaccagtaataaatcggatgtttcaaatctcaaaagagatacagatgtgctataaatgctaaaaaccag

SEQ ID NO: 63593 - DNA, 600 bp, Chicken  19866894326739_4
atacaaagtgcctacacacagtttcttaamaactgatgcttatttctgctacaatttgtaagaaaagagttaacagttaccctgttttaaatatttgagaggttcttatacataacagcagagctaactctataaccaaracagacagaaatttatctattmtttgtaaaggacttcttaattatggttttgtgcccaagctcccttcttcccttccacaacccaggtagctgagcaattaggttacctcagtcacactacctggaaataaggacatcaagaagcagctatgccactatygtgtattattgtgtttatgacacgcttggtgaaaagagaaataaataccagaagatctttatctttctgtagttataatttgcatttttctaaaaccagtaataaatcggatgtttcaaatctcaaaagagatacagatgtgctataaatgctaaaaaccagacaataaagataaccatctaccaactgaatcttacatttttgtccacttgtatcactggatgtaaaaactgatagaatgcatcacctcaagccaacaacatttttccagatggggtttgtgatacatgctctaaaaca

SEQ ID NO: 63594 - DNA, 600 bp, Chicken  19866894326751_1
tactgcactgcattgctgggttaattagctcccggccctgttctgccaccattccttccatttcgtgcaaacatttgtcccagatctcactacctgagcagcctcatgggctggcaaagctgcccaaaagcaggtttagtcaatacatcgttatggactgtaacctccccaaggcagggaccttttcctctggtcagcagagcacatggcatgtgctcagctctataaaaaacagtgcactgctttactctttcatttatgtaataaagagccagcacatctgcatgatgttaaacgccktttttttttccacagcttttatgttgcctccacaatgcaagcggtgtgtgaaaggttatctagcttcctcttgctcctacgtgccaacgcttttgcctgcaaagctctcccatgctgaattcctcaacttgctggatctgcttcacacagttatccgtacagaaacaccgtcaaacagcatcctccttcccaaacagcagagagcakcctgctctagtaaactgctgagacacatcttgatgcactggaacaggctgcccaaggaggctgtggatgccccatccctgcaggcattcaagg

SEQ ID NO: 63595 - DNA, 600 bp, Chicken  19866894326751_2
ggcatgtgctcagctctataaaaaacagtgcactgctttactctttcatttatgtaataaagagccagcacatctgcatgatgttaaacgccktttttttttccacagcttttatgttgcctccacaatgcaagcggtgtgtgaaaggttatctagcttcctcttgctcctacgtgccaacgcttttgcctgcaaagctctcccatgctgaattcctcaacttgctggatctgcttcacacagttatccgtacagaaacaccgtcaaacagcatcctccttcccaaacagcagagagcakcctgctctagtaaactgctgagacacatcttgatgcactggaacaggctgcccaaggaggctgtggatgccccatccctgcaggcattcaaggccaggctgaatgtggctctgggcagcctgggctgctggttgacacccctgcacatagcagggggttggaactgatgatcattgtggtccttttcaacccaggccrttctrtgatcttagttctctccaccctgacctttgtattcagctctgagcaagcacatttgaagacaacccctgcgagttacaggcagtgaaaaaccccgca

SEQ ID NO: 63596 - DNA, 600 bp, Chicken  19866894326751_3
tctcccatgctgaattcctcaacttgctggatctgcttcacacagttatccgtacagaaacaccgtcaaacagcatcctccttcccaaacagcagagagcakcctgctctagtaaactgctgagacacatcttgatgcactggaacaggctgcccaaggaggctgtggatgccccatccctgcaggcattcaaggccaggctgaatgtggctctgggcagcctgggctgctggttgacacccctgcacatagcagggggttggaactgatgatcattgtggtccttttcaacccaggccrttctrtgatcttagttctctccaccctgacctttgtattcagctctgagcaagcacatttgaagacaacccctgcgagttacaggcagtgaaaaaccccgcataactccttggcaaatccaacagcaatctgcaccctcagctgggacacgaggcactactgaagacgttgctttgagaacagctgaggccttaagaaaaagataaataacaacccattatgttccttcccatcagcacaatcaggccgacagaataacaagaggccactgtatgcaattcgctgccgcgcacacacaca

SEQ ID NO: 63597 - DNA, 600 bp, Chicken  19866894326751_4
catgctgaattcctcaacttgctggatctgcttcacacagttatccgtacagaaacaccgtcaaacagcatcctccttcccaaacagcagagagcakcctgctctagtaaactgctgagacacatcttgatgcactggaacaggctgcccaaggaggctgtggatgccccatccctgcaggcattcaaggccaggctgaatgtggctctgggcagcctgggctgctggttgacacccctgcacatagcagggggttggaactgatgatcattgtggtccttttcaacccaggccrttctrtgatcttagttctctccaccctgacctttgtattcagctctgagcaagcacatttgaagacaacccctgcgagttacaggcagtgaaaaaccccgcataactccttggcaaatccaacagcaatctgcaccctcagctgggacacgaggcactactgaagacgttgctttgagaacagctgaggccttaagaaaaagataaataacaacccattatgttccttcccatcagcacaatcaggccgacagaataacaagaggccactgtatgcaattcgctgccgcgcacacacacactgag

SEQ ID NO: 63598 - DNA, 553 bp, Chicken  19866894326751_5
acactgagagggccttattcacagcaacctctcagggcaggccttcccagcacaatatccacacgttttgtgccatttttgatgaactcggccaggctgtgaggagcagcagctgctgcctgcctggcgatcccagggacgaacagcagctcccagccacgcaccccaccgaccaccaaacccagcacagccaacacgctgtgcccacagggctgggaacgaggccttaagaagataaatatttagcaacgaacgctgtgggaggaaccttgagaagggaaaggctgcttctatctccaygccagccggcaaacccgacagagcggcgcaaggggaagatttccacgctggacagcaggcccagcgctgggtgcaccaccgccaggccggggcctgcatcccaccgccacagcgcggccaccgcgggctgccaagaatcgccatccaggctttaaatcatcatcatcatcattaaataaacagaggcagaaaacgtctccacggacccgcgagagcccctcaggcccagcctcagcttcaggcccaggcccag

SEQ ID NO: 63599 - DNA, 568 bp, Chicken  19866894326769_1
tatatttgtgtgtgcaaatgtatgagctttctccattgtgaatgtgtgtccttgaagcgccatatcaagccagaaggaactgtcaggaaattctgataatatcttaaattgtacctgtggaaatcagggtttcttggtctccacagcctcagtgcttgttgcttcatggctcttactgcaccttatctgtcactctgtaagtgttttggctgctgaacttcaaaatttgtcagtagccaaaagttcaagctaattaagaattaggtacatagatctaatagtcagccctttggtggatawaactttggtggatataacttggtgctgccaaattcaggattttgtaacgcatctgttctcagtaggtgtcaggccctaagtgcaacccctcccctatccgaaaggtttggctgcctctactcaaagccagatttgatgtggtatagctgtgtgacatgggatcagagcactctgaaacttctgaaaacctcatttttccttaggtgctgcttttaacctccatctcattgcactttcttgagcttttttgcctcccctgggccattta

SEQ ID NO: 63600 - DNA, 600 bp, Chicken  19866894326773_1
aaagtactgggtgacattcatacatgttcgatacaggggagggcagagggcagtatttttatcctgttattcccttttatcaatctcagttattaagcaagtggtgcaaattagcattaaccttgacttaagcatctaagagcaatttcccattaggctaattatgtatatcccactgtgtttcttgcagggtctgtgtctcatgggtgcatgccatactgcccctttgggatacagtgcagtgagtaggaaaagaaatgtgtttgaacttggcataactgcagtaaacataacgttacraytggaactttctyggattgctcttttctctcttgctgtcataggccaatatcttggttctctgctgtcagttgcttagaagcaatgttactgagaaggaggaatcacttctgcctcagtttcgtgcatgtattgagactgaaaaaactacagctggactaaatgctgtaaccacagctcactttatgtagctctttttgccgtggacataactgcccactgaaagaaaatgaagatgcatcactttcatttttttttaaggtcttgctgtatccatgaacagaaagcagtaacaaaggt

SEQ ID NO: 63601 - DNA, 600 bp, Chicken  19866894326773_2
agtactgggtgacattcatacatgttcgatacaggggagggcagagggcagtatttttatcctgttattcccttttatcaatctcagttattaagcaagtggtgcaaattagcattaaccttgacttaagcatctaagagcaatttcccattaggctaattatgtatatcccactgtgtttcttgcagggtctgtgtctcatgggtgcatgccatactgcccctttgggatacagtgcagtgagtaggaaaagaaatgtgtttgaacttggcataactgcagtaaacataacgttacraytggaactttctyggattgctcttttctctcttgctgtcataggccaatatcttggttctctgctgtcagttgcttagaagcaatgttactgagaaggaggaatcacttctgcctcagtttcgtgcatgtattgagactgaaaaaactacagctggactaaatgctgtaaccacagctcactttatgtagctctttttgccgtggacataactgcccactgaaagaaaatgaagatgcatcactttcatttttttttaaggtcttgctgtatccatgaacagaaagcagtaacaaaggtct

SEQ ID NO: 63602 - DNA, 600 bp, Chicken  19866894326773_3
cattcatacatgttcgatacaggggagggcagagggcagtatttttatcctgttattcccttttatcaatctcagttattaagcaagtggtgcaaattagcattaaccttgacttaagcatctaagagcaatttcccattaggctaattatgtatatcccactgtgtttcttgcagggtctgtgtctcatgggtgcatgccatactgcccctttgggatacagtgcagtgagtaggaaaagaaatgtgtttgaacttggcataactgcagtaaacataacgttacraytggaactttctyggattgctcttttctctcttgctgtcataggccaatatcttggttctctgctgtcagttgcttagaagcaatgttactgagaaggaggaatcacttctgcctcagtttcgtgcatgtattgagactgaaaaaactacagctggactaaatgctgtaaccacagctcactttatgtagctctttttgccgtggacataactgcccactgaaagaaaatgaagatgcatcactttcatttttttttaaggtcttgctgtatccatgaacagaaagcagtaacaaaggtctgtgctttatctg

SEQ ID NO: 63603 - DNA, 600 bp, Chicken  19866894326773_4
tgttaccagtggaatgtaaatattttcttggtttttaatccttagtggttaatttatagctcctgaaattatatatctgttctgtctccttctgtttgctttcagggagaaactggagctgcctcatcagtgccatttccataccgtgtctggtctctggagaaggacagcacggatgaatttgtgcaacaagccaaccagccatagaagattatatcttacaagaaaatccacttgtggtgacttgtaagctacgttggccatccctcacccacagtggtaagcagtcttctgagatcygcgagaatctttttggtatacctggaaattagtctgattatttaagtttctaaagacagaattgagaatccaccttctgtggactaaagaatctgtttagtgcttgtttctcgtcttggctgttctactacagtgagctttaccacttgaattcactgattgaagttttaagccgaataaagcctctatttattttatttctcttttcaaaatctgttaccaaaacgcagagtattttgcagttcaaaaactgctctaattaaaccaatctatgccatcctcctcacaggactgtagtgg

SEQ ID NO: 63604 - DNA, 600 bp, Chicken  19866894326775_1
atggaaatatagcaagaataggaagtggacagcaaagaaatttccaggccaagtccagctatggaaagagcagagctgtttgaattacatagctcttcgtattttcccaaacttcagcatttttttagcaacagaaactccagcaggaaatgctttgggggaaacaattcactaaaacatttattttgtaggaatatatgttttcctgttctgtaaagaggtgttcctgatttccatgagttctgctaaagaggtgtcagcagagcagaaagaggtgcagggatctgtccctcaccctgmcagccatcactgaccccctcacagccacctgcaggctgctgagcacccctttgtcctgcagcagcactgcctttctcatcatccttcagaggtcatgggagaaaggcacaggtttgcctctgggctccattgtgcagtgaagaaattcacactacctcctggatggaaatgcactgaacagtctatttttcctgaaatraatcagctcacttctactgttggttcttaggagcttcaaaaagctttctaggtaacttaagtcaatacctcaatcttacttgttctcttgacctggatgcc

SEQ ID NO: 63605 - DNA, 600 bp, Chicken  19866894326775_2
gttttcctgttctgtaaagaggtgttcctgatttccatgagttctgctaaagaggtgtcagcagagcagaaagaggtgcagggatctgtccctcaccctgmcagccatcactgaccccctcacagccacctgcaggctgctgagcacccctttgtcctgcagcagcactgcctttctcatcatccttcagaggtcatgggagaaaggcacaggtttgcctctgggctccattgtgcagtgaagaaattcacactacctcctggatggaaatgcactgaacagtctatttttcctgaaatraatcagctcacttctactgttggttcttaggagcttcaaaaagctttctaggtaacttaagtcaatacctcaatcttacttgttctcttgacctggatgccaaacttttgtactatctgtctcttgattttatcccccaaatatctccratgcactgccagaagcaaatgtcagctagttcttagattcacttaaggagcctgccattttctaggtagtcttacatcagagacagggctcagctcataacaaattgcacaccttttgttgctgttgcttctttttctctaaaaagattca

SEQ ID NO: 63606 - DNA, 470 bp, Chicken  19866894326775_3
ctttgtcctgcagcagcactgcctttctcatcatccttcagaggtcatgggagaaaggcacaggtttgcctctgggctccattgtgcagtgaagaaattcacactacctcctggatggaaatgcactgaacagtctatttttcctgaaatraatcagctcacttctactgttggttcttaggagcttcaaaaagctttctaggtaacttaagtcaatacctcaatcttacttgttctcttgacctggatgccaaacttttgtactatctgtctcttgattttatcccccaaatatctccratgcactgccagaagcaaatgtcagctagttcttagattcacttaaggagcctgccattttctaggtagtcttacatcagagacagggctcagctcataacaaattgcacaccttttgttgctgttgcttctttttctctaaaaagattcagggcaatgcaataagccag

SEQ ID NO: 63607 - DNA, 600 bp, Chicken  19866894326778_1
ttggatttgcttatatcaaagctgactttggcagaggtactcccaaagagccatgtaataggcttccttatcctttcctctctgtggggtttgagatgctttttaagccgctgcatgacttatgtgcccctgaatgcaagatacagaactaattaaatatttttcctgcttcggaatacaaactgttcattccttctgcaaggaatggagggaaaagaaagtttgaaaaagaattacactgttcttaaggtaggtactgctgtctgtttaaagggagattcctcttttccagtaatccartgtcagtaaattctcagggacaattagaacttggtagcaaaacaattcatgcacgcatctccaggataaaacaactgaatatgtytggaggaaagygtgcacggagacgagcactgcacacctctaaataatctgctccttagacaggacagctaaccactatggagcctcgtttttaacagattgcttgacacctgaaatcagatggatcagctcaaagttcctcaagtgctaaagaagaaacagctgaaaaggtctactctgcctgaactgtatgcctttacattacccatatatgtc

SEQ ID NO: 63608 - DNA, 600 bp, Chicken  19866894326778_2
ggggtttgagatgctttttaagccgctgcatgacttatgtgcccctgaatgcaagatacagaactaattaaatatttttcctgcttcggaatacaaactgttcattccttctgcaaggaatggagggaaaagaaagtttgaaaaagaattacactgttcttaaggtaggtactgctgtctgtttaaagggagattcctcttttccagtaatccartgtcagtaaattctcagggacaattagaacttggtagcaaaacaattcatgcacgcatctccaggataaaacaactgaatatgtytggaggaaagygtgcacggagacgagcactgcacacctctaaataatctgctccttagacaggacagctaaccactatggagcctcgtttttaacagattgcttgacacctgaaatcagatggatcagctcaaagttcctcaagtgctaaagaagaaacagctgaaaaggtctactctgcctgaactgtatgcctttacattacccatatatgtctcaaatctgtttttataattcagcagggttcgtatagcagaataagtacacagcacagcctgtgctgatggccttcacgtgtaga

SEQ ID NO: 63609 - DNA, 600 bp, Chicken  19866894326778_3
tgctttttaagccgctgcatgacttatgtgcccctgaatgcaagatacagaactaattaaatatttttcctgcttcggaatacaaactgttcattccttctgcaaggaatggagggaaaagaaagtttgaaaaagaattacactgttcttaaggtaggtactgctgtctgtttaaagggagattcctcttttccagtaatccartgtcagtaaattctcagggacaattagaacttggtagcaaaacaattcatgcacgcatctccaggataaaacaactgaatatgtytggaggaaagygtgcacggagacgagcactgcacacctctaaataatctgctccttagacaggacagctaaccactatggagcctcgtttttaacagattgcttgacacctgaaatcagatggatcagctcaaagttcctcaagtgctaaagaagaaacagctgaaaaggtctactctgcctgaactgtatgcctttacattacccatatatgtctcaaatctgtttttataattcagcagggttcgtatagcagaataagtacacagcacagcctgtgctgatggccttcacgtgtagaaaatggcttag

SEQ ID NO: 63610 - DNA, 600 bp, Chicken  19866894326782_1
ttttctgagtgacacagcgcagcgtgccgcagggccgcagcttgaggtattgctgttgacatcagtaagatcagcattagacccccggggagtgctgcagcacagtctcccacgtggcttcaaaagaaaggaaagaagagaaaaaactcaatctctttaaggccaggcgagggggccacacatgttttaatgatagatactttttaaagcttgtttgcgtttgggtgataatgtactttagtatagctggggaaatgagaaacttcacacatggcatctggaaatccttgtggctcactrccctccttgacagccgtaatgtggctataaatttcccccaacagaaaaacatataactgcattggctgtaccagaaacagcctttcattttcttttagatgaatgtgttgttttacatctcagccttttaatagctccatataaacatttgtgagcctctgaggtaagtaagtatatttttcctycttggtcttatgtcttatagaaaatcagcctgtggctcaatttaccatccagagtgggaggtgggcactgatacgttcctgtgcatctcacaacagatgacagggacgtcgctct

SEQ ID NO: 63611 - DNA, 600 bp, Chicken  19866894326782_2
tttaatgatagatactttttaaagcttgtttgcgtttgggtgataatgtactttagtatagctggggaaatgagaaacttcacacatggcatctggaaatccttgtggctcactrccctccttgacagccgtaatgtggctataaatttcccccaacagaaaaacatataactgcattggctgtaccagaaacagcctttcattttcttttagatgaatgtgttgttttacatctcagccttttaatagctccatataaacatttgtgagcctctgaggtaagtaagtatatttttcctycttggtcttatgtcttatagaaaatcagcctgtggctcaatttaccatccagagtgggaggtgggcactgatacgttcctgtgcatctcacaacagatgacagggacgtcgctcttgtgagtgctcctgctaagtctctgcagcatcagtttgatcacttcatgcatatgttatcatagctctgcttggcgtcaggcagagcttctttggcaatctgatggccatttctttacgtctttgaacgtcaaaaacctgttgtgtgctaaaatgctggtgctggtgcctttgccagaatgaact

SEQ ID NO: 63612 - DNA, 600 bp, Chicken  19866894326783_1
ggtgacaaagccgctcctcccagcgaggcaaaaggagcacatgcatccttccatgccacccatccactcaccacaatctatgaaccggatatctgctgctgacttgtgggagcccagcacgttgctgcccatcaggaggaggacgatgccacgtaacaacctgtgggcttcgctcagagctgtctcgggagtcttccaccctgcatgagagcagctgtgggcattggcaccaattacctggcacaaaacccagctctcccttcccagtcccaaaggggtcggaggaacctctgagctctstgcttgcccagggttttgcccacagcacggtgcttctggggagcgtttccagcacctcggaggctcaccctgcgtgaaagatgtactgcctgaactctggcgagaggtggctgggcggcaggctcaggtaggttggcggtcagttgcaggacttgtgcttggagcatgtaccagaccttggcagtcttctgcagagccgggttctggagcacctccagcaagagggcagtgccatctttaatctgcaggaggcagcagaaggagaaagtcactatttgcagatcagggagcctccatggc

SEQ ID NO: 63613 - DNA, 600 bp, Chicken  19866894326791_1
atctctctttcacacataatgatcaaggatctggagggcatggattcgtagcagccaaaatgcacatgaacttataagaaaatagatttctaaagcagaacaagaattttatttaaagtaattggagagtgacagttattttggttttcagcagatcagtgtagtactcttaataagtgacatctgtttaaaaactagtatacagtagaaaaatccagctcatcaaaaattgaaaataagagaacagatgaggagtgatactgctgacctcatggcggctgcagctcctcacagggagcsgaggggcagcgctgagctctgctctgtatgacagcgacagggcccgagggaaaggcatggagctgtgtcaggggaggggcagtgggggttggggacagggtctgcaccagaggacggtgggcatggaatgggctgcccagggctgtgtcatagcaccaagctgctggagttcaagaagtgtttggacagtggtctcagacataatgtttgaattttgggtggtactgtgtggagccaggagatgaacttgatgatccccacgggtctcttccaactcagaatattctgatttcatgcttt

SEQ ID NO: 63614 - DNA, 600 bp, Chicken  19866894326793_1
agcacgagtgggggctcagaaaggctcagaaagcgctgggagggggggttgtaaccgtggagaaaatcctcgcagcccttagaggatgccacgtgctgctctgctctgcatcaccacagcgggactttacgggacgttgcttacgtgcatggcagcagaaggcagagttcaatggggcatggtgcctcttggtgtctggggaggcagaaagccccagcgttcctcctggagctccaaaatgttgcatgcctttaaaatgcaccccattagagccccaacaccatgggctttttgcccctrtcaaaagtattgccttgctgtcagcaactttgggactccccaygggcagcatggggacatcccagctaacccagtgcgagttgtttatggggttaaagagagaagcaatttgacacgcctgtggtaatcgattcctccgctcaattagccttgcagatttaaggaaaagatgcaacttgcctctagagcaaaaatcatcagcgtcactggtgcagatgcttatgaagggccatcctgcatgtcccagctctgtcctctggttcctctttagcagactgaggggtctgcaggacaaggggc

SEQ ID NO: 63615 - DNA, 600 bp, Chicken  19866894326793_2
gggggttgtaaccgtggagaaaatcctcgcagcccttagaggatgccacgtgctgctctgctctgcatcaccacagcgggactttacgggacgttgcttacgtgcatggcagcagaaggcagagttcaatggggcatggtgcctcttggtgtctggggaggcagaaagccccagcgttcctcctggagctccaaaatgttgcatgcctttaaaatgcaccccattagagccccaacaccatgggctttttgcccctrtcaaaagtattgccttgctgtcagcaactttgggactccccaygggcagcatggggacatcccagctaacccagtgcgagttgtttatggggttaaagagagaagcaatttgacacgcctgtggtaatcgattcctccgctcaattagccttgcagatttaaggaaaagatgcaacttgcctctagagcaaaaatcatcagcgtcactggtgcagatgcttatgaagggccatcctgcatgtcccagctctgtcctctggttcctctttagcagactgaggggtctgcaggacaaggggccaagacaccacggtgtccccagcagcaacagcacagtccaggg

SEQ ID NO: 63616 - DNA, 544 bp, Chicken  19866894326796_1
gtaggagcaatctgtcctctattcactggtggaacaatttacagtcaagtgtagcaaaatcttctagcagaacaataaataaaactcctccaacctgatccaaatctggaattatcatagtaacagtctactacttctcagtaattactccaaacatggaactaatattagcctgcttgggaatgtgttgcaaaacctgactaccactgaagctcattcactaaggcattcaaacagtttcctggaacacaaagattcagaaattaacaaccgctcattcctctgaaaaaaaaaaaaaaraaagaaagaaagaaagaaaaaaaagccccacatctgcttcattctaagaacaatgatatttgcatttgaaattgtagttaaatggaaactgtaattttctggcataaaatccatagctaaagatattgcaattcaatgtgcattccttttatagattctagttgtgcttgcaatctatcttcctgttttgtatgaaattgtgaaattttttacagcatctaagtggtagtaagtctcataatga

SEQ ID NO: 63617 - DNA, 600 bp, Chicken  19866894326798_1
tggcagaggcattgagtaatgctgaaagaaatcagtgacaggagggctgtcttggctggggagcattgaggtgggaagccccggagccctccatgtactgactattctcagaggagcagtgctccacacgtatcaccatgtggccgtaagtacacacactcaacagcttccaaggaaatggcaaaagtatggcagtctgttccccaagtgcagctggatggatttgttaatgacagtaagggcctctggcttaggtacaggggtcttccagttgtcagaaaagctgaagcatcttaaaaraacagaggggcacaaggcttgctcaagagagcgttagccacagagggcagtcatggccccgtgccatgrtgtggagacacagcccttcactgtactgccaaggtctggaggctcacagtgcctcagtgtatttgstaagatgagaacttgaaaggaattacagattaccactactgaagttctaaagctgtgttcattctttttctccctcttctgtggcaaatgctggtgtacgcatttgaagtgcttgtatcagcgcatattgacccagttctcaagcgttattaaaatcctggaagt

SEQ ID NO: 63618 - DNA, 600 bp, Chicken  19866894326798_2
ggtgggaagccccggagccctccatgtactgactattctcagaggagcagtgctccacacgtatcaccatgtggccgtaagtacacacactcaacagcttccaaggaaatggcaaaagtatggcagtctgttccccaagtgcagctggatggatttgttaatgacagtaagggcctctggcttaggtacaggggtcttccagttgtcagaaaagctgaagcatcttaaaaraacagaggggcacaaggcttgctcaagagagcgttagccacagagggcagtcatggccccgtgccatgrtgtggagacacagcccttcactgtactgccaaggtctggaggctcacagtgcctcagtgtatttgstaagatgagaacttgaaaggaattacagattaccactactgaagttctaaagctgtgttcattctttttctccctcttctgtggcaaatgctggtgtacgcatttgaagtgcttgtatcagcgcatattgacccagttctcaagcgttattaaaatcctggaagttcttttagtggttttatgttcatgcggaacacgaacaacaagcaggtagaaacctgcgaaaccacattg

SEQ ID NO: 63619 - DNA, 600 bp, Chicken  19866894326798_3
ccatgtggccgtaagtacacacactcaacagcttccaaggaaatggcaaaagtatggcagtctgttccccaagtgcagctggatggatttgttaatgacagtaagggcctctggcttaggtacaggggtcttccagttgtcagaaaagctgaagcatcttaaaaraacagaggggcacaaggcttgctcaagagagcgttagccacagagggcagtcatggccccgtgccatgrtgtggagacacagcccttcactgtactgccaaggtctggaggctcacagtgcctcagtgtatttgstaagatgagaacttgaaaggaattacagattaccactactgaagttctaaagctgtgttcattctttttctccctcttctgtggcaaatgctggtgtacgcatttgaagtgcttgtatcagcgcatattgacccagttctcaagcgttattaaaatcctggaagttcttttagtggttttatgttcatgcggaacacgaacaacaagcaggtagaaacctgcgaaaccacattggagcgttaggaaaatagacagagaaraaagccttaatgttatcattcctttcttgacattattttt

SEQ ID NO: 63620 - DNA, 536 bp, Chicken  19866894326798_4
tgccaaggtctggaggctcacagtgcctcagtgtatttgstaagatgagaacttgaaaggaattacagattaccactactgaagttctaaagctgtgttcattctttttctccctcttctgtggcaaatgctggtgtacgcatttgaagtgcttgtatcagcgcatattgacccagttctcaagcgttattaaaatcctggaagttcttttagtggttttatgttcatgcggaacacgaacaacaagcaggtagaaacctgcgaaaccacattggagcgttaggaaaatagacagagaaraaagccttaatgttatcattcctttcttgacattattttttcagttatccgtctctattagggacccagaaagtcaagaagtcttcctccttataaagtgagcgctaaagaaagctgagcataataatatggccagaacagaacttggtatttactcaatactaagaagaaatgtcaaggattctacatgtaacagtttgaataattacgttcaataaacatgaatcacaaagctg

SEQ ID NO: 63621 - DNA, 600 bp, Chicken  19866894326802_1
tggggcctcagaggcactgggagacctcaaagagttctctgacttctgagagcccgggggttcttctttcatctcttctgcaatgtggaagaacacacagaagatgagtatttctaacagaacatcggaatagggtgaaaagatgacttgggtaatgataactgaggcagatgtcagctctgtgagggagaagggaagcagacctgatcctgacttcaaaaggacaggaacaaaaattaatgacagtcaacaaagttatagaaaacagctctaggcaaaaaaaaagaccatttccttctkagatctgaggttcagcaccaagttgataaaggcaactttagttgagcatgacattttgatccaaaaatcaccactgtactatgacagcacagcgtgctgaatgggtttagggttggcccatgagccctgaatgcagtcagccaaggaaaatcaccaagcacaacgttagctgcagtggggctctgctggccttgacaaagagcccagtgctgttccaaagggccattgctgacctggaaaatgacttcaagcataaagaagcgatcctgcatccacagactgagctggtgagatcatcct

SEQ ID NO: 63622 - DNA, 600 bp, Chicken  19866894326807_1
tctggcacgaaggttctgctcctcgtgggactcgagctgctttggacataaacagccctcccagtgctatggttttgattagcaatgacttaataattgttgatgggtgacagctgagccagtaaacatgagcgtgtttccaagtctggctatcttcagctctttgtggaggatatacataaacacaaaatcttacttcactccttagatattctctgtgctgatggcaccaatagctccatgtaaacactgcggctgtgctcctctgagccttcacggcagcgctgttccttcactccrgtcaccagccacaaacactcgtgctcccaaggcagatgtcaggttgatgtcccattgcttctccagggaaggagcgttatcagctgtgagatggtaataaataaccgataaaagttcctgttaaaaccaatgtagagcaaaatggctgtgaggctgcaaaccactctctggcacatctttactatccctgcctcatcctttgctgcatcctatggatgcgtggagagcgctccgtaccccatctgaaagcggcacccccagtttgtcccatttgaaatgctctcagaggcagtgccagtg

SEQ ID NO: 63623 - DNA, 524 bp, Chicken  19866894326807_2
atttccttttctgatgcacacatgctgtagctatggggagtgacgccacgtgtttgctttggcttgggagcccttgctgcatggattgtctggagtttgtcctgctcctcacagcgagcaccccggtctgttgtttgtgctaagggctctggagggcgatggcaatgctttcccagttggtcactgttacacatttagtagaagaaatttaagccgaatccaatcagctgcttctcagctcgtccttttccagaaacttacactgaacttccagcactgctgttgcatctcagtcacctsttctgcccctctgggctggctgatgggctggcaccatgggaaagctggcatgggtgggatgagctcaggtcaacaccactgtgcgctcctctccgctgagattatggttatacagttcttcaccatgcccacatctctggcatggaagagaatatctgtcccttgtgtttggattccagctgggcttctaaggcttgagcctttgcctctttgatcatcaagca

SEQ ID NO: 63624 - DNA, 600 bp, Chicken  19866894326808_1
tttgggcatgtatgtgtcttcattccgcaagtgaactgtctaaattggtttgtccctgttactgtgtaatccagcatttctccaacaaacagcattttactcaatgtgaatatatttcagtctctatcactgacttttatatcgtgtcctgtgaggagtgagtcattagcatgagtgtagtattacaatctgtgtgtatgacaggcatcaccaagatgattaggtgcttatcaccactgagcagtgtctgtgtttgaggcatctcctgctctgtaaagctgcagtgatgctatgggctgrctgtgggggatgtgatgggccaaatgcaggctgcagtcttcttcctccacaggagcagtaccaagccacactrtgaggaactatgagaggctgggctgtagcaggagacctcaaacagtgaggagagcgtcagtactgataatgctggggkctttgcggtgtacagtctttgtgggacaaatctcgtcctcctggagaagagaacttgatgaagtgaggatcagggggatgagtctcccctgaggcttaatagtgatttgtatgaaagtttgaaaatgtattaaaattgctgcattgtga

SEQ ID NO: 63625 - DNA, 600 bp, Chicken  19866894326808_2
gcatttctccaacaaacagcattttactcaatgtgaatatatttcagtctctatcactgacttttatatcgtgtcctgtgaggagtgagtcattagcatgagtgtagtattacaatctgtgtgtatgacaggcatcaccaagatgattaggtgcttatcaccactgagcagtgtctgtgtttgaggcatctcctgctctgtaaagctgcagtgatgctatgggctgrctgtgggggatgtgatgggccaaatgcaggctgcagtcttcttcctccacaggagcagtaccaagccacactrtgaggaactatgagaggctgggctgtagcaggagacctcaaacagtgaggagagcgtcagtactgataatgctggggkctttgcggtgtacagtctttgtgggacaaatctcgtcctcctggagaagagaacttgatgaagtgaggatcagggggatgagtctcccctgaggcttaatagtgatttgtatgaaagtttgaaaatgtattaaaattgctgcattgtgaaaaattaaatactgaaaacttgctttttaattacttgttagaaaagcaagtgtaaataaatgtttccagatta

SEQ ID NO: 63626 - DNA, 600 bp, Chicken  19866894326808_3
tgaggagtgagtcattagcatgagtgtagtattacaatctgtgtgtatgacaggcatcaccaagatgattaggtgcttatcaccactgagcagtgtctgtgtttgaggcatctcctgctctgtaaagctgcagtgatgctatgggctgrctgtgggggatgtgatgggccaaatgcaggctgcagtcttcttcctccacaggagcagtaccaagccacactrtgaggaactatgagaggctgggctgtagcaggagacctcaaacagtgaggagagcgtcagtactgataatgctggggkctttgcggtgtacagtctttgtgggacaaatctcgtcctcctggagaagagaacttgatgaagtgaggatcagggggatgagtctcccctgaggcttaatagtgatttgtatgaaagtttgaaaatgtattaaaattgctgcattgtgaaaaattaaatactgaaaacttgctttttaattacttgttagaaaagcaagtgtaaataaatgtttccagattatgcagctaactgttaaacctgtgggaaataaagctgcaatgcaagttttgtgtatttcccacgctacttcttcagcta

SEQ ID NO: 63627 - DNA, 600 bp, Chicken  19866894326808_4
ctaactgttaaacctgtgggaaataaagctgcaatgcaagttttgtgtatttcccacgctacttcttcagctatttttggtttgttggatgcagtattgcgtaacagaagatattttgtgattcactgacctgaaaagcgcagctctgaatccaaacgtgtgttggcattctgttccatgcacttcatgcccagatttcatccttcactgttgactaacagtcttagttctgttgattcacagtaatctataggttttctgtaacatttattttgctaatctgctgcacagtaatgttgwtttatatataatccatagcaaaccgaactcctctgatgctaactttaagtttagtggattttaagctgaatttttaatacttaaataaaataaaagcttcaaacagttaaagtgmtatcctagtgaaccgttgtctgaactgagttgtcagctatcagccaggagtaagaatctcaaagcctgatagcaaattatatttggaactttgtacccktatgcagtgttaatctgtatccatggctatgatgtcctggcagaataaaacaagggtcttttttgctgccgtaccaataggtactc

SEQ ID NO: 63628 - DNA, 600 bp, Chicken  19866894326808_5
ttgtgattcactgacctgaaaagcgcagctctgaatccaaacgtgtgttggcattctgttccatgcacttcatgcccagatttcatccttcactgttgactaacagtcttagttctgttgattcacagtaatctataggttttctgtaacatttattttgctaatctgctgcacagtaatgttgwtttatatataatccatagcaaaccgaactcctctgatgctaactttaagtttagtggattttaagctgaatttttaatacttaaataaaataaaagcttcaaacagttaaagtgmtatcctagtgaaccgttgtctgaactgagttgtcagctatcagccaggagtaagaatctcaaagcctgatagcaaattatatttggaactttgtacccktatgcagtgttaatctgtatccatggctatgatgtcctggcagaataaaacaagggtcttttttgctgccgtaccaataggtactccttttccctgcatagggtgttataaatctgttttgactgattgtgctggatatgtgcattacaacttatttctgtttgtagtcattcttgaataagtcccatatttcagttaaga

SEQ ID NO: 63629 - DNA, 600 bp, Chicken  19866894326808_6
ctaacagtcttagttctgttgattcacagtaatctataggttttctgtaacatttattttgctaatctgctgcacagtaatgttgwtttatatataatccatagcaaaccgaactcctctgatgctaactttaagtttagtggattttaagctgaatttttaatacttaaataaaataaaagcttcaaacagttaaagtgmtatcctagtgaaccgttgtctgaactgagttgtcagctatcagccaggagtaagaatctcaaagcctgatagcaaattatatttggaactttgtacccktatgcagtgttaatctgtatccatggctatgatgtcctggcagaataaaacaagggtcttttttgctgccgtaccaataggtactccttttccctgcatagggtgttataaatctgttttgactgattgtgctggatatgtgcattacaacttatttctgtttgtagtcattcttgaataagtcccatatttcagttaagattctgtcagcttccttgaggagctggcttcttgcagcccgtaaaagagggactgtgaggcagcgtgttttgttcttctgcagcacaaakatgtggggca

SEQ ID NO: 63630 - DNA, 600 bp, Chicken  19866894326808_7
tttgtacccktatgcagtgttaatctgtatccatggctatgatgtcctggcagaataaaacaagggtcttttttgctgccgtaccaataggtactccttttccctgcatagggtgttataaatctgttttgactgattgtgctggatatgtgcattacaacttatttctgtttgtagtcattcttgaataagtcccatatttcagttaagattctgtcagcttccttgaggagctggcttcttgcagcccgtaaaagagggactgtgaggcagcgtgttttgttcttctgcagcacaaakatgtggggcatgacttagcaaaaaatgtaaaccaaggctgatgctaggattcactgggcaggtcatgattaggtaattttgcagcaaaaccctataggaccttgcctctggggtacaaaatgcaaacgggtgctggggcatccagtgtggcacgctgcaaagtggtcgatataggaatgtatatttctgttttggacttagagaaggcctcgtcctaaagttcatctacttttctgcactaacaagtcaccgtgacggactgtggttctctacatgctttgactgtcttttgtatgaatt

SEQ ID NO: 63631 - DNA, 600 bp, Chicken  19866894326809_1
tgaagtcttcagttctaaaatatacaactacacacatacatatcctttgtcattaactgaaacagtttttagtaaataacctgtatttgattttttttttttacagtaaatcttatggaaagcaattccccaaatgtgcaaaccattaacaaaatatgtacaaaaaccctgaggtctgattggtagactaaagttgcagaatgaggaagacttagcctgtttagtattaataccagcagatccctctgcactctaaaacgtgacataccatttgctttattagccctgcatcaactattygttcaatttgcattagaaacgggaaatgagaaattaacacagacaacttagaagtcatgcaaagacagctctactttttcataagactttcagttataagaattcttactgaacgctgctgaattgcttcgacagtccacatggccagtactagaagtctgttgatacaactaataagttttcatttattaattataacagactcaattaaaacaaggcttccttttccactaactgaatactaacagttgtgcatttagaactgatcgtatcatacaatcacagaatcatagaatggcc

SEQ ID NO: 63632 - DNA, 600 bp, Chicken  19866894326816_1
tcttttgtcagaaaatatagatacccgctccagaaacatgtctgggagttagcttttcttggtgctttgaaagtactgtttatctgtttcattttggtgtacttactactgcacattataatcttacatgaccaatgtaattgcagtgactgcaaaatatagttgctgaattctaggagtgtaatttgcatggtatacaactcatttaaaacatggcactgtggtataatactaactttaaaagcgtattcaatctagattattcctgaatgctcaaaatggagtctcagacttcttctrtttattcctgtcacttgctgctgcttctccaggaggagagtcttccagcacactggggaaaacctggaggttttgtccctcccccctcccccttgttctggtagatcatgyagaccaaaaagctccttgcaaataatgaaatcagtgagcaacctttctcaagtatcattcaaatgatttttttctctgaaaactacttctgaagaccttgatttttgtactgtttcttataatttaatctagcaaataaaccttgctagagaagtagcgaaggctatatatattttcgaatttaagttt

SEQ ID NO: 63633 - DNA, 600 bp, Chicken  19866894326816_2
cacattataatcttacatgaccaatgtaattgcagtgactgcaaaatatagttgctgaattctaggagtgtaatttgcatggtatacaactcatttaaaacatggcactgtggtataatactaactttaaaagcgtattcaatctagattattcctgaatgctcaaaatggagtctcagacttcttctrtttattcctgtcacttgctgctgcttctccaggaggagagtcttccagcacactggggaaaacctggaggttttgtccctcccccctcccccttgttctggtagatcatgyagaccaaaaagctccttgcaaataatgaaatcagtgagcaacctttctcaagtatcattcaaatgatttttttctctgaaaactacttctgaagaccttgatttttgtactgtttcttataatttaatctagcaaataaaccttgctagagaagtagcgaaggctatatatattttcgaatttaagttttgaaccttatgtttgtctttagtgtttcaaggtggggagagtggtgtctatactatggaacaagctgtaagcttacagccagtgtctatggaatctgaatctaatactgac

SEQ ID NO: 63634 - DNA, 600 bp, Chicken  19866894326831_1
caagaataactttgtcatcataaaatcattcataacacataaaccaccaatacaaggtcagatatggcaggggactctagtattttaactgtgggcatttgataactaggcctttctttcgttatttcttaaagatgccaaagtgttaatctgtaagattttaatttgtactgtatgcctttcaacaagcccctcagagggctgagctgcactaaagacagagaggaagccaaaaaagaaaacagaggttttggaacaatagaattttaatgggtaattaaatgtcttgcatacttacayattcacacacacttccaaatcacatacacaaagactctgaagacaactttggcttaaaagattctcaaatgccatgaataaattcaagtattattaggcatttcagctattcaatacgcatatttcagattttgctaaamtcctgtttattataagctttatttttgtacaaatctattatctagaggatgttcactgaagattcccaggtgcatgctgctagtattaactctatttgtcctccccaaagctacagggattaacactgaaaatatgttaaatagacttttccctggcaag

SEQ ID NO: 63635 - DNA, 600 bp, Chicken  19866894326831_2
aagtgttaatctgtaagattttaatttgtactgtatgcctttcaacaagcccctcagagggctgagctgcactaaagacagagaggaagccaaaaaagaaaacagaggttttggaacaatagaattttaatgggtaattaaatgtcttgcatacttacayattcacacacacttccaaatcacatacacaaagactctgaagacaactttggcttaaaagattctcaaatgccatgaataaattcaagtattattaggcatttcagctattcaatacgcatatttcagattttgctaaamtcctgtttattataagctttatttttgtacaaatctattatctagaggatgttcactgaagattcccaggtgcatgctgctagtattaactctatttgtcctccccaaagctacagggattaacactgaaaatatgttaaatagacttttccctggcaagaggaaaaacactgtgataacaaaaagtaaaatttaaacagtaccgtccaccttagttttctgaactctgcgtgtttctcatgaagcctaggaacatgttttcatgaatacagaattaccctttgttcaaaatgatggagg

SEQ ID NO: 63636 - DNA, 599 bp, Chicken  19866894326832_1
  misc_feature (1)..(49): n is any nucleotide
nnnnnnnnnnnnnnnnnnnnnnnnnnnnnnnnnnnnnnnnnnnnnnnnngagaatgttgtcctaagttctaatgccatcagaatttttaagatatgaaaattgcagccagcactgcttagagctgcacaacgcaacaacttgatatggggaaaaaaggttcatttgagaattttaagaacttactctactcaatgaaagtgaaaattaatccttctagcacaaatggattttgcacttaagaagggggattgttattagtcagtggggatatccttcagcagtgagtatattagtggtaygtactgttgacaaaaccctgaaagcagtgcaaatgacagtgtgcttrtgggtacrtgtatgtttgtcaggtagcaggagagaaggctgcaagacctcagaacaagttttatagctatcaaaaacgaagagctttataatagacctgggcctcttgggaatcaatggtttacattcaaaacaagttttgcataatgagtaatattaacttgttcttttaccttttctgtttcacataaggaagcgtgctttctcattaggtccatagatcatcttcgatgcatcattaatgctcacgttc

SEQ ID NO: 63637 - DNA, 599 bp, Chicken  19866894326832_2
  misc_feature (1)..(2): n is any nucleotide
nngagaatgttgtcctaagttctaatgccatcagaatttttaagatatgaaaattgcagccagcactgcttagagctgcacaacgcaacaacttgatatggggaaaaaaggttcatttgagaattttaagaacttactctactcaatgaaagtgaaaattaatccttctagcacaaatggattttgcacttaagaagggggattgttattagtcagtggggatatccttcagcagtgagtatattagtggtaygtactgttgacaaaaccctgaaagcagtgcaaatgacagtgtgcttrtgggtacrtgtatgtttgtcaggtagcaggagagaaggctgcaagacctcagaacaagttttatagctatcaaaaacgaagagctttataatagacctgggcctcttgggaatcaatggtttacattcaaaacaagttttgcataatgagtaatattaacttgttcttttaccttttctgtttcacataaggaagcgtgctttctcattaggtccatagatcatcttcgatgcatcattaatgctcacgttcagcatggtaagtatgaagctgttcataaaaatgatctttgaaactgc

SEQ ID NO: 63638 - DNA, 600 bp, Chicken  19866894326832_3
gttgtcctaagttctaatgccatcagaatttttaagatatgaaaattgcagccagcactgcttagagctgcacaacgcaacaacttgatatggggaaaaaaggttcatttgagaattttaagaacttactctactcaatgaaagtgaaaattaatccttctagcacaaatggattttgcacttaagaagggggattgttattagtcagtggggatatccttcagcagtgagtatattagtggtaygtactgttgacaaaaccctgaaagcagtgcaaatgacagtgtgcttrtgggtacrtgtatgtttgtcaggtagcaggagagaaggctgcaagacctcagaacaagttttatagctatcaaaaacgaagagctttataatagacctgggcctcttgggaatcaatggtttacattcaaaacaagttttgcataatgagtaatattaacttgttcttttaccttttctgtttcacataaggaagcgtgctttctcattaggtccatagatcatcttcgatgcatcattaatgctcacgttcagcatggtaagtatgaagctgttcataaaaatgatctttgaaactgcaaaatgaca

SEQ ID NO: 63639 - DNA, 600 bp, Chicken  19866894326832_4
tccatagatcatcttcgatgcatcattaatgctcacgttcagcatggtaagtatgaagctgttcataaaaatgatctttgaaactgcaaaatgacaggttaaatgattgtccatagaaaagtgtaaatacatgcagttgttagtagtggctgttttgtcagcagccctgcccccaaataaacttgttgctcacatttttcatgcgctaagagtttccatcagaaacatggaaatatactggttacatgaagctaatattaaactaaaagctgcttaaggaaaagtgtttagttattttaygtgcatttaaaattctagcacgtagtccttgtagtcaattacaattcatgggtttcttactcatgaatgcacttctgactgtttgctaaagaagataatctgctcccaggacatctgaagtccagccataaatcagtgagaataactgaccattccttcttgtttcattcaccatctctttttaaaatccccagtgtttcaagaactttggcccatggcttttcagtctgtacttgtattgcctaaaatctcttgtattcacatggagttcctggagttcacaagtttgtggttgttcta

SEQ ID NO: 63640 - DNA, 600 bp, Chicken  19866894326840_1
taataaacaaaatttttctgtagtacagctgtataacaaaatccaaggatggattgcaacagcactacccaacctgtactaggagggaaaacaacaaatctaacaaaataaaagcagaagaaacaacagcagcaacagtaaaaaacaacttaagtctcccagattttaaccgatagtaactttacattggacaatacaattttttctcctaaaaatagatgagaatcaagttttaacaaaaagataaactgaagctgaatattcaaagccattgcctcagatcctgagtgaaagcatcayaccactcttatacaataccaggttacaaatgtcagaaacagctctacagttactcctgaattctctgcagttaaccaacagcayctgaaggaaattttcttagttcttcctgttgtgggatgcacaagtgtaagagtttcttcctccactgataaaaatattgaatataagagaaaccaagcttgcagagaaatggattatttgatacatagggacccatatcatccctttgactgagaacattcaggaccataaaacaggtagtaacaagtttagatgtgtcatgtcttcctacgctca

SEQ ID NO: 63641 - DNA, 600 bp, Chicken  19866894326840_2
gggaaaacaacaaatctaacaaaataaaagcagaagaaacaacagcagcaacagtaaaaaacaacttaagtctcccagattttaaccgatagtaactttacattggacaatacaattttttctcctaaaaatagatgagaatcaagttttaacaaaaagataaactgaagctgaatattcaaagccattgcctcagatcctgagtgaaagcatcayaccactcttatacaataccaggttacaaatgtcagaaacagctctacagttactcctgaattctctgcagttaaccaacagcayctgaaggaaattttcttagttcttcctgttgtgggatgcacaagtgtaagagtttcttcctccactgataaaaatattgaatataagagaaaccaagcttgcagagaaatggattatttgatacatagggacccatatcatccctttgactgagaacattcaggaccataaaacaggtagtaacaagtttagatgtgtcatgtcttcctacgctcaagaaaatcagcaaaacaatttagggcttcatgcccatgggacagctaatgcctgtgatgcttaggagaaacgtggaggacacct

SEQ ID NO: 63642 - DNA, 600 bp, Chicken  19866894326846_1
aagacaaaagcgttttaaagatgggaagataagccaattcattcagacacgtgcatcaggctgcaggagcggctcacgcaggaaagcaatgcaattataaggcatgtgtgctattgcaaaccacttacaaagctgaagtcatcctgcagaggctgccctgacagcgggaagaaaaataaacccacaagcaaaatcaacatgaccatctgcaatactcctctgggaaagaggctgaagtgccagggtaaaatcagtggcaacgcagttaacaggctcccttctgcctcagctctgaaatgytttttagctgatggataataaaactgttcaccctcacagaactcagcctttgaaactttcaaaaygtacattccagaactcagmatcaacacattaaggacacctgggggggaggggtgagccccttctgtgtgtgaggaggcagctaaaggccactttcacacttcatacttcagagattctccatcctttattggatgcagtggggaacattacaaccaaggatgaggaataggctgaggtgctcaatgccttctttatttgtgtctttaatagtcagagcagttatcctcaaggtat

SEQ ID NO: 63643 - DNA, 600 bp, Chicken  19866894326846_2
ggagcggctcacgcaggaaagcaatgcaattataaggcatgtgtgctattgcaaaccacttacaaagctgaagtcatcctgcagaggctgccctgacagcgggaagaaaaataaacccacaagcaaaatcaacatgaccatctgcaatactcctctgggaaagaggctgaagtgccagggtaaaatcagtggcaacgcagttaacaggctcccttctgcctcagctctgaaatgttttttagctgatggataataaaactgttcaccctcacagaactcagcctttgaaactttcaaaaygtacattccagaactcagmatcaacacattaaggacacctgggggggaggggtgagccccttctgtgtgtgaggaggcagctaaaggccactttcacacttcatacttcagagattctccatcctttattggatgcagtggggaacattacaaccaaggatgaggaataggctgaggtgctcaatgccttctttatttgtgtctttaatagtcagagcagttatcctcaaggtatcactataggcacgggacagagtggctggaaagctgtgtggaagaaaaggatttgggagtgtcagt

SEQ ID NO: 63644 - DNA, 600 bp, Chicken  19866894326846_3
agcaatgcaattataaggcatgtgtgctattgcaaaccacttacaaagctgaagtcatcctgcagaggctgccctgacagcgggaagaaaaataaacccacaagcaaaatcaacatgaccatctgcaatactcctctgggaaagaggctgaagtgccagggtaaaatcagtggcaacgcagttaacaggctcccttctgcctcagctctgaaatgttttttagctgatggataataaaactgttcaccctcacagaactcagcctttgaaactttcaaaaygtacattccagaactcagmatcaacacattaaggacacctgggggggaggggtgagccccttctgtgtgtgaggaggcagctaaaggccactttcacacttcatacttcagagattctccatcctttattggatgcagtggggaacattacaaccaaggatgaggaataggctgaggtgctcaatgccttctttatttgtgtctttaatagtcagagcagttatcctcaaggtatcactataggcacgggacagagtggctggaaagctgtgtggaagaaaaggatttgggagtgtcagtcaacagccagctgaatgtg

SEQ ID NO: 63645 - DNA, 600 bp, Chicken  19866894326847_1
ctggctgctgccccaggagggcgtgagtgtggctttacagcttgagtttgggtctttttttccatagcactactctccaggacatacatgtgtgttttaccactgctgtaactcaccctttctgcagcctcccactcgttttgcccatattgatctgagaggtctcaccctcttacacacagggaatacaatctgcaaaactgtgaatacccacaagaaggtatctgctttcttactagctgatcaccacctctcaggagaaactgtctaatttctctcttcagccagacctcctaatgyaagcaagctgttcccttcaaccagttgcctggcttacgtatggtttcaaattgatgttgttaattcagtgacagatgcacaaggtgccattagtgggtcttaaatggaagcataatttttacccatcaagatccttttaccatgctggtgcttacaaccttcaccggggaataagagccgcagcagcgagctggttataatttcagtgctgccttctggacatgcagctacaacagaaacatgcaggttttggagtgccacttttggggttagcttcagtcagagtatccaagttcatgg

SEQ ID NO: 63646 - DNA, 600 bp, Chicken  19866894326849_1
tctcagattgctcactggagacaagtgattgactgtgagagttcaacagtttggtagggtccttcttggtcagcactgacaaagctgaaaaactccataccactcaaaaaaaatataaaaaaataaaaaaggaaagcccaaacaaaatggatgacccaaaagtaatgtatttccactgcattcccaagtagtgaaagagactagctatggaatctcacccttctgagaatcttagatgtcagagataatgggtctcaaaggagatctttttgtatatcttcttctgtgtgagtttcaagrtgtgtttagcgccaagctgttctgtgtttaatcagatgttactatctacctagaaacgtgttgtatgagaaaagagtgtgaggtttggggttttttgagggataggaggggaatgtcaatatatgtcaatatatattkaaaygcttagtgtcttttttattgatgaggggaatctgaagactccccagtgtttttattgacctttatctgttcttaatgtattgggccttgttttcaacagatgcctatatgatataaatractcaaagtaaaaaatgacaagcaaaggggcatgaggag

SEQ ID NO: 63647 - DNA, 600 bp, Chicken  19866894326849_2
caaacaaaatggatgacccaaaagtaatgtatttccactgcattcccaagtagtgaaagagactagctatggaatctcacccttctgagaatcttagatgtcagagataatgggtctcaaaggagatctttttgtatatcttcttctgtgtgagtttcaagrtgtgtttagcgccaagctgttctgtgtttaatcagatgttactatctacctagaaacgtgttgtatgagaaaagagtgtgaggtttggggttttttgagggataggaggggaatgtcaatatatgtcaatatatattkaaaygcttagtgtcttttttattgatgaggggaatctgaagactccccagtgtttttattgacctttatctgttcttaatgtattgggccttgttttcaacagatgcctatatgatataaatractcaaagtaaaaaatgacaagcaaaggggcatgaggagacaaaaaacaaaaacaaacaacaacaacaaaaagaaaaccaccmaaaatscaacccagccaactaaaatttaagcaactctcttctttccaaagattcattttataatgatacaaaaataaattaacttcacagaatt

SEQ ID NO: 63648 - DNA, 600 bp, Chicken  19866894326849_3
caaaatggatgacccaaaagtaatgtatttccactgcattcccaagtagtgaaagagactagctatggaatctcacccttctgagaatcttagatgtcagagataatgggtctcaaaggagatctttttgtatatcttcttctgtgtgagtttcaagrtgtgtttagcgccaagctgttctgtgtttaatcagatgttactatctacctagaaacgtgttgtatgagaaaagagtgtgaggtttggggttttttgagggataggaggggaatgtcaatatatgtcaatatatattkaaaygcttagtgtcttttttattgatgaggggaatctgaagactccccagtgtttttattgacctttatctgttcttaatgtattgggccttgttttcaacagatgcctatatgatataaatractcaaagtaaaaaatgacaagcaaaggggcatgaggagacaaaaaacaaaaacaaacaacaacaacaaaaagaaaaccaccmaaaatscaacccagccaactaaaatttaagcaactctcttctttccaaagattcattttataatgatacaaaaataaattaacttcacagaattatag

SEQ ID NO: 63649 - DNA, 600 bp, Chicken  19866894326849_4
agatctttttgtatatcttcttctgtgtgagtttcaagrtgtgtttagcgccaagctgttctgtgtttaatcagatgttactatctacctagaaacgtgttgtatgagaaaagagtgtgaggtttggggttttttgagggataggaggggaatgtcaatatatgtcaatatatattkaaaygcttagtgtcttttttattgatgaggggaatctgaagactccccagtgtttttattgacctttatctgttcttaatgtattgggccttgttttcaacagatgcctatatgatataaatractcaaagtaaaaaatgacaagcaaaggggcatgaggagacaaaaaacaaaaacaaacaacaacaacaaaaagaaaaccaccmaaaatscaacccagccaactaaaatttaagcaactctcttctttccaaagattcattttataatgatacaaaaataaattaacttcacagaattatagaatcattagagttggaaggaagacttaaaaatcatctrgtccaactctcctgcaatgaacagggacatccacagctagatcaggttgcttagagcccccatccagcctgaccttgaatg

SEQ ID NO: 63650 - DNA, 600 bp, Chicken  19866894326849_5
tctacctagaaacgtgttgtatgagaaaagagtgtgaggtttggggttttttgagggataggaggggaatgtcaatatatgtcaatatatattkaaaygcttagtgtcttttttattgatgaggggaatctgaagactccccagtgtttttattgacctttatctgttcttaatgtattgggccttgttttcaacagatgcctatatgatataaatractcaaagtaaaaaatgacaagcaaaggggcatgaggagacaaaaaacaaaaacaaacaacaacaacaaaaagaaaaccaccmaaaatscaacccagccaactaaaatttaagcaactctcttctttccaaagattcattttataatgatacaaaaataaattaacttcacagaattatagaatcattagagttggaaggaagacttaaaaatcatctrgtccaactctcctgcaatgaacagggacatccacagctagatcaggttgcttagagcccccatccagcctgaccttgaatgtctccaggtatggggcatccatcacctctctaggcaatctgttcctgtgcttcaccacccttatcatttaaaataaaacaaaa

SEQ ID NO: 63651 - DNA, 600 bp, Chicken  19866894326849_6
tagaaacgtgttgtatgagaaaagagtgtgaggtttggggttttttgagggataggaggggaatgtcaatatatgtcaatatatattkaaaygcttagtgtcttttttattgatgaggggaatctgaagactccccagtgtttttattgacctttatctgttcttaatgtattgggccttgttttcaacagatgcctatatgatataaatractcaaagtaaaaaatgacaagcaaaggggcatgaggagacaaaaaacaaaaacaaacaacaacaacaaaaagaaaaccaccmaaaatscaacccagccaactaaaatttaagcaactctcttctttccaaagattcattttataatgatacaaaaataaattaacttcacagaattatagaatcattagagttggaaggaagacttaaaaatcatctrgtccaactctcctgcaatgaacagggacatccacagctagatcaggttgcttagagcccccatccagcctgaccttgaatgtctccaggtatggggcatccatcacctctctaggcaatctgttcctgtgcttcaccacccttatcatttaaaataaaacaaaacaaaac

SEQ ID NO: 63652 - DNA, 600 bp, Chicken  19866894326849_7
ctccccagtgtttttattgacctttatctgttcttaatgtattgggccttgttttcaacagatgcctatatgatataaatractcaaagtaaaaaatgacaagcaaaggggcatgaggagacaaaaaacaaaaacaaacaacaacaacaaaaagaaaaccaccmaaaatscaacccagccaactaaaatttaagcaactctcttctttccaaagattcattttataatgatacaaaaataaattaacttcacagaattatagaatcattagagttggaaggaagacttaaaaatcatctrgtccaactctcctgcaatgaacagggacatccacagctagatcaggttgcttagagcccccatccagcctgaccttgaatgtctccaggtatggggcatccatcacctctctaggcaatctgttcctgtgcttcaccacccttatcatttaaaataaaacaaaacaaaacgcttttcttatatccaatctaaatctctttagtctgaaaagatttcttcttgtcttattataacagaaccttctaaggaatctatcccaatacattaactatagaatgtccttgtatgggaattgttgaa

SEQ ID NO: 63653 - DNA, 600 bp, Chicken  19866894326850_1
acagtaattttattcactgttgaagtgtgtagttgcagaagtaaaaaatgctatcagagcttatttcacctgattttttattctccttaatgctactgcagaaactgaaaccagctcaccaatccaatgcctattttgttttgcattcaaaaatcctctggtatcattttttttcagattagtaggtaatttatatcagacttacaaagctaagtcaaactactgcttgctcttccctagttttacaaaaaaagctgagtgaatctgaagcagcaagtgaatgctgccaaggcaaatgaytgagcctccattttrcttagataaccctgctcctgactgccawaagccccactgcaggtgtaggtttcaggccttcatgcccacagttcagtctgatgcaggacgctgtttttttccattaaaagatgcttccaacagaagtcagccatttcaactttatttcccagggcatcttatcaaacctgtccattataaataagaaacagaaccaactgaaagagattaagggttttaaaaaaaaagaggcaccacctcccatgagtttctgggggtgatgcaaagcacatgcagctggtttga

SEQ ID NO: 63654 - DNA, 600 bp, Chicken  19866894326850_2
actgttgaagtgtgtagttgcagaagtaaaaaatgctatcagagcttatttcacctgattttttattctccttaatgctactgcagaaactgaaaccagctcaccaatccaatgcctattttgttttgcattcaaaaatcctctggtatcattttttttcagattagtaggtaatttatatcagacttacaaagctaagtcaaactactgcttgctcttccctagttttacaaaaaaagctgagtgaatctgaagcagcaagtgaatgctgccaaggcaaatgaytgagcctccattttrcttagataaccctgctcctgactgccawaagccccactgcaggtgtaggtttcaggccttcatgcccacagttcagtctgatgcaggacgctgtttttttccattaaaagatgcttccaacagaagtcagccatttcaactttatttcccagggcatcttatcaaacctgtccattataaataagaaacagaaccaactgaaagagattaagggttttaaaaaaaaagaggcaccacctcccatgagtttctgggggtgatgcaaagcacatgcagctggtttgagggtgctgctaacat

SEQ ID NO: 63655 - DNA, 600 bp, Chicken  19866894326850_3
aaaaatgctatcagagcttatttcacctgattttttattctccttaatgctactgcagaaactgaaaccagctcaccaatccaatgcctattttgttttgcattcaaaaatcctctggtatcattttttttcagattagtaggtaatttatatcagacttacaaagctaagtcaaactactgcttgctcttccctagttttacaaaaaaagctgagtgaatctgaagcagcaagtgaatgctgccaaggcaaatgaytgagcctccattttrcttagataaccctgctcctgactgccawaagccccactgcaggtgtaggtttcaggccttcatgcccacagttcagtctgatgcaggacgctgtttttttccattaaaagatgcttccaacagaagtcagccatttcaactttatttcccagggcatcttatcaaacctgtccattataaataagaaacagaaccaactgaaagagattaagggttttaaaaaaaaagaggcaccacctcccatgagtttctgggggtgatgcaaagcacatgcagctggtttgagggtgctgctaacattcctctataaattattagaactctcagt

SEQ ID NO: 63656 - DNA, 599 bp, Chicken  19866894326852_1
  misc_feature (1)..(141): n is any nucleotide
nnnnnnnnnnnnnnnnnnnnnnnnnnnnnnnnnnnnnnnnnnnnnnnnnnnnnnnnnnnnnnnnnnnnnnnnnnnnnnnnnnnnnnnnnnnnnnnnnnnnnnnnnnnnnnnnnnnnnnnnnnnnnnnnnnnnnnnnnnnnntccccctccatctcccatgagggttttcaatgagatgtccatagtggacagcagccccttcccagtcaatagcccatctccaggttgtagttttcagcccatggatgttcactgctgcttcaagccttcgcaggctgaaggagaaaagcatcaccagargttgataaagatgcactgaacctggttcaccaaaatctgtcatagaacagaaggatccacagcatttaaggagctgagagctactttatagctaaggatgatgcttattcttctggaaaagagcaaagctgaagctttcagataaccaagcatcgcttcggtctatttatctctgcagtacttctggctgcctttctgcagcaattaaagcccaagggctttctcccgcctgtctgctgctgttagaggagcaggttttccatcacaagggatatgaatggtcctgtgtgggtttggtg

SEQ ID NO: 63657 - DNA, 523 bp, Chicken  19866894326852_2
agctactttatagctaaggatgatgcttattcttctggaaaagagcaaagctgaagctttcagataaccaagcatcgcttcggtctatttatctctgcagtacttctggctgcctttctgcagcaattaaagcccaagggctttctcccgcctgtctgctgctgttagaggagcaggttttccatcacaagggatatgaatggtcctgtgtgggtttggtgactgcttggggtgagctgacggagaagatccagtcccagagctggggaagaggaaggcaaaggaggtacacacatatgygaaaggtaggaatgctcagtgaaggacgttctgctgtttccaataggatactaaggccaaacagatgctgaatctctatcaattaaccccacagtttaaagaggttgggttcccggagggccttagaaagggaaaaatgagaaatcagagagatgcaaacccaatatcccaaccctggccaccagaaagaaggtgaaggagttattaagccatgcacaatgaa

SEQ ID NO: 63658 - DNA, 600 bp, Chicken  19866894326860_1
tagctgaggatgtgacagatacagcagtggcaaggatcaaacactgaaaggcatcgcagcaggcagaagctgggtggggtgatggatggtcccgctgagcgtgatgctgcaatgctcccagcctgcaccctaaccaaagggatgccccattgcaatgcgccccagcccctgcagcgctgtgtgcagcccactccctgtccccgacaccacaggatccatcccgtggctgtgacctggccccatgcaaagtttgcaggcaggaaatagcaaagaggatggactgattgtctccaggcccaragcctgtgcctgcagcaggtatttttgctctgctgctgtctggcactgcctgttctgccccagatcacgccaggctatccctttgtatctcatccrgwtgaggctgttctgggagcctcggctgtgctgtactgcagacggctctgatgctgactgcggggtctcctccatctcccctgtgtgcttttgttaccgtactggccagttttgtaattcagaggtgcaagagcctaaaagccataagactcaatgaagctttaaaatctctgctgagagaggctcagctcttacatagctccc

SEQ ID NO: 63659 - DNA, 600 bp, Chicken  19866894326860_2
gagcgtgatgctgcaatgctcccagcctgcaccctaaccaaagggatgccccattgcaatgcgccccagcccctgcagcgctgtgtgcagcccactccctgtccccgacaccacaggatccatcccgtggctgtgacctggccccatgcaaagtttgcaggcaggaaatagcaaagaggatggactgattgtctccaggcccaragcctgtgcctgcagcaggtatttttgctctgctgctgtctggcactgcctgttctgccccagatcacgccaggctatccctttgtatctcatccrgwtgaggctgttctgggagcctcggctgtgctgtactgcagacggctctgatgctgactgcggggtctcctccatctcccctgtgtgcttttgttaccgtactggccagttttgtaattcagaggtgcaagagcctaaaagccataagactcaatgaagctttaaaatctctgctgagagaggctcagctcttacatagctccccgcttccccggcggtggctgcctgccagggagatgggtttatgtgtctgtggtgcagttagcagctgaatgactgattacatggtattttagtaac

SEQ ID NO: 63660 - DNA, 600 bp, Chicken  19866894326860_3
gcgtgatgctgcaatgctcccagcctgcaccctaaccaaagggatgccccattgcaatgcgccccagcccctgcagcgctgtgtgcagcccactccctgtccccgacaccacaggatccatcccgtggctgtgacctggccccatgcaaagtttgcaggcaggaaatagcaaagaggatggactgattgtctccaggcccaragcctgtgcctgcagcaggtatttttgctctgctgctgtctggcactgcctgttctgccccagatcacgccaggctatccctttgtatctcatccrgwtgaggctgttctgggagcctcggctgtgctgtactgcagacggctctgatgctgactgcggggtctcctccatctcccctgtgtgcttttgttaccgtactggccagttttgtaattcagaggtgcaagagcctaaaagccataagactcaatgaagctttaaaatctctgctgagagaggctcagctcttacatagctccccgcttccccggcggtggctgcctgccagggagatgggtttatgtgtctgtggtgcagttagcagctgaatgactgattacatggtattttagtaacat

SEQ ID NO: 63661 - DNA, 600 bp, Chicken  19866894326866_1
attttctccccagcaaaagttgtactgcaatgaaatgtcaagattcttcttgtattctttgcttcaataagctctttcacaataaagacaatccttctacacgccttgatcaattatgatcatgggcaattgtgatttttatctaatggtaatctagggattaacaatgaattttatcagagctttactgagcagtgttatgtgaaaacgaacaaaacagttcttggatactgcagtaatagttccattaaaaaagtgataaaagagatgaaaatggacttgagtatcttcacactgatrggaaccaaagttcaatttccagtgtgatcaaaccctctctcagtcaaacacatatcaaaattcactctttaaaatgtgccgtaaaattaccttcagtgtttgggtcagataacagtttggacccgaatatccaggatcacagatgcattgctctttcaggcagtctccatgtcctctgcaattttccagacaaccagggcccagatagaaattatcaatggcccactgcatatctgagtatttctggtagaaccgaaacctcacaggactatatatacagaaacaaagaaaacagatgtg

SEQ ID NO: 63662 - DNA, 600 bp, Chicken  19866894326866_2
tgtcaagattcttcttgtattctttgcttcaataagctctttcacaataaagacaatccttctacacgccttgatcaattatgatcatgggcaattgtgatttttatctaatggtaatctagggattaacaatgaattttatcagagctttactgagcagtgttatgtgaaaacgaacaaaacagttcttggatactgcagtaatagttccattaaaaaagtgataaaagagatgaaaatggacttgagtatcttcacactgatrggaaccaaagttcaatttccagtgtgatcaaaccrtctctcagtcaaacacatatcaaaattcactctttaaaatgtgccgtaaaattaccttcagtgtttgggtcagataacagtttggacccgaatatccaggatcacagatgcattgctctttcaggcagtctccatgtcctctgcaattttccagacaaccagggcccagatagaaattatcaatggcccactgcatatctgagtatttctggtagaaccgaaacctcacaggactatatatacagaaacaaagaaaacagatgtgtgaaacaactttgctcaaacaaaaacaggtaattg

SEQ ID NO: 63663 - DNA, 600 bp, Chicken  19866894326866_3; identical to SEQ ID NO: 63662

SEQ ID NO: 63664 - DNA, 600 bp, Chicken  19866894326866_4; identical to SEQ ID NO: 63662

SEQ ID NO: 63665 - DNA, 457 bp, Chicken  19866894326866_5
cagacaaccagggcccagatagaaattatcaatggcccactgcatatctgagtatttctggtagaaccgaaacctcacaggactatatatacagaaacaaagaaaacagatgtgtgaaacaactttgctcaaacaaaaacaggtaattgaaatgctatatacttacgactgtactatcctccaagcttccaaagtaatatctagcagtctctgttgaaatgacatacacgttttctccttcacaagtgtactatgatatcaggacactgtggaagcaggaaaagtctattctggctcccygaatttcatttttggttatactttctttgcagattactcaaagatacaagagattttcatttttgcagaaaaaaatcagcccaaatagtttgcatatgtgtggactactgcagacaataggggaacgtttccactcagtagggccataaattactct

SEQ ID NO: 63666 - DNA, 600 bp, Chicken  19866894326884_1
tttgttacgactgacaaaagaaccaatgttgaacgtgatggtcaagtctgacatgctcaatgttttgcaagctatctgaatagcccatcagtgcatgaatttcttaagaatgacattatttcatgtcttggtgtagaagctcataaaagctgccttcatttcagccactcagtaatcagtgagttttcatcagaagttactgaaaagcagcatgagagcacataatagtaacacagagaaaggaacagtttaaaggattttttgtctggtttatgataataacaggattttatcaggagrtaaatttctactatacaatggtcattctttaattatagtttaaggactgtatgttagcatcttagatagtgtaaaaaaagaattatactcaagtgatttctttatttttaattcaaatgcaataaaggcaactcagtttttgttggctgttatatcagcttaaccaaggagttacattcaattcctgtgcatgtgtacatgggtgtatgaagattctaatgtgccatratcttcaagagagagactgagaggaaaaagagaaggtgaatatggggttgttccattttcatgctgttactt

SEQ ID NO: 63667 - DNA, 480 bp, Chicken  19866894326884_2
taacacagagaaaggaacagtttaaaggattttttgtctggtttatgataataacaggattttatcaggagrtaaatttctactatacaatggtcattctttaattatagtttaaggactgtatgttagcatcttagatagtgtaaaaaaagaattatactcaagtgatttctttatttttaattcaaatgcaataaaggcaactcagtttttgttggctgttatatcagcttaaccaaggagttacattcaattcctgtgcatgtgtacatgggtgtatgaagattctaatgtgccatratcttcaagagagagactgagaggaaaaagagaaggtgaatatggggttgttccattttcatgctgttacttcaaacatcaaaaattgagctgaacacaggaaataaagaggcaaagtaatttgaaatgatttagatgaattaggcttatggtctgataactaaattaagttgtgtatgt

SEQ ID NO: 63668 - DNA, 600 bp, Chicken  19866894328733_1
acaaaaactgtgtttattcctaaatacacagatacaggctcaggtaaaaagaacggattttctattttcagttgaattctccagatcttcaggatctccaggatccttcaggagatctccagatcttcaggaaccttcctgtaaactctttgataagcttcagagtacactgtttcacttcatttcctacttattaaatgtattttacttgaatattaatacttcaatttcttaacctctttataccacgagttgccatttttttccaacctctgattttgttttattctaccacagtasaactgaggtcatcacgttttgcaaaggtgttttgtcacagttttgcaagaacatctgaggctcttttcttgcttctgtgttaatccacaccgttctatgacaggctagaaatatatgttctctattcctcctcacacaggtctaacaagttactgcattttgatttttcacaaaccycaggaaagctgcacagcctgctyatttgactcagattccttcagttcatatacacgtattttccycttccaaataattctgaaagtctacctcacgtttctagtttacaacactgacttaatt

SEQ ID NO: 63669 - DNA, 600 bp, Chicken  19866894328733_2
cttcatttcctacttattaaatgtattttacttgaatattaatacttcaatttcttaacctctttataccacgagttgccatttttttccaacctctgattttgttttattctaccacagtasaactgaggtcatcacgttttgcaaaggtgttttgtcacagttttgcaagaacatctgaggctcttttcttgcttctgtgttaatccacaccgttctatgacaggctagaaatatatgttctctattcctcctcacacaggtctaacaagttactgcattttgatttttcacaaaccycaggaaagctgcacagcctgctyatttgactcagattccttcagttcatatacacgtattttccycttccaaataattctgaaagtctacctcacgtttctagtttacaacactgacttaattcctaagcttttataagagttttgaagtcagccatgcacaggacagcttttaaaaggaagaccaacagccatacaatgcttatttacaaaataggtagcacgtgcacagaaagtggaaccgctgctctccacaattatttgttgaaccctgcacagggaactttctcacagcaacact

SEQ ID NO: 63670 - DNA, 600 bp, Chicken  19866894328733_3
tattttacttgaatattaatacttcaatttcttaacctctttataccacgagttgccatttttttccaacctctgattttgttttattctaccacagtasaactgaggtcatcacgttttgcaaaggtgttttgtcacagttttgcaagaacatctgaggctcttttcttgcttctgtgttaatccacaccgttctatgacaggctagaaatatatgttctctattcctcctcacacaggtctaacaagttactgcattttgatttttcacaaaccycaggaaagctgcacagcctgctyatttgactcagattccttcagttcatatacacgtattttccycttccaaataattctgaaagtctacctcacgtttctagtttacaacactgacttaattcctaagcttttataagagttttgaagtcagccatgcacaggacagcttttaaaaggaagaccaacagccatacaatgcttatttacaaaataggtagcacgtgcacagaaagtggaaccgctgctctccacaattatttgttgaaccctgcacagggaactttctcacagcaacactaagcatcaaagccatgaacaaaa

SEQ ID NO: 63671 - DNA, 600 bp, Chicken  19866894328733_4
ataccacgagttgccatttttttccaacctctgattttgttttattctaccacagtasaactgaggtcatcacgttttgcaaaggtgttttgtcacagttttgcaagaacatctgaggctcttttcttgcttctgtgttaatccacaccgttctatgacaggctagaaatatatgttctctattcctcctcacacaggtctaacaagttactgcattttgatttttcacaaaccycaggaaagctgcacagcctgctyatttgactcagattccttcagttcatatacacgtattttccycttccaaataattctgaaagtctacctcacgtttctagtttacaacactgacttaattcctaagcttttataagagttttgaagtcagccatgcacaggacagcttttaaaaggaagaccaacagccatacaatgcttatttacaaaataggtagcacgtgcacagaaagtggaaccgctgctctccacaattatttgttgaaccctgcacagggaactttctcacagcaacactaagcatcaaagccatgaacaaaaccacttatctgtaataatatcagcccacatttgtaacaaaac

SEQ ID NO: 63672 - DNA, 600 bp, Chicken  19866894328733_5
aactcctggggaacaaaacaagttttgagacatgccagtactcatctcttctcagttgagcaacttagaacaactacttcccattaaatacatcactttaaattacctttttttacgttcttctctcttgaaacagtgttagaaaacagtgttgtgacacaaacatgcagcacttgcaaatagtaagtgcagaaatgaacagtaatcactcatgtggcaggagttatacagtcacagaagtcaccactgaaagatactttgttttaatgtaactctgctttgagtttgacaagctaaaawaaaggtaaataatacacaaaaacccttctgggtttaggcttcactctgcttgcacctcactaaccactattaggagtgatttaaakaactgaacaagtaacagaaggcacaaaaccaacacccaagcctcttacgatggcagttagcttcgatacttctgcaaccaacacctcgaggtcttcatttactttttctaccgacagcactcccattctaagggtctcaaagcataaatgtgttgtcagaacacgtagattgttttccagcgctcatttttgcccccttccccctcagaattcc

SEQ ID NO: 63673 - DNA, 600 bp, Chicken  19866894328733_6
aatacatcactttaaattacctttttttacgttcttctctcttgaaacagtgttagaaaacagtgttgtgacacaaacatgcagcacttgcaaatagtaagtgcagaaatgaacagtaatcactcatgtggcaggagttatacagtcacagaagtcaccactgaaagatactttgttttaatgtaactctgctttgagtttgacaagctaaaawaaaggtaaataatacacaaaaacccttctgggtttaggcttcactctgcttgcacctcactaaccactattaggagtgatttaaakaactgaacaagtaacagaaggcacaaaaccaacacccaagcctcttacgatggcagttagcttcgatacttctgcaaccaacacctcgaggtcttcatttactttttctaccgacagcactcccattctaagggtctcaaagcataaatgtgttgtcagaacacgtagattgttttccagcgctcatttttgcccccttccccctcagaattcctggataccagtgatcaatattgttctcacttcctgctcatgaccaaccttccagctacactggaggggtgggagaagtgagggcag

SEQ ID NO: 63674 - DNA, 600 bp, Chicken  19866894328740_1
aatgactgcaactcaactttcactttccactaattaaaatccagtcctctagattacaaattcacttctgttctgggagagtgccatggttatttttaattggagtaacttagtatcaagcaaccagggtgatctacctagtttggcaagggataaagcagctctctttgctgactacttgttgccataatacgtgccaagttttacttccaggaaggctataagaggaataaaacctgcacctcacattctacactttaattaagtgtctttaattaagatcttatctctttacttacraaggcaggggtaggatatggataggyctggttaatgggaaaactgaagaccagcgatttttcaccaaagtaattagtagacctgcatatcgtcacagattatttatacttctgtaatggctaattaaaaaggcaaacccacaggcattcaggcaactgaaatgcaggcctttacatccataacatcatttactatccagaactccaacagaaacaamtagctcrctcattaagggtgcatttgtgaggaaggcaaaaaaataagccagaatgccatgctagtctgaaataaccaagggtg

SEQ ID NO: 63675 - DNA, 600 bp, Chicken  19866894328740_2
ccactaattaaaatccagtcctctagattacaaattcacttctgttctgggagagtgccatggttatttttaattggagtaacttagtatcaagcaaccagggtgatctacctagtttggcaagggataaagcagctctctttgctgactacttgttgccataatacgtgccaagttttacttccaggaaggctataagaggaataaaacctgcacctcacattctacactttaattaagtgtctttaattaagatcttatctctttacttacraaggcaggggtaggatatggataggyctggttaatgggaaaactgaagaccagcgatttttcaccaaagtaattagtagacctgcatatcgtcacagattatttatacttctgtaatggctaattaaaaaggcaaacccacaggcattcaggcaactgaaatgcaggcctttacatccataacatcatttactatccagaactccaacagaaacaamtagctcrctcattaagggtgcatttgtgaggaaggcaaaaaaataagccagaatgccatgctagtctgaaataaccaagggtgcctttgagacacttgaacactcagct

SEQ ID NO: 63676 - DNA, 516 bp, Chicken  19866894328740_3
gctataagaggaataaaacctgcacctcacattctacactttaattaagtgtctttaattaagatcttatctctttacttacraaggcaggggtaggatatggataggyctggttaatgggaaaactgaagaccagcgatttttcaccaaagtaattagtagacctgcatatcgtcacagattatttatacttctgtaatggctaattaaaaaggcaaacccacaggcattcaggcaactgaaatgcaggcctttacatccataacatcatttactatccagaactccaacagaaacaamtagctcrctcattaagggtgcatttgtgaggaaggcaaaaaaataagccagaatgccatgctagtctgaaataaccaagggtgcctttgagacacttgaacactcagcttttgggaaagcaatgcaggagagctggagttgtgatcttctgacagtcacacatttgggaggaagtgggtttcttgtacattgcaccaaagatgctctttgcagagg

SEQ ID NO: 63677 - DNA, 509 bp, Chicken  19866894328740_4
gaggaataaaacctgcacctcacattctacactttaattaagtgtctttaattaagatcttatctctttacttacraaggcaggggtaggatatggataggyctggttaatgggaaaactgaagaccagcgatttttcaccaaagtaattagtagacctgcatatcgtcacagattatttatacttctgtaatggctaattaaaaaggcaaacccacaggcattcaggcaactgaaatgcaggcctttacatccataacatcatttactatccagaactccaacagaaacaamtagctcrctcattaagggtgcatttgtgaggaaggcaaaaaaataagccagaatgccatgctagtctgaaataaccaagggtgcctttgagacacttgaacactcagcttttgggaaagcaatgcaggagagctggagttgtgatcttctgacagtcacacatttgggaggaagtgggtttcttgtacattgcaccaaagatgctctttgcagagg

SEQ ID NO: 63678 - DNA, 600 bp, Chicken  19866894328747_1
ctgcttaaaggatcttaatgcttgtttttaaacagcgttgttgctgtgaggcggaactggtgcctgagctgcttacttcactggtgccttcaccacgtgccttgtgtaacccatgctggccattggcctcctcttgggcttcacacagtgctgagcggtggtggctggaccccaggcagcttcttggtgctgcggcaccgatggcagctcagccaggtgtggggaagctggtcctgtccatcgatcacatccccaccttcaggtggctttagctccttgcagttatttccactcctccartggaagggccagtgccccacactgttctgccgaggcagctgctcactgaagctcttcagtcttattaaagccaacgagacttaacaagttctcgtgtaatttagtagtgatggcctgagctgttggcacataggtctgtatgtggggttgctgcagttagggcagctcttctgcttttggggagctcctttctgggcagccaggagagtggcactggggaagggctgagcattggcacaggttgtgctggctgctttgctaatggccagctttgtaattacagtgtccagagttgcagca

SEQ ID NO: 63679 - DNA, 600 bp, Chicken  19866894328747_2
ctgagaaggaatatgctgtgacatacctttgtatggtacttttttttcaaggagggacaaaacagagaaggcagaacagtgattgctcaagagctgttgctctggttttgctgttaagatggtttccctacgttctgttttcgttggtgcaagtgggcagcgtggtaggttaagatggaaatgtgattttattttggaggattagctaacactgaagtgcataggagggaaaggaaaaggaaaaaatcacgaaccaacaaatcattctgcatgctgggtgctatatccatcttctaaaawctgatagaaaacttgaggaggaacttttggcacctcagatgaaatgcgctgttagatatcccttatttaatgtatttttttgccctaaccatagcaattacgattgttttgaaatactgtttttagcaactgtaataacaaagcatttaaaaaatggtcttttaactcttgaggtaatgactgagcattttagctgctgtagccatacttcatagtttgaaaaaacaacgatacgcagcaataaagagagattctcaagcacaacaaaagctgtttttatatactggttttcattaagtc

SEQ ID NO: 63680 - DNA, 600 bp, Chicken  19866894328755_1
tgtccactaactgccccaatcccccaaagtcccttttgttagccatcgagcttctctcagtgacttcattgctgccaccctgaactatcagtaagggataataatcagaacagagaaccagactagggagtcccttactaatgtccctcccccagggaggcagcacatgtccctacaaaggtgacatgcttcctttctagctgtaactttaagaaagaaatcaaaatgatgatggctgaactatatggacacaaatcatcattgaggtcactgaataaactgtaatctgcatctaggacrccagacagtggcaactgcagtctttctgtctgtagcagtcagcctgcaagccaaccctaagggccttatgtcactgtaaaaatgctaagaggcatttgagaaatatcttaagtatacttaaaaaataatcctgcttcaaaagaggtcagtagatatcaacatgttatttatttactgacaaacataaaaaagaaatgacctcattagtttcatagcttttcctccccctatggacaattctacatttagctggatgtgctgcagtaatgggaaacatgtaacatgcagtgggtactgggg

SEQ ID NO: 63681 - DNA, 600 bp, Chicken  19866894328755_2
cttaaaaaataatcctgcttcaaaagaggtcagtagatatcaacatgttatttatttactgacaaacataaaaaagaaatgacctcattagtttcatagcttttcctccccctatggacaattctacatttagctggatgtgctgcagtaatgggaaacatgtaacatgcagtgggtactggggctggttatttctactgactcatgtctctttctctgagactctcatgtcctaataaggcaaaatcatgttttattatgattcagtctcttcctctggtgtaataggaggagacatgkgataccttgggtacagtcttttgcattttctagaggagaaattctagtgagactactatttcaacaacaacaacaacaacaaatcccataatggtaatggaattaaaaaaagcaaaaacccttccccaaacaagaaccaaactacagtattttttttcctctttatatctttgcattatagcttacatcaggggatatatatatattttgtctgtatttttattttaaagctgtgcttcactgtttcttccttttatatattataatacaatttttagagtaggaaaaggtaaagaaatt

SEQ ID NO: 63682 - DNA, 600 bp, Chicken  19866894328758_1
acagagcctggcaccaccagtatggatggaaaatacttaaacattggtatagtatttcttctcaatttactccttatttcttgcagtgaagctttgattcttcttgactgaatttttcataggcctgtctagattttatttataaatattttggataccactaacaataaactcttgtctagtgtatgttatgagtgtgttgctgcctaccttgcaaagaacgtctatttcataggccagggaaagaggtgtgaggatgtgaccaaggtcgtctttcagagcatggcagtatgtgctgtwatttagtgactggcaggatatttagtgttttattgggcattatggagccaaactttactagagctctcagtactgatgatctgagcatcacttgccaacttgtaccctcagatgctgtgctatatctgcttaggtcagacttccattggagtaggggatatatttctgcttttcctaatatcaaaacaatgcccttcagcatgggttgcaattatgagaatcaatccagcctcaaagcaatgtcattgtcaatgctgtatgttgaattaaatgtagtcatactgctgtttacactggaaa

SEQ ID NO: 63683 - DNA, 600 bp, Chicken  19866894328761_1
acgattttttaaaaagtgcctaactcactggttctctattaaacctgcctactttatgcagtacctaagtatttctgtgtttctgtcctgtgcaactctatatatttcacagaagcctgtaaaaaattatgctgattagcaggtacttgcatctacaatgtacttctgtaccagctttgtcaataatctccttggaaatagcattagtattacagttcttcagaaatacgaactttaagtattttcagtacactcacataaagtatgatactcttcacagacaagttcccccaccccccmaaaaatgtaatcacctctagagcagttgataaaacatttttctaaaacactgtttcagcattgctgctgaacactgctggaaaaggtagacrccagagaacttaacatctaatcaagactaaaaaaaaaaaaaaaaaaaagaattacaaatccatcttattatctgccctgaatcagatttccttgactcctcttccacctaaacctaatataaactgagtttctctccatttcacttcctacaaccctaactgataataccaaatcaaaccaaaataacggggatgcaactaagcataa

SEQ ID NO: 63684 - DNA, 558 bp, Chicken  19866894328761_2
caactctatatatttcacagaagcctgtaaaaaattatgctgattagcaggtacttgcatctacaatgtacttctgtaccagctttgtcaataatctccttggaaatagcattagtattacagttcttcagaaatacgaactttaagtattttcagtacactcacataaagtatgatactcttcacagacaagttcccccaccccccmaaaaatgtaatcacctctagagcagttgataaaacatttttctaaaacactgtttcagcattgctgctgaacactgctggaaaaggtagacrccagagaacttaacatctaatcaagactaaaaaaaaaaaaaaaaaaaagaattacaaatccatcttattatctgccctgaatcagatttccttgactcctcttccacctaaacctaatataaactgagtttctctccatttcacttcctacaaccctaactgataataccaaatcaaaccaaaataacggggatgcaactaagcataaaatcaaatcaaaccaaagcaattgggatgcagccaataaccctctaccta

SEQ ID NO: 63685 - DNA, 600 bp, Chicken  19866894328763_1
gaaatgtaacaaaagaaaagggctgcataaatagctcatccaatacaatcctatggaaaaggtaaatcttttttcttgccttaccaagcatgatatagagtaacccagggctgtcagccaaacatttagagcatttggagggttcatatatacatggagccattgcgtggtgaatttccaagagggtcatatttcaatagacatagctttagatgttgaatttcctatagaggaagtccttagatgtagaagcacactcagaactacttaaaaaaggacctgcaagcaatgattgtgatrttatgcatcagatgtgctgctgtattagaggccagatgaaatgtaatgaaagatgaaaatagcagcagaagggcttccaggacaaggaagggtttactctcttggtctgttttattgtaggagtgctggagaattattctttttttaaataacatccaataaccatagctacagctgcttctgattgtacattcattattktgagctcatttatagcaatgactgtggartgctgctgcgttacagcattgctcctgtgctgttcgttaagcagtggtgtctttagtacaagctgaaact

SEQ ID NO: 63686 - DNA, 600 bp, Chicken  19866894328763_2
catagctttagatgttgaatttcctatagaggaagtccttagatgtagaagcacactcagaactacttaaaaaaggacctgcaagcaatgattgtgatrttatgcatcagatgtgctgctgtattagaggccagatgaaatgtaatgaaagatgaaaatagcagcagaagggcttccaggacaaggaagggtttactctcttggtctgttttattgtaggagtgctggagaattattctttttttaaataacatccaataaccatagctacagctgcttctgattgtacattcattattktgagctcatttatagcaatgactgtggartgctgctgcgttacagcattgctcctgtgctgttcgttaagcagtggtgtctttagtacaagctgaaactcagatcccttccttaccagttattcttccaacccctggcctcctcttgccagcctctcctgccacgtgtgctccaaggctgtgaccaatgatgtggacattggctgaagagtatgaatattgatcctgagraaataaatatttagaarataatttactacttcagttttcatcagcaacagagagaattaaaaaggggctg

SEQ ID NO: 63687 - DNA, 600 bp, Chicken  19866894328763_3
aggaagtccttagatgtagaagcacactcagaactacttaaaaaaggacctgcaagcaatgattgtgatrttatgcatcagatgtgctgctgtattagaggccagatgaaatgtaatgaaagatgaaaatagcagcagaagggcttccaggacaaggaagggtttactctcttggtctgttttattgtaggagtgctggagaattattctttttttaaataacatccaataaccatagctacagctgcttctgattgtacattcattattktgagctcatttatagcaatgactgtggartgctgctgcgttacagcattgctcctgtgctgttcgttaagcagtggtgtctttagtacaagctgaaactcagatcccttccttaccagttattcttccaacccctggcctcctcttgccagcctctcctgccacgtgtgctccaaggctgtgaccaatgatgtggacattggctgaagagtatgaatattgatcctgagraaataaatatttagaarataatttactacttcagttttcatcagcaacagagagaattaaaaaggggctggaaaccaaatcttactttgactacagcct

SEQ ID NO: 63688 - DNA, 600 bp, Chicken  19866894328763_4
aattattctttttttaaataacatccaataaccatagctacagctgcttctgattgtacattcattattktgagctcatttatagcaatgactgtggartgctgctgcgttacagcattgctcctgtgctgttcgttaagcagtggtgtctttagtacaagctgaaactcagatcccttccttaccagttattcttccaacccctggcctcctcttgccagcctctcctgccacgtgtgctccaaggctgtgaccaatgatgtggacattggctgaagagtatgaatattgatcctgagraaataaatatttagaarataatttactacttcagttttcatcagcaacagagagaattaaaaaggggctggaaaccaaatcttactttgactacagcctaatccagtagaggctcctataggattttggcacacttttgccagtttaggtacttaaacccaaaatacagattttttttttttaatttttatttttcccaaagcttctaatttatctgctgtcctcatttggatattcttaaaactctggacagctctagcatcaagtcctgagaggctcaacatcctttttacatcctag

SEQ ID NO: 63689 - DNA, 600 bp, Chicken  19866894328763_5
ataacatccaataaccatagctacagctgcttctgattgtacattcattattktgagctcatttatagcaatgactgtggartgctgctgcgttacagcattgctcctgtgctgttcgttaagcagtggtgtctttagtacaagctgaaactcagatcccttccttaccagttattcttccaacccctggcctcctcttgccagcctctcctgccacgtgtgctccaaggctgtgaccaatgatgtggacattggctgaagagtatgaatattgatcctgagraaataaatatttagaarataatttactacttcagttttcatcagcaacagagagaattaaaaaggggctggaaaccaaatcttactttgactacagcctaatccagtagaggctcctataggattttggcacacttttgccagtttaggtacttaaacccaaaatacagattttttttttttaatttttatttttcccaaagcttctaatttatctgctgtcctcatttggatattcttaaaactctggacagctctagcatcaagtcctgagaggctcaacatcctttttacatcctagacccatgaagagtaatt

SEQ ID NO: 63690 - DNA, 600 bp, Chicken  19866894328768_1
agctatggaaaccagccactttttcctagccctgcacactctacaaggcatgcagcagggcatgtaagagatgagtactctttaccccagctagccttaggactgcagtagcagcagacacaaagtcagctcctcatttcttccaaggtacagtaaaacagatcaaaaggtttcattatctgtgtgagcaagcatacagcagcttggcctcaaccacagagttacttttttcttccatagactttttttaagtaggccataaccacaaccaacacaaagcagacttcaagaagaaatggkaaaggaaattctgtgcagggaaaagcagggaatgtgaagcagttccattttatcagagatccatactggtcattcccactgagagtacatgtgtgttactgccaaactgataccagttgtayaacttacctgttaattttatccacaagtacttgcggtacttgaaaagaaattctttgtctttccagttctatctcacagatcagaggtttgcaatacagaagtggtgtgctttgtgtaaaaacatggtttaaagcaccctctatgcagaaagatttatcttgactcctgccaatayat

SEQ ID NO: 63691 - DNA, 600 bp, Chicken  19866894328768_2
aagtcagctcctcatttcttccaaggtacagtaaaacagatcaaaaggtttcattatctgtgtgagcaagcatacagcagcttggcctcaaccacagagttacttttttcttccatagactttttttaagtaggccataaccacaaccaacacaaagcagacttcaagaagaaatggkaaaggaaattctgtgcagggaaaagcagggaatgtgaagcagttccattttatcagagatccatactggtcattcccactgagagtacatgtgtgttactgccaaactgataccagttgtayaacttacctgttaattttatccacaagtacttgcggtacttgaaaagaaattctttgtctttccagttctatctcacagatcagaggtttgcaatacagaagtggtgtgctttgtgtaaaaacatggtttaaagcaccctctatgcagaaagatttatcttgactcctgccaatayataaaagcacagcaaaatcattgactctttcctagatttaatgtgacataagggagggtgacaaagataattcaccttaacactaatgcaactcttgctgaatccctgatcttgctagacaaca

SEQ ID NO: 63692 - DNA, 580 bp, Chicken  19866894328768_3
gkaaaggaaattctgtgcagggaaaagcagggaatgtgaagcagttccattttatcagagatccatactggtcattcccactgagagtacatgtgtgttactgccaaactgataccagttgtayaacttacctgttaattttatccacaagtacttgcggtacttgaaaagaaattctttgtctttccagttctatctcacagatcagaggtttgcaatacagaagtggtgtgctttgtgtaaaaacatggtttaaagcaccctctatgcagaaagatttatcttgactcctgccaatayataaaagcacagcaaaatcattgactctttcctagatttaatgtgacataagggagggtgacaaagataattcaccttaacactaatgcaactcttgctgaatccctgatcttgctagacaacaaaaatgcaactyagcatatttttatggatagatggtccaatactgaaacaatctgcacaaataagttgtgtggtctgcatcttgctctgagtgacttgttctacctagctctgcagtgaacagcaatcaactgattgtccctgccaacatcaacca

SEQ ID NO: 63693 - DNA, 444 bp, Chicken  19866894328768_4
aattttatccacaagtacttgcggtacttgaaaagaaattctttgtctttccagttctatctcacagatcagaggtttgcaatacagaagtggtgtgctttgtgtaaaaacatggtttaaagcaccctctatgcagaaagatttatcttgactcctgccaatayataaaagcacagcaaaatcattgactctttcctagatttaatgtgacataagggagggtgacaaagataattcaccttaacactaatgcaactcttgctgaatccctgatcttgctagacaacaaaaatgcaactyagcatatttttatggatagatggtccaatactgaaacaatctgcacaaataagttgtgtggtctgcatcttgctctgagtgacttgttctacctagctctgcagtgaacagcaatcaactgattgtccctgccaacatcaacca

SEQ ID NO: 63694 - DNA, 600 bp, Chicken  19866894328776_1
aacaaggatttaagcactccaagcttcttagagttttcacatgtactgtctatggtgcagcatttgctcactgctcactgaatgtcctcatgttaatgattattttgcacccagatgacttctagatatcatagtgggaacaatgtcaagacagttttttttggggggggtacatgttaaaaaaaaaaccccaaacctgtggtcttccattgtgtcttcgatgctggttacatgactttgctttcatatgttcaggagtaaagttgctaagccagcacacatctcccatatacaatcctkattcactgtaagggggacttgatttagcttaaactggctcttaaataatcctgaaatttgttcatatttgtaytgatacaagattaactgacaaaaaaaataaggggggggggggacagagaaccttcttagctttgtgtctggctgctataccctatattatgcatctcaccacactgttagcaatgtaaatggcagtctgcccacatggataagcaggtggcacacatacagctgagcatatctggcaagcaacatgttcaagtttgtctgccagcttaccagatttttggagccagt

SEQ ID NO: 63695 - DNA, 600 bp, Chicken  19866894328776_2
ctcactgaatgtcctcatgttaatgattattttgcacccagatgacttctagatatcatagtgggaacaatgtcaagacagttttttttggggggggtacatgttaaaaaaaaaaccccaaacctgtggtcttccattgtgtcttcgatgctggttacatgactttgctttcatatgttcaggagtaaagttgctaagccagcacacatctcccatatacaatcctkattcactgtaagggggacttgatttagcttaaactggctcttaaataatcctgaaatttgttcatatttgtaytgatacaagattaactgacaaaaaaaataaggggggggggggacagagaaccttcttagctttgtgtctggctgctataccctatattatgcatctcaccacactgttagcaatgtaaatggcagtctgcccacatggataagcaggtggcacacatacagctgagcatatctggcaagcaacatgttcaagtttgtctgccagcttaccagatttttggagccagtggtgaagttattgcacaaagagaaaggatcactgatcttcatcctctctcagaccttaagacattacaatgga

SEQ ID NO: 63696 - DNA, 600 bp, Chicken  19866894328787_1
tactggattacatagttcccttcagaagaactatattccatgaagtgagtgaggaattcctgtttttttttacagcaaaagcaatagctgtttatactgtaaatcttttctgaagcagaaccgggcaaaaatgtcttttctgcaagaaaattttgttcaagaccagattctggaaataagaagctcccccagcacagcagttttggggcagttccactcagtatcaaacaattccccaaggcaataaagctcctggaaagttaactcaactcttctctgatttgcactcatcaataagcycattcatttagttcccactgaataattcatcattactagcagtaaaagtatgcaaaccagggaaaaaatcagcttgacttttacatccctggacgaatgtatagtcaggaaaataagaagctggaaacttattttcttctcttagcatatgctagaaatggatgtggcagccatttcaagcactatgtcatggttctccatgaccacaaaatctttttcatgatgtctgagagcaaaaccagggagcccaaaaccagaggctcaggctggtgagtgctgcttggaagagccgtgccaggc

SEQ ID NO: 63697 - DNA, 600 bp, Chicken  19866894328788_1
gagaatgacttttgtcctgctccagctggaagctaagcataccagtatgaccagttgctgcacatcaggtgtgcagtgctaatttattaatctgtacttaatcagccatgagcctaacatagcatggttcgtcttctatattacttgttttgagagtgcagtcataacagttatgtcattctttgtaactgtattcttgaggtttccatttaaatcttatccattccatttaaaccttttgcaaacaaattcagatttctgtgttgctccaactcaactctttcaccattatccttaacrcagctacatattgcttatctatacagatggtgatggcttggtttggaacgctcgctttggatatcggcatagatatgttttaacatcagaccaaatttgaagaagtactttgcataagtaaatatattctttgcctcctgttyccagatatactgttaacttaaatatgaacactcagggaggattgagaaccgaataaggttgttgaagatgcattccctccattagtgcagtgttcgaattaggcacaaaaaatgtacaaatacaggtttggggcataaatgctsaatcacctgaaaa

SEQ ID NO: 63698 - DNA, 600 bp, Chicken  19866894328788_2
cttgttttgagagtgcagtcataacagttatgtcattctttgtaactgtattcttgaggtttccatttaaatcttatccattccatttaaaccttttgcaaacaaattcagatttctgtgttgctccaactcaactctttcaccattatccttaacrcagctacatattgcttatctatacagatggtgatggcttggtttggaacgctcgctttggatatcggcatagatatgttttaacatcagaccaaatttgaagaagtactttgcataagtaaatatattctttgcctcctgttyccagatatactgttaacttaaatatgaacactcagggaggattgagaaccgaataaggttgttgaagatgcattccctccattagtgcagtgttcgaattaggcacaaaaaatgtacaaatacaggtttggggcataaatgctsaatcacctgaaaacrctttccagtaaattaacaagagttycagagcttgtgtccttataggctacgttcatccacaatattagttgtgtaaaatccgttaaatttgcacatggaattagtttgacctctggagtttttaggatgttgctcacattt

SEQ ID NO: 63699 - DNA, 600 bp, Chicken  19866894328788_3
attatccttaacrcagctacatattgcttatctatacagatggtgatggcttggtttggaacgctcgctttggatatcggcatagatatgttttaacatcagaccaaatttgaagaagtactttgcataagtaaatatattctttgcctcctgttyccagatatactgttaacttaaatatgaacactcagggaggattgagaaccgaataaggttgttgaagatgcattccctccattagtgcagtgttcgaattaggcacaaaaaatgtacaaatacaggtttggggcataaatgctsaatcacctgaaaacrctttccagtaaattaacaagagttycagagcttgtgtccttataggctacgttcatccacaatattagttgtgtaaaatccgttaaatttgcacatggaattagtttgacctctggagtttttaggatgttgctcacatttggttctcattaagagaacaaaaaagaaaacagattattttatcaatctggtatgctatttcaaagaacaactcaacaacaaaacacacccttccagtatcactcaccaaggacagctagaacacaaattmatttttttttaata

SEQ ID NO: 63700 - DNA, 600 bp, Chicken  19866894328788_4
gctacatattgcttatctatacagatggtgatggcttggtttggaacgctcgctttggatatcggcatagatatgttttaacatcagaccaaatttgaagaagtactttgcataagtaaatatattctttgcctcctgttyccagatatactgttaacttaaatatgaacactcagggaggattgagaaccgaataaggttgttgaagatgcattccctccattagtgcagtgttcgaattaggcacaaaaaatgtacaaatacaggtttggggcataaatgctsaatcacctgaaaacrctttccagtaaattaacaagagttycagagcttgtgtccttataggctacgttcatccacaatattagttgtgtaaaatccgttaaatttgcacatggaattagtttgacctctggagtttttaggatgttgctcacatttggttctcattaagagaacaaaaaagaaaacagattattttatcaatctggtatgctatttcaaagaacaactcaacaacaaaacacacccttccagtatcactcaccaaggacagctagaacacaaattmatttttttttaatagctgaaactcaagag

SEQ ID NO: 63701 - DNA, 600 bp, Chicken  19866894328788_5
tggtgatggcttggtttggaacgctcgctttggatatcggcatagatatgttttaacatcagaccaaatttgaagaagtactttgcataagtaaatatattctttgcctcctgttyccagatatactgttaacttaaatatgaacactcagggaggattgagaaccgaataaggttgttgaagatgcattccctccattagtgcagtgttcgaattaggcacaaaaaatgtacaaatacaggtttggggcataaatgctsaatcacctgaaaacrctttccagtaaattaacaagagttycagagcttgtgtccttataggctacgttcatccacaatattagttgtgtaaaatccgttaaatttgcacatggaattagtttgacctctggagtttttaggatgttgctcacatttggttctcattaagagaacaaaaaagaaaacagattattttatcaatctggtatgctatttcaaagaacaactcaacaacaaaacacacccttccagtatcactcaccaaggacagctagaacacaaattmatttttttttaatagctgaaactcaagaggttcttcgtgataccacaatataaa

SEQ ID NO: 63702 - DNA, 440 bp, Chicken  19866894328788_6
gggcataaatgctsaatcacctgaaaacrctttccagtaaattaacaagagttycagagcttgtgtccttataggctacgttcatccacaatattagttgtgtaaaatccgttaaatttgcacatggaattagtttgacctctggagtttttaggatgttgctcacatttggttctcattaagagaacaaaaaagaaaacagattattttatcaatctggtatgctatttcaaagaacaactcaacaacaaaacacacccttccagtatcactcaccaaggacagctagaacacaaattmatttttttttaatagctgaaactcaagaggttcttcgtgataccacaatataaaaataacttgtataaatttctctctttaccaaggaaacttacagcatagcaatgtagtgatctggctttggtggtggtaggaaaatt

SEQ ID NO: 63703 - DNA, 488 bp, Chicken  19866894328795_1
tcccctcccctcccctcccaaggagcacttaataatgctgtttcaaatgtctcccattccaaataatctatctgtttaatcttgaatgtatctttttttaaaattattattattattcctcgaagaatgatataaagttgtttcaggaaagtagaatagaaaattcccagtgaagggcttctgttcactgctgagaaaagaaagttgattcaccccatggtaaatgatgcatgggatttgtcctgaattaaaaatagagtgatgaggaagcctgttagctctgctgtgctggtaagcttyattggtggaggggaagagcgtgcctccccaaagctggctggcagtaaaagtgggcaccgtgcccccagcactggctgcctatggggagaagctccatgcatggcagtagcccgcgactcagggggggttgcagtcttttttcttttagcattgacaatgaatatttcactggtgagcaaagcaaaaag

SEQ ID NO: 63704 - DNA, 600 bp, Chicken  19866894328823_1
aattaagacgagtgatgattggtgtatggcagatgttcatgctctttcatgggccagtgctcagtggtggcattggaggcatgtagtcatgtggtgcaggtccaaccttgtgctccatcagtcccatgtagaccatcactgggtgttgcacatgatctcactggaacactttgatggcacttggttccttccgatgatcctagaggctcaaagactcacagggagtaatacagatgtttcaggggtaccaggaggggaaggtctgccccccagggcaagatacaggccatatttctatcytgggttaacacttcagcttgtactggggcmtgccctggccgcctgtaccataccctttggccagatatctgcagctgcataactatgtcaggcaccaaatggggtgtcctgatctgccatagggacatgatggggtccctttagcaatgaagactggggtgttgaccagaatatcagtaggccatgtacctattaccggaaggactacctagcttcccacctccaataatctcccccaaggtgcaagtaggccactccgtataggtcctacctgaaccttccaagaccattttattctat

SEQ ID NO: 63705 - DNA, 600 bp, Chicken  19866894328823_2
agatgttcatgctctttcatgggccagtgctcagtggtggcattggaggcatgtagtcatgtggtgcaggtccaaccttgtgctccatcagtcccatgtagaccatcactgggtgttgcacatgatctcactggaacactttgatggcacttggttccttccgatgatcctagaggctcaaagactcacagggagtaatacagatgtttcaggggtaccaggaggggaaggtctgccccccagggcaagatacaggccatatttctatcytgggttaacacttcagcttgtactggggcmtgccctggccgcctgtaccataccctttggccagatatctgcagctgcataactatgtcaggcaccaaatggggtgtcctgatctgccatagggacatgatggggtccctttagcaatgaagactggggtgttgaccagaatatcagtaggccatgtacctattaccggaaggactacctagcttcccacctccaataatctcccccaaggtgcaagtaggccactccgtataggtcctacctgaaccttccaagaccattttattctatggatacctggttctaaattcccaggggcag

SEQ ID NO: 63706 - DNA, 600 bp, Chicken  19866894328844_1
tcagctgctcctaccagactttattaaaacattacaaccttggcaggatcaccttccgatggaacaagattaactgtgtggctgctgctccacgatgtgctcaggcaggtctctgttgagggaagactgaacaccaagcagatttgtagtgactttgagtgataaggagtatttgaaataagcaaaccgcttttaaaatgggagcctttagtctttggtttcaatcatttcacggaatgctttttacttattctgctgtggatcaatctcctgctgcagacggagaggagaaagatggcmgtgtctgcctaacacaatcataattgtctctgaagttgtcttttgcaaatgctgcttccttttattaaagaggagatttatcaagcagaacatacaggttttaggctgtcttggagatatggtataaagttaggaaagaaagaaagcaaacataattttgtctcctgtgtgccgggtctttgaatattgtaataggttaattggatcacggaaaggttgttttctgaaaacagagcaggttataagggataacagttttccaatgacacggatgaggtttgttttgtgggcatgaaattc

SEQ ID NO: 63707 - DNA, 600 bp, Chicken  19866894328847_1
gcagctatcagcactggcacatcctttcccttcacagtgttccgataaaatcactggctgtgctgcggtgcttctgccattttcttcttaggactgagaactgggataccaatgaattggtttcaagaaccagaaaacctgacttaatagaactaccaacaatcagaactttactgacgtgtataaaggtgagctcacagaatgaaaacaggcagtatccaacagaacagatgagcaattaaaagggatttggaggcattaaatgcattcccagcagctaaggtcacttaaaaagctcayggcaccgactgtcaagaaacgccaatgaactacttytgtcatagaaaaagctcagggctgagtaatctgctggtgattcatttactaataaatcaatgtggttcttcttttagagactatttctacttcccttgaaatataatcgtgaacctgtgttgatagagagcacagacattgcgtgatgctaattgtcaccacacctaaattactacctttgggtgctgcagtcttctttggaatgccgaattctgaatccgagtcagaatttacagtttccatcttcttggccttgggagccct

SEQ ID NO: 63708 - DNA, 600 bp, Chicken  19866894328847_2
gtgttccgataaaatcactggctgtgctgcggtgcttctgccattttcttcttaggactgagaactgggataccaatgaattggtttcaagaaccagaaaacctgacttaatagaactaccaacaatcagaactttactgacgtgtataaaggtgagctcacagaatgaaaacaggcagtatccaacagaacagatgagcaattaaaagggatttggaggcattaaatgcattcccagcagctaaggtcacttaaaaagctcayggcaccgactgtcaagaaacgccaatgaactacttytgtcatagaaaaagctcagggctgagtaatctgctggtgattcatttactaataaatcaatgtggttcttcttttagagactatttctacttcccttgaaatataatcgtgaacctgtgttgatagagagcacagacattgcgtgatgctaattgtcaccacacctaaattactacctttgggtgctgcagtcttctttggaatgccgaattctgaatccgagtcagaatttacagtttccatcttcttggccttgggagcccttttaggtttaggtggtacatctacttttgctgttag

SEQ ID NO: 63709 - DNA, 600 bp, Chicken  19866894328852_1
tattatattttctgtatttagcagcatgtttttaagcagaacttggaagtggtatatcaacagtaacttgtttatatcataatggtgtaagttatgtacctatatattagaatcaaatagttgtattatgaatactgtatgaaagcaatataaatactactacttgaaagtattaatcaaagttagtggtaacaataagaaagtactcttttgtttgttcctgcaaaggataataataagtacttcctgaacaaatctaattgatacagtgaaacctttttctttttaaaaagagactcsgaaattgtcmacgcttcacaaacagcaagtgatcagaaaaaaagacaattttcatttacttgaataatgaggcttttaactcagctccctcctttttggctataattaatgaccttcctgttcagttaatctggaatacatcacattaggctagacagattacaatgaaatgcagaaaaagaaattgaactaagaaattcatagtggcatttacttcctgtatatgttgccataataataatatccaggcaacagacaagagtgactattacaataaatcagaaggttraagagttgtgg

SEQ ID NO: 63710 - DNA, 600 bp, Chicken  19866894328852_2
tctgtatttagcagcatgtttttaagcagaacttggaagtggtatatcaacagtaacttgtttatatcataatggtgtaagttatgtacctatatattagaatcaaatagttgtattatgaatactgtatgaaagcaatataaatactactacttgaaagtattaatcaaagttagtggtaacaataagaaagtactcttttgtttgttcctgcaaaggataataataagtacttcctgaacaaatctaattgatacagtgaaacctttttctttttaaaaagagactcsgaaattgtcmacgcttcacaaacagcaagtgatcagaaaaaaagacaattttcatttacttgaataatgaggcttttaactcagctccctcctttttggctataattaatgaccttcctgttcagttaatctggaatacatcacattaggctagacagattacaatgaaatgcagaaaaagaaattgaactaagaaattcatagtggcatttacttcctgtatatgttgccataataataatatccaggcaacagacaagagtgactattacaataaatcagaaggttraagagttgtggttttgcttat

SEQ ID NO: 63711 - DNA, 600 bp, Chicken  19866894328852_3
aaagagactcsgaaattgtcmacgcttcacaaacagcaagtgatcagaaaaaaagacaattttcatttacttgaataatgaggcttttaactcagctccctcctttttggctataattaatgaccttcctgttcagttaatctggaatacatcacattaggctagacagattacaatgaaatgcagaaaaagaaattgaactaagaaattcatagtggcatttacttcctgtatatgttgccataataataatatccaggcaacagacaagagtgactattacaataaatcagaaggttraagagttgtggttttgcttatcatagaatcatagaattactcaggttggaaaggacctcaaagatcatcaagtccaactgcagcctaaccatagtaccctaactctaacaaccctccactaaatcatatctctgagcaccacatccaaacagctcttaaacacatccagggatggtgactcaaccacctccctggggagcctattccagtgcttaaccaccctttctgtaaagaagtgtttcctaacatccaacctaaacttgccttggcgcaacttgaggccatttccccttgtcttgt

SEQ ID NO: 63712 - DNA, 600 bp, Chicken  19866894328857_1
atcagcttagtcaggtacaagctaaacacaaaccccatgatttagctactcaaagagatcacagagttgtaggggctggaagggacctctagaggtcattgagtccaacccctgcaaagcaggctccctacagcaggttgcacacgtaggtgtccagaagggtcctgaatgtctccagagaaggagactccacaacctctctgggcagcctgttccagtgctccatcaccctcactatgaagaaattcttatgcacatttgtgcagaacttcctatgcttcagtttgtggccatttcccmttgtcctgtcaccatgcatcgctgaaaagagtctggcctygtccctttgcctcctacaccttagatatttatagacatggatcagatctcctctcagccttcttttctcaaggctgaacagatccaccttgctcagcctttcctcacaggggagatgctccaggccctttatcatctctgtggccctccgctggactctctccagaagaaccctgtcttttttgtactggggagcccagaactggacgcagtactcaaggtgaggcctgaccaaggcagagtagagggggaagatcacct

SEQ ID NO: 63713 - DNA, 600 bp, Chicken  19866894328857_2
tttagctactcaaagagatcacagagttgtaggggctggaagggacctctagaggtcattgagtccaacccctgcaaagcaggctccctacagcaggttgcacacgtaggtgtccagaagggtcctgaatgtctccagagaaggagactccacaacctctctgggcagcctgttccagtgctccatcaccctcactatgaagaaattcttatgcacatttgtgcagaacttcctatgcttcagtttgtggccatttcccmttgtcctgtcaccatgcatcgctgaaaagagtctggcctygtccctttgcctcctacaccttagatatttatagacatggatcagatctcctctcagccttcttttctcaaggctgaacagatccaccttgctcagcctttcctcacaggggagatgctccaggccctttatcatctctgtggccctccgctggactctctccagaagaaccctgtcttttttgtactggggagcccagaactggacgcagtactcaaggtgaggcctgaccaaggcagagtagagggggaagatcacctcccttgagctgctggccactctttttaatgcaccccagga

SEQ ID NO: 63714 - DNA, 600 bp, Chicken  19866894328859_1
ggagccattcatgcacatatttaatgttatggtttgtacagagcaggtaactggcaggcgactcctccatttaggttctgcttcgattggaagctgcaactttacaccaaggtgcacacagaatcatagaatccctccattggaaggaacccataaggcccactgagttcagttccctgctccacacaggagtaccccaaatatcagaccaaaagactgagagtggtatccatacaccccttgaactcctgcatttggggccgtgcccacagccctgtgcagcccgttccatgcccaccrccctctggtgcagcccctttccctcacccccagctgcccctcccatgacagctccatgccgttccctcaggccctgtctctgtcacagacagcagagctcaacgctgcctctgggctccctgtgaggagctgcagccaccatgaggcctcccctcatctcctctgctctgcgctgagcacaccgaggggccacagctgttccccacatgtcttcccctccagaatcttcattatctttgtagccctcgtttggacactctcatatatgtgtgcctcatgcagtccccatggggtttgttg

SEQ ID NO: 63715 - DNA, 600 bp, Chicken  19866894328859_2
atatatgtgtgcctcatgcagtccccatggggtttgttgctacagcagtttgtggagttacagtcatgcacatttttagaaagtagctactaaaaggaagtgaccgtatgggtccagtacacagctcagtgcatcgggcaggaaaccaaagaggaaggggaaacaaatccaccttccaactccccagcctgtccttgacaaatcagcgctctgaaacccaagccacagagcaacaccacagctcctttcaagagaaagacagagctccctcgtcacgctactcttagtgtcttctttttsytgacatcccttttttcggtaaattttgtgtgtattccaggtatacagacagtcttaaaattcacctcacaaacacctgtctgtatacgttcataaccagtgtgggccttgattcatcagacaattcaagtacttactgaacttcaggcacgtgcagagtgcttttgaatcggtggagtgattcatgcccttcaatccaggcacacgtttcattacctggctgaaccatggccgaaagccattcacttaacattagggttgttttattttataaatagcattattaactttctgcctttg

SEQ ID NO: 63716 - DNA, 600 bp, Chicken  19866894328859_3
tatatgtgtgcctcatgcagtccccatggggtttgttgctacagcagtttgtggagttacagtcatgcacatttttagaaagtagctactaaaaggaagtgaccgtatgggtccagtacacagctcagtgcatcgggcaggaaaccaaagaggaaggggaaacaaatccaccttccaactccccagcctgtccttgacaaatcagcgctctgaaacccaagccacagagcaacaccacagctcctttcaagagaaagacagagctccctcgtcacgctactcttagtgtcttctttttsytgacatcccttttttcggtaaattttgtgtgtattccaggtatacagacagtcttaaaattcacctcacaaacacctgtctgtatacgttcataaccagtgtgggccttgattcatcagacaattcaagtacttactgaacttcaggcacgtgcagagtgcttttgaatcggtggagtgattcatgcccttcaatccaggcacacgtttcattacctggctgaaccatggccgaaagccattcacttaacattagggttgttttattttataaatagcattattaactttctgcctttgt

SEQ ID NO: 63717 - DNA, 570 bp, Chicken  19866894328859_4
agcagtcaaaaaggcgcatagtcatgttttaatttgtaacttgtagacactggagaactttgcacctcctatacactaatgtgttgattcactgagaggaaggaaaaggtttattttttcaggaaaaatgttgaagtagtttcatagcaaggaatactactggtagatttattgtatttggtttatgaactgtttttttacttttaatcttatattgttactgtcttaaggtatcataactgatgagatacaagaaatattagaggtatatatgtattatataaacaagtatgcacaatrtgtatgtgtaataagtatgtaaaataagtaatgagtaaatgttatatacagtgatctgtaatcctgcaaggcaaaatgtggtgcttttattttccttttatttttgttgagggtgcagaaagtcatgtgaagaaagaactacttcctgagcatcagtctgtatgccacctactccatgtattctgatctcaaagctaagtaggatcagtctgggtcagttcttggatcagagctccagggagaactcaagtgctatatacaggaaacaac

SEQ ID NO: 63718 - DNA, 600 bp, Chicken  19866894328863_1
agtggtcatgcagtcgttaacatgaactaaatgagctggacttgaattcactccatttcttcatgtggatgcagcatgtactggcttgagctgaattaatacatgttaattaaataccacctaagcacagcttttcctctagatcggacaaagctgacacactgcctacagacccttctccgtccaaccttcagtacacacaggatgtggctctctatttattttatcttattccattttttctccaggactcctaattcttccagcgtatctgagatggatggagaataaagcagaccmatgtcacgtatgaagcaggaagaagtgggatagttatgtggttaaggtaattggctgtgatctgggagaagtagcttttatctctgtttctgtcataaggttcctgtgggaggttgagcttaaatctctcaccaaatttttggaagtagctgctaatattttcttcattattttctgggaattccatgtagggcactggagcctgattttcacaaagacagctgaagtcaataaaacctgcagatgtggggccgctctgagaatttgaggtcttgggtggttggcactgtacagcaagca

SEQ ID NO: 63719 - DNA, 600 bp, Chicken  19866894328867_1
ttttgtatgcaagagaaaagtgaacttctcaaagtatgagttactagtcctcttgcccaccaatcagtgtaattctgtggtcagacatttgaactgggctttaggagacttggcttgaatcccagttctgtcaagagcctaccgagtgtttgtggtcaggtctcatgctctccatataccttagcctcccagccagtaaaacgggaacgttattctcctagtatcttcataccacagcttcacctgactttgatggtgctgcattcatcataccattttaaatcagctgtgggtctgtcrgcctacccttaccaaaacctaaatcttctagtggaaggaataatcttagcagctgtactcatctgtgactaatgcaagacacctaaaatgttcaacgctgattgaattcagtcaattgcagatcttccaggtatcaactctactgatgccagtaaaaataaaaaaagggaattacttagagagaagcagcagcactgaaatttcagcccctggttaataagactatcaattctgagccataacagtagtgctcaaaagttatagaatctatcaggagccagaaactccttccagcaaaac

SEQ ID NO: 63720 - DNA, 527 bp, Chicken  19866894328879_1
tattaaaagtttgtctcaatgttcattttcatttagctgctctataaggaagcatttattgctagaatgtttacagttggtgcatagataaatcacaaacaggaatttaattctttgctagttactcatatgagttccattacagccacgctgcaggcagtgatgcacttcaaggattgtgctgatgctgatgttatgaagaagaacaaagtttaaatgggtctgtaaatgtcagcaaaatcttgatagtaaattatgaccttgctattgactcctcagtacctttagctacattttacrcatttcacataatgaaagtgtaatgctccttaaatcgcataaacaaaaggggagcacaactgaccacactcaccaaaacagaacaccagatatttattaggagttctttgaagttatttatagaagttaaagtcatctgtaggaaagcaataatatccagaaagtagtgttgcaagaaatactagtgtctgtattcttggggggaattagatttttttcattatttt

SEQ ID NO: 63721 - DNA, 600 bp, Chicken  19866894328888_1
agataacatttagaaggctttctggttaataaatgcaggggttgggaacggcagcgtgagaagagctggatataactttgtgccgtaggacctgttagtaaaagtcacgtgaataaattatagacccagcagaggtcatcttctacgtcaagggaaaaagctgactgcctgattacaacacactcccactcgaagacccacacatacgatcctaagaaccagaactccaaaaggctttttgggagcaacagaagagaaagggggaatttgttgtctgtagcgtttagctgggttttatamgaaaacaaatgcagcctggtgataaatggctgtagccatggagattctccaaaggaatgatagggaaattctgtggaagttgtcatttacagcagaggagttcagcagagtatacattattgtgtgttttggaacttgccatggaaatatacatggaaggaaggagaaagaggaacatacctgtcctttgcaagcactgtaggacagactgaagcttcttcatagaaaatagatgttaattctgtaattactattttatgtccatactgagattcctctctgcttaaggtgatcacagga

SEQ ID NO: 63722 - DNA, 600 bp, Chicken  19866894328891_1
tgacacaggttaaggataatttttttgtgattccagctccctgtggagctctcatctcctcagtacatggcctagttggtttgctgattctaacactcttctaagcaaacacaagtgttaaacattttaaaacatattttaaacacatgccttctcatttataaaagacccaggcttaaacacaacaaggttttaggaaactttaggaagacataaagtaaaaggacaaactcattgcatgtaatttcatctggtaacaatcaccatcttgtgatattttcctccatcatcttgtccctsagcaatccttacaaccaagaagactgaagtgagaaagatgattctcatttctccattaagaaattatattatgacatcttgcactgtataagaggttgaaataaggcttcttgagacaggactacaacccttagttatcagtggagtgctagtgagagccagaaattatggtgggaattgaagcaggaattgatatagaaagygcattttaggatctacagaggaatcaggaacctctgggaaggttgagagcatatgaggaggggagagagagaggaaagagaaccacaaagatgatca

SEQ ID NO: 63723 - DNA, 506 bp, Chicken  19866894328891_2
taggaagacataaagtaaaaggacaaactcattgcatgtaatttcatctggtaacaatcaccatcttgtgatattttcctccatcatcttgtccctsagcaatccttacaaccaagaagactgaagtgagaaagatgattctcatttctccattaagaaattatattatgacatcttgcactgtataagaggttgaaataaggcttcttgagacaggactacaacccttagttatcagtggagtgctagtgagagccagaaattatggtgggaattgaagcaggaattgatatagaaagygcattttaggatctacagaggaatcaggaacctctgggaaggttgagagcatatgaggaggggagagagagaggaaagagaaccacaaagatgatcagagggctggagcacctttcctgtggggatggtctgatagagccaggcttgttcagcatggagaagactccaaggagacctcattgcagccttgcagtacttaaagggag

SEQ ID NO: 63724 - DNA, 599 bp, Chicken  19866894328904_1
  misc_feature (1)..(78): n is any nucleotide
nnnnnnnnnnnnnnnnnnnnnnnnnnnnnnnnnnnnnnnnnnnnnnnnnnnnnnnnnnnnnnnnnnnnnnnnnnnnnntgaaaggcagactgaacattttttttttttgcagacgtagatgttggtgcagattgaaataactcattgacagctgtgtcttaccttgtatttttaatcatttgtaaacatccttcacaattatgtgcttctggtgagctagtagacgtgacggttgtcactcaaacctgatatcaaggaaaatagaaactgagcactccattattgtggacagcatccctygagtctctctcccatcaatctaactctgtggcaaagttgtattatggacaaagaccacatctattgtagcagcaaatgttggcttagttctgggcacggaacttaacctccacttaagcttctaaaactgtttacatcggttgggacacagctgtgcctaaggctcctttgtgttttaatcttaataaaattgagagaacaaattacagagcaggcaagatgtgggagtattttctgaaccccggtggcttctgggacggaccaaacggcactgcggtattgatatgacagagcctgtg

SEQ ID NO: 63725 - DNA, 600 bp, Chicken  19866894328912_1
ggcaggaaggagcagctgcagaacggctatagactggagtggcccaagattctctcttgaagtcatgggcttgctttctccttttctgcactgtattttagccagtgctttttctatgtcagtggagtcatactcattttccacaggtagaactccacagacaagcaagtatgttacttgggaagtccctctacccaaaaccatctgcaatttcccctgtaattaaaaacaagaacttcagttccgcatggccttcttgcctgttacaaccccaggttatcatttgtacaattatttatmctcagacctaactttaaaactaggaattggaaaaagccctataaaaacaggatacagagtccatatccaagtcattaaaaaacgaaaggaatcaaggctttccttgattttggatagtccgtaaatgtcttgagatagtacctgaaagagaacaagcaagagaatgaaggtgcatatgagcmagaaaactgcacagtttcaatacagctcagctgaggtaccttaaaatgcctccaatctaccttgctttgcaacctctctgtgttactctgcaaaaggacattctcaagagatttacac

SEQ ID NO: 63726 - DNA, 600 bp, Chicken  19866894328912_2
aagtccctctacccaaaaccatctgcaatttcccctgtaattaaaaacaagaacttcagttccgcatggccttcttgcctgttacaaccccaggttatcatttgtacaattatttatmctcagacctaactttaaaactaggaattggaaaaagccctataaaaacaggatacagagtccatatccaagtcattaaaaaacgaaaggaatcaaggctttccttgattttggatagtccgtaaatgtcttgagatagtacctgaaagagaacaagcaagagaatgaaggtgcatatgagcmagaaaactgcacagtttcaatacagctcagctgaggtaccttaaaatgcctccaatctaccttgctttgcaacctctctgtgttactctgcaaaaggacattctcaagagatttacaccaatatttaattcaggaattcagctcacaggagcacttcaattccaaagtgctgcagaggcagcaagggaccctcaggaaaagtcatgtttaccaggctcagtgacaagatgtcttaatgtggaaggagcagtgaygtaagtagagctacttaaatgaccatcaggcccatttaacagtttt

SEQ ID NO: 63727 - DNA, 600 bp, Chicken  19866894328912_3
agtacctgaaagagaacaagcaagagaatgaaggtgcatatgagcmagaaaactgcacagtttcaatacagctcagctgaggtaccttaaaatgcctccaatctaccttgctttgcaacctctctgtgttactctgcaaaaggacattctcaagagatttacaccaatatttaattcaggaattcagctcacaggagcacttcaattccaaagtgctgcagaggcagcaagggaccctcaggaaaagtcatgtttaccaggctcagtgacaagatgtcttaatgtggaaggagcagtgaygtaagtagagctacttaaatgaccatcaggcccatttaacagttttttccagtgcactgytgtaccttcacccagttgcaaacaggctaatatgcttcttgtatataacattaaatttcagttttattttggattccagccctgtccctctgccccctccctggcattttgcaatatgcgttccatgagcaagaggcagcacgctgcaggaagcagttcgagttttgatacctgtgatggtggtaagcacggggcccaatgcagcaaagagtgaaaaaggcaaaggtgaaggctggtagg

SEQ ID NO: 63728 - DNA, 600 bp, Chicken  19866894328912_4
tttcaatacagctcagctgaggtaccttaaaatgcctccaatctaccttgctttgcaacctctctgtgttactctgcaaaaggacattctcaagagatttacaccaatatttaattcaggaattcagctcacaggagcacttcaattccaaagtgctgcagaggcagcaagggaccctcaggaaaagtcatgtttaccaggctcagtgacaagatgtcttaatgtggaaggagcagtgaygtaagtagagctacttaaatgaccatcaggcccatttaacagttttttccagtgcactgytgtaccttcacccagttgcaaacaggctaatatgcttcttgtatataacattaaatttcagttttattttggattccagccctgtccctctgccccctccctggcattttgcaatatgcgttccatgagcaagaggcagcacgctgcaggaagcagttcgagttttgatacctgtgatggtggtaagcacggggcccaatgcagcaaagagtgaaaaaggcaaaggtgaaggctggtagggaccaggtagcgatggcaaaaccaaaccattccacgatttctccaaagtagttggctcca

SEQ ID NO: 63729 - DNA, 600 bp, Chicken  19866894328924_1
ccttatacatccaaaactgagcatttgcaaaaggtttcttgaatgcaaaggtcagaaatgcatgtctgcgttctgctagaaggccagcttttagaggctggggcacaggtgtggaactggggaacgagaactctttgaaacagctttctgtgtaataatagctgaattacattttttcatcatgagtgtagcaaaatttggtgatgctttatcctgaatccaaagctgatctacacgcagtctgagagagggaatagcacagagctgactgcaatcctttcactttaccttagtgacagygtcctgatgtcatgttagttggtagggggaaaacaatcataaagacatttttcaagaccaaactttgcacgtctttctacttcagtatatttttaaccaatgtgcagctctacaccaaacaatgattgtttgtagtaataagagctgaattcattttttagtaacctttctaagaatatttacacaatattccttgatccccagctgaggtacctggctaactgtgtatacctgtgtgtctatgtacacrcacacacacaagcatgcacccctaaggtttagctgggttaaatagaattg

SEQ ID NO: 63730 - DNA, 520 bp, Chicken  19866894328924_2
ggaatagcacagagctgactgcaatcctttcactttaccttagtgacagygtcctgatgtcatgttagttggtagggggaaaacaatcataaagacatttttcaagaccaaactttgcacgtctttctacttcagtatatttttaaccaatgtgcagctctacaccaaacaatgattgtttgtagtaataagagctgaattcattttttagtaacctttctaagaatatttacacaatattccttgatccccagctgaggtacctggctaactgtgtatacctgtgtgtctatgtacacrcacacacacaagcatgcacccctaaggtttagctgggttaaatagaattgctccaaaacatgactgaacttacctgtggagtatgcatggttcagcctggcccattttgattgcttttccttattctgcatgaaatggcaagagagtgcttcttccttgggtggtgagctgaagctcttaggggaaaaaggcttatttttcccccaggcttagcctgtca

SEQ ID NO: 63731 - DNA, 600 bp, Chicken  19866894328927_1
cagttgatgtcaccagtgaaattgggcaggttagccttcccatccatcccataattgtcctctgttaaaagaaagaataaagcctaatggtgaacaccagcttaaaggtgcaagcaaaggtgctgcgtgcgtttctcctcccatttccttgaaagcaccactatgcatagcatatgtatctcaaactcgaagatgctccacatcttcagtcattttcctaatgattgtggcctcaggtgagtcacagctcctgcagaacacacagcagtgaaacccctgttttctgctgcatccttggastgagtaaaacagggcwgaatctgccctttatggggttttgtgatgtcatctaaagatagatcttccctatggtatttcaaggcataagagttgcttcaatacatgactaatccatttgcctttcctaaacattccaccaaatggtgcaatgaacaaacagtggttgagtataatagatgggactaattctgaaagccattactgacaagaacttcaacaaagtccataggaatttgatgtgtakcttgagatgtaagttcagcaaaccaactagccaagttttatttaataaattagagt

SEQ ID NO: 63732 - DNA, 518 bp, Chicken  19866894328927_10
ttgatgtgtakcttgagatgtaagttcagcaaaccaactagccaagttttatttaataaattagagtctaaggtagtttctataccttgtamgtattcactttaatttacatggagcacagagaagaaataaaatctgtaaaagtttggtgtgaattaagttataggactttaccactctgtaggatattgttaaaatttagatagaatatctcctatagtttttattttttattaaaatatctaaggtttatccaacaatatatctgaataacgagcaatggaacaactacagtgactygggtcatcaaatgtactgtgaaatccattttatacactgaatacgattctttcatataatttacagcacgtccaaatattttccctaaaaaatagcctacaaggaaaaaataattaggtaatgcagaaggcattcaggggaaagtggcagacctgtcctcacaaagatctcgtaggcaatatttagcaatcagttcactggggatgacttattctttt

SEQ ID NO: 63733 - DNA, 600 bp, Chicken  19866894328927_2
tgaaattgggcaggttagccttcccatccatcccataattgtcctctgttaaaagaaagaataaagcctaatggtgaacaccagcttaaaggtgcaagcaaaggtgctgcgtgcgtttctcctcccatttccttgaaagcaccactatgcatagcatatgtatctcaaactcgaagatgctccacatcttcagtcattttcctaatgattgtggcctcaggtgagtcacagctcctgcagaacacacagcagtgaaacccctgttttctgctgcatccttggastgagtaaaacagggcwgaatctgccctttatggggttttgtgatgtcatctaaagatagatcttccctatggtatttcaaggcataagagttgcttcaatacatgactaatccatttgcctttcctaaacattccaccaaatggtgcaatgaacaaacagtggttgagtataatagatgggactaattctgaaagccattactgacaagaacttcaacaaagtccataggaatttgatgtgtakcttgagatgtaagttcagcaaaccaactagccaagttttatttaataaattagagtctaaggtagtttctat

SEQ ID NO: 63734 - DNA, 600 bp, Chicken  19866894328927_3
aagcaccactatgcatagcatatgtatctcaaactcgaagatgctccacatcttcagtcattttcctaatgattgtggcctcaggtgagtcacagctcctgcagaacacacagcagtgaaacccctgttttctgctgcatccttggastgagtaaaacagggcwgaatctgccctttatggggttttgtgatgtcatctaaagatagatcttccctatggtatttcaaggcataagagttgcttcaatacatgactaatccatttgcctttcctaaacattccaccaaatggtgcaatgwacaaacagtggttgagtataatagatgggactaattctgaaagccattactgacaagaacttcaacaaagtccataggaatttgatgtgtakcttgagatgtaagttcagcaaaccaactagccaagttttatttaataaattagagtctaaggtagtttctataccttgtamgtattcactttaatttacatggagcacagagaagaaataaaatctgtaaaagtttggtgtgaattaagttataggactttaccactctgtaggatattgttaaaatttagatagaatatctcctata

SEQ ID NO: 63735 - DNA, 600 bp, Chicken  19866894328927_4
agcaccactatgcatagcatatgtatctcaaactcgaagatgctccacatcttcagtcattttcctaatgattgtggcctcaggtgagtcacagctcctgcagaacacacagcagtgaaacccctgttttctgctgcatccttggastgagtaaaacagggcwgaatctgccctttatggggttttgtgatgtcatctaaagatagatcttccctatggtatttcaaggcataagagttgcttcaatacatgactaatccatttgcctttcctaaacattccaccaaatggtgcaatgawcaaacagtggttgagtataatagatgggactaattctgaaagccattactgacaagaacttcaacaaagtccataggaatttgatgtgtakcttgagatgtaagttcagcaaaccaactagccaagttttatttaataaattagagtctaaggtagtttctataccttgtamgtattcactttaatttacatggagcacagagaagaaataaaatctgtaaaagtttggtgtgaattaagttataggactttaccactctgtaggatattgttaaaatttagatagaatatctcctatag

SEQ ID NO: 63736 - DNA, 600 bp, Chicken  19866894328927_5
gcaccactatgcatagcatatgtatctcaaactcgaagatgctccacatcttcagtcattttcctaatgattgtggcctcaggtgagtcacagctcctgcagaacacacagcagtgaaacccctgttttctgctgcatccttggastgagtaaaacagggcwgaatctgccctttatggggttttgtgatgtcatctaaagatagatcttccctatggtatttcaaggcataagagttgcttcaatacatgactaatccatttgcctttcctaaacattccaccaaatggtgcaatgaawaaacagtggttgagtataatagatgggactaattctgaaagccattactgacaagaacttcaacaaagtccataggaatttgatgtgtakcttgagatgtaagttcagcaaaccaactagccaagttttatttaataaattagagtctaaggtagtttctataccttgtamgtattcactttaatttacatggagcacagagaagaaataaaatctgtaaaagtttggtgtgaattaagttataggactttaccactctgtaggatattgttaaaatttagatagaatatctcctatagt

SEQ ID NO: 63737 - DNA, 600 bp, Chicken  19866894328927_6
caccactatgcatagcatatgtatctcaaactcgaagatgctccacatcttcagtcattttcctaatgattgtggcctcaggtgagtcacagctcctgcagaacacacagcagtgaaacccctgttttctgctgcatccttggastgagtaaaacagggcwgaatctgccctttatggggttttgtgatgtcatctaaagatagatcttccctatggtatttcaaggcataagagttgcttcaatacatgactaatccatttgcctttcctaaacattccaccaaatggtgcaatgaacwaacagtggttgagtataatagatgggactaattctgaaagccattactgacaagaacttcaacaaagtccataggaatttgatgtgtakcttgagatgtaagttcagcaaaccaactagccaagttttatttaataaattagagtctaaggtagtttctataccttgtamgtattcactttaatttacatggagcacagagaagaaataaaatctgtaaaagtttggtgtgaattaagttataggactttaccactctgtaggatattgttaaaatttagatagaatatctcctatagtt

SEQ ID NO: 63738 - DNA, 600 bp, Chicken  19866894328927_7
cagctcctgcagaacacacagcagtgaaacccctgttttctgctgcatccttggastgagtaaaacagggcwgaatctgccctttatggggttttgtgatgtcatctaaagatagatcttccctatggtatttcaaggcataagagttgcttcaatacatgactaatccatttgcctttcctaaacattccaccaaatggtgcaatgaacaaacagtggttgagtataatagatgggactaattctgaaagccattactgacaagaacttcaacaaagtccataggaatttgatgtgtakcttgagatgtaagttcagcaaaccaactagccaagttttatttaataaattagagtctaaggtagtttctataccttgtamgtattcactttaatttacatggagcacagagaagaaataaaatctgtaaaagtttggtgtgaattaagttataggactttaccactctgtaggatattgttaaaatttagatagaatatctcctatagtttttattttttattaaaatatctaaggtttatccaacaatatatctgaataacgagcaatggaacaactacagtgactygggtcatcaaa

SEQ ID NO: 63739 - DNA, 600 bp, Chicken  19866894328927_8
ctttatggggttttgtgatgtcatctaaagatagatcttccctatggtatttcaaggcataagagttgcttcaatacatgactaatccatttgcctttcctaaacattccaccaaatggtgcaatgaacaaacagtggttgagtataatagatgggactaattctgaaagccattactgacaagaacttcaacaaagtccataggaatttgatgtgtakcttgagatgtaagttcagcaaaccaactagccaagttttatttaataaattagagtctaaggtagtttctataccttgtamgtattcactttaatttacatggagcacagagaagaaataaaatctgtaaaagtttggtgtgaattaagttataggactttaccactctgtaggatattgttaaaatttagatagaatatctcctatagtttttattttttattaaaatatctaaggtttatccaacaatatatctgaataacgagcaatggaacaactacagtgactygggtcatcaaatgtactgtgaaatccattttatacactgaatacgattctttcatataatttacagcacgtccaaatattttccctaaaaaa

SEQ ID NO: 63740 - DNA, 600 bp, Chicken  19866894328927_9
gtatttcaaggcataagagttgcttcaatacatgactaatccatttgcctttcctaaacattccaccaaatggtgcaatgaacaaacagtggttgagtataatagatgggactaattctgaaagccattactgacaagaacttcaacaaagtccataggaatttgatgtgtakcttgagatgtaagttcagcaaaccaactagccaagttttatttaataaattagagtctaaggtagtttctataccttgtamgtattcactttaatttacatggagcacagagaagaaataaaatctmtaaaagtttggtgtgaattaagttataggactttaccactctgtaggatattgttaaaatttagatagaatatctcctatagtttttattttttattaaaatatctaaggtttatccaacaatatatctgaataacgagcaatggaacaactacagtgactygggtcatcaaatgtactgtgaaatccattttatacactgaatacgattctttcatataatttacagcacgtccaaatattttccctaaaaaatagcctacaaggaaaaaataattaggtaatgcagaaggcattcagg

SEQ ID NO: 63741 - DNA, 600 bp, Chicken  19866894328932_1
ccctgttcaacctaatgcgtctttctgttgctgttttttcttagcctgatatctactactgtttctcccctattcataaggccttttactgtgttgctgaaggaaatcagattggcttgaccacatctgttcttgataaatctgtggtggctactgcttgcctgattatctcctcagtgcttaccaatagtttgattctaagtttctcagggggttgacgttaaactgatgaatcaataattctttttgctcctccaagggatgtttgactttttctggtcttgcaatacttcagcggtyctcaacagtttctcacaattactgaaaaaggtctgaggctacctgagacagtggtgtgtgcaaggatgaagttcaactagcttaaccagccacctggttgcaatgaaccatttagtgaagacatacaaagggaaaaactaacaaatgaagcyttttgtctcctcagcatcatctgttaatttcattccttcagtactgagcaggggaagaaaccttttccttcctcttccattaattgctaatacaattacacaatgatttattggtatctctaaagctccctgctacttctatttcaca

SEQ ID NO: 63742 - DNA, 574 bp, Chicken  19866894328932_2
actgcttgcctgattatctcctcagtgcttaccaatagtttgattctaagtttctcagggggttgacgttaaactgatgaatcaataattctttttgctcctccaagggatgtttgactttttctggtcttgcaatacttcagcggtyctcaacagtttctcacaattactgaaaaaggtctgaggctacctgagacagtggtgtgtgcaaggatgaagttcaactagcttaaccagccacctggttgcaatgaaccatttagtgaagacatacaaagggaaaaactaacaaatgaagcyttttgtctcctcagcatcatctgttaatttcattccttcagtactgagcaggggaagaaaccttttccttcctcttccattaattgctaatacaattacacaatgatttattggtatctctaaagctccctgctacttctatttcacatgatgcattggccctttctggattttgtccttggtttcttgttattatccatagcaagctgacaacaccttgcatgttttctttcatgtatttgaggtcaaaggacagccatatcttagccaactg

SEQ ID NO: 63743 - DNA, 600 bp, Chicken  19866894328945_1
ctaattctgctcgaaggaagatgataaaaatgatttaattccaggtaaaatttgcatcgctgagctgggaaaagcattctatcccgtgctgtgggcagagctacactgttactgcgctgacattgtgaatggcaatgagaaaaaatactgagagacggtcatgtgtgtgcatgcatacacgcagctaagggctaataaatggcatcatccgcagccctgagacatgaggaaaactctgtaaactatttaaaaaaatcatgaaaatgcaaaccccaaacctacatctgcagaatggaaaayacccacacgcaacccctggcagaagcagaacgctcagggttaagtctgcattcccatctgatgctctcagctttcatcacatccctatgaatttttatccgtgcgctcggggtgaattgaggttgatggtgtcaatatggagtttggagccccgttttgatgttttgtttccttccaaactttttgtctccttgctctttgcagcaaagccccagcagctcgggaggagcgcgatgcgtttgaggttaagccgtgatgtgtctgggattaaagcaaacacgtccacagacctcgcagtgc

SEQ ID NO: 63744 - DNA, 600 bp, Chicken  19866894328947_1
gcttctaactaagaggcaaaggattctgcttcagggagaaagtgtgctctgtgcaggaagaaggaaatgtgttagaatcaattactgattttagtaatgataagttaaaaaaaaaaaaaaaaaagtgtaaggtctggaaagttactctccagctttcatttataacagagaatgggatttacactattacactatttcaactttttccttgtagagtacattttaatttaaggaggttacgtgaacttctagcacactccttacaatggtttccttttaatgttgacattatttactttsagtagatttttcttggcatttttctacaacttggtctgatatttcattactgtcttccagtataaaaaactgtctttttcctgacactgtgggccaacatcataaaataggaaggagctactttagtgcaattgggacatctgcacaaattagmtaacggtggtgactgttaaaaaacagtattttgcagctgagaattttctctgtcaggtagtgttattgtgctttttgtatctgttgtagattccaagtaaatcagtaggagatattacttttgtagctatccacatacttaatcac

SEQ ID NO: 63745 - DNA, 570 bp, Chicken  19866894328947_2
ttcatttataacagagaatgggatttacactattacactatttcaactttttccttgtagagtacattttaatttaaggaggttacgtgaacttctagcacactccttacaatggtttccttttaatgttgacattatttactttsagtagatttttcttggcatttttctacaacttggtctgatatttcattactgtcttccagtataaaaaactgtctttttcctgacactgtgggccaacatcataaaataggaaggagctactttagtgcaattgggacatctgcacaaattagmtaacggtggtgactgttaaaaaacagtattttgcagctgagaattttctctgtcaggtagtgttattgtgctttttgtatctgttgtagattccaagtaaatcagtaggagatattacttttgtagctatccacatacttaatcactgttggttagattagaaaatgtattttaagggatgacctttcttcaggaagctggagaactgcttgggcatgaacatgtaaaatactcatttcttgagtgctgcttgtttgaggtatataaaaa

SEQ ID NO: 63746 - DNA, 600 bp, Chicken  19866894328956_1
ctgtggacagagtcccccttgaatgtccttttattaagatgctcttctccctcagtaagtccataacatgcttttataataaggtaaatacttatcagagaacaaatccatatttattaggcttatgacagtacaaaacccaatacaaatggttctggcatggcaaccatcattttgcatttctctgtttctaacctccttcatcaattctcactctcattcacttcgcacttccatttcctgtctcagggccaggttttcagtactctctgttcatctccagctctctctgcagctctrtgagacaaccaaactgactcccctgctgtcatctggaatacttttaacgttaactaggcaaagtccacattctgtttctccaaatatttctcaagtatgtattcactctgtgcttttgagatcaccagacttcagtttacattctttaaggcttgatttttgccccaagtccagtttttttctaatataacgtttatataaaacaaatgtttcagtacgtgaagacgactaaaggaatgaaggaggtatttggctgtcctttaattttgcatgtgtttcatgttacctgagagaaatgta

SEQ ID NO: 63747 - DNA, 599 bp, Chicken  19866894328957_1
  misc_feature (1)..(73): n is any nucleotide
nnnnnnnnnnnnnnnnnnnnnnnnnnnnnnnnnnnnnnnnnnnnnnnnnnnnnnnnnnnnnnnnnnnnnnnnncagcagggtccaccaggtgtcagggttccttggcactgtaactcctcctcctttcccatcatagcataatacaagcctaccaaaatgatgacttcttgatttcagagagggttaactgctttgtcaacacagcagaggggctggagctccagcaggactgagggcaggggttacaggagctgcatggggcggcagggccgggaccctggccagggtggtgggtggcrgtgcctggggtcccctgcctgccgacagaagtgatgggtggtgcttcagtgtgttgtaaattacaactgcagtgggcgtcatcaccattaatatcagtagcastgtacctggtggtcgcattatataaaatgtgtggtccgtacaaaagaagttcagacagatttacagagattcgaatgtgcctaacacaccwctgtacttaactgtaagccgcaatcaaagctttgtttctgtgcacaatccagtcacgcggtcacagaacggctcaggctggaggcatctctgcagaacagcccgc

SEQ ID NO: 63748 - DNA, 600 bp, Chicken  19866894328957_2
tggcactgtaactcctcctcctttcccatcatagcataatacaagcctaccaaaatgatgacttcttgatttcagagagggttaactgctttgtcaacacagcagaggggctggagctccagcaggactgagggcaggggttacaggagctgcatggggcggcagggccgggaccctggccagggtggtgggtggcrgtgcctggggtcccctgcctgccgacagaagtgatgggtggtgcttcagtgtgttgtaaattacaactgcagtgggcgtcatcaccattaatatcagtagcastgtacctggtggtcgcattatataaaatgtgtggtccgtacaaaagaagttcagacagatttacagagattcgaatgtgcctaacacaccwctgtacttaactgtaagccgcaatcaaagctttgtttctgtgcacaatccagtcacgcggtcacagaacggctcaggctggaggcatctctgcagaacagcccgcgtggggagcggctgctgggcaggatgaggtcccaccgggcacagcagacccacagcccgggcacagcgcagagcgctctgagctgcagcccggctgctgtttga

SEQ ID NO: 63749 - DNA, 600 bp, Chicken  19866894328957_3
tgtcaacacagcagaggggctggagctccagcaggactgagggcaggggttacaggagctgcatggggcggcagggccgggaccctggccagggtggtgggtggcrgtgcctggggtcccctgcctgccgacagaagtgatgggtggtgcttcagtgtgttgtaaattacaactgcagtgggcgtcatcaccattaatatcagtagcastgtacctggtggtcgcattatataaaatgtgtggtccgtacaaaagaagttcagacagatttacagagattcgaatgtgcctaacacaccwctgtacttaactgtaagccgcaatcaaagctttgtttctgtgcacaatccagtcacgcggtcacagaacggctcaggctggaggcatctctgcagaacagcccgcgtggggagcggctgctgggcaggatgaggtcccaccgggcacagcagacccacagcccgggcacagcgcagagcgctctgagctgcagcccggctgctgtttgaccagcaacctttccctgctcctgtccttttcttacagcgggatcccaggctgagcttctagttcatctctcaaaagaaaacagaarcaact

SEQ ID NO: 63750 - DNA, 600 bp, Chicken  19866894328957_4
caccwctgtacttaactgtaagccgcaatcaaagctttgtttctgtgcacaatccagtcacgcggtcacagaacggctcaggctggaggcatctctgcagaacagcccgcgtggggagcggctgctgggcaggatgaggtcccaccgggcacagcagacccacagcccgggcacagcgcagagcgctctgagctgcagcccggctgctgtttgaccagcaacctttccctgctcctgtccttttcttacagcgggatcccaggctgagcttctagttcatctctcaaaagaaaacagaarcaactgctctaccaccgatttcaggacgttccacaatttattgacaatgacaagacttcctggaattttctctccggctggaggactatcccagcatccaaccaccccagctcctaatagcagagatgctcccatcctcccagcaccttggtggccattctctgggctcactccaatgtgtccgggtctgtgtgttactggggagcccacacctggacactgtggtctcaccagagctgagcagaggggaatggaacgatgacctcgagctgctggcagcgctcctcacacagcccaggg

SEQ ID NO: 63751 - DNA, 600 bp, Chicken  19866894328958_1
ggagcaccaggcttagggcagatacagctgcagtgaagaggagctgcttttcatgctgaccaaagcttgaaggtctcagcaaagcagaggttctaaggaagattagttagaagtttgagctatgcagtgggaaacaaggggtcagcagtaagtatgggcatgttgcgggcaagtggagagtgagagaaacagagaagaggctgtcagattttgcagactcagaaaaacccccaaggacaccagtgatggcaacctagtgccttggagcaggggaagcagcactgctgggaaaatccagcrttgttggcctgcacagggacacacggtcctctttccccaccaaggctgtgcagggaggcccagctcctggcgcccgctgcagctaaagggatgctstgggaggaaagagcaaagcccagcagagcctgccagaaatcacatgcgatgcaaagagcagttgcaattttcaagaccgcctgagggatctgcgtgactacttcctatttaattgggtgttatgacttttcaagcatctttgaatatcactgccaaagtttacaagccaccagtttgcgtgcccagacttggagaacagcccat

SEQ ID NO: 63752 - DNA, 520 bp, Chicken  19866894328958_2
ggaagattagttagaagtttgagctatgcagtgggaaacaaggggtcagcagtaagtatgggcatgttgcgggcaagtggagagtgagagaaacagagaagaggctgtcagattttgcagactcagaaaaacccccaaggacaccagtgatggcaacctagtgccttggagcaggggaagcagcactgctgggaaaatccagcrttgttggcctgcacagggacacacggtcctctttccccaccaaggctgtgcagggaggcccagctcctggcgcccgctgcagctaaagggatgctstgggaggaaagagcaaagcccagcagagcctgccagaaatcacatgcgatgcaaagagcagttgcaattttcaagaccgcctgagggatctgcgtgactacttcctatttaattgggtgttatgacttttcaagcatctttgaatatcactgccaaagtttacaagccaccagtttgcgtgcccagacttggagaacagcccattttatcccagcacaca

SEQ ID NO: 63753 - DNA, 600 bp, Chicken  19866894328961_1
ctgttgtagcacttggccttgagtttcttacagcactggttgcctgtctgtgcttccctaggctagccaaacttctcagagttgctcttccctttcttgctcctcccaggcacttgagcagcatgtatctggagggcgttagtagaaaaagtaattaagtgctgagttaatataggaaagagttagcagaaggtgagagtaccagccactgggaaggtcaaggcagcaaagagggcaggaggccgtattccctcttcagaggagctgaaggaatccacactcttccacgtaaatatttakttttttwaatcagatcttagagtgcaccaagtgtttcctctggcacatgctgtagggcaggagtgcagaggagctgtttgttcctttctttgccttcagttctgtttccacatcctattcattaatgccattttgggcaacacgtctggcattctgctcactgaagctgactgacttgggcagtgtgaggccttctggcttttggcaagagtctgaatgcaatctcagragaaacttcttcacaagagtctttccaccagagataattccagtggcgggtcttggcgttactccactcat

SEQ ID NO: 63754 - DNA, 600 bp, Chicken  19866894328961_2
agcacttggccttgagtttcttacagcactggttgcctgtctgtgcttccctaggctagccaaacttctcagagttgctcttccctttcttgctcctcccaggcacttgagcagcatgtatctggagggcgttagtagaaaaagtaattaagtgctgagttaatataggaaagagttagcagaaggtgagagtaccagccactgggaaggtcaaggcagcaaagagggcaggaggccgtattccctcttcagaggagctgaaggaatccacactcttccacgtaaatatttakttttttwaatcagatcttagagtgcaccaagtgtttcctctggcacatgctgtagggcaggagtgcagaggagctgtttgttcctttctttgccttcagttctgtttccacatcctattcattaatgccattttgggcaacacgtctggcattctgctcactgaagctgactgacttgggcagtgtgaggccttctggcttttggcaagagtctgaatgcaatctcagragaaacttcttcacaagagtctttccaccagagataattccagtggcgggtcttggcgttactccactcattaacaag

SEQ ID NO: 63755 - DNA, 600 bp, Chicken  19866894328961_3
agagggcaggaggccgtattccctcttcagaggagctgaaggaatccacactcttccacgtaaatatttakttttttwaatcagatcttagagtgcaccaagtgtttcctctggcacatgctgtagggcaggagtgcagaggagctgtttgttcctttctttgccttcagttctgtttccacatcctattcattaatgccattttgggcaacacgtctggcattctgctcactgaagctgactgacttgggcagtgtgaggccttctggcttttggcaagagtctgaatgcaatctcagragaaacttcttcacaagagtctttccaccagagataattccagtggcgggtcttggcgttactccactcattaacaaggaaaattacaattaatagtgaaattcacccagagartggcattaacctttctgygtgaggcctcagccctttattacccattcaggattttctcatcaaagtaggttttggtaggaatcttacctcctatttgtcatgctcattctggtacctcgtcacggctgtacatacttgcttcttgtgctggcttggattagggcaaggcagtgcagtaaggatgag

SEQ ID NO: 63756 - DNA, 600 bp, Chicken  19866894328961_4
cacatgctgtagggcaggagtgcagaggagctgtttgttcctttctttgccttcagttctgtttccacatcctattcattaatgccattttgggcaacacgtctggcattctgctcactgaagctgactgacttgggcagtgtgaggccttctggcttttggcaagagtctgaatgcaatctcagragaaacttcttcacaagagtctttccaccagagataattccagtggcgggtcttggcgttactccactcattaacaaggaaaattacaattaatagtgaaattcacccagagartggcattaacctttctgygtgaggcctcagccctttattacccattcaggattttctcatcaaagtaggttttggtaggaatcttacctcctatttgtcatgctcattctggtacctcgtcacggctgtacatacttgcttcttgtgctggcttggattagggcaaggcagtgcagtaaggatgaggcctttcttgcacggcttagttcagagtggaaattctgccaaaaatattccctcttctactattaatttcggaggccaaatctttctgatctcagctcaagggctcaatgaata

SEQ ID NO: 63757 - DNA, 600 bp, Chicken  19866894328961_5
agtgcagaggagctgtttgttcctttctttgccttcagttctgtttccacatcctattcattaatgccattttgggcaacacgtctggcattctgctcactgaagctgactgacttgggcagtgtgaggccttctggcttttggcaagagtctgaatgcaatctcagragaaacttcttcacaagagtctttccaccagagataattccagtggcgggtcttggcgttactccactcattaacaaggaaaattacaattaatagtgaaattcacccagagartggcattaacctttctgygtgaggcctcagccctttattacccattcaggattttctcatcaaagtaggttttggtaggaatcttacctcctatttgtcatgctcattctggtacctcgtcacggctgtacatacttgcttcttgtgctggcttggattagggcaaggcagtgcagtaaggatgaggcctttcttgcacggcttagttcagagtggaaattctgccaaaaatattccctcttctactattaatttcggaggccaaatctttctgatctcagctcaagggctcaatgaatactctttatacctggattc

SEQ ID NO: 63758 - DNA, 600 bp, Chicken  19866894328970_1
gtaaccttatcatagatggacagcagggttagttaagcaggacccaccccttcataaatccaccattggctgcatctaattattcaactgtccccatatgttctgtatcattatcactgaaggtgatctgctccattacctactctggtataaaggtcatactgacaggcctgcaattccctggatctttcttcctcccatttcctgatctccatctatcgggacagttttagttagtcaaggactgatggtaaataattaaggatgtcttggcaacctgtgccaccagctccttcagtrccctcagatgaatcacatagctcctcaagacttgtggatgttcaaatcgtgtagtagttcacttacagtttcycactggaatataggagctttgcttcactcctgatatcagtcagaagtctatgtatcctcattttaccttatgctactaggtagtcctcccagtgagagatctcaccacctcaagaatcatcttctgggcttgttttatttgttgttatgagatttttttattttttttttcagacatgatgttcatcagcaacaccaaaaaaacaatcacctttaaaataggtatag

SEQ ID NO: 63759 - DNA, 600 bp, Chicken  19866894328970_2
atctaattattcaactgtccccatatgttctgtatcattatcactgaaggtgatctgctccattacctactctggtataaaggtcatactgacaggcctgcaattccctggatctttcttcctcccatttcctgatctccatctatcgggacagttttagttagtcaaggactgatggtaaataattaaggatgtcttggcaacctgtgccaccagctccttcagtrccctcagatgaatcacatagctcctcaagacttgtggatgttcaaatcgtgtagtagttcacttacagtttcycactggaatataggagctttgcttcactcctgatatcagtcagaagtctatgtatcctcattttaccttatgctactaggtagtcctcccagtgagagatctcaccacctcaagaatcatcttctgggcttgttttatttgttgttatgagatttttttattttttttttcagacatgatgttcatcagcaacaccaaaaaaacaatcacctttaaaataggtatagtgctctaggaatatttattcaattaatttactgagtgagccaattaaggcaaaatataatgtttggaaataga

SEQ ID NO: 63760 - DNA, 600 bp, Chicken  19866894328970_3
ttagtcaaggactgatggtaaataattaaggatgtcttggcaacctgtgccaccagctccttcagtrccctcagatgaatcacatagctcctcaagacttgtggatgttcaaatcgtgtagtagttcacttacagtttcycactggaatataggagctttgcttcactcctgatatcagtcagaagtctatgtatcctcattttaccttatgctactaggtagtcctcccagtgagagatctcaccacctcaagaatcatcttctgggcttgttttatttgttgttatgagatttttttyttttttttttcagacatgatgttcatcagcaacaccaaaaaaacaatcacctttaaaataggtatagtgctctaggaatatttattcaattaatttactgagtgagccaattaaggcaaaatataatgtttggaaatagacatccttgcactgagtacrgatattagctgacttaaagtatattgtgtatgaaaatgtcctgtgaaaacatccacgaaaggtaaaagcagaagaatacaagctgaaaaactatttaaggcaaacaaagtatttatttattctttgcttcttaaaaaaagt

SEQ ID NO: 63761 - DNA, 465 bp, Chicken  19866894328970_4
tgcttcactcctgatatcagtcagaagtctatgtatcctcattttaccttatgctactaggtagtcctcccagtgagagatctcaccacctcaagaatcatcttctgggcttgttttatttgttgttatgagatttttttattttttttttcagacatgatgttcatcagcaacaccaaaaaaacaatcacctttaaaataggtatagtgctctaggaatatttattcaattaatttactgagtgagccaattaaggcaaaatataatgtttggaaatagacatccttgcactgagtacrgatattagctgacttaaagtatattgtgtatgaaaatgtcctgtgaaaacatccacgaaaggtaaaagcagaagaatacaagctgaaaaactatttaaggcaaacaaagtatttatttattctttgcttcttaaaaaaagtgttattaacaaaatattttcttca

SEQ ID NO: 63762 - DNA, 600 bp, Chicken  19866894328975_1
tgtcctatcactatcagaccatgtagaaagtcagtctccttcctgcttataagctccctttagatactggaatgccacaatgaggtctccctggagcctccttcaagctaaacaagcccaacttcctcaacctgtcctagtaagagaggtgctctagccctctgatcatctttgtggcccccctcttgacctgttccaacatctccacatttttcctgtgctgagggctccaggcctggacactgcgctccgtatggggccttgtgagagtagagtagaaggggacaattgcctctgtcytcctgctggccacctccctttggatgcagcccaagatactgtttgacttctgggctgcaaatgcatgctgctggctcatgtccagtttttcatccaccaggaccccaagtgcttctctgcagggctgctctcaattcattcttcttcttctgtgtacatacctggtgggattgccccagcccatgtgcagtatcttgcacttagcctcttttaatctcattagactcacatggacccacatttcaagcttgaccaggtccatttggatggcatcctttccttctattgtatcaactgcac

SEQ ID NO: 63763 - DNA, 600 bp, Chicken  19866894328977_1
ctgacctctttattttgaaaaagtgtcatctccttctgcctgattctgagctttctcacccccaccagtactcgacatttgaaacaaaatataactccttggaactatgattacaaacagtctttcatcacataatgtttctccattcaggcttcagacatgcttcccactagctaccgcttttagatatcctgaacactagtaccactaagcacaaatatggactgtaccggtcattttggtttcttatctgtcatggaaggagggaaatgagacaactgtttatttttttcaatctaragtcagtgctcaaatgaacatggctgagcagtgaatccaattttcctatctcagatgtgttcccagagggatacccagctctgagagtcccattcaatttgctcttgtgcttgagttaagcccgctgtaaattctggatcacttctttgcctctccctgttcaaaaatgctcgtattatatatgtgcgttaggagacagttagactccaagactaagaccatatttgtctctaggaaaaacacgtcatctaatattaggtaacataaatgaagaaacaactgagttgtttttttcttcac

SEQ ID NO: 63764 - DNA, 600 bp, Chicken  19866894328985_1
gttccagagacagaggaactacaggagacattaagacctagttttgtttcacttatctgagatgctctaggtgcctctgtaatcaaaagagaaaagtagaagcctcaggagggaaatacaactcctaggcaggctgagctgctctcaggaggtgccttgtttctccaccaaaaacaagggaagcctaaggcaactgcagttttgttttagttaggaggctacaatgaggtgtattcaagctgaactcatgggacttgcttaaaaataggcagtgaatacacacacgctagagagaaaatrtatttctggctaaacyagttatcttctcaggcagggcgtttttccttactgcagacataagttatccttggctacacaagaacttttatttattgcatcacaggttacggacagcagccccattatggatctcacaaataatcccaaatcctgcaagtgaagatgtgatgtatcacaggctaaggtgacmtaatagccagctgctacagaaaggggtctggttcttcatctaaaaataatttatctgctgccagatcaaggaacaaaatcagattaatgtggagttgcagaagcactgct

SEQ ID NO: 63765 - DNA, 600 bp, Chicken  19866894328985_2
aactacaggagacattaagacctagttttgtttcacttatctgagatgctctaggtgcctctgtaatcaaaagagaaaagtagaagcctcaggagggaaatacaactcctaggcaggctgagctgctctcaggaggtgccttgtttctccaccaaaaacaagggaagcctaaggcaactgcagttttgttttagttaggaggctacaatgaggtgtattcaagctgaactcatgggacttgcttaaaaataggcagtgaatacacacacgctagagagaaaatrtatttctggctaaacyagttatcttctcaggcagggcgtttttccttactgcagacataagttatccttggctacacaagaacttttatttattgcatcacaggttacggacagcagccccattatggatctcacaaataatcccaaatcctgcaagtgaagatgtgatgtatcacaggctaaggtgacmtaatagccagctgctacagaaaggggtctggttcttcatctaaaaataatttatctgctgccagatcaaggaacaaaatcagattaatgtggagttgcagaagcactgctacaargtgagaaatca

SEQ ID NO: 63766 - DNA, 600 bp, Chicken  19866894328985_3
caactgcagttttgttttagttaggaggctacaatgaggtgtattcaagctgaactcatgggacttgcttaaaaataggcagtgaatacacacacgctagagagaaaatrtatttctggctaaacyagttatcttctcaggcagggcgtttttccttactgcagacataagttatccttggctacacaagaacttttatttattgcatcacaggttacggacagcagccccattatggatctcacaaataatcccaaatcctgcaagtgaagatgtgatgtatcacaggctaaggtgacmtaatagccagctgctacagaaaggggtctggttcttcatctaaaaataatttatctgctgccagatcaaggaacaaaatcagattaatgtggagttgcagaagcactgctacaargtgagaaatcattacagggagctcctggagacaatgyagggatgctgctgcttttcagcatgagcagaagtattaaagcatcctacctacaacacagactgccattctggtaagtagttaaaagtggttttagttaacagtgttttcacacagaggtaaagacaattcttaatagatctgctatc

SEQ ID NO: 63767 - DNA, 591 bp, Chicken  19866894328985_4
ctggctaaacyagttatcttctcaggcagggcgtttttccttactgcagacataagttatccttggctacacaagaacttttatttattgcatcacaggttacggacagcagccccattatggatctcacaaataatcccaaatcctgcaagtgaagatgtgatgtatcacaggctaaggtgacmtaatagccagctgctacagaaaggggtctggttcttcatctaaaaataatttatctgctgccagatcaaggaacaaaatcagattaatgtggagttgcagaagcactgctacaargtgagaaatcattacagggagctcctggagacaatgyagggatgctgctgcttttcagcatgagcagaagtattaaagcatcctacctacaacacagactgccattctggtaagtagttaaaagtggttttagttaacagtgttttcacacagaggtaaagacaattcttaatagatctgctatccatatgtgttaaccaggaaaaagaactacagaccctacaaaactgcaatgctgcatggacctgtaatctgatgtaatcaagtgtaacgaggacgtaattatcatga

SEQ ID NO: 63768 - DNA, 554 bp, Chicken  19866894328985_5
tccttactgcagacataagttatccttggctacacaagaacttttatttattgcatcacaggttacggacagcagccccattatggatctcacaaataatcccaaatcctgcaagtgaagatgtgatgtatcacaggctaaggtgacmtaatagccagctgctacagaaaggggtctggttcttcatctaaaaataatttatctgctgccagatcaaggaacaaaatcagattaatgtggagttgcagaagcactgctacaargtgagaaatcattacagggagctcctggagacaatgyagggatgctgctgcttttcagcatgagcagaagtattaaagcatcctacctacaacacagactgccattctggtaagtagttaaaagtggttttagttaacagtgttttcacacagaggtaaagacaattcttaatagatctgctatccatatgtgttaaccaggaaaaagaactacagaccctacaaaactgcaatgctgcatggacctgtaatctgatgtaatcaagtgtaacgaggacgtaattatcatga

SEQ ID NO: 63769 - DNA, 600 bp, Chicken  19866894328989_1
agttgtcacagcatccaatttctccatggcatgactgagcacaataactggagaatggcccaggtccatggccccaccaccttacggttgcttccccaagggtcaaagatcctatgcattgtgtgtgacccaaatacagccctgctcctgccatcaggatgcaggagattgagctgacaatggcttgcccaaagaagttatggattccccatccttggaggtgttcagggccaggttggatggggccctgggcagccagagctgctgggtggaaactagcctacaacaggggggtgagasctggatgatctttaaggtcccttccaacctaagggattctctcattctatgaatggcctggacttctgttcctaggaaggtggtgagaagatgttgggtttgaaagctcttgcatatttgttactctaggttatttccagtactttatgtgctgcatgaacccttcagcactctgaggtctgagcatccttcctccagacaagatgcaggacttccctgtaggtctattacctggccacatgtgagtgtttccagacctctcttccacccttattcttactttcaccactgataaaagaa

SEQ ID NO: 63770 - DNA, 600 bp, Chicken  19866894328990_1
cttctgcttggatggagacacttctgcttggatggagacaccgtatccttggatggagacaccgtatccttggatggagactccatctcctcgcatggagactcttctacttgcacggagacacctctccttggacagaaacaccatctcctcctctggaggcatcatctccttggatggagacctctcctcacctggaaacaccatctcctcgtctggaggcatcgtctccttggatggagacctctcctcacctggaaacaccatctcccccctctggagatgccacctcctcacccrgagaccccatctcttcacccggatctctctggttctccatatcttctgcagatctgcagtgtagaccccgctgtggggctccctccatcatctccatctccaccatctccatcatctccacctttttggctctatgtgacccccacgtgaatcccccacgggaggtgttggagatgcctacgggtatcgttggaaccttccggatgggtttcccgaggagggctgaccgggggatgcttccccgatgagcgcacaccggtgaggtcggttcccaccctccgacgtcgagaaccggatgga

SEQ ID NO: 63771 - DNA, 600 bp, Chicken  19866894328991_1
agggccatgaagtcattgtcatatggaagctccacagatctacattatgccatacatttctgaaagacattttggaaaagcaaggaaggagttatgggactggtctgacatttagggggtctcaatttcatttccttctctgacggacagtccttcctagtgccacacaaagcatgagtaaatgatttcccttacctcagttttccatttttaaaatggagaccatttagatacctgtatcaaatcaatattaaacagtggaaataaaaaagaaaagaaagaaaaacatttcttctatgrtttttttcttctcagatgggaagacacctgaaagctcaattttccagcagctctgactgcatggtcttaaacagtttgaaatcaacctaaacactactcagaagtaacatgctttgcattctgcaggtcttaatgtcactggatatccttccatttcaaagtgcttctctgtgatagaagagatacagaagaatgagcactagtgaagttaataaacaaaatgcattcacggcccattacttcaaataactttgccatataaatagtccactcataaaataatggcctcaattaacattt

SEQ ID NO: 63772 - DNA, 600 bp, Chicken  19866894328991_2; identical to SEQ ID NO: 63771

SEQ ID NO: 63773 - DNA, 600 bp, Chicken  19866894328991_3; identical to SEQ ID NO: 63771

SEQ ID NO: 63774 - DNA, 600 bp, Chicken  19866894328991_4
gaagtcattgtcatatggaagctccacagatctacattatgccatacatttctgaaagacattttggaaaagcaaggaaggagttatgggactggtctgacatttagggggtctcaatttcatttccttctctgacggacagtccttcctagtgccacacaaagcatgagtaaatgatttcccttacctcagttttccatttttaaaatggagaccatttagatacctgtatcaaatcaatattaaacagtggaaataaaaaagaaaagaaagaaaaacatttcttctatgatttttttrttctcagatgggaagacacctgaaagctcaattttccagcagctctgactgcatggtcttaaacagtttgaaatcaacctaaacactactcagaagtaacatgctttgcattctgcaggtcttaatgtcactggatatccttccatttcaaagtgcttctctgtgatagaagagatacagaagaatgagcactagtgaagttaataaacaaaatgcattcacggcccattacttcaaataactttgccatataaatagtccactcataaaataatggcctcaattaacatttaattctcg

SEQ ID NO: 63775 - DNA, 600 bp, Chicken  19866894328992_1
ccagcattgccagctgagtgagggaaggaatcctctctgctctgcactgtgtggcctcacctcgagcactgtgtgtaggtttgggcaccacaccagaaggaggacataaaactatgagagagcagcagaaggagggctacaaaggtgttgaagagtctggagggcaaaatgtatgaggagtggctgaaatcactagtttttttggctaacagaagagaaagctggggggtgatctcactgtgggagtaaagggggaagaaacaagtgacaggacccaaggaaatggcatgaagctttgtygggagagattcagatagactattaggaaaagatttttcattgagtaggtggtaaggcactgacacaggctctccagggacatggtcatggcacaaagccttctggagttcaagaggtgtttaggcagtgtttagacagtgttctcagaaatatgctttgatttttgagtggtcctgtgtgaagtcaggagctggattccaatggtccttgaatggtcactttcaactcaggatgttctatgattttatattttatgattctagaataaagtatatttgcttttcatcttttccattatgt

SEQ ID NO: 63776 - DNA, 600 bp, Chicken  19866894328994_1
gagcgccgcgctgaggagaagcgggagcccgcgctcgagctccccagcagcggctggccgtgtctgcgggtccgcctcgctcaccgcgcatgcgcgctgccggtcccagcatcctgaggtttggcgcggccggagcggagcggagcggagctatggcgctgcacgtccccaaggccccgggctttgcccagatgcttaaggagggagcgaaggtgagagcggcgccgggcagtgcgcgccttccggactccctcccctactccccctcccgctgcgagcaggctgcggggcgtttcggcrtggagggcggggaaggttctggaaggcccggcggctccacgcggcccggcgcggcctgggctcccggctgctcccctcggcctgtgggagccgggagggcggcctggccgtgtgtggctgcgtgctgggggcggccttctagaaggctctgccggggcccggccggtggatcctttttgcagtcggaggtagagccagtgctactgaaggatgggatagaaggaaagcagcttatttttctcgtgggtggaaaaaaggagtgaagttttgcttgctgctactgaatagaatggaaaggga

SEQ ID NO: 63777 - DNA, 600 bp, Chicken  19866894328994_2
ggaaggcccggcggctccacgcggcccggcgcggcctgggctcccggctgctcccctcggcctgtgggagccgggagggcggcctggccgtgtgtggctgcgtgctgggggcggccttctagaaggctctgccggggcccggccggtggatcctttttgcagtcggaggtagagccagtgctactgaaggatgggatagaaggaaagcagcttatttttctcgtgggtggaaaaaaggagtgaagttttgcttgctgctactgaatagaatggaaagggaagctgagcagctcagccctrtttttgttctttttcggaggtttccttggggayaaggaatggtctttttcagaggtgggggagagcagagtgccatagtttttgttgctctaaaagaaaaaaaaatcagccatagggagagctgtgttctaccgaacaaggaggatgcgttytgaggtgcttgttttgcatttaaagaatagtttttagggagctgcatgcttatagtggccttccagtacctgaaaggggcctacaggaaagatggggaggacttataagggcatgtagtgacaggatgaggggaaatggttttaaact

SEQ ID NO: 63778 - DNA, 600 bp, Chicken  19866894328994_3
gcctgggctcccggctgctcccctcggcctgtgggagccgggagggcggcctggccgtgtgtggctgcgtgctgggggcggccttctagaaggctctgccggggcccggccggtggatcctttttgcagtcggaggtagagccagtgctactgaaggatgggatagaaggaaagcagcttatttttctcgtgggtggaaaaaaggagtgaagttttgcttgctgctactgaatagaatggaaagggaagctgagcagctcagccctrtttttgttctttttcggaggtttccttggggayaaggaatggtctttttcagaggtgggggagagcagagtgccatagtttttgttgctctaaaagaaaaaaaaatcagccatagggagagctgtgttctaccgaacaaggaggatgcgttytgaggtgcttgttttgcatttaaagaatagtttttagggagctgcatgcttatagtggccttccagtacctgaaaggggcctacaggaaagatggggaggacttataagggcatgtagtgacaggatgaggggaaatggttttaaactggaagagagtagatttagactagatattaggaa

SEQ ID NO: 63779 - DNA, 600 bp, Chicken  19866894328994_4
ctttttgcagtcggaggtagagccagtgctactgaaggatgggatagaaggaaagcagcttatttttctcgtgggtggaaaaaaggagtgaagttttgcttgctgctactgaatagaatggaaagggaagctgagcagctcagccctrtttttgttctttttcggaggtttccttggggayaaggaatggtctttttcagaggtgggggagagcagagtgccatagtttttgttgctctaaaagaaaaaaaaatcagccatagggagagctgtgttctaccgaacaaggaggatgcgttytgaggtgcttgttttgcatttaaagaatagtttttagggagctgcatgcttatagtggccttccagtacctgaaaggggcctacaggaaagatggggaggacttataagggcatgtagtgacaggatgaggggaaatggttttaaactggaagagagtagatttagactagatattaggaagaaattctttactgtgtgggtggtgagacactggaacagacattggttgcccagaggttgtggatgctgcctgcctggaggcattcaaggccaggctggatggggctttgagcaacctg

SEQ ID NO: 63780 - DNA, 600 bp, Chicken  19866894328994_5
cttcttccgaactgaagccaggctgatcagcttctcaaacaccaatattttctgaataataaaatcatttagactggaaaaaacattcaagatcatcaagaccagccatcaacctgacctgagtctcatgactaaaccatgtcacttggtacatgggcatacgcactccaatgtgttaaattaagtcactgaattataaaaatgtgtagactgtctactcttaaatttttaagccactcatttgaatgtgaaactgagttgaatggttttgttatgtacagagttgtgggtaaagaaacraaacccctttgttgcatgcccctggtcttcccttctttctccaagctgctcctggttattttctatctccatttggtatgccattaatattttatgtagtagccttttggcatataaagggaggctataagaagagaggagacagggaaatggttctgaactaaagcaggagagatttagattggatgtaatgaagaagttttttactataagggtggtgaagcacaggaagaggttgcccagagtaatagtggatgctctgtccctggagacgttcagagtcaggctgatggggctctg

SEQ ID NO: 63781 - DNA, 600 bp, Chicken  19866894328996_1
agtcagaggattcaggacccaccaattcagtttagttcaactgttaatagaattttcaacacatgcttacttgttgcagctaagagtcttctgtctgagggttcataagccaattctggacagacatctacagctatttatctgctgactgtaagcaacagcaattaaagatagacttttcacctagaaaaacaaggtagctcagactaggagtgaaggaccaagcctgagattaaatagcatttatgaccaatcccagaagaccaaggtgaggctggtcaaggcaattcaggcctattrgcgtactcattgccctgacaagcgtgragatgaagccatttatcaaaaagatctgcattcatgacttgcctgaaaagccttctgaaactctttaagcaaccaactcaaaatgatgctgataggctaaaatatttttcttcattttatcactgcttttgttttggttctcttcttatacaaatttcttcttggaatttcagcaccagtcatgagatctagaaggaggcattatatactctagtgtacctgaagatgggtgaagacaccactaacttcttgtgttttctgtttggtatatat

SEQ ID NO: 63782 - DNA, 600 bp, Chicken  19866894328996_2
cagtttagttcaactgttaatagaattttcaacacatgcttacttgttgcagctaagagtcttctgtctgagggttcataagccaattctggacagacatctacagctatttatctgctgactgtaagcaacagcaattaaagatagacttttcacctagaaaaacaaggtagctcagactaggagtgaaggaccaagcctgagattaaatagcatttatgaccaatcccagaagaccaaggtgaggctggtcaaggcaattcaggcctattrgcgtactcattgccctgacaagcgtgragatgaagccatttatcaaaaagatctgcattcatgacttgcctgaaaagccttctgaaactctttaagcaaccaactcaaaatgatgctgataggctaaaatatttttcttcattttatcactgcttttgttttggttctcttcttatacaaatttcttcttggaatttcagcaccagtcatgagatctagaaggaggcattatatactctagtgtacctgaagatgggtgaagacaccactaacttcttgtgttttctgtttggtatatattcaaagtcaattatgctagccaagagg

SEQ ID NO: 63783 - DNA, 600 bp, Chicken  19866894329001_1
aggccacagtctctgtgcatttctgaaaacaaatgtaatcaaatgaatttcatttatttacttagcatttagaagtgtttatctgcttctcttatgaaactgaaatgattccttccaaattaattctagttggatcaaaacaatctaaagaacatagtaaacaaccaccttaaaaaggcatgtagggaattatagcccacagcaacactttccagacagtctgtcagtgtgtgtgatttgaggatggggtgtggaggtttctgctgagatgaggaaagaagaggaagagattagatataytgtgttcttatggccttctttgagctcctcttgcctccagcccactgccaaattggctcctgcccttcattgtcacatttgataagtgatgttatttgaagagatgggaaagttggtttcactgacacttaaagcagtggtactggttgctatgacaagaacgtttctgtgctgggaaaagaagcaaatgaacagctaccttgtcccagccgtcagacygctacttatcaggtagacagaccttataagcttcctctgccagcagctgctgttggcttctttttgggtttcttactacac

SEQ ID NO: 63784 - DNA, 600 bp, Chicken  19866894329001_2
tctgtcagtgtgtgtgatttgaggatggggtgtggaggtttctgctgagatgaggaaagaagaggaagagattagatataytgtgttcttatggccttctttgagctcctcttgcctccagcccactgccaaattggctcctgcccttcattgtcacatttgataagtgatgttatttgaagagatgggaaagttggtttcactgacacttaaagcagtggtactggttgctatgacaagaacgtttctgtgctgggaaaagaagcaaatgaacagctaccttgtcccagccgtcagacygctacttatcaggtagacagaccttataagcttcctctgccagcagctgctgttggcttctttttgggtttcttactacaccagctgaaataagagctatgatccgaaratgcattatgactcctacagcaaatgactcaaaattagtcagtaaatttgttgtgcatcaaagactgaccatttctggagaaaaatgggagagactacattgtagggtgcattctcaaaaaacccagtaggtaaatcctatgcaggtataacaagcattatacaggctatatatatatatatatatatata

SEQ ID NO: 63785 - DNA, 600 bp, Chicken  19866894329001_3
tcttgcctccagcccactgccaaattggctcctgcccttcattgtcacatttgataagtgatgttatttgaagagatgggaaagttggtttcactgacacttaaagcagtggtactggttgctatgacaagaacgtttctgtgctgggaaaagaagcaaatgaacagctaccttgtcccagccgtcagacygctacttatcaggtagacagaccttataagcttcctctgccagcagctgctgttggcttctttttgggtttcttactacaccagctgaaataagagctatgatccgaaratgcattatgactcctacagcaaatgactcaaaattagtcagtaaatttgttgtgcatcaaagactgaccatttctggagaaaaatgggagagactacattgtagggtgcattctcaaaaaacccagtaggtaaatcctatgcaggtataacaagcattatacaggctatatatatatatatatatatatatatatatatatttggccttgctcatttcaaatctctagcactgatccttcacaaagagttctgcacaacagttcttcttgctgaaaatccacagagctcatattttggc

SEQ ID NO: 63786 - DNA, 600 bp, Chicken  19866894329004_1
cggtttcaggattggctcctgtttcaggagggaagcctggggagtattctcctcttgagacaggtgctgacctgctctgcagaatcattagtcactgctgtgctgctgtactggtttcttcattccctctgacctggtgtatataaattattttaaagaagtccctgcttagaaaaacccagtttgaatcgtttccctttccttgtggtccaggcaagccttggccagcttgatttttgggtcagtttcttccctctcctggtagcctccttccacagctctcttccatctgtatggatyactttatgctgcccggcagaggagattccctgtgttggttttcagctatactatgctgatgatctgcctgcctcgccttctgaggtttggcctggttmtgagggaggtgcagtgcagctgctgtgtgtatttggcctaattccttgacttttccttcagttttttatcacatatgagcaactgaagcgccttccattctgagagctagcttcattccacgagtgtcatcttcaaggctcacagcagtgttttgctgcagccttcatttcaccatccacccgttttgatgttttgttacat

SEQ ID NO: 63787 - DNA, 600 bp, Chicken  19866894329004_2
tgtgctgctgtactggtttcttcattccctctgacctggtgtatataaattattttaaagaagtccctgcttagaaaaacccagtttgaatcgtttccctttccttgtggtccaggcaagccttggccagcttgatttttgggtcagtttcttccctctcctggtagcctccttccacagctctcttccatctgtatggatyactttatgctgcccggcagaggagattccctgtgttggttttcagctatactatgctgatgatctgcctgcctcgccttctgaggtttggcctggttmtgagggaggtgcagtgcagctgctgtgtgtatttggcctaattccttgacttttccttcagttttttatcacatatgagcaactgaagcgccttccattctgagagctagcttcattccacgagtgtcatcttcaaggctcacagcagtgttttgctgcagccttcatttcaccatccacccgttttgatgttttgttacatgtgggtccggactctcctcctcccccacattcatggctcctgaaggttgttgtggctgaagtgtaactgggaggctgatggcaggtactgcatgcttt

SEQ ID NO: 63788 - DNA, 600 bp, Chicken  19866894329008_1
aaatcagatcagagggaagaaaatcaaaagccagtataatttccagaaggaatgacaaagaattgtaaactaatttatttctacattaataggaagcagcagatatatgtgactatgaaggaagaaaatcaaaagacatattgtcagctcaaatttggataacagaaggtttttgttgtctgtcagacagtatctgagaaaagaacagttcagtcaaagcaaaatagttctcagagttcttactattttctctgccatttggttcaaatgctaatgacataactacacatcagatctaaygttcctggtaaattcctactgaaagaatgatattcatatgttcacatacagttctctgattagtagagtatgcatagaggtctgtaccatagatttttagttatttgaagcaacaaattccacttaaaccaattatagaaacacagaaagatatatgcagaagttccaattatatgcactgacttttataggtctatgaagagagagaaaaatatggcacttggctttgggattcatagatgacaagatgacaagagttctaaattaagaaatgatgctaaattgaataaaataaygcag

SEQ ID NO: 63789 - DNA, 600 bp, Chicken  19866894329008_2
taaygttcctggtaaattcctactgaaagaatgatattcatatgttcacatacagttctctgattagtagagtatgcatagaggtctgtaccatagatttttagttatttgaagcaacaaattccacttaaaccaattatagaaacacagaaagatatatgcagaagttccaattatatgcactgacttttataggtctatgaagagagagaaaaatatggcacttggctttgggattcatagatgacaagatgacaagagttctaaattaagaaatgatgctaaattgaataaaataaygcagaatctgtagttgatttccatggatcaccaggccctttttctttcttcttacttcttataacatttaaatgctgtctgctcttggaggaaacacaataatgagctaccaatctaatttagtacaacaaatttctatttctagtttaagtcctattggatcttttcactaagaaaagtaacagatttattcaagctgctacataaaacaaaagagaggataatgcattttttcctttgaaatgttttctacaaaaaggcccataacaattgtttgcaatctgaaagaaatacacctca

SEQ ID NO: 63790 - DNA, 600 bp, Chicken  19866894329009_1
gggtctgaaagtttggggatctgatagaatggagttggatgctgctggaaatatgagctgctgcagctgaggtcctgctgcaagcaagctgattctcatcaactcttatttgcttgcctacgtggtcttaaggctggcttattgcacagatatcccctcctgctgtctgactgttccctgcttgctttctgctgcggttctgccataaaccatctgggaagctttaattctctgcttttaggaggagattgcatttcaccagccggagctgattgcaaagctggggtagcaaaccccacraaargggacaaaccctttccccaccatagccctccaccagcagaaccctgcagaagcgggtgaaggsaagagcccagcttctgccttcccagccctgtgtccatccgtgctgtccccttccccacagacccagaggtctcattyggagccaaaggtaaaaggacatcagctctgcagcctcacrcctgccctactgcaggaaacagccccgaagacctcttgttctgtgccctgttaatgtaactcgtatttcacgtgtccaccaccaggcacaaaatgtggcactaataggattaatga

SEQ ID NO: 63791 - DNA, 600 bp, Chicken  19866894329009_2
ctgaaagtttggggatctgatagaatggagttggatgctgctggaaatatgagctgctgcagctgaggtcctgctgcaagcaagctgattctcatcaactcttatttgcttgcctacgtggtcttaaggctggcttattgcacagatatcccctcctgctgtctgactgttccctgcttgctttctgctgcggttctgccataaaccatctgggaagctttaattctctgcttttaggaggagattgcatttcaccagccggagctgattgcaaagctggggtagcaaaccccacraaargggacaaaccctttccccaccatagccctccaccagcagaaccctgcagaagcgggtgaaggsaagagcccagcttctgccttcccagccctgtgtccatccgtgctgtccccttccccacagacccagaggtctcattyggagccaaaggtaaaaggacatcagctctgcagcctcacrcctgccctactgcaggaaacagccccgaagacctcttgttctgtgccctgttaatgtaactcgtatttcacgtgtccaccaccaggcacaaaatgtggcactaataggattaatgagcag

SEQ ID NO: 63792 - DNA, 600 bp, Chicken  19866894329009_3
tgaggtcctgctgcaagcaagctgattctcatcaactcttatttgcttgcctacgtggtcttaaggctggcttattgcacagatatcccctcctgctgtctgactgttccctgcttgctttctgctgcggttctgccataaaccatctgggaagctttaattctctgcttttaggaggagattgcatttcaccagccggagctgattgcaaagctggggtagcaaaccccacraaargggacaaaccctttccccaccatagccctccaccagcagaaccctgcagaagcgggtgaaggsaagagcccagcttctgccttcccagccctgtgtccatccgtgctgtccccttccccacagacccagaggtctcattyggagccaaaggtaaaaggacatcagctctgcagcctcacrcctgccctactgcaggaaacagccccgaagacctcttgttctgtgccctgttaatgtaactcgtatttcacgtgtccaccaccaggcacaaaatgtggcactaataggattaatgagcagagcacagaaacagctccattacgttttgggaatgagatatatctgggaacagccaggatataa

SEQ ID NO: 63793 - DNA, 600 bp, Chicken  19866894329009_4
cacagatatcccctcctgctgtctgactgttccctgcttgctttctgctgcggttctgccataaaccatctgggaagctttaattctctgcttttaggaggagattgcatttcaccagccggagctgattgcaaagctggggtagcaaaccccacraaargggacaaaccctttccccaccatagccctccaccagcagaaccctgcagaagcgggtgaaggsaagagcccagcttctgccttcccagccctgtgtccatccgtgctgtccccttccccacagacccagaggtctcattyggagccaaaggtaaaaggacatcagctctgcagcctcacrcctgccctactgcaggaaacagccccgaagacctcttgttctgtgccctgttaatgtaactcgtatttcacgtgtccaccaccaggcacaaaatgtggcactaataggattaatgagcagagcacagaaacagctccattacgttttgggaatgagatatatctgggaacagccaggatataatttggttcatttgttaaaataacatggatttaaggaaaaaaaaaagagcctaaagtgaagccattccagggacccac

SEQ ID NO: 63794 - DNA, 600 bp, Chicken  19866894329009_5
ctttctgctgcggttctgccataaaccatctgggaagctttaattctctgcttttaggaggagattgcatttcaccagccggagctgattgcaaagctggggtagcaaaccccacraaargggacaaaccctttccccaccatagccctccaccagcagaaccctgcagaagcgggtgaaggsaagagcccagcttctgccttcccagccctgtgtccatccgtgctgtccccttccccacagacccagaggtctcattyggagccaaaggtaaaaggacatcagctctgcagcctcacrcctgccctactgcaggaaacagccccgaagacctcttgttctgtgccctgttaatgtaactcgtatttcacgtgtccaccaccaggcacaaaatgtggcactaataggattaatgagcagagcacagaaacagctccattacgttttgggaatgagatatatctgggaacagccaggatataatttggttcatttgttaaaataacatggatttaaggaaaaaaaaaagagcctaaagtgaagccattccagggacccacagaaggcaaaccagaacgatggcccttatccccgatggca

SEQ ID NO: 63795 - DNA, 600 bp, Chicken  19866894329026_1
ccagtgtaatcctgggcagaaattactaaatgagagaatcacgtgtgcttctcatggcacaggcaggctcctgggttagagacccttggacagactttgtgttcactcagaagcagatgaaagaaatgagcaggtgagtcagggtaaatgtatcttgtaaagcattcagaataatgccggcaaatgtcaaagcatcatgctattttggttctgccagctcttttctctgctgagaaacgtccaagtcattttagagtggctcacctttatcctacacatggcaatgacctggggatgagrkaagcagctgtccccatcctggtttattgatgcacgcagtagcatccagacactgcccaggtttgctccagtcagtcagagtcccctgggtctgcactggttatttggagtgttttgaggtcatccatccagtcagatgggcaggttattggaagatgtggcactcgggaacagggtttagtgggcatggtggtaatgggttggactagatgatctcagtggtcttttccaaccttaatgttctatcattccaagatgatcctgatggaaacatcattccctggagctcctttccatatt

SEQ ID NO: 63796 - DNA, 600 bp, Chicken  19866894329026_2
cagtgtaatcctgggcagaaattactaaatgagagaatcacgtgtgcttctcatggcacaggcaggctcctgggttagagacccttggacagactttgtgttcactcagaagcagatgaaagaaatgagcaggtgagtcagggtaaatgtatcttgtaaagcattcagaataatgccggcaaatgtcaaagcatcatgctattttggttctgccagctcttttctctgctgagaaacgtccaagtcattttagagtggctcacctttatcctacacatggcaatgacctggggatgagrkaagcagctgtccccatcctggtttattgatgcacgcagtagcatccagacactgcccaggtttgctccagtcagtcagagtcccctgggtctgcactggttatttggagtgttttgaggtcatccatccagtcagatgggcaggttattggaagatgtggcactcgggaacagggtttagtgggcatggtggtaatgggttggactagatgatctcagtggtcttttccaaccttaatgttctatcattccaagatgatcctgatggaaacatcattccctggagctcctttccatattg

SEQ ID NO: 63797 - DNA, 600 bp, Chicken  19866894329026_3
tgggtctgcactggttatttggagtgttttgaggtcatccatccagtcagatgggcaggttattggaagatgtggcactcgggaacagggtttagtgggcatggtggtaatgggttggactagatgatctcagtggtcttttccaaccttaatgttctatcattccaagatgatcctgatggaaacatcattccctggagctcctttccatattgcagaggggcatctccttagcagaaccatcagggcagcagcatgagcatctgctcacacttagcactgcagctccagatcctaacragggggccaggactgatctcttaaccatcagccacagcgccatgcttgcagcagcacagggagaggttacagccccatgcacagctggaaggagcaaaaccaccccacatcttctgcttgaatgggaactaccctttctcagaggcaaaagtcatatatgactgtaaaggattttaccttcttcggcttccagatccaccagtgaagataccaacacgcccatctcctgacattttttgctgtgggcttttgacttcatatgcttagtcagattccctgaaaggaagcagaaaacacatt

SEQ ID NO: 63798 - DNA, 573 bp, Chicken  19866894329029_1
agattatatctgaaattcaagataagaatgttttctcaactgttcaaatatgtatcatagagcaaccatgaacatttggtccaagaaggacagccagaaagataactcccacgatactgaacaagaatacacaatgcagcagcagctaatagtgtgagtgggttacacgaggaaagagcgtgatcccatccttgctgctagtcatagaacagctgaggcatgtgttactatcagagtagatagcccagtcttctagagcaaggaatggggacttgtaatttttcagctgcatatatgctygaattgcrcaaaagtctacctcttctaagcatctaacrattgttgacaataaaagttaagttttccatctcatgataggaaaaaaaacagcctacagtcgtcacacattcagttcttatttttactcttctcagatgtaggttactgaaaacgttaaatgcatttttgtgtaccagcattcttgggggactgttagtaacatgggataaaatgctgaacccattgaagatggtggagaaaatgctgagcaagttttcaaggcaaatatgaaaa

SEQ ID NO: 63799 - DNA, 565 bp, Chicken  19866894329029_2
tctgaaattcaagataagaatgttttctcaactgttcaaatatgtatcatagagcaaccatgaacatttggtccaagaaggacagccagaaagataactcccacgatactgaacaagaatacacaatgcagcagcagctaatagtgtgagtgggttacacgaggaaagagcgtgatcccatccttgctgctagtcatagaacagctgaggcatgtgttactatcagagtagatagcccagtcttctagagcaaggaatggggacttgtaatttttcagctgcatatatgctygaattgcrcaaaagtctacctcttctaagcatctaacrattgttgacaataaaagttaagttttccatctcatgataggaaaaaaaacagcctacagtcgtcacacattcagttcttatttttactcttctcagatgtaggttactgaaaacgttaaatgcatttttgtgtaccagcattcttgggggactgttagtaacatgggataaaatgctgaacccattgaagatggtggagaaaatgctgagcaagttttcaaggcaaatatgaaaa

SEQ ID NO: 63800 - DNA, 535 bp, Chicken  19866894329029_3
actgttcaaatatgtatcatagagcaaccatgaacatttggtccaagaaggacagccagaaagataactcccacgatactgaacaagaatacacaatgcagcagcagctaatagtgtgagtgggttacacgaggaaagagcgtgatcccatccttgctgctagtcatagaacagctgaggcatgtgttactatcagagtagatagcccagtcttctagagcaaggaatggggacttgtaatttttcagctgcatatatgctygaattgcrcaaaagtctacctcttctaagcatctaacrattgttgacaataaaagttaagttttccatctcatgataggaaaaaaaacagcctacagtcgtcacacattcagttcttatttttactcttctcagatgtaggttactgaaaacgttaaatgcatttttgtgtaccagcattcttgggggactgttagtaacatgggataaaatgctgaacccattgaagatggtggagaaaatgctgagcaagttttcaaggcaaatatgaaaa

SEQ ID NO: 63801 - DNA, 600 bp, Chicken  19866894329035_1
agacttcataagcagatattggaataaatgtaatcttccaagggacatatcacgcctgtgggttagaacaaattctgctaataattactggggtaaggctctgacaaataaatggtaggtgctgagtctgagctttgtctttgccttcatggactgtgattagactatcagtgctatatcaatggtacttttttgttctgattaatactacatcactttcatccccaatccagttgtgatcagataaacatagcttgagcatgaaaaaaagaaaagccattcttgcattttcatttatcyttcccagcattgaatgcattccgggcatttttcyttaattagcagcatttgaatttgagtggctgtatttgtaataagagttttaacagatacgtgcttattttgacatctagtgttgaacatcttcaatgagtaccatggtattaaggttgaacttgcatatgctactggctttaactttgaaattgcaaacagtattctagtagagattgaaagcttgcacgttaacagcttgtttcagatatctcaaaggtactgcatagcctttcttttcataagaaatatagtggcagatgctat

SEQ ID NO: 63802 - DNA, 600 bp, Chicken  19866894329035_2
cttccaagggacatatcacgcctgtgggttagaacaaattctgctaataattactggggtaaggctctgacaaataaatggtaggtgctgagtctgagctttgtctttgccttcatggactgtgattagactatcagtgctatatcaatggtacttttttgttctgattaatactacatcactttcatccccaatccagttgtgatcagataaacatagcttgagcatgaaaaaaagaaaagccattcttgcattttcatttatcyttcccagcattgaatgcattccgggcatttttcyttaattagcagcatttgaatttgagtggctgtatttgtaataagagttttaacagatacgtgcttattttgacatctagtgttgaacatcttcaatgagtaccatggtattaaggttgaacttgcatatgctactggctttaactttgaaattgcaaacagtattctagtagagattgaaagcttgcacgttaacagcttgtttcagatatctcaaaggtactgcatagcctttcttttcataagaaatatagtggcagatgctatcactaatagtgctaaaaagcatcagtttgcgtct

SEQ ID NO: 63803 - DNA, 600 bp, Chicken  19866894329036_1
tgccatatgcactgaagatggttttagtgatgtctcttcccagagtggagaaaatttattcacatttattcccaatgaaggaagaagtcagtataaaacaaagaaacaaacaaacaaacaaaaaaaacaacatggaaatatctgggccattctttctacctttcttaaaaatgagtgtgatattgcctttttttccagttaccagagacttcacctgaccaccacgacttttcaaatttcatcaggagtggcttggtgactacatcagccaattccctagaatgaaaaaaaaaaaaaaaraaagaaaaaaaaagaaaaattascactcccatggttgactttcctgcatttggggaaatcacaggtgttggctcacactaagtgcttgggataagcctcaccctgggaaaaccactcacctgatcatggtgtctcccctgccaataagtatttctggttcttcttaacaatcctatgctcaaatatgaatcacacataaattgcaacacgtttacatggctgctcacaacaatttgtgcattaatcctgtacacataattataagtgtagctaggtggttttaagtcgtcactgctgcat

SEQ ID NO: 63804 - DNA, 600 bp, Chicken  19866894329036_2
ttagtgatgtctcttcccagagtggagaaaatttattcacatttattcccaatgaaggaagaagtcagtataaaacaaagaaacaaacaaacaaacaaaaaaaacaacatggaaatatctgggccattctttctacctttcttaaaaatgagtgtgatattgcctttttttccagttaccagagacttcacctgaccaccacgacttttcaaatttcatcaggagtggcttggtgactacatcagccaattccctagaatgaaaaaaaaaaaaaaaraaagaaaaaaaaagaaaaattascactcccatggttgactttcctgcatttggggaaatcacaggtgttggctcacactaagtgcttgggataagcctcaccctgggaaaaccactcacctgatcatggtgtctcccctgccaataagtatttctggttcttcttaacaatcctatgctcaaatatgaatcacacataaattgcaacacgtttacatggctgctcacaacaatttgtgcattaatcctgtacacataattataagtgtagctaggtggttttaagtcgtcactgctgcatattttatgctgcagcaccatcta

SEQ ID NO: 63805 - DNA, 600 bp, Chicken  19866894329037_1
ttttattcagaaggcatatactgtaacaaacaagacataaatgactacacttgcatggcattcaatggactcacgtatctaaggttatctacatgtgcctttagttagctgttggaaatgagagttattccaacattttcaggttcagttatgaaactaaaccacacaatagcaggtcatgattgcttaattcatcagtgaagatgagtttcatttacttgagaaacaggcataatagcatacaagagactttaacagtatacatgttgtcaggaatcaacagcccagcaatccacacartaacacaaaactactgcaacactatatggatgttcccaaaacagcttatccattccctttccctttcctgcctttcctcaagttgaaatagtaaagttaccatcagaatccgtatgaattacatcaacgaattgtgcgtcagtacgatccaatctgtcctctggtagtactctagtgaataaagggcccgctggatcaagacctacatgaaaataatgctagcattacacatcctaatatgtctaaaattatactcactactgacattagagcattgtttattattgattcacacatttt

SEQ ID NO: 63806 - DNA, 600 bp, Chicken  19866894329048_1
cagaaaataaagtgaaaacacttctctttcttttctggagcacagcctcgtcatggcagcaaacctcacaccagtgctgcactataaaagaccccacagagggactgaaagtgcatgaaagaaggggaatttaaagaatgtgaaagatcccaccgaggtacaaaggcccacagagaatctgtgtttggcactcagtccgtgctaacagctggtgatgtagttgagtagattgaattgtttgaatagaccgtattgctagaattgaagctggacagggggggatcggctgctctttgcaastggctcgtaggtgttgccacagtgggctgtgctgcttgtaaccactgaaatgcaaggtgttcttcaaataggtgatgttatgaacgccaatggttggtgctccacaaagtatagcagctccccggatggaatggaaatagaataagagaaccagaatagcttttagtttggaggggaccttaaagctcacccagccccaacccctgctgtgggctggctgccccacacagttcgggatgcccaggggatcccatccaacctggaatgccagatatggggcacccgcagcagtctgggcag

SEQ ID NO: 63807 - DNA, 484 bp, Chicken  19866894329048_2
ccacagtgggctgtgctgcttgtaaccactgaaatgcaaggtgttcttcaaataggtgatgttatgaacgccaatggttggtgctccacaaagtatagcagctccccggatggaatggaaatagaataagagaaccagaatagcttttagtttggaggggaccttaaagctcacccagccccaacccctgctgtgggctggctgccccacacagttcgggatgcccaggggatcccatccaacctggaatgccagatatggggcacccgcagcagtctgggcagccttcccctcccagcyctatgcagaactggaagagttctgtgttgtggctctgaatgttacagcttgaggccatgacagcagcacagaaacacacgggtagatgttacagatgggtgtgtgtgtaaaaagtttagggtaaagacacggaactcttcaatgcctgccactgcatctttattgtccctatctcttctccaca

SEQ ID NO: 63808 - DNA, 600 bp, Chicken  19866894329051_1
atattctggtattgtaatattccatccactcactctctggtgagtgcctcacaggggaatgtctgttatgtagctgaagcaattattacaaacagttgtatggagtttttttgtgacttcagagcttgaattttggaggacaggaagttgatactgaagaactacttgttctgtcttgttatctgtatggccacattcctttctcagtccaggaaaaataaaggaatagttaggagttcagcttcttctcagaccttgatcaatttgagatgaaattttctgatctctggcattgactgrctctggcttgctttatgctaatatagttcttttgtcttctaattgagatatctatagagacctatttgttgttttcaaatatggttcctgagttccaacgtaagcatcagttcttcactctcaaagtctatctaaaaggctgccggagcctctccttgatgccaaagaaagctttatttttaatattagcaggacacaatacttggactactcagtaggtatcatcaatcacactgctttgtacagtgattctccagcaggtagcagttaaaggcaacacggccaaaaagattctggaga

SEQ ID NO: 63809 - DNA, 600 bp, Chicken  19866894329061_1
ctgtccaatctggggactaattttggcccaacaaagctgttctctgtgcaaaatgattatgtcactatcctgacagcagcaaatgcagctgtatgcctgaaacagctgctggagtggggggaaaaacaggtttgtcgtttgctgagaaacagagctctccccatgactttttctctttagtttttatccagaacaacatcaggtcccagtgtattaacaaatcaaagctgactgcactcagcacctctcgggaagacgccaagttacaggaaacacccttggaaaggatgtcagtattascaagcctcctatgaactggtaatactggaacttgcaagaagattaagaaaagtcagtttctgtatttaaaaataaacctgctttggtccaaagtctgtgaaaaaaaaaaaaaaaagtgtgtggaactctttataaagtttgtagggtttgctgtcctataaatcagtaatacatttttcttaaaaaataaaataaaatgaaatctgggcttgcagtcatcacgccaagtttccactcttgcaatctgaagaatcagggcttgaaagagcataatgaagtataattcatgcagtaaattat

SEQ ID NO: 63810 - DNA, 599 bp, Chicken  19866894329072_1
  misc_feature (1)..(14): n is any nucleotide
nnnnnnnnnnnnnncatagaaaataaaaaagataaagtaataaacttgaattctgattataatccagatgggtcatagcttacaattactgaaactatcatgcatacagtacttcccacctggtggtgtatttctaaactctcttccttcagtgctgctgtttcctctgcctacttactgtgtcacatacaaccagccttaagtgaggtgtgatggaatccagtagcacaaagaatagtactgagtgcttttaacttttggtggaactggaggatatccagcaccttatcttctaccttmtcttctcttcctgtatctaacaggtgaaattcagatctacacaggaaaccaacattagtcagactgattcctgaagaaagacttctgtatcagatgttaagcttttaagcccagttttgagggaccgagcaagagctgggggctaaaaaagcttctgttttctgaccttcagcatggagctgaacttcatccatcaggaggacatccatctgaaacatgggtgggtcttgtgattagagtgacaatcaaagctgtatttcataacaaggcctgtcttgcagagtatgccagtacacaga

SEQ ID NO: 63811 - DNA, 600 bp, Chicken  19866894329074_1
cccaaacccagcacctgagggaggaagcagggaaagctatccacctgccaggcacagctctgaaggtgcctgaccctgtgctgctcgcttctttccatgtcccttctggccctgcagatagctcctggagtgccagcacaaaatccacacaacatatgcagttctgtcccaggaccatcacgcattcctgtaattcacaggtgtatgtcttactttatatagagattttctcactacataggctcagtcaagcaattacaacaataccaaggaatgcagcgatcagatattaccttcaaygtaaaattcaacttgaaaaaaggttgaaattttaagttgaaagttgaaaactgaaaagctaacctgaaacctcaaaataaagcgttctgttttgtgcagagaccacatctcccgaacacaaacccacagccaaatccatgaagaaagaaaagaacaraaggaggaattattttgcatgggggagcaccrgagggacagcaatgctacaacacagcacacagcagtttaggcagaagtttcagttttttgttattaaagcacacacatatagtgtgtggggaccttacaataaggctgaaa

SEQ ID NO: 63812 - DNA, 600 bp, Chicken  19866894329074_2
gcagttctgtcccaggaccatcacgcattcctgtaattcacaggtgtatgtcttactttatatagagattttctcactacataggctcagtcaagcaattacaacaataccaaggaatgcagcgatcagatattaccttcaaygtaaaattcaacttgaaaaaaggttgaaattttaagttgaaagttgaaaactgaaaagctaacctgaaacctcaaaataaagcgttctgttttgtgcagagaccacatctcccgaacacaaacccacagccaaatccatgaagaaagaaaagaacaraaggaggaattattttgcatgggggagcaccrgagggacagcaatgctacaacacagcacacagcagtttaggcagaagtttcagttttttgttattaaagcacacacatatagtgtgtggggaccttacaataaggctgaaactgcttttgaggacagtcttgtttggaaagaaaggttttattgctaagatactcatcagcagttayatagtttaacataagtacaaaagcttagtccattgtaattcacagaaagcattggatgcaacaaatcgttttgttttctgtgcttcccctg

SEQ ID NO: 63813 - DNA, 600 bp, Chicken  19866894329074_3
gtaattcacaggtgtatgtcttactttatatagagattttctcactacataggctcagtcaagcaattacaacaataccaaggaatgcagcgatcagatattaccttcaaygtaaaattcaacttgaaaaaaggttgaaattttaagttgaaagttgaaaactgaaaagctaacctgaaacctcaaaataaagcgttctgttttgtgcagagaccacatctcccgaacacaaacccacagccaaatccatgaagaaagaaaagaacaraaggaggaattattttgcatgggggagcaccrgagggacagcaatgctacaacacagcacacagcagtttaggcagaagtttcagttttttgttattaaagcacacacatatagtgtgtggggaccttacaataaggctgaaactgcttttgaggacagtcttgtttggaaagaaaggttttattgctaagatactcatcagcagttayatagtttaacataagtacaaaagcttagtccattgtaattcacagaaagcattggatgcaacaaatcgttttgttttctgtgcttcccctgtaattaaatgacacacgaaggaatcatcctgc

SEQ ID NO: 63814 - DNA, 600 bp, Chicken  19866894329074_4
aaacctcaaaataaagcgttctgttttgtgcagagaccacatctcccgaacacaaacccacagccaaatccatgaagaaagaaaagaacaraaggaggaattattttgcatgggggagcaccrgagggacagcaatgctacaacacagcacacagcagtttaggcagaagtttcagttttttgttattaaagcacacacatatagtgtgtggggaccttacaataaggctgaaactgcttttgaggacagtcttgtttggaaagaaaggttttattgctaagatactcatcagcagttayatagtttaacataagtacaaaagcttagtccattgtaattcacagaaagcattggatgcaacaaatcgttttgttttctgtgcttcccctgtaattaaatgacacacgaaggaatcatcctgcttaatggcaccatcagcaatacaccttttctttttttcaactgaaaaaacgtttggatagttgatacaaaaggatgagcccctgtgtctccacctacctaagctacagaagtattaacgttgagtcagaactacttcgttacacaattaacaataattaaccttggataattcactt

SEQ ID NO: 63815 - DNA, 600 bp, Chicken  19866894329075_1
catttttaaatgctgctcaagtcttcaaatcaataatagattagctgatactcctggcaacctgattcaaagctgcagactgcgaagctcagagcacttgattgcaacttcaaacacaagttctgtcttcccagatcaatggagtgttggtgggtatggcaacacattgccaaatccaggacagtgcagtgcctcctgccacatgtactaacaaaaggaggtacgagctgtgctaatctcactgagcacaacattgcagactgcagatattcttctgaacctctcccctgggtacatttmccacctctctcaggctctgctgcacacgcagcttgctgctttcccctctcagctcttcccacctcctgctctcctgcagcctcctctccccttgcttaccaygttgtgagcccaagccgtgccctggggatgtatcttataactccccttcactcaagaactactgactcttgtccttctccctcattaaatccctcttccagaaaacccttgaraacaaagcagcgagttaaggaaatagtgcatctctgaaggaagaaatagaccttgcagggtaccgagtcctttctctggtcagca

SEQ ID NO: 63816 - DNA, 600 bp, Chicken  19866894329075_2
tgcaacttcaaacacaagttctgtcttcccagatcaatggagtgttggtgggtatggcaacacattgccaaatccaggacagtgcagtgcctcctgccacatgtactaacaaaaggaggtacgagctgtgctaatctcactgagcacaacattgcagactgcagatattcttctgaacctctcccctgggtacatttmccacctctctcaggctctgctgcacacgcagcttgctgctttcccctctcagctcttcccacctcctgctctcctgcagcctcctctccccttgcttaccaygttgtgagcccaagccgtgccctggggatgtatcttataactccccttcactcaagaactactgactcttgtccttctccctcattaaatccctcttccagaaaacccttgaraacaaagcagcgagttaaggaaatagtgcatctctgaaggaagaaatagaccttgcagggtaccgagtcctttctctggtcagcaggtctggagggtagtgcttgtccattcagcaacacctgttggggcacagactgcacctccttgctgcgtgtgcagctgggaactccctgtaccaggacacca

SEQ ID NO: 63817 - DNA, 600 bp, Chicken  19866894329075_3
aggaggtacgagctgtgctaatctcactgagcacaacattgcagactgcagatattcttctgaacctctcccctgggtacatttmccacctctctcaggctctgctgcacacgcagcttgctgctttcccctctcagctcttcccacctcctgctctcctgcagcctcctctccccttgcttaccaygttgtgagcccaagccgtgccctggggatgtatcttataactccccttcactcaagaactactgactcttgtccttctccctcattaaatccctcttccagaaaacccttgaraacaaagcagcgagttaaggaaatagtgcatctctgaaggaagaaatagaccttgcagggtaccgagtcctttctctggtcagcaggtctggagggtagtgcttgtccattcagcaacacctgttggggcacagactgcacctccttgctgcgtgtgcagctgggaactccctgtaccaggacaccaagtaatagcatcattmtcttctcttcttacctttatatctaaatgagccactcggcaattgtgaagatactgcaaggcttccattgtgtctcttatgtagaaagctacttttt

SEQ ID NO: 63818 - DNA, 600 bp, Chicken  19866894329075_4
gtgccctggggatgtatcttataactccccttcactcaagaactactgactcttgtccttctccctcattaaatccctcttccagaaaacccttgaraacaaagcagcgagttaaggaaatagtgcatctctgaaggaagaaatagaccttgcagggtaccgagtcctttctctggtcagcaggtctggagggtagtgcttgtccattcagcaacacctgttggggcacagactgcacctccttgctgcgtgtgcagctgggaactccctgtaccaggacaccaagtaatagcatcattmtcttctcttcttacctttatatctaaatgagccactcggcaattgtgaagatactgcaaggcttccattgtgtctcttatgtagaaagctactttttcctccataagttcatcatggttcattagataatctaggagacgaccatcatccatcctacaaaaaaaaaaaatgaaacccccacacctgaaagatcacatgacatctgcacgatgaacagctgatatttgacaagaaaactgcaatggaaactttgtgacctaaaaacggaggatatcaaaatgagagatttgattagggttt

SEQ ID NO: 63819 - DNA, 600 bp, Chicken  19866894329075_5
ggcccttaataaatttagggacaatctcgaagtacactgagttgcttaaggacggattcagcagacagaggagatccctttgaaaacagatccacttaattatttggattcacttatttatttatagagatggttgcatagtgcagaaaaaaggtcactgatatttcagctcgtggtgtgttccttgggaaagctaactcaacaaaagttttccacctagttttatttatctgtattaataaacgagcaaagagcccaaatatgctcgattggatacactataacagagaaagcagtttrgattttggttgctatttctccttatagggacaaacatagccccagtgcagctttttttatcaactattagagcaacgtaggctccgatccagccgaagtgtatttgctcagatatagagagcagactaaagtgccccaataaatctgatgcgatgtgacaaactaactgctgatacaattactgagcttccagcgtggggagtttcatttgtacccctgattctcatttactgtaaagaaaaagcagtgggaaagtcagcagaaaatggctatttcatttgacattcgcagtcaataagg

SEQ ID NO: 63820 - DNA, 600 bp, Chicken  19866894329085_1
ctttgacaggttctcagttagatcaaggatagagataacaagcatctacaacctgcagaatttctaaggaaaaaattggacaactattgactgccttctacagaatgaagattaaaaaaaaaagaaacatgttatgaacatacaatgcaccttcaattagaaaaaccataggaagagaacataaccattgaagggaagataccaaaattgaacatttgacaaaactactaaagaagtttggcagtcaagcttttgccttttcattgatattgcattttttttttccagaacttgagaaaraaagtcttatgaaactatatgcctctctagcaaaggattatacaatgaagtaataagattatcagttttccactgaagagagttttatacacaacatacgtatatagtacacatttttccagaggaaaaaaagctcaactgggaaaaggaagttaattaatgcatttctcaggagaacataaaagtcaacatacaattcacaatgaaaatacaagattcctcttgtaaaaacaactagccaggaactatttcaagctgattttttaaaaaataatatatcctattaagttggtacactta

SEQ ID NO: 63821 - DNA, 600 bp, Chicken  19866894329094_1
agaaaggccttgtcttacagagaccatcactgcaggccctgctgccaacatttgacagttacaacctgtgttaataccagggctgctgtgaaagtaacgtcccctattttactatgttggttcatgacatcaaagatggatatcagtggtatggcagaagagaatgagccatcccaccaatattccattaaattttgttgctgtgtaacagatgggagcagagaggcagcctgacaagacagtgtctttcatgaaaattcatatgaagcaacagtgtatcattgaattcctccattcagraaaaaaaaaaaaaaaaaaaaaaaaatgcacccactgacattcatcaatgcttgctgaacatttatggagactaattggtggatgtaaacacagtgagtcagtgggtggtgaatttctgcagtgcaaacaactacacaaaagacaaggcacattccaggtggccttccagacttttacaggtgcaacatggatgctcgcattcattgctggtgaaaatgcatagctaatgggtggtgactaaattgaaaaatgttattttgtagctgagaatttgctttatccaacagtgttattggattc

SEQ ID NO: 63822 - DNA, 600 bp, Chicken  19866894329094_2; identical to SEQ ID NO: 63821

SEQ ID NO: 63823 - DNA, 599 bp, Chicken  19866894329099_1
  misc_feature (1)..(123): n is any nucleotide
nnnnnnnnnnnnnnnnnnnnnnnnnnnnnnnnnnnnnnnnnnnnnnnnnnnnnnnnnnnnnnnnnnnnnnnnnnnnnnnnnnnnnnnnnnnnnnnnnnnnnnnnnnnnnnnnnnnnnnnnnnntcaagacggatctaggtgcctcgctattgtctttctaatactgacagacagcaaaataagatgtctgaatcgagttgctctttcacactgagcctagaaagggagcatattaagcagggagaagtggtaagtcagcccacacgagtgggcttaaattaaagtaattctgggaatgartgggtggaagagctgaagagtgagctgtgtgggagagcaatgaaaacttgagagtataaacagatttaaaaaaaaatgttttagggtttaggtataataaacccctaagacgttgttaacttagaccaataggtaggtagycatacctacaagaaaagtaagttatgatgctgygaaaagactatcacattaccagaaattcacccttacaatttaaggaagaggacaggaaggcaatgggaaccatcttcatagctctcagttacaaacactgttagttttccataccaaaaaacatc

SEQ ID NO: 63824 - DNA, 600 bp, Chicken  19866894329099_2
cctcgctattgtctttctaatactgacagacagcaaaataagatgtctgaatcgagttgctctttcacactgagcctagaaagggagcatattaagcagggagaagtggtaagtcagcccacacgagtgggcttaaattaaagtaattctgggaatgartgggtggaagagctgaagagtgagctgtgtgggagagcaatgaaaacttgagagtataaacagatttaaaaaaaaatgttttagggtttaggtataataaacccctaagacgttgttaacttagaccaataggtaggtagycatacctacaagaaaagtaagttatgatgctgygaaaagactatcacattaccagaaattcacccttacaatttaaggaagaggacaggaaggcaatgggaaccatcttcatagctctcagttacaaacactgttagttttccataccaaaaaacatcccagttgatggaatggtctacccaaccattctgacttccctgctgaagatgaaaatcctgcaagcaaggacctaaagatgttcttrgttgaccaagttattgacaacatattctcctcatgcctttgcacaaagtkcacctg

SEQ ID NO: 63825 - DNA, 600 bp, Chicken  19866894329099_3
caaaataagatgtctgaatcgagttgctctttcacactgagcctagaaagggagcatattaagcagggagaagtggtaagtcagcccacacgagtgggcttaaattaaagtaattctgggaatgartgggtggaagagctgaagagtgagctgtgtgggagagcaatgaaaacttgagagtataaacagatttaaaaaaaaatgttttagggtttaggtataataaacccctaagacgttgttaacttagaccaataggtaggtagycatacctacaagaaaagtaagttatgatgctgygaaaagactatcacattaccagaaattcacccttacaatttaaggaagaggacaggaaggcaatgggaaccatcttcatagctctcagttacaaacactgttagttttccataccaaaaaacatcccagttgatggaatggtctacccaaccattctgacttccctgctgaagatgaaaatcctgcaagcaaggacctaaagatgttcttrgttgaccaagttattgacaacatattctcctcatgcctttgcacaaagtkcacctgcctatacagaagttgatgctacagttacaataa

SEQ ID NO: 63826 - DNA, 600 bp, Chicken  19866894329099_4
gtttaggtataataaacccctaagacgttgttaacttagaccaataggtaggtagycatacctacaagaaaagtaagttatgatgctgygaaaagactatcacattaccagaaattcacccttacaatttaaggaagaggacaggaaggcaatgggaaccatcttcatagctctcagttacaaacactgttagttttccataccaaaaaacatcccagttgatggaatggtctacccaaccattctgacttccctgctgaagatgaaaatcctgcaagcaaggacctaaagatgttcttrgttgaccaagttattgacaacatattctcctcatgcctttgcacaaagtkcacctgcctatacagaagttgatgctacagttacaataacttggtgcaaggaggaatcaatatcttctgataaagttgaaaactgttaaccacttttctcaggccaattacaagagaacggaaaacaattagtcttacctaatctagcagagacactcctgtatttagagaaaacgagagctcattttctccaaaaagaaaataaaaatcccccacgtaagtgaggattggttctaattaccatgttata

SEQ ID NO: 63827 - DNA, 600 bp, Chicken  19866894329099_5
ggtagycatacctacaagaaaagtaagttatgatgctgygaaaagactatcacattaccagaaattcacccttacaatttaaggaagaggacaggaaggcaatgggaaccatcttcatagctctcagttacaaacactgttagttttccataccaaaaaacatcccagttgatggaatggtctacccaaccattctgacttccctgctgaagatgaaaatcctgcaagcaaggacctaaagatgttcttrgttgaccaagttattgacaacatattctcctcatgcctttgcacaaagtkcacctgcctatacagaagttgatgctacagttacaataacttggtgcaaggaggaatcaatatcttctgataaagttgaaaactgttaaccacttttctcaggccaattacaagagaacggaaaacaattagtcttacctaatctagcagagacactcctgtatttagagaaaacgagagctcattttctccaaaaagaaaataaaaatcccccacgtaagtgaggattggttctaattaccatgttataatgtaagatgcagaaggtcaaatataaagtaagttttaattagctatttc

SEQ ID NO: 63828 - DNA, 600 bp, Chicken  19866894329099_6
acaaaaacctactgacacatggcaagtactttctggaagcaaagtctatgttaactcagcaacacaggaaaagggttatttatcttcttaacgggcaacacaattaatacaaagaggcacttttaaactgtttcatataaagcagcctgtctgaatttctgtgtatccttgagaagaagttgcattagagcatgcactgacaaatgcagatgtttaagtgagaaaatgtctgcgctattctttagcataagcaaagaaacacaaacagggcagagttaccaagtttccacgcaatgctcycagcaaagaagcctcttagaagtaataacgcctatggtcacaagacagtattgtgcctcaccaaactagcacagcattrtgttatctatttgggatgtcagttttgatcttttcactatactgtagcacaggagctggaccaagctgcttgcttttggaggctctggagcactcaggggtgttgaaaagagctccttgaagtatttcattccagtagtaggtgcagccaaactgcataactgaaacagaacaccatgatgatacaatagcctacagcagcatggtattatttagataaat

SEQ ID NO: 63829 - DNA, 600 bp, Chicken  19866894329099_7
ttatcttcttaacgggcaacacaattaatacaaagaggcacttttaaactgtttcatataaagcagcctgtctgaatttctgtgtatccttgagaagaagttgcattagagcatgcactgacaaatgcagatgtttaagtgagaaaatgtctgcgctattctttagcataagcaaagaaacacaaacagggcagagttaccaagtttccacgcaatgctcycagcaaagaagcctcttagaagtaataacgcctatggtcacaagacagtattgtgcctcaccaaactagcacagcattrtgttatctatttgggatgtcagttttgatcttttcactatactgtagcacaggagctggaccaagctgcttgcttttggaggctctggagcactcaggggtgttgaaaagagctccttgaagtatttcattccagtagtaggtgcagccaaactgcataactgaaacagaacaccatgatgatacaatagcctacagcagcatggtattatttagataaataaacactgctgtaactactgtcaaagtattatcaactatctagcaaagctggtgtcaaacatctacagacaaacaaaca

SEQ ID NO: 63830 - DNA, 600 bp, Chicken  19866894329102_1
gctggtttacactggatttaaacctgagaaacaccttctgaaaatcaaaatcctgaggaaaggatttaaatctcagtcaacctgagaagtggtgaattccgtcatcgctcctgaaatgtgagtggctcatttgacaacacgtgcaaaaatgtctattccacgtgatgatgtaaattaaccagtatttgttctgaaacagttggggtctcatcaggccttccaagacaaatttcaaatgaaattcatttttgatattcagagcacatcacaaagatagttcatacaataccatttaatacratctcccacttttttttttactttggaagtttttatgcaaattccaaatcactacttaaaagaagaagtatttacatacagagaggaaaatctggctgcaatcttcattttgcagtctacatttcaaatccaacatgtgatggtgacatctgttgggttcttattcctgtgttttggagaggttggggtatttgttcctgatacatttctgactatgtatttactaatatatatatatgtatacaaggttttgagcaccatttgtcagtctatattttcaaaatagggccccatccaaaa

SEQ ID NO: 63831 - DNA, 599 bp, Chicken  19866894329104_1
  misc_feature (1)..(26): n is any nucleotide
nnnnnnnnnnnnnnnnnnnnnnnnnnttatagtttgatctgtgtgctcttccctttagaaaaatggacatggatgtagttgtgaaagaaatggtaatgaagttatctcatgtgtggctttcaagttatttaccttttaaatatttttaatgtctcaggtagaatattgccttatagttgtgatcacgtttgctttgaaggggaagaataatagtcgagtaaaatctcatgttgctgaacttttgcttgtgtcagtccttggcttcctttttaacatgaagccctccgtgtgacacaaaaytgtgtgcattagtatttccatactcactcatttactatctttcaggaacgtttggaaagcctgtatggaggcctcagctggactccctttcaggtcgtaggcagccagcagcaagttgtcaaccgaaaacctcccataataatcctcattcctcattggactttgatccagaagcagatgaagatggaagggaaaggacagtttctagaggacaaaatagcatttacaattacaaacagtcctttgaaaacttcagaacttttaactttcaatcctgtgatttggatacatagttcttt

SEQ ID NO: 63832 - DNA, 600 bp, Chicken  19866894329110_1
cagcacacatcagtgctgacagcatctcggtcagaggaaggagcggagcatctcaacttacctaggcagtggaggatgcagcagctgggaagcgggtgagagggcccagcagtgcctggtgttatatagggtgtcccaacccccgggggagttggcgcattccttccacatgaaactccccagtaaccagcagttttctcctggaaagctcccccagctgattaaaaagttttgtctttcatctgtcatgttttgcttccatttagtactgagtaagattgaaatgattccagctacatrcagtaattatcttacctcccagggccraagtgcattttaggttggatgctacgagacaggagagtgcttcagcagaatttagggcaggtgcatccccagcacatctcccctccctccccttcttctgagcacaaccataaatcagtggggaattcagctcctgagttcacctgaggtgagatcataaacctggggctttaagcacaccaagagaaacacatccatgcacaagttcagtgcaaacagcaaggctcctgcactgcctgggcctcacgggttcctattggtgattgaaagatg

SEQ ID NO: 63833 - DNA, 600 bp, Chicken  19866894329110_2
cggtcagaggaaggagcggagcatctcaacttacctaggcagtggaggatgcagcagctgggaagcgggtgagagggcccagcagtgcctggtgttatatagggtgtcccaacccccgggggagttggcgcattccttccacatgaaactccccagtaaccagcagttttctcctggaaagctcccccagctgattaaaaagttttgtctttcatctgtcatgttttgcttccatttagtactgagtaagattgaaatgattccagctacatrcagtaattatcttacctcccagggccraagtgcattttaggttggatgctacgagacaggagagtgcttcagcagaatttagggcaggtgcatccccagcacatctcccctccctccccttcttctgagcacaaccataaatcagtggggaattcagctcctgagttcacctgaggtgagatcataaacctggggctttaagcacaccaagagaaacacatccatgcacaagttcagtgcaaacagcaaggctcctgcactgcctgggcctcacgggttcctattggtgattgaaagatgggggatgctgcaaaggtgaggggtggt

SEQ ID NO: 63834 - DNA, 600 bp, Chicken  19866894329110_3
gagacaggagagtgcttcagcagaatttagggcaggtgcatccccagcacatctcccctccctccccttcttctgagcacaaccataaatcagtggggaattcagctcctgagttcacctgaggtgagatcataaacctggggctttaagcacaccaagagaaacacatccatgcacaagttcagtgcaaacagcaaggctcctgcactgcctgggcctcacgggttcctattggtgattgaaagatgggggatgctgcaaaggtgaggggtggtaagggagattatcacacaaccaacrgtatggtgctgcagttctgcagctctcatccttccccagctatccaggtagcacagacatagacgcggctcagtgcaagccccatgtagctgaattaatctagcgtgaccaagtgtttatgcatttggatccagtttatgygtttggatccacatggactatgtcgtattttgatatttctcatgtgtgaggcacgtattcagtttggaaagttgagcagattttaaaagcaaacgaatcaaagacacagaaargtgttaaaaagactctggagtccatccctgaaggtggcactgaccg

SEQ ID NO: 63835 - DNA, 600 bp, Chicken  19866894329110_4
ggctttaagcacaccaagagaaacacatccatgcacaagttcagtgcaaacagcaaggctcctgcactgcctgggcctcacgggttcctattggtgattgaaagatgggggatgctgcaaaggtgaggggtggtaagggagattatcacacaaccaacrgtatggtgctgcagttctgcagctctcatccttccccagctatccaggtagcacagacatagacgcggctcagtgcaagccccatgtagctgaattaatctagcgtgaccaagtgtttatgcatttggatccagtttatgygtttggatccacatggactatgtcgtattttgatatttctcatgtgtgaggcacgtattcagtttggaaagttgagcagattttaaaagcaaacgaatcaaagacacagaaargtgttaaaaagactctggagtccatccctgaaggtggcactgaccgtaagcagtgaactttgctcagtgagctgattgcagaggcctggagccttcccaacctgctcttgggacatgctaagagcagtgagtcagaagttcacagctattctttcctgtgatggagagaaactgccaagacattcta

SEQ ID NO: 63836 - DNA, 600 bp, Chicken  19866894329110_5
gctgcaaaggtgaggggtggtaagggagattatcacacaaccaacrgtatggtgctgcagttctgcagctctcatccttccccagctatccaggtagcacagacatagacgcggctcagtgcaagccccatgtagctgaattaatctagcgtgaccaagtgtttatgcatttggatccagtttatgygtttggatccacatggactatgtcgtattttgatatttctcatgtgtgaggcacgtattcagtttggaaagttgagcagattttaaaagcaaacgaatcaaagacacagaaargtgttaaaaagactctggagtccatccctgaaggtggcactgaccgtaagcagtgaactttgctcagtgagctgattgcagaggcctggagccttcccaacctgctcttgggacatgctaagagcagtgagtcagaagttcacagctattctttcctgtgatggagagaaactgccaagacattctaatgataggtgtgactccagattgctctgctgaaccctgctaacctgctagagagacagggagtcgcaggagtcccgacctgcatttaaacatgaatcagctatatgctgggga

SEQ ID NO: 63837 - DNA, 600 bp, Chicken  19866894329118_1
ttatttcaactggttgttacttacctcatcccactcaagaaggtagctggtgatttttgagccattatcaatgggcgcctatgaacaaaaacaaaccaaagacagtttggggagtaagagaactactttctccccccaggcatatgactacagtttaaagtaaaactaaagcacacggcttggcagcctcttaacgactaacgagaagaagctggaatgtaatgaaacacatacattttaaaagtcaagtcagtgcacagggagggatttgtcagagtagagcaagttcatgtcccttaytgaaaaatgactgtctcactttcagttatgttttacagttatgttggcaagctgtatttccctctgtttttacgagtgcccactctgacccaagcattacctaccttccattgtaaggttaaggagcttttggtcctgtgcgagggcttgggtgggaagggacactctggtgctgagctgtgagtggtgaagcttactggctctgagcaggatccccttactgaattgtatgttgcatacaccctggaaacggacacaaggaaatgggttatacatttgctgaccaggctagaaagcact

SEQ ID NO: 63838 - DNA, 600 bp, Chicken  19866894329121_1
ctaatttaaagaacgctggcattgactggtgatattttaattcatctcactgtgccgaaacacagaaaaacatgcaccatacaaaacttcactaatcttaccatgcagttaacttactgctaagttctgcagacattaaatgaactatctgtataaataacgatgaaaggatgggtgcagaaaattgaaagacattaaccgtatctcctgggcatctgaaagtatcaatgctaaatgttaaatataacgtttgtcttgagtatgagttcacacgttttgtgactgtgaaataagatctcyaaattacatatttaagaaatacatgggcttttattccatgattcctgttaagttactatttttgcatcagtggagctctttaactgtatgtttatttttaggaaagaattacatattctctgttaaacgcagcagataaatatgtgcttatgtcctcttcaattaagtaggcttgttgcctaaagcacttttcagtgtaaatttactgcattaaacgtatgttttccttgtgttgactgctatacttctcccactgcttttgctgcacggaacagtcagctggtgttagctaacactagc

SEQ ID NO: 63839 - DNA, 600 bp, Chicken  19866894329129_1
aataaaaggcctgtaactctgtaactacatcagcttggtattccttgacagctaccagacaaaactctaaatgagctgctaattgcataaaacaaaaggaggttcaggaatgtgttatattggatctattccatctccaaaaattataatttcattcttaatagcagattatattaggaagttggtagtaaggaatactactgtaaaaatacagataagatataaaattggaaactttgcttctagcatgatattttcaattctggtatactgaagaaaatgttaaccagaaaaaaaacytgtatttagcagtaaagattattcagactctagctctacagtttctgcggtgtagagtaatgtcactgctttatgtggcaaatttgcttgtaacccacacaaatttggcagcactatgatttttttccaaccatatacaattacttaaactagaaaagttgaatcagagcatagaagttatcaacaagactcaaattacccctgttggaacacgctttttgatattttaagattcttggtgcaagtatttttggttttctcatattacagaggagttgtgagaactgcagtattaccaaa

SEQ ID NO: 63840 - DNA, 600 bp, Chicken  19866894329129_2
tcaagaaatttacttgagaatgcgtttgttttaaacaaaaattgcataacatgtagattttgaaatggtacctttttatggtaccaagtaaggaaaatatctacaatattattgagcagcattcttttcctctcttattatggctgaaaatttcataagaggctttcttacaaagtttcatgatcttgcgtatagtcagactggaagatcagcatgcgtccttcaggggtattattgaaatcaacaggcacaaagcacataaaaataaggaaaaaaaaaagtaaggttcccagaaattamctttttttggttgttgttgttctggtactggaaaacaaatctgggctcaatgtcacaatatgaggttgggttttgccctactttggtgtttcattctccttcaggttgttgctatatttttgctttcaacctttccaaaatttgctctcctaatttgacctttgctgttcttagtttgcttccccttacatagcctttaaagactgatatatgcaaatgtgcaaaatcctgaatagttccagtgtagcttgaccttttgaattttaattctgcaataattctgatcttgaaatctgagac

SEQ ID NO: 63841 - DNA, 599 bp, Chicken  19866894329130_1
  misc_feature (1)..(20): n is any nucleotide
nnnnnnnnnnnnnnnnnnnnacgaaataacagtaacagataacccaaatcatcgtaacagcaaataatacagactatactggtgggatcattaattatgaagaactacaaagacttcagtttcagatttcatccatgcttgttaaacagacataatggtgaaacaaattcattcttactatttgtgttatggaaacacaaagctcccagtccagaatcatagctgcagtgacctgggcaacatgtaattaaaaaaagacagtccttacatgtacaatttggaggtctggaagtacgacayaaaagatgaatctcttatgaaatgggaggaacagaatgcttgcatccactgcataggattctgggtactctcagctcttcagctgcgtggccgataaagacccagacaaaccctgaaggaagcctttttaccattttgacagcaaatgttatttcccatgtatcaggtaccatccagtgaatcaccaagacagcttgctcttgtaggacaaactcccgccaggccacaggcagtaaacatgcagccagactaaaggggctaacaggagaaatgagcatccagtacattttctgcactgc

SEQ ID NO: 63842 - DNA, 382 bp, Chicken  19866894329130_2
caggccacaggcagtaaacatgcagccagactaaaggggctaacaggagaaatgagcatccagtacattttctgcactgcagatgctttgggctctcttcttccgagcagtaaaagaaagaaagaaaacaaggcccagacagtaccacaaataaagctgtttcctactacgaattaaaggcttaaaaaaccagaaatgaaatctgaaaagttcaacttaactaaaaaaaaccaaatgaacacaaacgctgtggttgcagcacagcacaacacacacagtcgtcttcaccaccagcagcargaaaacaatgaagccgctcaaattttcttccattgcccaaactttgctttccttccaggctatgcagaccaggaacagagaa

SEQ ID NO: 63843 - DNA, 600 bp, Chicken  19866894329131_1
ctgctggacatcaaagtttatcctaatgataacacctgttttattgggaaataggatgaacagattctgatctgcacgcttgctttagtagaaatcacaagagttttgtttagtagaaatcatagatgttcctcattggcctgcttagagttctgtttaactttattaaggagcctgctgtgtgctttgaggaatgcctgtctcctcaggacaacatgaagccttgcctgtttgccttgtgaagtcttcttgaaacatgaatagcagataaaatatcagaatgattatttggtgccctcygagggctcattttccatctctgtcagtgttagaaagaacactcttctgcctgatctccctgccgaggccaaatgttttcagtaaaggaaatctctacctcaagagcaggtctttaggtgttgttttactgctcttgtagggctactgctggcagttttttgggggaaaatgatgtactcagtgactttctttccactttccttctacttattctcctttttcaggtgcctcctgagagaacgtgatgtgatgagaccaaattcaccaatgacggagcgacttataaggagagcagcggct

SEQ ID NO: 63844 - DNA, 600 bp, Chicken  19866894329138_1
aaacaagctaaagagaggaaaagtggatactgcattgtgctaagagaggtaggtcagtgaagtccaagaacttccattttaattctgtggtcttgccaggaaaacttcagctcaggttcaggagatctgactcaacaactaccagagactgaaaagtgcatctggtggcactgtatgtaattatctattgtatcaatcatctgtatctttcaattccttcctgcatttatcacgtttccttttatgcccactgagaactcttgcccccttggtcaacattagggaatctttccaaaacayggctgttctcatactaggcatttctaggaatttctagagtgagtattgtatcatttgtaataggctcttaatttctgagaggtcttgaacatgttgctttaaagaataaggattttgtacgattttatttgtacctggcacactgctgttaaatgtgcctcttctgtcacatgattcagccttatgaatgagtttgtttgtttgtttgttttgttggctagtagttgcatcacattcattctgcagtttacaactatctcagtattatcatcctcctcagtactgagctccaaccttgct

SEQ ID NO: 63845 - DNA, 600 bp, Chicken  19866894329142_1
acacagcgctgcttaagctattataccacctgttttggcctcatgaagactcaagaagataaaagtttaagttacctttgggttgtttgcatcaaacagacctgtagaaagtccaaaaaacaatgaacttttccctttattttttgctggcgatatggaacgtgaacgaggtacaaaaggctcttcttgggaagactgagatgatagaactggtgaggctgtaggtacagctgggggctgtattactctctggaataacggttcaggttgcagagagtcactggaacaagtttctgaggyggtataagaaagtccattacaaattgaaatgacatayaactccaagctctcatgcaaaaggtaactaaaatgagcaatgctaaccaaattctgttgtacaattaaagggaaaaatagatcgcaccataggagtatkaaaatctgtatggattacttaagtagaarcattrtaatgcaaaaatctctcacaggttttttgagaatacacagctcctagctacagtctattccattctgtgccctcttgtttatcatgatccaatctgtatctggaatgatggcatcatccattttcatcta

SEQ ID NO: 63846 - DNA, 600 bp, Chicken  19866894329142_2
gcctcatgaagactcaagaagataaaagtttaagttacctttgggttgtttgcatcaaacagacctgtagaaagtccaaaaaacaatgaacttttccctttattttttgctggcgatatggaacgtgaacgaggtacaaaaggctcttcttgggaagactgagatgatagaactggtgaggctgtaggtacagctgggggctgtattactctctggaataacggttcaggttgcagagagtcactggaacaagtttctgaggyggtataagaaagtccattacaaattgaaatgacatayaactccaagctctcatgcaaaaggtaactaaaatgagcaatgctaaccaaattctgttgtacaattaaagggaaaaatagatcgcaccataggagtatkaaaatctgtatggattacttaagtagaarcattrtaatgcaaaaatctctcacaggttttttgagaatacacagctcctagctacagtctattccattctgtgccctcttgtttatcatgatccaatctgtatctggaatgatggcatcatccattttcatctactgcttcttgccttattctagatttcttcaaacttat

SEQ ID NO: 63847 - DNA, 600 bp, Chicken  19866894329142_3
ttattttttgctggcgatatggaacgtgaacgaggtacaaaaggctcttcttgggaagactgagatgatagaactggtgaggctgtaggtacagctgggggctgtattactctctggaataacggttcaggttgcagagagtcactggaacaagtttctgaggyggtataagaaagtccattacaaattgaaatgacatayaactccaagctctcatgcaaaaggtaactaaaatgagcaatgctaaccaaattctgttgtacaattaaagggaaaaatagatcgcaccataggagtatkaaaatctgtatggattacttaagtagaarcattrtaatgcaaaaatctctcacaggttttttgagaatacacagctcctagctacagtctattccattctgtgccctcttgtttatcatgatccaatctgtatctggaatgatggcatcatccattttcatctactgcttcttgccttattctagatttcttcaaacttatcccaacatatgtgctycaacactggaaaaaaatctacagtctgcttaatgggccagtaaataaattcctcagtatcaccaataatactgtagatgtatt

SEQ ID NO: 63848 - DNA, 600 bp, Chicken  19866894329142_4
acgaggtacaaaaggctcttcttgggaagactgagatgatagaactggtgaggctgtaggtacagctgggggctgtattactctctggaataacggttcaggttgcagagagtcactggaacaagtttctgaggyggtataagaaagtccattacaaattgaaatgacatayaactccaagctctcatgcaaaaggtaactaaaatgagcaatgctaaccaaattctgttgtacaattaaagggaaaaatagatcgcaccataggagtatkaaaatctgtatggattacttaagtagaarcattrtaatgcaaaaatctctcacaggttttttgagaatacacagctcctagctacagtctattccattctgtgccctcttgtttatcatgatccaatctgtatctggaatgatggcatcatccattttcatctactgcttcttgccttattctagatttcttcaaacttatcccaacatatgtgctycaacactggaaaaaaatctacagtctgcttaatgggccagtaaataaattcctcagtatcaccaataatactgtagatgtattttctattctagcataaaataagtggattt

SEQ ID NO: 63849 - DNA, 600 bp, Chicken  19866894329142_5
gtacaaaaggctcttcttgggaagactgagatgatagaactggtgaggctgtaggtacagctgggggctgtattactctctggaataacggttcaggttgcagagagtcactggaacaagtttctgaggyggtataagaaagtccattacaaattgaaatgacatayaactccaagctctcatgcaaaaggtaactaaaatgagcaatgctaaccaaattctgttgtacaattaaagggaaaaatagatcgcaccataggagtatkaaaatctgtatggattacttaagtagaarcattrtaatgcaaaaatctctcacaggttttttgagaatacacagctcctagctacagtctattccattctgtgccctcttgtttatcatgatccaatctgtatctggaatgatggcatcatccattttcatctactgcttcttgccttattctagatttcttcaaacttatcccaacatatgtgctycaacactggaaaaaaatctacagtctgcttaatgggccagtaaataaattcctcagtatcaccaataatactgtagatgtattttctattctagcataaaataagtggattttctgg

SEQ ID NO: 63850 - DNA, 561 bp, Chicken  19866894329142_6
gcaaaaggtaactaaaatgagcaatgctaaccaaattctgttgtacaattaaagggaaaaatagatcgcaccataggagtatkaaaatctgtatggattacttaagtagaarcattrtaatgcaaaaatctctcacaggttttttgagaatacacagctcctagctacagtctattccattctgtgccctcttgtttatcatgatccaatctgtatctggaatgatggcatcatccattttcatctactgcttcttgccttattctagatttcttcaaacttatcccaacatatgtgctycaacactggaaaaaaatctacagtctgcttaatgggccagtaaataaattcctcagtatcaccaataatactgtagatgtattttctattctagcataaaataagtggattttctggaattagcttagagacctcaaagagcaatsaattcttctaggcaataaagacaaaarattatcattaacagctgtctaaaatacatctttttatccaggctgcattttaacgttaatattagcgatgtcaaccaacaaagcaaca

SEQ ID NO: 63851 - DNA, 415 bp, Chicken  19866894329142_7
agaatacacagctcctagctacagtctattccattctgtgccctcttgtttatcatgatccaatctgtatctggaatgatggcatcatccattttcatctactgcttcttgccttattctagatttcttcaaacttatcccaacatatgtgctycaacactggaaaaaaatctacagtctgcttaatgggccagtaaataaattcctcagtatcaccaataatactgtagatgtattttctattctagcataaaataagtggattttctggaattagcttagagacctcaaagagcaatsaattcttctaggcaataaagacaaaarattatcattaacagctgtctaaaatacatctttttatccaggctgcattttaacgttaatattagcgatgtcaaccaacaaagcaaca

SEQ ID NO: 63852 - DNA, 388 bp, Chicken  19866894329142_8
attccattctgtgccctcttgtttatcatgatccaatctgtatctggaatgatggcatcatccattttcatctactgcttcttgccttattctagatttcttcaaacttatcccaacatatgtgctycaacactggaaaaaaatctacagtctgcttaatgggccagtaaataaattcctcagtatcaccaataatactgtagatgtattttctattctagcataaaataagtggattttctggaattagcttagagacctcaaagagcaatsaattcttctaggcaataaagacaaaarattatcattaacagctgtctaaaatacatctttttatccaggctgcattttaacgttaatattagcgatgtcaaccaacaaagcaaca

SEQ ID NO: 63853 - DNA, 600 bp, Chicken  19866894329151_1
tacagctgcgagctgtacaaaggaaatgacgacaggatataaaggactggggaatattcagtatttactaaacaaagatcttcatttgagcatgtgtccagtcataccacaagtatttgacagaaacagctccctgagcttgggcaggtcacagagtcattgctgttattttgctgtgcacatgcaaaaaaatcactttgcattaatatacttgcaatagcagattcttttttccccctttttaaaattgccattttaagctagaaaggcaagccaaagggcaccggcaaatatgggaaygagacctgaaaccctgaaaactccatgatcattctgagacatacatttcacaccttagtttttcaaaggaactctcttcagaagaaacactttcaakctcaggccaaaagtcaggttagaatcacatcaacttgctgaaagggatttttacaacttcatctgacttctggggtaaccagagagcagtttgggtaatctttaatacgaccagatgagagctgttcctataacacagtatgttatgtcttyttcttgggatctgaagaaaagggctgttgtaaaacaatattatttatgaac

SEQ ID NO: 63854 - DNA, 600 bp, Chicken  19866894329151_2
ccagtcataccacaagtatttgacagaaacagctccctgagcttgggcaggtcacagagtcattgctgttattttgctgtgcacatgcaaaaaaatcactttgcattaatatacttgcaatagcagattcttttttccccctttttaaaattgccattttaagctagaaaggcaagccaaagggcaccggcaaatatgggaaygagacctgaaaccctgaaaactccatgatcattctgagacatacatttcacaccttagtttttcaaaggaactctcttcagaagaaacactttcaakctcaggccaaaagtcaggttagaatcacatcaacttgctgaaagggatttttacaacttcatctgacttctggggtaaccagagagcagtttgggtaatctttaatacgaccagatgagagctgttcctataacacagtatgttatgtcttyttcttgggatctgaagaaaagggctgttgtaaaacaatattatttatgaactgtgttgcagtgtttgccagacaacagagtacaggcggtacatctccaaccaggcagcaaggagcttagggctgcaaggacaggctgccacctctga

SEQ ID NO: 63855 - DNA, 600 bp, Chicken  19866894329151_3
gccattttaagctagaaaggcaagccaaagggcaccggcaaatatgggaaygagacctgaaaccctgaaaactccatgatcattctgagacatacatttcacaccttagtttttcaaaggaactctcttcagaagaaacactttcaakctcaggccaaaagtcaggttagaatcacatcaacttgctgaaagggatttttacaacttcatctgacttctggggtaaccagagagcagtttgggtaatctttaatacgaccagatgagagctgttcctataacacagtatgttatgtcttyttcttgggatctgaagaaaagggctgttgtaaaacaatattatttatgaactgtgttgcagtgtttgccagacaacagagtacaggcggtacatctccaaccaggcagcaaggagcttagggctgcaaggacaggctgccacctctgaggagccttcagtctgaagaatcaatagaggcaaagggccagagatgggtaaaagtgattcgatgacttacccagctttagagctaaagtagactccactggaaggggggagcggtggctccatgctgacaatggacttgtttctgtttgcag

SEQ ID NO: 63856 - DNA, 472 bp, Chicken  19866894329152_1
caggctctgaatttctaactgtgtttcatacacggtatgagaagtgctgggagaaaacagccggtgtagcttaggacaaggacaatgaactttacagacaccactgctgttttattattcatgagctagtttagtccaagagagagtcatagaatcatagaatatcccgagttggaggggacccataaaggtcattgaattcagctcctgagagagtgatatttatgtggatcttgggggaattggtgaaataaagagacagaaaatagcaaagcccaaaggcagacaaccatctcaccrtgcctcaaggcgcaaagtttacagcacctgccatggttttgctgacactgaatctgtacacacctccctctgagtcatgtttcttcatttcacactccaaaaaaatataaaccctttgaccgactccacatttctttggccctatgttcgtgccacagcccatctgtctgtt

SEQ ID NO: 63857 - DNA, 600 bp, Chicken  19866894329153_1
cacctcatatatttctgtttcaaaggaggattcctttgtcttgaataaacgggtcatgtgtaaagaatgaaatcacaggtctgttccaggtagggtaattttttaaattttgaccacagcttagcatatgtttgtatgctaggattttcattaaaatgaatagatgtcacaacattggtggaattggcttcagagcatcattttgtggaagagttgtacaatttctgtttttgaatggcaagatgaagcactaagttgcaccagttgcagataaggctagaattaaactcatgcatcctraaacttctgttgtcacctgaacatgtttttactctcaaatcacaagtaatatctgtaattcatgaactagaaagcatcaattttacttcagtttgtagaaatataatttttcagttgatacaagaatttctgcagaattaagccccttaagtctgcttttcttagctaccttccataaatcctttaagagtattttatggattcagaggtcttgtggctccgctatggaaaaccaatgcagcacaagctcatttctggggcttatgaagacctttcttcagctttaaatagagagcttaa

SEQ ID NO: 63858 - DNA, 599 bp, Chicken  19866894329155_1
  misc_feature (1)..(77): n is any nucleotide
nnnnnnnnnnnnnnnnnnnnnnnnnnnnnnnnnnnnnnnnnnnnnnnnnnnnnnnnnnnnnnnnnnnnnnnnnnnnncaataaccatcaagaaccatactgtattctagtatttgggtttacttgcagaccagaaggaatttgagaagtgtggatatgagggactatcagacttacagaagccaaaggatctctgatccttgtggaaaaattccattttgagaagaaagaaccacaagcactttaccaattccagtctttgtttatatgtatgtttgagttgtatttgaccatgttcagyaaagcatttttctgcactaccagaagcagtgagtattttggcatactgattggatgtgtttaccccttggtaaagggctgtgaagagaaaaataatttttatagtgagtagcatcctgaatatgccaagttatatttgtcttcattgctaaccagagttgtgtcagtgaaacgatgtgtacttttatgtggaaaagcagagggagagtggrtaagaggtttaatgtttcagtrtcaccgccattgtgggttatctctatgtgttgtctgtagcaattccagtcttttcgctgaaagatt

SEQ ID NO: 63859 - DNA, 600 bp, Chicken  19866894329155_2
tccattttgagaagaaagaaccacaagcactttaccaattccagtctttgtttatatgtatgtttgagttgtatttgaccatgttcagyaaagcatttttctgcactaccagaagcagtgagtattttggcatactgattggatgtgtttaccccttggtaaagggctgtgaagagaaaaataatttttatagtgagtagcatcctgaatatgccaagttatatttgtcttcattgctaaccagagttgtgtcagtgaaacgatgtgtacttttatgtggaaaagcagagggagagtggrtaagaggtttaatgtttcagtrtcaccgccattgtgggttatctctatgtgttgtctgtagcaattccagtcttttcgctgaaagatttttcctatgtgtttcccaagatttatgttcttaaataaatgaacaggaggtctttagtactgaaggcaaaaaggcagaactgccattccccagatttcattcagagatgaattctttattagaaatgtctgaaaaattgccagagaagtactacacagcaaactaggagaattgatggctattttgaaagaaaataaagaatctgtgtccat

SEQ ID NO: 63860 - DNA, 600 bp, Chicken  19866894329155_3
acaagcactttaccaattccagtctttgtttatatgtatgtttgagttgtatttgaccatgttcagyaaagcatttttctgcactaccagaagcagtgagtattttggcatactgattggatgtgtttaccccttggtaaagggctgtgaagagaaaaataatttttatagtgagtagcatcctgaatatgccaagttatatttgtcttcattgctaaccagagttgtgtcagtgaaacgatgtgtacttttatgtggaaaagcagagggagagtggrtaagaggtttaatgtttcagtrtcaccgccattgtgggttatctctatgtgttgtctgtagcaattccagtcttttcgctgaaagatttttcctatgtgtttcccaagatttatgttcttaaataaatgaacaggaggtctttagtactgaaggcaaaaaggcagaactgccattccccagatttcattcagagatgaattctttattagaaatgtctgaaaaattgccagagaagtactacacagcaaactaggagaattgatggctattttgaaagaaaataaagaatctgtgtccatagtaagtttgctttagtttcat

SEQ ID NO: 63861 - DNA, 600 bp, Chicken  19866894329158_1
gggaattggaagtaccagggcacagttttgagtggtgattacaagggcatgagtgtgagtgccaaagtaacagtcttctacactgcaggaagctgagaaaccttcaagtctacatttgtaaatcagcctggatgattacagcagtcacaagcaaagaacatatgaaacaattatttgcaccattctttcactcttttaatttgctcttaaaatgaacacagtgataccgagagccattggtgctttattgttgaaaatgctgtgtgatttcgtagctttctaagcagcaccatgaattgyttaaaagtagaaatataataaagaaatattgtttttggattgttcggctcctttcatgtcaataatctaagcttacattcacgtttggatgtgcctgtgagtttactttaaaagtatttggttgatgtgctgaagcagaatgaatttcgactttctacctctcctaaattgctttgaaaagacagtttgcattttttaagtgagtaaactgtaaaggtatttttattacattaaaattgtgttgtaaatttaggtctatatcccttctactaaagcaagagaacagtattccttgatcct

SEQ ID NO: 63862 - DNA, 600 bp, Chicken  19866894329159_1
cttaagcttttttctttagctattgatccatctaacaactcagctttttggattaattttgaaaacaaagaattgctcccattcagtatcactgcaagtacacgaaaagttaattccaaaagggaatggatgttttgagacacttagaaaatggtgtggtccaaacatgaaagccaggttgccatgtgatttttcatggggcttaactaggagaactgccctgtgcccagaggtaaccaattcatgctcacaaaatagaagagctgaggttgatacccagttggactggaagaatgtctkggtgcacgtgtagctcrttgctgctcagtgatttacagaggggctgaatgtccaggatctttgtgcacrcactgttagaacacgaaaaggatctgaagaaaggacagcttacatcagacrtaacgttatgttctactacaacagacattaatacaaactgctgcaatttacatataaaaatataagttcaagcctatttattccacgtatatctgtatcaagcagaaagggaatacatttggtgcctctttactgctttcaatcttttactgtaaattactgtgcacataaccccaaaca

SEQ ID NO: 63863 - DNA, 600 bp, Chicken  19866894329159_2
agctattgatccatctaacaactcagctttttggattaattttgaaaacaaagaattgctcccattcagtatcactgcaagtacacgaaaagttaattccaaaagggaatggatgttttgagacacttagaaaatggtgtggtccaaacatgaaagccaggttgccatgtgatttttcatggggcttaactaggagaactgccctgtgcccagaggtaaccaattcatgctcacaaaatagaagagctgaggttgatacccagttggactggaagaatgtctkggtgcacgtgtagctcrttgctgctcagtgatttacagaggggctgaatgtccaggatctttgtgcacrcactgttagaacacgaaaaggatctgaagaaaggacagcttacatcagacrtaacgttatgttctactacaacagacattaatacaaactgctgcaatttacatataaaaatataagttcaagcctatttattccacgtatatctgtatcaagcagaaagggaatacatttggtgcctctttactgctttcaatcttttactgtaaattactgtgcacataaccccaaacattaatttggcctcatca

SEQ ID NO: 63864 - DNA, 600 bp, Chicken  19866894329159_3
gaattgctcccattcagtatcactgcaagtacacgaaaagttaattccaaaagggaatggatgttttgagacacttagaaaatggtgtggtccaaacatgaaagccaggttgccatgtgatttttcatggggcttaactaggagaactgccctgtgcccagaggtaaccaattcatgctcacaaaatagaagagctgaggttgatacccagttggactggaagaatgtctkggtgcacgtgtagctcrttgctgctcagtgatttacagaggggctgaatgtccaggatctttgtgcacrcactgttagaacacgaaaaggatctgaagaaaggacagcttacatcagacrtaacgttatgttctactacaacagacattaatacaaactgctgcaatttacatataaaaatataagttcaagcctatttattccacgtatatctgtatcaagcagaaagggaatacatttggtgcctctttactgctttcaatcttttactgtaaattactgtgcacataaccccaaacattaatttggcctcatcacaggatgcaatcaaagtatttcaattagcatacacagaataacatttccagg

SEQ ID NO: 63865 - DNA, 600 bp, Chicken  19866894329159_4
agggaatggatgttttgagacacttagaaaatggtgtggtccaaacatgaaagccaggttgccatgtgatttttcatggggcttaactaggagaactgccctgtgcccagaggtaaccaattcatgctcacaaaatagaagagctgaggttgatacccagttggactggaagaatgtctkggtgcacgtgtagctcrttgctgctcagtgatttacagaggggctgaatgtccaggatctttgtgcacrcactgttagaacacgaaaaggatctgaagaaaggacagcttacatcagacrtaacgttatgttctactacaacagacattaatacaaactgctgcaatttacatataaaaatataagttcaagcctatttattccacgtatatctgtatcaagcagaaagggaatacatttggtgcctctttactgctttcaatcttttactgtaaattactgtgcacataaccccaaacattaatttggcctcatcacaggatgcaatcaaagtatttcaattagcatacacagaataacatttccaggttgaataaaagaacaacgctggcagggtgcttgcagttggtgaagcaagta

SEQ ID NO: 63866 - DNA, 600 bp, Chicken  19866894329166_1
ttgttacattgcattataggaagctttataacatggatgtatattttgatcgaaactcatataagggaacttccgatttctgacaatacatccacaaatccgtgtccatcgaaatatgaggttggtatttatttctggttagaggagctggagatttctgtctaagatacatatttaaacactttaatactccccaatacttcaaatagcatgatctttctacaagttccttccaggacaatctgagtcccatgtgaaaggcatctctcattagaaatttagattatctttacacatcaygggctgttgaaatccgaactgcatcaagcctccttagagtgtttgtgaaggtttaatttagtttactctttcagaagaaagaaatgagccaagatttggttttcttctcagttcttctgagataatatctttctcacatattgcatttattcaaatagattgaaaaaaaaggaaattagagaaggctgaaaaaaataacgtcttgttttgaagacacattcctacatgtggtgatatttacagtaatgtgcactagctgattcaagtgaaacatgcacaaagaaataagtaaaaaaaaag

SEQ ID NO: 63867 - DNA, 600 bp, Chicken  19866894329167_1
agtataaccactattaaaaataccagaagtttatgaaaaggcagccaactcagatttctgcaaagcattttccctctaagcaaaatattgtactgcagtacccatttccagattcaagctaaaattagagtaactcattaccattctagccaacagaatgctgtcaactgcctctgcatcacagaagcatcttggctcctgtcatggaatagctccctgtacacccactaacatcaataatttacttgaagaaccggatctttttaaacagactgaagaattaggatagagcttccaaayaatccagttctttgacatcatagcttacattttatcgagcacaaaatgtttaatttagctaagtaaaaattgaaaaaaatgatcagaagattaacaggtaggtaaaaactgtatggctgctgctgggcatcactctggcagcagatttttcatcgtatagattctctccatttcctaaacagttttcagaatgaaatattcattcagtctcctttaatctttactaaaaataagttgctgaacacagtatattgaactacagattttaactatttcttctactatcttctccagacttag

SEQ ID NO: 63868 - DNA, 600 bp, Chicken  19866894329169_1
atttgaaccaattatttttgtaatgaatgtacaataaatctgttgaaaagctatctgttaacgactcttgcttaaattctggtagttttgacaccccacaagtgaggctgttaagagctagacaagcctgcttgacaggtggtatctgtccaattgtctggaatctggaaatgaggtctaaacaagaatgttctggttgagcactgagccagtgctgctactgtcagcacacaatggaggcctgaagcttcagaggcacagcatcagaggtcaaaagcaatttgtgctgaggagtggggraagaatttgtgagtggagaacataccaaagcggaggtgaggatggtcaccmaaaaaggtaaaaggatgacttagacttctatgtatgggcagccaagcactgcagaaagcatccatgtgatttttgtttttagctttttccctagataaatgagaagcgtgggcatttggtaaggatgatttttggattttttttgtttgtttgttttcatgtttgagactttaggacatgcttgattgtttcagtaagtgtcactgtttcartcctccagctgtatatggtatgtgctaacagttcaca

SEQ ID NO: 63869 - DNA, 600 bp, Chicken  19866894329169_2
tatctgttaacgactcttgcttaaattctggtagttttgacaccccacaagtgaggctgttaagagctagacaagcctgcttgacaggtggtatctgtccaattgtctggaatctggaaatgaggtctaaacaagaatgttctggttgagcactgagccagtgctgctactgtcagcacacaatggaggcctgaagcttcagaggcacagcatcagaggtcaaaagcaatttgtgctgaggagtggggraagaatttgtgagtggagaacataccaaagcggaggtgaggatggtcaccmaaaaaggtaaaaggatgacttagacttctatgtatgggcagccaagcactgcagaaagcatccatgtgatttttgtttttagctttttccctagataaatgagaagcgtgggcatttggtaaggatgatttttggattttttttgtttgtttgttttcatgtttgagactttaggacatgcttgattgtttcagtaagtgtcactgtttcartcctccagctgtatatggtatgtgctaacagttcacacgcaggagaggtgtagttgatgatctcgtgcagactgtgtaccgacaagaa

SEQ ID NO: 63870 - DNA, 600 bp, Chicken  19866894329169_3
acaagcctgcttgacaggtggtatctgtccaattgtctggaatctggaaatgaggtctaaacaagaatgttctggttgagcactgagccagtgctgctactgtcagcacacaatggaggcctgaagcttcagaggcacagcatcagaggtcaaaagcaatttgtgctgaggagtggggraagaatttgtgagtggagaacataccaaagcggaggtgaggatggtcaccmaaaaaggtaaaaggatgacttagacttctatgtatgggcagccaagcactgcagaaagcatccatgtgamttttgtttttagctttttccctagataaatgagaagcgtgggcatttggtaaggatgatttttggattttttttgtttgtttgttttcatgtttgagactttaggacatgcttgattgtttcagtaagtgtcactgtttcartcctccagctgtatatggtatgtgctaacagttcacacgcaggagaggtgtagttgatgatctcgtgcagactgtgtaccgacaagaatacttgattgtgagatcagcttcatggctagagtgtttttagctttctctaggatctgtatggtgattgt

SEQ ID NO: 63871 - DNA, 600 bp, Chicken  19866894329169_4
tcagaggtcaaaagcaatttgtgctgaggagtggggraagaatttgtgagtggagaacataccaaagcggaggtgaggatggtcaccmaaaaaggtaaaaggatgacttagacttctatgtatgggcagccaagcactgcagaaagcatccatgtgatttttgtttttagctttttccctagataaatgagaagcgtgggcatttggtaaggatgatttttggattttttttgtttgtttgttttcatgtttgagactttaggacatgcttgattgtttcagtaagtgtcactgtttcartcctccagctgtatatggtatgtgctaacagttcacacgcaggagaggtgtagttgatgatctcgtgcagactgtgtaccgacaagaatacttgattgtgagatcagcttcatggctagagtgtttttagctttctctaggatctgtatggtgattgtgccttttgctgttctggctttttgttgaatttttagcttctcaaaggacacaggagtggagttaatgattgctgtggaacaggggagttccccaaacataaaatgggtactgggggaacaagtaatccatctgtcactggtg

SEQ ID NO: 63872 - DNA, 600 bp, Chicken  19866894329174_1
ttctttgcactccactcttgtctccagaataattatgtaatatttaggggaaaaaacatctgaaaaggccattgaatgaaatcctttccatatctccaagcttaacaagagtaacactgaaagaacatatacaaagctgggatgaaaattctgaggaaaagaagattgaatttccatcaagaataccaaagattttagtactatcagcagactcagataaaactctatacataagcacttctctgtcttgcaatagcatataatagaaaaaggagcaccagatttcattataatcgtcakttctatttagataggcatatagtgctactgttccctcacattaagcattttctgcaatttataaggccattcggaaatgtgagcaagctggcagtttattaccatctgcatttcacatagcagagatgttgcaagtaatttccatctacaattaaaaaggagtgttagcaatctcccactgtcaataatcacatgatgtagtaagtaggttggatacaaaatggggattaggcgagacctatcttgatgctagcaagcaatgtactcagaatttcctacattatctagtaatcttaacac

SEQ ID NO: 63873 - DNA, 494 bp, Chicken  19866894329174_2
attaagcattttctgcaatttataaggccattcggaaatgtgagcaagctggcagtttattaccatctgcatttcacatagcagagatgttgcaagtaatttccatctacaattaaaaaggagtgttagcaatctcccactgtcaataatcacatgatgtagtaagtaggttggatacaaaatggggattaggcgagacctatcttgatgctagcaagcaatgtactcagaatttcctacattatctagtaatcttaacacaagcaccaaaactactattaagagactaccccgttattyctattgctccaaattagttctcagtgagaaataattcacttttataaggcattggttaaagtactttccagcaacatatctccacaggaattgctaattgttgtcaatgttaaactagcattactattggtaggccttaattaagaaaagttaatacaatctatagagttgtaatagacaaccagaatagcaga

SEQ ID NO: 63874 - DNA, 600 bp, Chicken  19866894329175_1
tagtctgactatacaaacagcacaactaaagcagtatccttgaactagccaactcaggtatccagcaaaacctatgcactattcctttaggttcccttgcctgtaatttcccgtgtacagtctccttatggcctggaaagcatgcaagtctctccttttcacagaagtatatttaatccaaacactgtttaaactcttaataagagctttagagaggcaggaagcattcaagaaagggcttaaagatggtgataggatttttaggaacatcattcctgttatcttggggcctaactaagyctattggcacaatttctcaatctgttacagaagttgcatggtcatgcctgagcctctaaatcctgaccacctaccttacagaactatggaatccttagagttggaagggacctttaaaggtcacctagtgcaactcccctgcaatgaacaggaacatgcacagctagatcaggttgcccagggactgatccagcctctccttgaaagtctccagggacggggcatccaccacctctctgagcaacctgttccactggctcatcacactcactgggaaagactttttccttatatctaaac

SEQ ID NO: 63875 - DNA, 600 bp, Chicken  19866894329177_1
cttgaagaaagaagtgcgggctgtaggaggcagcccattgtgagtaagttctggtaggtgcatggctatgcagggtgcaatgttctatgtgctttcctgccctggccaggcataagtagatgttgtaaaccatgcttgctctccttacccgtgacattggttgttcttttggcatgttccaagcctctcctaataaaatattctggagaacactgtgtgctcatagggcttcacctggaagctggcatctaggctgctttctcccatcaggtctagagccagtaagtatggacttcagcragcatcagcttyagcaagtgctgcccacatctagtggaattaaaaagttgctgtcaggtcacatttggatgaaactttaaaaatgatttgttccctgacagcgcgtctctaataagtgctcttttttggctcctgcagatgcctgtcagtgggatctgtcagctgtgtctctgacatcagcctgatggctgcactgggagatgcctgtcacagcgtactgctgcccagtgccttgttaggggtgtttgggtgggttttcagtcaaggcaaggaggctgtttgcccacctggctgctctgg

SEQ ID NO: 63876 - DNA, 600 bp, Chicken  19866894329177_2
agtgcgggctgtaggaggcagcccattgtgagtaagttctggtaggtgcatggctatgcagggtgcaatgttctatgtgctttcctgccctggccaggcataagtagatgttgtaaaccatgcttgctctccttacccgtgacattggttgttcttttggcatgttccaagcctctcctaataaaatattctggagaacactgtgtgctcatagggcttcacctggaagctggcatctaggctgctttctcccatcaggtctagagccagtaagtatggacttcagcragcatcagcttyagcaagtgctgcccacatctagtggaattaaaaagttgctgtcaggtcacatttggatgaaactttaaaaatgatttgttccctgacagcgcgtctctaataagtgctcttttttggctcctgcagatgcctgtcagtgggatctgtcagctgtgtctctgacatcagcctgatggctgcactgggagatgcctgtcacagcgtactgctgcccagtgccttgttaggggtgtttgggtgggttttcagtcaaggcaaggaggctgtttgcccacctggctgctctggacaagtaaaaat

SEQ ID NO: 63877 - DNA, 600 bp, Chicken  19866894329179_1
gaatggggaaacactttccttcagtgcttgaggcacacgcagcaggagaaacatgggatgagatctcataacagtaaactgctcggtgaaaatagcgctatgcaaacagagaagcaaaaagcatccccaggaaacccttagcatcagaagggggttccagatcacatcacacatgtggatctgcttcatatggaattgacacacgatccagtgatacctgcacaggtttggtcctgtgactacaggaactaaatgtctgatctcagtgtgtgagtcgcaccctactgtcacagtgtcaaygcagaacggcacagtcaccccccgtttggttctggggcccacactgctccatctcattagacgagtgttttrctcacacaaagtgtgttcaatcctacgtaagctcagagccaagttccccagctcacagaggtgatatttykgggagaactgcgtggttttgtcttggcagggagatctgtagagctctttattcctgctggttactctcaattcatagtttttcagtaacttgagttcactgcagaaggccayaattacgaacgtgagtcacacagttttagccatccattacgtcct

SEQ ID NO: 63878 - DNA, 600 bp, Chicken  19866894329179_2
agtaaactgctcggtgaaaatagcgctatgcaaacagagaagcaaaaagcatccccaggaaacccttagcatcagaagggggttccagatcacatcacacatgtggatctgcttcatatggaattgacacacgatccagtgatacctgcacaggtttggtcctgtgactacaggaactaaatgtctgatctcagtgtgtgagtcgcaccctactgtcacagtgtcaaygcagaacggcacagtcaccccccgtttggttctggggcccacactgctccatctcattagacgagtgttttrctcacacaaagtgtgttcaatcctacgtaagctcagagccaagttccccagctcacagaggtgatatttykgggagaactgcgtggttttgtcttggcagggagatctgtagagctctttattcctgctggttactctcaattcatagtttttcagtaacttgagttcactgcagaaggccayaattacgaacgtgagtcacacagttttagccatccattacgtcctccagttgtcctgaaataactcacgtgttgcagccctttaacagaaccactgctctgcattactgtcctcgca

SEQ ID NO: 63879 - DNA, 600 bp, Chicken  19866894329179_3
atcagaagggggttccagatcacatcacacatgtggatctgcttcatatggaattgacacacgatccagtgatacctgcacaggtttggtcctgtgactacaggaactaaatgtctgatctcagtgtgtgagtcgcaccctactgtcacagtgtcaaygcagaacggcacagtcaccccccgtttggttctggggcccacactgctccatctcattagacgagtgttttrctcacacaaagtgtgttcaatcctacgtaagctcagagccaagttccccagctcacagaggtgatatttykgggagaactgcgtggttttgtcttggcagggagatctgtagagctctttattcctgctggttactctcaattcatagtttttcagtaacttgagttcactgcagaaggccayaattacgaacgtgagtcacacagttttagccatccattacgtcctccagttgtcctgaaataactcacgtgttgcagccctttaacagaaccactgctctgcattactgtcctcgcaaggtgagcgataactgctgttatcactgatctcctaccacagaatgaacaggtagcactttgcaggtagc

SEQ ID NO: 63880 - DNA, 600 bp, Chicken  19866894329179_4
tcagaagggggttccagatcacatcacacatgtggatctgcttcatatggaattgacacacgatccagtgatacctgcacaggtttggtcctgtgactacaggaactaaatgtctgatctcagtgtgtgagtcgcaccctactgtcacagtgtcaaygcagaacggcacagtcaccccccgtttggttctggggcccacactgctccatctcattagacgagtgttttrctcacacaaagtgtgttcaatcctacgtaagctcagagccaagttccccagctcacagaggtgatatttykgggagaactgcgtggttttgtcttggcagggagatctgtagagctctttattcctgctggttactctcaattcatagtttttcagtaacttgagttcactgcagaaggccayaattacgaacgtgagtcacacagttttagccatccattacgtcctccagttgtcctgaaataactcacgtgttgcagccctttaacagaaccactgctctgcattactgtcctcgcaaggtgagcgataactgctgttatcactgatctcctaccacagaatgaacaggtagcactttgcaggtagca

SEQ ID NO: 63881 - DNA, 600 bp, Chicken  19866894329179_5
tctgatctcagtgtgtgagtcgcaccctactgtcacagtgtcaaygcagaacggcacagtcaccccccgtttggttctggggcccacactgctccatctcattagacgagtgttttrctcacacaaagtgtgttcaatcctacgtaagctcagagccaagttccccagctcacagaggtgatatttykgggagaactgcgtggttttgtcttggcagggagatctgtagagctctttattcctgctggttactctcaattcatagtttttcagtaacttgagttcactgcagaaggccayaattacgaacgtgagtcacacagttttagccatccattacgtcctccagttgtcctgaaataactcacgtgttgcagccctttaacagaaccactgctctgcattactgtcctcgcaaggtgagcgataactgctgttatcactgatctcctaccacagaatgaacaggtagcactttgcaggtagcatgccaactcccacgtgccagtgtgccttcatgactttaagctgcaggaagctcttcgaagcaattctgtttttctccctggattgcatcctttttccttttcccccaaagag

SEQ ID NO: 63882 - DNA, 599 bp, Chicken  19866894329182_1
  misc_feature (1)..(221): n is any nucleotide
nnnnnnnnnnnnnnnnnnnnnnnnnnnnnnnnnnnnnnnnnnnnnnnnnnnnnnnnnnnnnnnnnnnnnnnnnnnnnnnnnnnnnnnnnnnnnnnnnnnnnnnnnnnnnnnnnnnnnnnnnnnnnnnnnnnnnnnnnnnnnnnnnnnnnnnnnnnnnnnnnnnnnnnnnnnnnnnnnnnnnnnnnnnnnnnnnnnnnnnnnnnnnnnnnnnnnnnnnnnnnacacaaggtgaaacttcagtcacgctccaacatgtcacaaagcaatttgaaaaatgtgctatcacaatgaaattccagraagaaaagcaactttttgtgtgacctctaaatgctgaaaaaagaacgtaagtaaattctgcatgataaaccaaccacactgcagtttcttgttctaaatttcacaactggctttagtagccagacaagctatgctaagcgtacccaggcaagcamcaaccaaaactgagtaaaaaaacctcaagtaaagaacaaaaagctgttttttcagaactgattatcaaccttcacttaattatggtctgcccctcccarttaaccttaggtaaattaggattagtctctcctggccaatacagc

SEQ ID NO: 63883 - DNA, 599 bp, Chicken  19866894329182_2
  misc_feature (1)..(66): n is any nucleotide
nnnnnnnnnnnnnnnnnnnnnnnnnnnnnnnnnnnnnnnnnnnnnnnnnnnnnnnnnnnnnnnnnnacacaaggtgaaacttcagtcacgctccaacatgtcacaaagcaatttgaaaaatgtgctatcacaatgaaattccagraagaaaagcaactttttgtgtgacctctaaatgctgaaaaaagaacgtaagtaaattctgcatgataaaccaaccacactgcagtttcttgttctaaatttcacaactggctttagtagccagacaagctatgctaagcgtacccaggcaagcamcaaccaaaactgagtaaaaaaacctcaagtaaagaacaaaaagctgttttttcagaactgattatcaaccttcacttaattatggtctgcccctcccarttaaccttaggtaaattaggattagtctctcctggccaatacagcaacatgccatgacatctagggatttcatatcctcacatctcccagctgcaacaaaggaagaaataggaattaggagtgctgccctagcaagcatcttagaagtgccaagttatactgccatcacctacaattatgattacctaatttttacaatg

SEQ ID NO: 63884 - DNA, 600 bp, Chicken  19866894329182_3
gtcacaaagcaatttgaaaaatgtgctatcacaatgaaattccagraagaaaagcaactttttgtgtgacctctaaatgctgaaaaaagaacgtaagtaaattctgcatgataaaccaaccacactgcagtttcttgttctaaatttcacaactggctttagtagccagacaagctatgctaagcgtacccaggcaagcamcaaccaaaactgagtaaaaaaacctcaagtaaagaacaaaaagctgttttttcagaactgattatcaaccttcacttaattatggtctgcccctcccarttaaccttaggtaaattaggattagtctctcctggccaatacagcaacatgccatgacatctagggatttcatatcctcacatctcccagctgcaacaaaggaagaaataggaattaggagtgctgccctagcaagcatcttagaagtgccaagttatactgccatcacctacaattatgattacctaatttttacaatggtaatctgacaatcagcttaaaagtctgtcagagaaatacctctgtccctgttaagtataagagcaaccctcccattccccacgtacacatacaccccta

SEQ ID NO: 63885 - DNA, 600 bp, Chicken  19866894329183_1
tcatgctctgttgatgtaattaggggaacccttgtagccctttagaaaccacagaactatgctgatgttaatgactttcatattagcgaatttagctacaacttctgttctaattttcatcagaagtaataaaaaattatctgatgacaatatatctcttccagagtgactctcctcccttatattgcagtgttcagagattcagtctaaaatgggcagctggtctccagataaaagtaatccttctgaaaagacacatctggtattactatgaaagtcccatgtaaaagttcagctcawtggttggagtgctcttgacagaccatctgagagccactttgagctytattgcagcattaaatacatacttttttttcacttctaggtaccgcaatgtatttcccgatccagattctgttcttctgttctgagtgatgttacagttaacaagatgctggggatggcacagccaacacaaaactctgccggagcacggagaaggccggagagtcaggtatgtgtcatttaaacagtctgacattttatgcaatgtctgcaaagctcttagtgttacttacatagtataacaagaaaaactgt

SEQ ID NO: 63886 - DNA, 572 bp, Chicken  19866894329183_2
aaccacagaactatgctgatgttaatgactttcatattagcgaatttagctacaacttctgttctaattttcatcagaagtaataaaaaattatctgatgacaatatatctcttccagagtgactctcctcccttatattgcagtgttcagagattcagtctaaaatgggcagctggtctccagataaaagtaatccttctgaaaagacacatctggtattactatgaaagtcccatgtaaaagttcagctcawtggttggagtgctcttgacagaccatctgagagccactttgagctytattgcagcattaaatacatacttttttttcacttctaggtaccgcaatgtatttcccgatccagattctgttcttctgttctgagtgatgttacagttaacaagatgctggggatggcacagccaacacaaaactctgccggagcacggagaaggccggagagtcaggtatgtgtcatttaaacagtctgacattttatgcaatgtctgcaaagctcttagtgttacttacatagtataacaagaaaaactgttaatacagcaaatttaaa

SEQ ID NO: 63887 - DNA, 529 bp, Chicken  19866894329195_1
actcccattgaaactcaggcatcctcagagatagagagcagctgctctgtatttacaggcagaaagaatatattttacttttaaatataggccatgaaattttgaatagtaaaaatgagactatcccagctggaatttgagcatcactagcagcagaatcactgtgactgtagcggctgtggtaattttcagatgctttggctgctaaagcacatgtgcctaatttatgcatgtgagtaccctgagtatgccttcaatcaagtaattatacaggcagattagcagtgcaaatagacatamataaacatgaaacccagcgaaataagaagcacccttcaggttatacatcatagtttggaattacaagtttatgtgttcaagcagttttcctttccagtcttttctttccggagtttaaatgagactagtatgtgcacaattatcctgtgcagaggttttgataactttgttattaagactaattctgtttttgaaaagaataagaaaacaggtgtatgggaactgttga

SEQ ID NO: 63888 - DNA, 599 bp, Chicken  19866894329199_1
  misc_feature (1)..(112): n is any nucleotide
nnnnnnnnnnnnnnnnnnnnnnnnnnnnnnnnnnnnnnnnnnnnnnnnnnnnnnnnnnnnnnnnnnnnnnnnnnnnnnnnnnnnnnnnnnnnnnnnnnnnnnnnnnnnnnnncttcctcatagagacgagaatttttgcctcttctttaagtcatgaagctgaatttaccttgttagcagaacatacctgtccttagcaactattttagcttctaggagttagtgcatttttcccccgttgccagttttcacaagcagtttctgaaaataaggacttattgcagtgtgctttattgatawgagtttacctgcttaagttgctgttttgtttcacctttccttcattttgatgtctgaagcctgtcgtgatatattcagaagggccgaagggaattaggcatcaccacttgaaaaycattaggacctaaggtcctttgatcatcccagacatatggatattaaatcccttcctgaactctgaatactttatcatcttgagtgaaatgcattcctgtacagaaagctagcataaaattcctaaaggtgaactgtaaataggtccatgtatgcgtatgttgtctgcaatagtgcattctcag

SEQ ID NO: 63889 - DNA, 600 bp, Chicken  19866894329199_2
cctcatagagacgagaatttttgcctcttctttaagtcatgaagctgaatttaccttgttagcagaacatacctgtccttagcaactattttagcttctaggagttagtgcatttttcccccgttgccagttttcacaagcagtttctgaaaataaggacttattgcagtgtgctttattgatawgagtttacctgcttaagttgctgttttgtttcacctttccttcattttgatgtctgaagcctgtcgtgatatattcagaagggccgaagggaattaggcatcaccacttgaaaaycattaggacctaaggtcctttgatcatcccagacatatggatattaaatcccttcctgaactctgaatactttatcatcttgagtgaaatgcattcctgtacagaaagctagcataaaattcctaaaggtgaactgtaaataggtccatgtatgcgtatgttgtctgcaatagtgcattctcagtaggactgcaaattgacttgatcctgaaactgaagtacacatagatgtatagtaagtgtattaagtatctatcttttagaaggcacatggtaattatgtcctctgttattgaattt

SEQ ID NO: 63890 - DNA, 600 bp, Chicken  19866894329200_1
acctgctctgctgcatgcatatggtcggggcggtgtcactgccgaccgcagtggggccgtattttcaccccttcatgccatcctaacccgatagcagagggcccggcggaggaagcatgcaggatccggccctgaacgtgcggctgccatgcagcagcagagctgagctccctccttacgtcccagcccaggaatgaggtgactcaaggcctctcctctccccgccagaacccgtaaccgtatctccataccaccatcgagcccggggccgctcgaggaggttctgttacataaaggaaygcctcgtgccaacaaggcagagagctatatcctctcttataaaccaccttttaaattctcagctgctttaaagcagccctggacgagggccctgtttttattttctgtttggccgtggcagccgccggctcttggctcccatcccagaatctgctttcgttttggagcgcggttggagctctcggcgtcccttattttttttattttattttattttttttttttggaaggggggggcggggggggggttggtttaaaatagcagccttgcctcaccgtggggagggaggggaaggaacg

SEQ ID NO: 63891 - DNA, 600 bp, Chicken  19866894329202_1
aaatagcccaaggtttatgttttatcatgatgaaaactgatgacaatacttcttcaggggcatagtcacctgcacagtggcatatggctaatcaggtctgatgtccacaaggtgcaaatttgcttcagctttcacctagatatctacaggatttggatcctggttcagatttatgaaagaataatttccattatcttcttgtgcttggacctctagttaacactgtaagaacatgtgctgcatactgttcatgtgcagtcagagctgaccagcatcagtggtacactttctcaagctcasagtcatagcttttatgttcagatctatggctgctggcttatagggttcgatgtatttgttttgctgtctggctacactgctgttcttaaggctttttgtcctgttgttgttaacttaaattgtgaaagatgtgcagtgattattcctgcccttgcttgcctttccacataacatcgagattttttagaatttattaaaaatcttctgtgtagagattactagttccaaacctgagaaaaagagccaaaaatgcttatatttttccagtagctatatgaaaytttttcactgtcacacatg

SEQ ID NO: 63892 - DNA, 471 bp, Chicken  19866894329202_2
tacactttctcaagctcasagtcatagcttttatgttcagatctatggctgctggcttatagggttcgatgtatttgttttgctgtctggctacactgctgttcttaaggctttttgtcctgttgttgttaacttaaattgtgaaagatgtgcagtgattattcctgcccttgcttgcctttccacataacatcgagattttttagaatttattaaaaatcttctgtgtagagattactagttccaaacctgagaaaaagagccaaaaatgcttatatttttccagtagctatatgaaaytttttcactgtcacacatggactggaacagtagaatgatgtatttattgaatgacctgtctggcactgaaatctgttggtgtggtgcatacctctagcttctctgttgaaaagagtaattgataaaaatagaaatagttttcttggttctgttagaaatgtatcacttttt

SEQ ID NO: 63893 - DNA, 600 bp, Chicken  19866894329206_1
aacatttggcctttgaagtttggcaggactgtatctgggtttgcaggcactgcacgccacaccagctcgtaacctgctcaaactgctgttgaatgaattgcagtcctgtgatttagacctgtcccatcagtatgctttgcaaactagtccaaggatctaccttattaataaaataatgtaaatccctacactctcagaaaaattatcatgtaagcaaacagtgaagtcaagcctccacagatattttatcaacaaactgaaaaatggatgaggcatgtgtaccaagtaaatgatttaatktcctgattttcatagatatcagttataaactaatacactggaaagtaagtcaatgtgcatctctaagttacttcactgtatagaaactgttaatacgaggagcaataatgagtctcagtattctcaatgaatgggtttgaagtccttcctatggactagaaaattaagatgtgtaacatgtttaaaaaagaattgtaatgatgcaccttcttctatcacataacaatggaatttggagtagagtgcaattgtcagcgacaaactggaaggtagagttcaatgacaatcagagcccagagt

SEQ ID NO: 63894 - DNA, 600 bp, Chicken  19866894329213_1
catctatggacacagtatttaatgtgtttcagtccacagctaaatcgctgttaggtaatacttcaatgccataacttctcaggtttctccagatcttttcagcctaaattaccaactccacgagttctactgctttaggaagaaatctgttaaacgaggcctgtacagatagttcagtccaaatttttgaagtatctagaagttttggattctgtaccctaaagatgctttgggtgatgctggcctccatatttaaagctctacatttaaacactatggttcaagtcaaatgtcatttayaaaaccaagcagcagaaagaatcaccaccmaagctacagacgtactgtgaaatgagatcttaccactcagtatctgaaatctttgaggcaatgttctctgcagttgcaaggaaaaagtgtgcagcaacgagaacctgacccaggatcagctggcaaaggcatacgtttataaatgacattgtagtcatgactcttctcagatcacaagctaacagaatgccttgaactaagtagtcattcaggagcactctatccacttcacccacaaggttgctgtcactataacatcagtgcattatt

SEQ ID NO: 63895 - DNA, 600 bp, Chicken  19866894329213_2
agtccacagctaaatcgctgttaggtaatacttcaatgccataacttctcaggtttctccagatcttttcagcctaaattaccaactccacgagttctactgctttaggaagaaatctgttaaacgaggcctgtacagatagttcagtccaaatttttgaagtatctagaagttttggattctgtaccctaaagatgctttgggtgatgctggcctccatatttaaagctctacatttaaacactatggttcaagtcaaatgtcatttayaaaaccaagcagcagaaagaatcaccaccmaagctacagacgtactgtgaaatgagatcttaccactcagtatctgaaatctttgaggcaatgttctctgcagttgcaaggaaaaagtgtgcagcaacgagaacctgacccaggatcagctggcaaaggcatacgtttataaatgacattgtagtcatgactcttctcagatcacaagctaacagaatgccttgaactaagtagtcattcaggagcactctatccacttcacccacaaggttgctgtcactataacatcagtgcattatttgaagaaagaagtacatgtccactagctgg

SEQ ID NO: 63896 - DNA, 600 bp, Chicken  19866894329214_1
ccaaaatgtataatgcttagcatatccaacaggcctgtgcagatgccagataaataatctactgtataaaaacaattatactttttaaaattgacacttaactatgattgcatttaatcatgaggtaggaggaggtatattttcccagttacaaacatatttactgattaagttggcaaatagttaaacttggctgactacttgcaagaaaagaaattcactgtaaatgcttttatgggtgtagaaataaaaagaaatctgtggttggtcagattcatattttgcaaatagtatccttcrcaagaacagcagaaagataaaacctgacctgaagctttgataaggtgtgcttaaatgacttctatttctacaaggctgttccartaagataacgtaagaagcaaacattatacgcacagtagtcaataaacagtgtggcagcaggggtttatgtgatgcaggctcacattggcagccccaagccaagaactttggtgtagcacagaacagtgaatgcaaatcaatctctgctaatataactacagaaagaggctatagcacttagaataatcctgaatagagaaactcagrccaactgtt

SEQ ID NO: 63897 - DNA, 600 bp, Chicken  19866894329214_2
ttaaaattgacacttaactatgattgcatttaatcatgaggtaggaggaggtatattttcccagttacaaacatatttactgattaagttggcaaatagttaaacttggctgactacttgcaagaaaagaaattcactgtaaatgcttttatgggtgtagaaataaaaagaaatctgtggttggtcagattcatattttgcaaatagtatccttcrcaagaacagcagaaagataaaacctgacctgaagctttgataaggtgtgcttaaatgacttctatttctacaaggctgttccartaagataacgtaagaagcaaacattatacgcacagtagtcaataaacagtgtggcagcaggggtttatgtgatgcaggctcacattggcagccccaagccaagaactttggtgtagcacagaacagtgaatgcaaatcaatctctgctaatataactacagaaagaggctatagcacttagaataatcctgaatagagaaactcagrccaactgttcaatttctttatgcttgtcactagtcttggccaaagctaggctaaagccaggtctgacactgaaagctagaaatgctaatgact

SEQ ID NO: 63898 - DNA, 600 bp, Chicken  19866894329214_3
tatccttcrcaagaacagcagaaagataaaacctgacctgaagctttgataaggtgtgcttaaatgacttctatttctacaaggctgttccartaagataacgtaagaagcaaacattatacgcacagtagtcaataaacagtgtggcagcaggggtttatgtgatgcaggctcacattggcagccccaagccaagaactttggtgtagcacagaacagtgaatgcaaatcaatctctgctaatataactacagaaagaggctatagcacttagaataatcctgaatagagaaactcagrccaactgttcaatttctttatgcttgtcactagtcttggccaaagctaggctaaagccaggtctgacactgaaagctagaaatgctaatgacttttygctgcttgactattctgtttgtgttggaattttaatgacatgtcatagatatgagaaactacatacataacatacacaaggcactgtgaagagcatcctaccagcatcctttactgatttgtaagacccttttgctgtgctccttgtccatcaggcactatactcaaggtcaagtttctgtttttttttttttttttcattgc

SEQ ID NO: 63899 - DNA, 600 bp, Chicken  19866894329214_4
ataacgtaagaagcaaacattatacgcacagtagtcaataaacagtgtggcagcaggggtttatgtgatgcaggctcacattggcagccccaagccaagaactttggtgtagcacagaacagtgaatgcaaatcaatctctgctaatataactacagaaagaggctatagcacttagaataatcctgaatagagaaactcagrccaactgttcaatttctttatgcttgtcactagtcttggccaaagctaggctaaagccaggtctgacactgaaagctagaaatgctaatgacttttygctgcttgactattctgtttgtgttggaattttaatgacatgtcatagatatgagaaactacatacataacatacacaaggcactgtgaagagcatcctaccagcatcctttactgatttgtaagacccttttgctgtgctccttgtccatcaggcactatactcaaggtcaagtttctgtttttttttttttttttcattgcaataatatttttatattccagaaatgtcttggcatttaaaaataacccatcattgcttctcaattttgtcaccttgtcgcttttccattttaggtgc

SEQ ID NO: 63900 - DNA, 521 bp, Chicken  19866894329223_1
agatttcaggccttccgtagctctccaatatccgacctcacagctttaacgtgccgctgatatttgttagcacacatcatgttactaaaagcagttttgatgttttaacctacgactgcggagcagttagacagctgtttaatcatgctgttctccaagctcacaccctttgagctcacccctgcctgtcgcagcctgcatgccttgctgaccactccaggagcgatgctgtgacgtcccatcagtgatcttgtgtgcaattagggctgtgagaaaggcttttagcgtagcactgagccrtttcccttccctgttccctgaactgagtcagtgcatctcactgtgagggactgcagcatcacgctccctgcagcaggtacagcatgagtcagtcttaatcgcattcatgcatggtttgctatttcagctttggatgtgaatgaagacaaacactgactgttcccataagtgacatctgtaaagtcctctgttttgaaatgagttcgtagtgaaagctgttt

SEQ ID NO: 63901 - DNA, 600 bp, Chicken  19866894329225_1
caattgcttttaattaattagtttagagattaatggttgtgttattgcagcaaagcagggcttagtagagcaaaatgcccagatatttaatcagtttcttagattgattttgcagctctctgctgccatatggcatcaccattagaagtagttgttgagccagctaacataaagctaggctggatgggcctacccaagcacagcaaggcaagtataccacataaccacgggcagagctaattgctgcttgagagtgtattgagacattacacttccctttccttgaagaaaactaacccytgaacctagtgggtttgcagctttgatggtgatcatgtagttaatgatttccagtctaartcttcatctcagactggtgatagaatagcttttctgtgaactgagagtactgttttcctcaaccgtaatcttgctaaccagccaaacgtgcatccacagcagctctcttcctttgtgtgctttgttaayaccaatgtttatttagctatgcctagccagttcataaactacttgcaggtatggagatcagcacaggtaggcttactttttcaaaaagctatattgagctttttgccttgc

SEQ ID NO: 63902 - DNA, 600 bp, Chicken  19866894329225_2
cttagtagagcaaaatgcccagatatttaatcagtttcttagattgattttgcagctctctgctgccatatggcatcaccattagaagtagttgttgagccagctaacataaagctaggctggatgggcctacccaagcacagcaaggcaagtataccacataaccacgggcagagctaattgctgcttgagagtgtattgagacattacacttccctttccttgaagaaaactaacccytgaacctagtgggtttgcagctttgatggtgatcatgtagttaatgatttccagtctaartcttcatctcagactggtgatagaatagcttttctgtgaactgagagtactgttttcctcaaccgtaatcttgctaaccagccaaacgtgcatccacagcagctctcttcctttgtgtgctttgttaayaccaatgtttatttagctatgcctagccagttcataaactacttgcaggtatggagatcagcacaggtaggcttactttttcaaaaagctatattgagctttttgccttgccagctaggctgcgaatatcagcgtgccgtccccrtcattggctgcatgtgctatgcagca

SEQ ID NO: 63903 - DNA, 600 bp, Chicken  19866894329225_3
ctacccaagcacagcaaggcaagtataccacataaccacgggcagagctaattgctgcttgagagtgtattgagacattacacttccctttccttgaagaaaactaacccytgaacctagtgggtttgcagctttgatggtgatcatgtagttaatgatttccagtctaartcttcatctcagactggtgatagaatagcttttctgtgaactgagagtactgttttcctcaaccgtaatcttgctaaccagccaaacgtgcatccacagcagctctcttcctttgtgtgctttgttaayaccaatgtttatttagctatgcctagccagttcataaactacttgcaggtatggagatcagcacaggtaggcttactttttcaaaaagctatattgagctttttgccttgccagctaggctgcgaatatcagcgtgccgtccccrtcattggctgcatgtgctatgcagcatgattctatagataactatccaattttattcctttcaaggttatgatccttttatgcaatcagcaaagtttcatatgtactcacattgactactgtcacccgcactgctacctccatcatagccggtcc

SEQ ID NO: 63904 - DNA, 553 bp, Chicken  19866894329225_4
atgtagttaatgatttccagtctaartcttcatctcagactggtgatagaatagcttttctgtgaactgagagtactgttttcctcaaccgtaatcttgctaaccagccaaacgtgcatccacagcagctctcttcctttgtgtgctttgttaayaccaatgtttatttagctatgcctagccagttcataaactacttgcaggtatggagatcagcacaggtaggcttactttttcaaaaagctatattgagctttttgccttgccagctaggctgcgaatatcagcgtgccgtccccrtcattggctgcatgtgctatgcagcatgattctatagataactatccaattttattcctttcaaggttatgatccttttatgcaatcagcaaagtttcatatgtactcacattgactactgtcacccgcactgctacctccatcatagccggtcctgtgctcgccttgtccgtgccatcaaactcctgtatggagacacagtggactctcttcgagaaaacagcacgctgaacagtgttgcaagaggcaaaaa

SEQ ID NO: 63905 - DNA, 600 bp, Chicken  19866894329245_1
aacttctctgctctcggagttcaaatatgacaagtaaaagaagccctacattcatggatcctctgaatgctagtttgatctgtcatttttttatttttattttccagttttactgtaaagaaaattaatactggaatcagatatttcactgaacagcttgtaagtgaaaagaaaacattaggtttggaaaaaggcagcgagctaggaatcttctgttacttggagtgccagtggatttactcccagtttatataaactactagtcctgcaattttttttaagaaagtaattgtggcactrtgtattctctcttttgcaatataatattaatttgtatatataatacagatcccttgtgaaattattctttttccatatattgaaatgtcatcatgccttgcaaagtaatcattatttgaaccatgtttacttttgggaaagaaactataatttgtctgatagcatttatacttgagcaggtagtcatatacactttcatttcttaattttaaatattttacatcattaacaaacctactcaggtggttatccagacaaatcatcagcataggctatacagattgagattattgagattat

SEQ ID NO: 63906 - DNA, 599 bp, Chicken  19866894329258_1
  misc_feature (1)..(28): n is any nucleotide
nnnnnnnnnnnnnnnnnnnnnnnnnnnnaggtgtcccagaatgacggggatgtggcctgggggacgtgctcagtgggttggcgttggtgaccctacaggtctccaacctgcatggccgtgtgattctgcgaccccctcacccggctaacagtcccaaagcccctccccagacctctgtcagccctcaccccgcgaccctttgggaaatgggatggggtccccaaacattcccatccaaaactttctagaaagagagaaaaagagggaaaccattcccgggatccccgctgcggtgtggckttcacagtccaatggcaccacctagaggggagccgggggctgggacagggcacagagcscaggtggccaacacagctctgccccatgccttgtcccccaccccacaaccaccgacaggcagagatgccaccgcctcaaggagacattgacccccccccccccggtgaaaagcacagagctgtcctgcttcggggccccagtgcacgaccccaagcacctcccacagcgtgaggatgcagccccgagctgctcccagccccgttccccctctctcaccccaccttcctgacagtctccat

SEQ ID NO: 63907 - DNA, 600 bp, Chicken  19866894329258_2
ggggacgtgctcagtgggttggcgttggtgaccctacaggtctccaacctgcatggccgtgtgattctgcgaccccctcacccggctaacagtcccaaagcccctccccagacctctgtcagccctcaccccgcgaccctttgggaaatgggatggggtccccaaacattcccatccaaaactttctagaaagagagaaaaagagggaaaccattcccgggatccccgctgcggtgtggckttcacagtccaatggcaccacctagaggggagccgggggctgggacagggcacagagcscaggtggccaacacagctctgccccatgccttgtcccccaccccacaaccaccgacaggcagagatgccaccgcctcaaggagacattgacccccccccccccggtgaaaagcacagagctgtcctgcttcggggccccagtgcacgaccccaagcacctcccacagcgtgaggatgcagccccgagctgctcccagccccgttccccctctctcaccccaccttcctgacagtctccatctgggccaggtccctgctgcgcagtcgcacccagcgccggcgccggttggtgtggtacat

SEQ ID NO: 63908 - DNA, 600 bp, Chicken  19866894329265_1
ttccatttctgggtggaattttgaaagtgtaatcaaaggtaaatctagtactagcactgctgaatgggtaacaaacactcatgaaagtaaggcagaagaggaatctgcctcaagtgatgaagaggatatttatggacatggattaccatattcatcttcagagactagtgtgcctgaagttggtgctgagcctggttcccaggatatgaccaggataagcctagatgaaatggtgctgttaaaatctgatcaggtatatgttttcaatttagttaaaaaatattttatatctcaacattktgaagaaaaaaaaaaaagyacacttgcatgtaatgactattctttacatcttttgggaggcagttttctttttgcttagttcaacaagtaaaacataaaaccaaagcagcaatatgtgtcatgactcttatgaaatgtgatgtatcagacttcagaatggtggatgagtccttacaagctggagaagctgtactgtctgcataaacattattatgatttccagttggacaaaaatttctgtcataagcacatctattaaagagtgagtagtcatacttaaaggccgctctttgttaggtc

SEQ ID NO: 63909 - DNA, 600 bp, Chicken  19866894329265_2
tttgaaagtgtaatcaaaggtaaatctagtactagcactgctgaatgggtaacaaacactcatgaaagtaaggcagaagaggaatctgcctcaagtgatgaagaggatatttatggacatggattaccatattcatcttcagagactagtgtgcctgaagttggtgctgagcctggttcccaggatatgaccaggataagcctagatgaaatggtgctgttaaaatctgatcaggtatatgttttcaatttagttaaaaaatattttatatctcaacattktgaagaaaaaaaaaaaagyacacttgcatgtaatgactattctttacatcttttgggaggcagttttctttttgcttagttcaacaagtaaaacataaaaccaaagcagcaatatgtgtcatgactcttatgaaatgtgatgtatcagacttcagaatggtggatgagtccttacaagctggagaagctgtactgtctgcataaacattattatgatttccagttggacaaaaatttctgtcataagcacatctattaaagagtgagtagtcatacttaaaggccgctctttgttaggtctccagtattccaagtcttg

SEQ ID NO: 63910 - DNA, 600 bp, Chicken  19866894329267_1
atgattctatgcttgagcagggtgttggactggatgggtcccttccaacctccagctttagggattctgagataaagaagtctggaaagcctagagctgccctaccaacatgctgtgggggggtgcctcaatccaggagcccgccattgagcttcagacgtacatacctgaatcataaaatctaccacttgcccatatgcttgtgaccatatgcttggaactggcctgaacctcatatagaagggtgtcccatcagaagctgacagctgactcatttcaggttgtcccacatcacttttmctgactaatggtcatgtgttttctttgaaatgctattgaatcacatctcgtaatgagaatgcggacattgcatcctgccattagttttaaaagagatcaatgcacttctagtggcaatgtattggtggaaagaatattgaatttttctgtcgtcgagcataatgtaagcatacagctggtggctgaaatgatcctgtgctccctttgctggggacatcatatgtgctgaatttctgtggtgtacaaacttcagcaagggatgcccttctaagcaatagtgaggagagaattaaggcaaaa

SEQ ID NO: 63911 - DNA, 599 bp, Chicken  19866894329270_1
  misc_feature (1)..(26): n is any nucleotide
nnnnnnnnnnnnnnnnnnnnnnnnnnatttttatttcttgtctgctgaagatgttattactgattgttctcttggctgtctttacctctatgctatatgtgcttgcctccagctatccccgtgttcttaagttctttatcaatttttcttatctattgaatgtctgctatataaataatttatggagactttcagatctttgaggatatattcaattatatatgaataaacggaatgtctatttcaataaaggtggattaatgattttataaagttaaatgttgctgtaagtgtaagagmattttctggacttcattgacttaatcagatttcaaaagtcctttgaaatagaaaattattctttacaacattcttttataaaaaaatataatacaatcttctcaattgcatatcactcttttgcagatatcttggcttctttgggttacaagatattcatgagctgttgacattagaaaaaatgtgtagaagtatgcttgcgcagtttctgatcctcatcttttgagagattggaagagatcgttaaaggtgattgcttgtttgccttgaagattcttcagtggaggattttgaaaaat

SEQ ID NO: 63912 - DNA, 599 bp, Chicken  19866894329280_1
  misc_feature (1)..(131): n is any nucleotide
nnnnnnnnnnnnnnnnnnnnnnnnnnnnnnnnnnnnnnnnnnnnnnnnnnnnnnnnnnnnnnnnnnnnnnnnnnnnnnnnnnnnnnnnnnnnnnnnnnnnnnnnnnnnnnnnnnnnnnnnnnnnnnnnnnnagctgtatgtgggcagctgccatagtacttgcctggctacatctgcatgaagagcatttttttttggtacaaagagcactagttaccacactggtgaagaaactcccaattgagagggcaccatattggcaaagccatgtttgcatgagtatagagcagttgctgtgcygtaggcaaaacaagccaaactagcagaaacatgcttttagtctgtgagccctcayggtargagtttggcttggcacagcagtgttggagtaytggtccaagatcatgcacaggtctatagtgtgcagctagatttattaaacgagtctgaactgcctgtctaaaatggccctgaggtcctgccttgacctcagctgctctgctaagaaaagccttattaagagctcctgtagtaatcaaacatgaagaatgtcaatgatttctctgcaaaatctagactctgatcattgggaagacccc

SEQ ID NO: 63913 - DNA, 599 bp, Chicken  19866894329280_2
  misc_feature (1)..(76): n is any nucleotide
nnnnnnnnnnnnnnnnnnnnnnnnnnnnnnnnnnnnnnnnnnnnnnnnnnnnnnnnnnnnnnnnnnnnnnnnnnnnagctgtatgtgggcagctgccatagtacttgcctggctacatctgcatgaagagcatttttttttggtacaaagagcactagttaccacactggtgaagaaactcccaattgagagggcaccatattggcaaagccatgtttgcatgagtatagagcagttgctgtgcygtaggcaaaacaagccaaactagcagaaacatgcttttagtctgtgagccctcayggtargagtttggcttggcacagcagtgttggagtaytggtccaagatcatgcacaggtctatagtgtgcagctagatttattaaacgagtctgaactgcctgtctaaaatggccctgaggtcctgccttgacctcagctgctctgctaagaaaagccttattaagagctcctgtagtaatcaaacatgaagaatgtcaatgatttctctgcaaaatctagactctgatcattgggaagacccctgaaatagtgtacgtgctttttccatttcttatatgctaaaagctactgtgtccc

SEQ ID NO: 63914 - DNA, 599 bp, Chicken  19866894329280_3
  misc_feature (1)..(71): n is any nucleotide
nnnnnnnnnnnnnnnnnnnnnnnnnnnnnnnnnnnnnnnnnnnnnnnnnnnnnnnnnnnnnnnnnnnnnnnagctgtatgtgggcagctgccatagtacttgcctggctacatctgcatgaagagcatttttttttggtacaaagagcactagttaccacactggtgaagaaactcccaattgagagggcaccatattggcaaagccatgtttgcatgagtatagagcagttgctgtgcygtaggcaaaacaagccaaactagcagaaacatgcttttagtctgtgagccctcayggtargagtttggcttggcacagcagtgttggagtaytggtccaagatcatgcacaggtctatagtgtgcagctagatttattaaacgagtctgaactgcctgtctaaaatggccctgaggtcctgccttgacctcagctgctctgctaagaaaagccttattaagagctcctgtagtaatcaaacatgaagaatgtcaatgatttctctgcaaaatctagactctgatcattgggaagacccctgaaatagtgtacgtgctttttccatttcttatatgctaaaagctactgtgtcccaagtg

SEQ ID NO: 63915 - DNA, 599 bp, Chicken  19866894329280_4
  misc_feature (1)..(39): n is any nucleotide
nnnnnnnnnnnnnnnnnnnnnnnnnnnnnnnnnnnnnnnagctgtatgtgggcagctgccatagtacttgcctggctacatctgcatgaagagcatttttttttggtacaaagagcactagttaccacactggtgaagaaactcccaattgagagggcaccatattggcaaagccatgtttgcatgagtatagagcagttgctgtgcygtaggcaaaacaagccaaactagcagaaacatgcttttagtctgtgagccctcayggtargagtttggcttggcacagcagtgttggagtaytggtccaagatcatgcacaggtctatagtgtgcagctagatttattaaacgagtctgaactgcctgtctaaaatggccctgaggtcctgccttgacctcagctgctctgctaagaaaagccttattaagagctcctgtagtaatcaaacatgaagaatgtcaatgatttctctgcaaaatctagactctgatcattgggaagacccctgaaatagtgtacgtgctttttccatttcttatatgctaaaagctactgtgtcccaagtgactagtaatttaagtagcttcaattttagaca

SEQ ID NO: 63916 - DNA, 600 bp, Chicken  19866894329280_5
gtcctgccttgacctcagctgctctgctaagaaaagccttattaagagctcctgtagtaatcaaacatgaagaatgtcaatgatttctctgcaaaatctagactctgatcattgggaagacccctgaaatagtgtacgtgctttttccatttcttatatgctaaaagctactgtgtcccaagtgactagtaatttaagtagcttcaattttagacatttaaaacaagacctgatggcaagacttgattatgggcatgaaggtgaggtaagagcagaactcttcattcccagtaccacagyccaaaacctctaagagagatgtagatcatatcacaagagaaaatcttaaccttatcgacattttaggctatgtacactcatatacagaatcacagaatggatggggttggaatgcatctctggagatcatctagtccagtccctcaaaatggggacaactagagctggtccttggaccagtgtctattctggctttgaacatgtccaagaaacttcaagaatggagactccagtctccctgagcaacctgttccagcatctgaccactttcctggcaaaaacattctaaacgttgggtcg

SEQ ID NO: 63917 - DNA, 600 bp, Chicken  19866894329285_1
aaggctgtatgttagggctggccaaacagtagttagttttgtggtgttgcacgtatggtttgcctcagatgacacacagaggaaacactgcatgcttctgtcagagaccagcagcatgtacacggtgggctaaccttgctttgctattttctgattcttaatgttcttctatctctctttgcttgtcagctgcttattttttgtggatttagaaatacaggatctgagggaaatgcatgggttccatggaaagttgaattacgggcgctgagaatccaacctctgtttgcagttttactktgccacctgagtcagtgaaaggctcrcttgtaagcttgtaaatatgacagtttcctttctgtataaaactacgcagattgaaaaacttactcctaccttttgagaaatggctgggcaggcgtcccaatgaagaggagaatgcaaatgctgtgttctctgctggtctttttagcaagatgcagcaaaacacactcactgctttgtagttccactgtctagcatagatctgttgaatgttggggtttgtatgagcaggcactgcrtagcattaagttaagactgggtgcacataccgttgat

SEQ ID NO: 63918 - DNA, 600 bp, Chicken  19866894329285_2
cagtagttagttttgtggtgttgcacgtatggtttgcctcagatgacacacagaggaaacactgcatgcttctgtcagagaccagcagcatgtacacggtgggctaaccttgctttgctattttctgattcttaatgttcttctatctctctttgcttgtcagctgcttattttttgtggatttagaaatacaggatctgagggaaatgcatgggttccatggaaagttgaattacgggcgctgagaatccaacctctgtttgcagttttactktgccacctgagtcagtgaaaggctcrcttgtaagcttgtaaatatgacagtttcctttctgtataaaactacgcagattgaaaaacttactcctaccttttgagaaatggctgggcaggcgtcccaatgaagaggagaatgcaaatgctgtgttctctgctggtctttttagcaagatgcagcaaaacacactcactgctttgtagttccactgtctagcatagatctgttgaatgttggggtttgtatgagcaggcactgcrtagcattaagttaagactgggtgcacataccgttgatatagctcaagtgacatgtgggaactt

SEQ ID NO: 63919 - DNA, 600 bp, Chicken  19866894329285_3
ggcgctgagaatccaacctctgtttgcagttttactktgccacctgagtcagtgaaaggctcrcttgtaagcttgtaaatatgacagtttcctttctgtataaaactacgcagattgaaaaacttactcctaccttttgagaaatggctgggcaggcgtcccaatgaagaggagaatgcaaatgctgtgttctctgctggtctttttagcaagatgcagcaaaacacactcactgctttgtagttccactgtctagcatagatctgttgaatgttggggtttgtatgagcaggcactgcrtagcattaagttaagactgggtgcacataccgttgatatagctcaagtgacatgtgggaacttgttagcaatcaygtccatttttgtgcatgttatgtgacagccagtagggtaatcccctcacccacagtaatacttgcaccataggggaaggtttcaagttgggagatgtattgcctctaaagccttcattcgaatactcgtgctttccaccatgtgatgaatgccctgcccagcaagatgctgggctaacttccatttcagctagactgatcccgttaagctttgcctgaggttttc

SEQ ID NO: 63920 - DNA, 572 bp, Chicken  19866894329285_4
taaatatgacagtttcctttctgtataaaactacgcagattgaaaaacttactcctaccttttgagaaatggctgggcaggcgtcccaatgaagaggagaatgcaaatgctgtgttctctgctggtctttttagcaagatgcagcaaaacacactcactgctttgtagttccactgtctagcatagatctgttgaatgttggggtttgtatgagcaggcactgcrtagcattaagttaagactgggtgcacataccgttgatatagctcaagtgacatgtgggaacttgttagcaatcaygtccatttttgtgcatgttatgtgacagccagtagggtaatcccctcacccacagtaatacttgcaccataggggaaggtttcaagttgggagatgtattgcctctaaagccttcattcgaatactcgtgctttccaccatgtgatgaatgccctgcccagcaagatgctgggctaacttccatttcagctagactgatcccgttaagctttgcctgaggttttcatatgctgaccaggatcacagaaggacaaatgtatctgctaatcatt

SEQ ID NO: 63921 - DNA, 558 bp, Chicken  19866894329286_1
gaagtgcgccgggtgcctggagagcatcgcgcccagcgagctggtgatgcgcgcccagcagagcgtctaccacctgcactgcttctgctgctgcgtctgcgagcggcgcctgcagaagggcgacgagttcgtgctgaaggaagggcagctgctctgtaagggcgactacgagaaggagcgtgagctgctgagcttggtgagcccggctctgtcggattccggtaaggggctgcctgatgcagcattgccccgacccgctgctcctgccccaggggttgcttggctgggggaaaagttccmgtgcagaactggggtgggatgctgyaggaatagggcaggrggttgcatcccttggagcggaaccagtgggagggatatttgagatcaacatttagacctgaatgtgcaattgatgcaactcatgtctgcgtgatacccaggatgacaaatttaaggagaaacccaacaaaataggaaatgagctgtgaggagaaagtactgggttaatggtatccctgataaaggcattggtgcttcccaaatcacataaaaagatca

SEQ ID NO: 63922 - DNA, 533 bp, Chicken  19866894329286_2
atcgcgcccagcgagctggtgatgcgcgcccagcagagcgtctaccacctgcactgcttctgctgctgcgtctgcgagcggcgcctgcagaagggcgacgagttcgtgctgaaggaagggcagctgctctgtaagggcgactacgagaaggagcgtgagctgctgagcttggtgagcccggctctgtcggattccggtaaggggctgcctgatgcagcattgccccgacccgctgctcctgccccaggggttgcttggctgggggaaaagttccmgtgcagaactggggtgggatgctgyaggaatagggcaggrggttgcatcccttggagcggaaccagtgggagggatatttgagatcaacatttagacctgaatgtgcaattgatgcaactcatgtctgcgtgatacccaggatgacaaatttaaggagaaacccaacaaaataggaaatgagctgtgaggagaaagtactgggttaatggtatccctgataaaggcattggtgcttcccaaatcacataaaaagatca

SEQ ID NO: 63923 - DNA, 518 bp, Chicken  19866894329286_3
ctggtgatgcgcgcccagcagagcgtctaccacctgcactgcttctgctgctgcgtctgcgagcggcgcctgcagaagggcgacgagttcgtgctgaaggaagggcagctgctctgtaagggcgactacgagaaggagcgtgagctgctgagcttggtgagcccggctctgtcggattccggtaaggggctgcctgatgcagcattgccccgacccgctgctcctgccccaggggttgcttggctgggggaaaagttccmgtgcagaactggggtgggatgctgyaggaatagggcaggrggttgcatcccttggagcggaaccagtgggagggatatttgagatcaacatttagacctgaatgtgcaattgatgcaactcatgtctgcgtgatacccaggatgacaaatttaaggagaaacccaacaaaataggaaatgagctgtgaggagaaagtactgggttaatggtatccctgataaaggcattggtgcttcccaaatcacataaaaagatca

SEQ ID NO: 63924 - DNA, 600 bp, Chicken  19866894329293_1
cccaccagtcaatttgctcagggagatcgggctcttctccagataagcacattgactttaaaataaagtgtgtgccaacagctgcagcaccgagactgaagcagacagagatgtggcactgaatgataattaaatacattttcatcatctgtcattttttactgcaggtgccggcgtaataaatctgcgcttgactcctttgtcagctggcagcaaacacatttcaacgtgaaatcccgggggatgaattaagagtcacttggccttgtgcgggaggaggatcccacctccgacacagcrcgaggggaacgcacacctgactgcttccatcacacctccattatgctggtgacacacatctgmcgtgtgacgcagcrcctcggccccgctggatggcggccacgcagccccgatcccgtgggcacggggagcccagggacccccagagcctcacggccaaccccgagctgctccccggggctgaaagcagccgctgccaactctgccagaaggagaacagtaaggatggctcaaagcatggaaagctcagaacgacagcacagccagctccgagcagagccagagcgacggagccaaaac

SEQ ID NO: 63925 - DNA, 600 bp, Chicken  19866894329293_2
taaagtgtgtgccaacagctgcagcaccgagactgaagcagacagagatgtggcactgaatgataattaaatacattttcatcatctgtcattttttactgcaggtgccggcgtaataaatctgcgcttgactcctttgtcagctggcagcaaacacatttcaacgtgaaatcccgggggatgaattaagagtcacttggccttgtgcgggaggaggatcccacctccgacacagcrcgaggggaacgcacacctgactgcttccatcacacctccattatgctggtgacacacatctgmcgtgtgacgcagcrcctcggccccgctggatggcggccacgcagccccgatcccgtgggcacggggagcccagggacccccagagcctcacggccaaccccgagctgctccccggggctgaaagcagccgctgccaactctgccagaaggagaacagtaaggatggctcaaagcatggaaagctcagaacgacagcacagccagctccgagcagagccagagcgacggagccaaaacatcgccaaacatttatctgagcggcagttctgctcgtgtccttacttaccctgaacacacaat

SEQ ID NO: 63926 - DNA, 600 bp, Chicken  19866894329293_3
acagctgcagcaccgagactgaagcagacagagatgtggcactgaatgataattaaatacattttcatcatctgtcattttttactgcaggtgccggcgtaataaatctgcgcttgactcctttgtcagctggcagcaaacacatttcaacgtgaaatcccgggggatgaattaagagtcacttggccttgtgcgggaggaggatcccacctccgacacagcrcgaggggaacgcacacctgactgcttccatcacacctccattatgctggtgacacacatctgmcgtgtgacgcagcrcctcggccccgctggatggcggccacgcagccccgatcccgtgggcacggggagcccagggacccccagagcctcacggccaaccccgagctgctccccggggctgaaagcagccgctgccaactctgccagaaggagaacagtaaggatggctcaaagcatggaaagctcagaacgacagcacagccagctccgagcagagccagagcgacggagccaaaacatcgccaaacatttatctgagcggcagttctgctcgtgtccttacttaccctgaacacacaatgcctctcatgcggt

SEQ ID NO: 63927 - DNA, 600 bp, Chicken  19866894329295_1
gacttttctttttcttttatcctcactttttgttcatacagcttatctgaatgtgttctatctgcgtttcttactttgtgagctctctccactccgttaccccggataattgagatttgactttgccaatgcattaaattttaacctcctcctactgtagcactggaaactgtgcaaaacagaaccagttggttgttgattagttgtcagaatcgcaaagggcaatgaagctccagtaaataaagtgtcttctcagttggaaatggttttgctgcatgactcaagctgaattaagtgggraaaaaaaaaagtgatagaggcttgaaggctgagtgaagcaatgtgtgcattttttggtgaaatagcaacatccggattttcttcaggaaggtactttgaatctgacccagacttgtgtctggaaaagcctttgcagtcctacatggaatttcttttcaagcagatgcaaagccccgtgccaaattgacggccatcacattctctaagtgaacttcacatggttctttcttgctccttgcccttccctgggatttaacgtgcctttctgatgttgtagtttggtgatgtgaccatcaagtt

SEQ ID NO: 63928 - DNA, 600 bp, Chicken  19866894329296_1
cctcatgggaaactcttacatctgcacgagtcatttcttaattacgagagcttattctggaaacaattgacctacttgtttctttatttatgtatttatttatttctgttcatttctgtggtaaaaaaaacacatctatggaatgcctcagctggccttgggcaaggttatgtgaccggtttgtattgcactggtgggtcaggtctacacagccacatcaggaccatgttactgaacaggggaaggcggccgttcctttatgtacatctacagttactgctaatgagattgtggtgtagrtctcaaagattacccagaaaggaaagccaaacctagaattttaagacataacacacatttttctagaattcctgaaccaactgtactgtgtatggaccaaacacccccttactatttataactttactgagttgtttttacagagtagacacctcgctgctgaagccagttaatcattggttatcattaccttgtatataaaaaggtatatgagagcagataactttcttttatatttcctcatgatggccccatcgaggaaataggcaacaagtgtactttcctttcagaaagtaagaa

SEQ ID NO: 63929 - DNA, 373 bp, Chicken  19866894329296_2
tccagcatgtaataataccttacaaagatattacatgggacatactatacagctttaatttagtgctacctctacgtgatgtggattcttcatggtacagagcagccagggcattgactctttatggtggttggactagatgaactccagagtccattccaacccctgcaactttgtgattctgtggcacaaagccatgcaaggtgtttgaagtgagccctgaagccaggcatggcttttgtatgagatttacaaatttgatttgcacaaacaaaacctgcttctagggctaagcagcartctttccttaatatgggacaaatggcttaaggtgccaagggttcagaaatcattatgtgtcaatgaagagaca

SEQ ID NO: 63930 - DNA, 600 bp, Chicken  19866894329298_1
cccaccactgtcattcccattgctgctatcccagctgacaaaccagggaaagattcctccatcagagccattcagcataacctctgcagatcagatatacacaggagcatgtaagcatcctcacaccaagagtttatacacaccagactcgaatgcaaaattacgtgcttgtaatataatgcaagcaaactatcttcgacacagggaacacctacatgaatgcagtaacttgctatagcaagttttttgtttgttattgaatacaaggtgtattacataaagatcttaagattaaacacrgagaatgttcccagatcccttctactctatgagttaaaaagcaaataaaggagctgcagggttgtggcacaccatgggatacctagccctgctaggaagcccaaccagtgttcgcacaagacactaacattatcttgaaaactgattctgaaacaacaatgctgcacatgaactaatgcaccctctgccaaggagtaaggaaggaaggaatttcagccccaaaytgtctttgcctaccaggtttcagaaagcttggcatgcacagaaatagattatatggaacaagatatatgataataa

SEQ ID NO: 63931 - DNA, 582 bp, Chicken  19866894329298_2
gtaacttgctatagcaagttttttgtttgttattgaatacaaggtgtattacataaagatcttaagattaaacacrgagaatgttcccagatcccttctactctatgagttaaaaagcaaataaaggagctgcagggttgtggcacaccatgggatacctagccctgctaggaagcccaaccagtgttcgcacaagacactaacattatcttgaaaactgattctgaaacaacaatgctgcacatgaactaatgcaccctctgccaaggagtaaggaaggaaggaatttcagccccaaaytgtctttgcctaccaggtttcagaaagcttggcatgcacagaaatagattatatggaacaagatatatgataataaaagttatcttggttttggtggggagaaggaatttatttrttttaaataaacacttttcttttaatcttttgagagttgactcatcacacaatagaagagcttacagggccagagatctaagccaatagatcctttgacttccggtagaggatctattaagactaaaagaaaaagcaaaagagcctcctgatgctgatagtacatga

SEQ ID NO: 63932 - DNA, 467 bp, Chicken  19866894329298_3
agcaaataaaggagctgcagggttgtggcacaccatgggatacctagccctgctaggaagcccaaccagtgttcgcacaagacactaacattatcttgaaaactgattctgaaacaacaatgctgcacatgaactaatgcaccctctgccaaggagtaaggaaggaaggaatttcagccccaaaytgtctttgcctaccaggtttcagaaagcttggcatgcacagaaatagattatatggaacaagatatatgataataaaagttatcttggttttggtggggagaaggaatttatttrttttaaataaacacttttcttttaatcttttgagagttgactcatcacacaatagaagagcttacagggccagagatctaagccaatagatcctttgacttccggtagaggatctattaagactaaaagaaaaagcaaaagagcctcctgatgctgatagtacatga

SEQ ID NO: 63933 - DNA, 600 bp, Chicken  19866894329304_1
attgtgcataacaaaataaatgtcacctttgaatcaacaatattcccctcaatttacattttatgcctcttgagaggccatttatgctgaaatattgaacactaatttgttattctactcactttgatgtacaggatttgattttaaaggctctgcacttaagaagaaaagcttatatgtgtgcactttgttttaaaaaactgattaaaggatttgttaccattaaaatactgtgttgcacatgacacaacctttaacacaacagtactttcagaatttaaccacacagtcactgtaaaygggaataaaataaactcaagggaagaattatatccttagagcaattcttacataactgtactttgagctagtaacttgccacagtgaaagataatatgctgtttgcatgcaattctataaattaaatagatacaatatgcaaaacattgctatttaaaaacaaacaaacaaaaaacaaaaacaaaaacaacatgaaaagtaaatcacagcatgcactataaaaaatgttacgaaaagggtccaataaagaatacaggtgtgaagtaaaaataattcgtattttttctgtgtctggctaaa

SEQ ID NO: 63934 - DNA, 600 bp, Chicken  19866894329310_1
ttaaatctgtcacattcttttaactggctgtatgctctaaaatttttgtacttcaataattctgctgctatactgcaaacaaaaaaaaaaatgcatgtagcatgagaaaggaatgcccataatttatagcaacttgttgctctattactcctgaattatttatgatttctatatgtcagaatgagtaaatcatataaaaccatcagaggtagtatttcacacaataatttcactttcaccatagaagctgttgatctggaaaacctacgcagaaaattgtgttatactggtatacatgcrgtaattttatagatgataatcctgggatatcactacactcttcatgctctatcaccatagaataatagaatgttaatttctactgaaaataagaggaaaatagaatgttcttcatggtgtcatattcatattcagagaaacactaacgtctcttccctatgttgcatttcccagaacaactacttgcgtacttcagtgttgttcttcagatgttcactgcaaaggtggatgaagccctgtaagaaatcatcctctaaacattgctgctcattatgctgatgttatttattccacagtatt

SEQ ID NO: 63935 - DNA, 600 bp, Chicken  19866894329310_2
tatcactacactcttcatgctctatcaccatagaataatagaatgttaatttctactgaaaataagaggaaaatagaatgttcttcatggtgtcatattcatattcagagaaacactaacgtctcttccctatgttgcatttcccagaacaactacttgcgtacttcagtgttgttcttcagatgttcactgcaaaggtggatgaagccctgtaagaaatcatcctctaaacattgctgctcattatgctgatgttatttattccacagtattcatttcatctactcccatgcagtcackgggattcttcgttaccagtttaagccaggatgggtcacaatacayggtaaatttcgaggacccatgtgatataatttgctagtccctctgaagggaaggtgragtcaagcacagcaagagcagctctttgaaacatttaagtcaagtctgtgaaatagagcgttaaaccagagagtttcctagcatttcaagtttttgagccataaatactacatatgtagactagtgtctaggtatagtaaaacaagtcatatttagtgtggtataagtgaacataatgattttgagcctgtgtttcaa

SEQ ID NO: 63936 - DNA, 600 bp, Chicken  19866894329310_3
ttaatttctactgaaaataagaggaaaatagaatgttcttcatggtgtcatattcatattcagagaaacactaacgtctcttccctatgttgcatttcccagaacaactacttgcgtacttcagtgttgttcttcagatgttcactgcaaaggtggatgaagccctgtaagaaatcatcctctaaacattgctgctcattatgctgatgttatttattccacagtattcatttcatctactcccatgcagtcackgggattcttcgttaccagtttaagccaggatgggtcacaatacayggtaaatttcgaggacccatgtgatataatttgctagtccctctgaagggaaggtgragtcaagcacagcaagagcagctctttgaaacatttaagtcaagtctgtgaaatagagcgttaaaccagagagtttcctagcatttcaagtttttgagccataaatactacatatgtagactagtgtctaggtatagtaaaacaagtcatatttagtgtggtataagtgaacataatgattttgagcctgtgtttcaaagacagagggttggaatttgatgatccttgaggtcacttccaacc

SEQ ID NO: 63937 - DNA, 600 bp, Chicken  19866894329310_4
attcagagaaacactaacgtctcttccctatgttgcatttcccagaacaactacttgcgtacttcagtgttgttcttcagatgttcactgcaaaggtggatgaagccctgtaagaaatcatcctctaaacattgctgctcattatgctgatgttatttattccacagtattcatttcatctactcccatgcagtcackgggattcttcgttaccagtttaagccaggatgggtcacaatacayggtaaatttcgaggacccatgtgatataatttgctagtccctctgaagggaaggtgragtcaagcacagcaagagcagctctttgaaacatttaagtcaagtctgtgaaatagagcgttaaaccagagagtttcctagcatttcaagtttttgagccataaatactacatatgtagactagtgtctaggtatagtaaaacaagtcatatttagtgtggtataagtgaacataatgattttgagcctgtgtttcaaagacagagggttggaatttgatgatccttgaggtcacttccaacctaagccattctatgatttcaaatagtgaaggtacgatttttgatttgaaaactagcc

SEQ ID NO: 63938 - DNA, 600 bp, Chicken  19866894329318_1
ctttagaaaaatatatagtcttattttaaattttacaacaatctccaatcacgtctgtatacacacagaatatgctgcaaaaaattcattagcatcctaagcaaaccttattctccagtttccaatactataaccttttctcctgttctcctaactgaagtgcatcagaattattgtactgcagtgggtggaacagtaatagtatgcatttccaaaaaagatccaagcagagactgaaccaaataaaaaaatattactggatgaaaacaaaaaagaatgctttcagtgtatttctgaaayttcgccaagtttttctgagctactttcctctactccttggtatcacagagatctctagtctgaagaatactctgtattccccttacgcttctaattttatcatggcttttccactcttatgcatcagttcaggctttgctacatattctgagctctgtttctggatagagaagyaagagmtaagagaaaatggaaacaaaataaatgagagtaggtataaaggagggggaaaaaagggaaaatgatttaaagcatcagaatgaaacagatggaatgtattagaagtattactggaaagaa

SEQ ID NO: 63939 - DNA, 600 bp, Chicken  19866894329318_2
tgtactgcagtgggtggaacagtaatagtatgcatttccaaaaaagatccaagcagagactgaaccaaataaaaaaatattactggatgaaaacaaaaaagaatgctttcagtgtatttctgaaayttcgccaagtttttctgagctactttcctctactccttggtatcacagagatctctagtctgaagaatactctgtattccccttacgcttctaattttatcatggcttttccactcttatgcatcagttcaggctttgctacatattctgagctctgtttctggatagagaagyaagagmtaagagaaaatggaaacaaaataaatgagagtaggtataaaggagggggaaaaaagggaaaatgatttaaagcatcagaatgaaacagatggaatgtattagaagtattactggaaagaagagtaactgatggaatttaaaagttcattactgaaaaattaaagatcctggaaagacaaactcaaagattttaaggtgagagggatttrtaacaacaatttagcagcagattaaaggtaacatggcaatagagtttgcaactggaattgggtttatcaggaaataacygacttc

SEQ ID NO: 63940 - DNA, 600 bp, Chicken  19866894329318_3
gcagtgggtggaacagtaatagtatgcatttccaaaaaagatccaagcagagactgaaccaaataaaaaaatattactggatgaaaacaaaaaagaatgctttcagtgtatttctgaaayttcgccaagtttttctgagctactttcctctactccttggtatcacagagatctctagtctgaagaatactctgtattccccttacgcttctaattttatcatggcttttccactcttatgcatcagttcaggctttgctacatattctgagctctgtttctggatagagaagyaagagmtaagagaaaatggaaacaaaataaatgagagtaggtataaaggagggggaaaaaagggaaaatgatttaaagcatcagaatgaaacagatggaatgtattagaagtattactggaaagaagagtaactgatggaatttaaaagttcattactgaaaaattaaagatcctggaaagacaaactcaaagattttaaggtgagagggatttrtaacaacaatttagcagcagattaaaggtaacatggcaatagagtttgcaactggaattgggtttatcaggaaataacygacttccgagaa

SEQ ID NO: 63941 - DNA, 600 bp, Chicken  19866894329318_4
tctaattttatcatggcttttccactcttatgcatcagttcaggctttgctacatattctgagctctgtttctggatagagaagyaagagmtaagagaaaatggaaacaaaataaatgagagtaggtataaaggagggggaaaaaagggaaaatgatttaaagcatcagaatgaaacagatggaatgtattagaagtattactggaaagaagagtaactgatggaatttaaaagttcattactgaaaaattaaagatcctggaaagacaaactcaaagattttaaggtgagagggatttrtaacaacaatttagcagcagattaaaggtaacatggcaatagagtttgcaactggaattgggtttatcaggaaataacygacttccgagaagaatgcattagctttccagaagcgtaacagtgcagaatgccactgttagcaaaagaaactgcagtcaaacttactttttgtcatctgacaggtcaatgttggtcccaaacttgattgttttaaaaggtcctcttctcctcctcccagaactgtagatataaaaaaaaagtaataggtgaatgtgcaaataggaacagtgtaaaaataca

SEQ ID NO: 63942 - DNA, 600 bp, Chicken  19866894329318_5
agaagyaagagmtaagagaaaatggaaacaaaataaatgagagtaggtataaaggagggggaaaaaagggaaaatgatttaaagcatcagaatgaaacagatggaatgtattagaagtattactggaaagaagagtaactgatggaatttaaaagttcattactgaaaaattaaagatcctggaaagacaaactcaaagattttaaggtgagagggatttrtaacaacaatttagcagcagattaaaggtaacatggcaatagagtttgcaactggaattgggtttatcaggaaataacygacttccgagaagaatgcattagctttccagaagcgtaacagtgcagaatgccactgttagcaaaagaaactgcagtcaaacttactttttgtcatctgacaggtcaatgttggtcccaaacttgattgttttaaaaggtcctcttctcctcctcccagaactgtagatataaaaaaaaagtaataggtgaatgtgcaaataggaacagtgtaaaaatacacacaaatctaactgtaaaaattaccaygtttataccacacttacttatctgaagatgtggattcattatctgagtggtc

SEQ ID NO: 63943 - DNA, 430 bp, Chicken  19866894329318_6
gtaacatggcaatagagtttgcaactggaattgggtttatcaggaaataacygacttccgagaagaatgcattagctttccagaagcgtaacagtgcagaatgccactgttagcaaaagaaactgcagtcaaacttactttttgtcatctgacaggtcaatgttggtcccaaacttgattgttttaaaaggtcctcttctcctcctcccagaactgtagatataaaaaaaaagtaataggtgaatgtgcaaataggaacagtgtaaaaatacacacaaatctaactgtaaaaattaccaygtttataccacacttacttatctgaagatgtggattcattatctgagtggtccttgtggtgactctttttttcgttttcctcctataaaatgcaattgtgaaaatgctatcatttattaaaacagcgaca

SEQ ID NO: 63944 - DNA, 600 bp, Chicken  19866894329325_1
caatctgctaggttctcctgctctgacacaatgttctgaccttaaacagggagggttttttttattaggagagggatggagggcaacagatttgccaaatattttgcatagctcaagaggagacctggatgatttctgatcatgctccctgaggctgaacaggtttctatataaacaaatggcaaaccaagggaagggagatgacaaatggagaggcagacatctcaagttgtaagaagtgagcagggaacgtagctttgttctgcagctactttagcaagcaggttgacttgaacttaygttctcatttgtaatgactacaaatgaagtgccacacaaaaacaagactattctgcaaagttcatgccaaatcttttacgctgtcttacattttttaaatatgcacttatgttctgtgacttttctaatgcatcatctcatcctaacatctcacattgcctgaagtttaagacattaaaggatggtgaacaagataaacacrcaagttctttttaattctgtttctgcattactagaaggattttcatgtaatattctctttattaattgtcacactaccttcagtttgcgcagaaatga

SEQ ID NO: 63945 - DNA, 560 bp, Chicken  19866894329325_2
gacaaatggagaggcagacatctcaagttgtaagaagtgagcagggaacgtagctttgttctgcagctactttagcaagcaggttgacttgaacttaygttctcatttgtaatgactacaaatgaagtgccacacaaaaacaagactattctgcaaagttcatgccaaatcttttacgctgtcttacattttttaaatatgcacttatgttctgtgacttttctaatgcatcatctcatcctaacatctcacattgcctgaagtttaagacattaaaggatggtgaacaagataaacacrcaagttctttttaattctgtttctgcattactagaaggattttcatgtaatattctctttattaattgtcacactaccttcagtttgcgcagaaatgaggatgcaaacaagtccagtgaagacgaggactagggagattgtctgataaataccccattaagaatttgaaggaatggacgtggcattcctgtggtgagtggacatcagccagctgccagacacctacccagctgctctcccacccaccccctcccataaag

SEQ ID NO: 63946 - DNA, 599 bp, Chicken  19866894329340_1
  misc_feature (1)..(109): n is any nucleotide
nnnnnnnnnnnnnnnnnnnnnnnnnnnnnnnnnnnnnnnnnnnnnnnnnnnnnnnnnnnnnnnnnnnnnnnnnnnnnnnnnnnnnnnnnnnnnnnnnnnnnnnnnnnnncaggcacttcacccccacactgagcgcttgggcagaggcagcactgctgaagcgatgacgtaactgctcatgaagcagttcctgctccagtagcttccagtttaacgtaacgtgcagattgaaaatagggttagttattgcaatatgctgacagccgcagcttgctcagcagctccttcccatgtcaggarctccttctaagcaaaagacctcttccatgttttgatagagatgaagcagcaagagatcctgttttagcaggttkattttaattaataaaccattaccagaaaaatcgcaccaaccattaaaaacaatttttgtaggaagttraatgaaaacgcaagttgatgctaatttcttgcttgacaattttgaaattaatccaagtggtctgcattttttaaggaactcgcttcccaagtcttgcctaatgtcacctccacagtaccttcctaccattccatttagagaactaccaatacactta

SEQ ID NO: 63947 - DNA, 599 bp, Chicken  19866894329340_2
  misc_feature (1)..(35): n is any nucleotide
nnnnnnnnnnnnnnnnnnnnnnnnnnnnnnnnnnncaggcacttcacccccacactgagcgcttgggcagaggcagcactgctgaagcgatgacgtaactgctcatgaagcagttcctgctccagtagcttccagtttaacgtaacgtgcagattgaaaatagggttagttattgcaatatgctgacagccgcagcttgctcagcagctccttcccatgtcaggarctccttctaagcaaaagacctcttccatgttttgatagagatgaagcagcaagagatcctgttttagcaggttkattttaattaataaaccattaccagaaaaatcgcaccaaccattaaaaacaatttttgtaggaagttraatgaaaacgcaagttgatgctaatttcttgcttgacaattttgaaattaatccaagtggtctgcattttttaaggaactcgcttcccaagtcttgcctaatgtcacctccacagtaccttcctaccattccatttagagaactaccaatacacttagtagcatttaacccaccaccttagaattgctctcccagccctgttcaaggcaaagtatcaaaaagtgtatttca

SEQ ID NO: 63948 - DNA, 600 bp, Chicken  19866894329340_3
agaggcagcactgctgaagcgatgacgtaactgctcatgaagcagttcctgctccagtagcttccagtttaacgtaacgtgcagattgaaaatagggttagttattgcaatatgctgacagccgcagcttgctcagcagctccttcccatgtcaggarctccttctaagcaaaagacctcttccatgttttgatagagatgaagcagcaagagatcctgttttagcaggttkattttaattaataaaccattaccagaaaaatcgcaccaaccattaaaaacaatttttgtaggaagttraatgaaaacgcaagttgatgctaatttcttgcttgacaattttgaaattaatccaagtggtctgcattttttaaggaactcgcttcccaagtcttgcctaatgtcacctccacagtaccttcctaccattccatttagagaactaccaatacacttagtagcatttaacccaccaccttagaattgctctcccagccctgttcaaggcaaagtatcaaaaagtgtatttcagggaaaaagaagaaacatctgatagaaaaacctaccttgtctcatttaatttgtacagctaagctacac

SEQ ID NO: 63949 - DNA, 600 bp, Chicken  19866894329349_1
tagcaaacttcatactgaagcagaaggtgtaccaagatggaaaccagcactcatgacagttggtgtagttcattgtagagtgactggtgttcatctctcaacatacaacagggtcttttttatccagagaattttacatctttaaatatgcatgtgtatacagttaaactttgggctcatccttgcataggaagaatgtgtaactgttaaaagaagaaatatttatgagtttgatgaggtgtgacatttaaggatttggcaaaaatagttgatgaatctactataatcaccagtcgtcaycatctgtactgaaaataatagtttgtgtcagagccttacactgtgctggtagtcatacaaacagaaagattctcacacagataccaacacagagaaagatccaaaatagttacaaaactgatacacgtgcatccatccactttttttttcccctgtagatttaagaaagttgctttactaatttcttcttagcaggtggtactgtagtgttttctacatcaaatcaaaaactctattttgctttaatgcacagatttagttcaggaatgatgatgagccacaaggcctagtagcatttta

SEQ ID NO: 63950 - DNA, 600 bp, Chicken  19866894329351_1
cagctgatagtttatgccaggaaccagcaatgatccaaattcatcccttgtgtaattctggaaaagccagtagagttccagggaagaagttgttggcttaacaaagtaaattttccctgacatttgaggaatgcagagtatcaattaaagtagagctaattattgctactattatttgcattgcagtagttcccagaggcccttaacaggattatagccttctggtatgaggagtttttaggaacataagctgtgattgggaagtcaatgtatgacagttaatatttggtacctgtgtasaaagcctccaagtttggaagggctccacagagcacagggctttgctcacrggtatgggtcacaagagactgaatctctaatgctttttgtgctgctttgaggtttgcctgaagtcatcatacatctcattactctgtaaagtatgatacaggccagcttgtgtacaaargaagaaactccatcctcaaactcagcactcaagtgaggccagcaatcawagaatcatagaatatccaagttggaagggaccaataagaatcattgagttcaacccctggcttcacatagaatcacctcaaa

SEQ ID NO: 63951 - DNA, 600 bp, Chicken  19866894329351_2
tgtaattctggaaaagccagtagagttccagggaagaagttgttggcttaacaaagtaaattttccctgacatttgaggaatgcagagtatcaattaaagtagagctaattattgctactattatttgcattgcagtagttcccagaggcccttaacaggattatagccttctggtatgaggagtttttaggaacataagctgtgattgggaagtcaatgtatgacagttaatatttggtacctgtgtasaaagcctccaagtttggaagggctccacagagcacagggctttgctcacrggtatgggtcacaagagactgaatctctaatgctttttgtgctgctttgaggtttgcctgaagtcatcatacatctcattactctgtaaagtatgatacaggccagcttgtgtacaaargaagaaactccatcctcaaactcagcactcaagtgaggccagcaatcawagaatcatagaatatccaagttggaagggaccaataagaatcattgagttcaacccctggcttcacatagaatcacctcaaaatcaatcatatgattgatagctttgtccaaatgctacttaatctccggca

SEQ ID NO: 63952 - DNA, 600 bp, Chicken  19866894329351_3
tattatttgcattgcagtagttcccagaggcccttaacaggattatagccttctggtatgaggagtttttaggaacataagctgtgattgggaagtcaatgtatgacagttaatatttggtacctgtgtasaaagcctccaagtttggaagggctccacagagcacagggctttgctcacrggtatgggtcacaagagactgaatctctaatgctttttgtgctgctttgaggtttgcctgaagtcatcatacatctcattactctgtaaagtatgatacaggccagcttgtgtacaaargaagaaactccatcctcaaactcagcactcaagtgaggccagcaatcawagaatcatagaatatccaagttggaagggaccaataagaatcattgagttcaacccctggcttcacatagaatcacctcaaaatcaatcatatgattgatagctttgtccaaatgctacttaatctccggcagcttggagctgtgcccactgccctggggagcctgtttgatgtccaccaccctccgataaagaaccttttctgataaccaacctgaacatccccagtgctttatattgggtcctcattaa

SEQ ID NO: 63953 - DNA, 600 bp, Chicken  19866894329351_4
cttctggtatgaggagtttttaggaacataagctgtgattgggaagtcaatgtatgacagttaatatttggtacctgtgtasaaagcctccaagtttggaagggctccacagagcacagggctttgctcacrggtatgggtcacaagagactgaatctctaatgctttttgtgctgctttgaggtttgcctgaagtcatcatacatctcattactctgtaaagtatgatacaggccagcttgtgtacaaargaagaaactccatcctcaaactcagcactcaagtgaggccagcaatcawagaatcatagaatatccaagttggaagggaccaataagaatcattgagttcaacccctggcttcacatagaatcacctcaaaatcaatcatatgattgatagctttgtccaaatgctacttaatctccggcagcttggagctgtgcccactgccctggggagcctgtttgatgtccaccaccctccgataaagaaccttttctgataaccaacctgaacatccccagtgctttatattgggtcctcattaagaaacctccagaaacacttctaaccttcacttgttctgatgagtcattc

SEQ ID NO: 63954 - DNA, 600 bp, Chicken  19866894329354_1
ggtctcgaaaaataaaaccaaataaaatggtgttttatttaaattagatttttttttactatgaagtttcacaggctgggtcctgaataaaaacacaagaaaatgtgtgagaagcagtgttgcagcaaattctacataatgattcctttagttgcatgtaccccaggttcatagatctgtaaatgaccaactccactgcaggatgagtgggggcacaagggtctttcagatcatgagagaatgagctctcacagtcagtgatagacactcaattggctttaggtctggctgagctgttayggatgaggaaaaggaccggaccaaacacatgaacagatgtcagtccaagtaaattttcttttagtcggaaataattctattttttttaagtyccatttgagtcactttcaagccatgctttttcaacttgactatacccaaatacagtagcagaaactagattttaaatcttcattycatgaggtcctgagtgccttcccactcctgttgaaatcattaagtatgctcaacacttttcagaattaatcctttttattttactattttctattttatttttagctggcattatcttcatag

SEQ ID NO: 63955 - DNA, 600 bp, Chicken  19866894329354_2
acacaagaaaatgtgtgagaagcagtgttgcagcaaattctacataatgattcctttagttgcatgtaccccaggttcatagatctgtaaatgaccaactccactgcaggatgagtgggggcacaagggtctttcagatcatgagagaatgagctctcacagtcagtgatagacactcaattggctttaggtctggctgagctgttayggatgaggaaaaggaccggaccaaacacatgaacagatgtcagtccaagtaaattttcttttagtcggaaataattctattttttttaagtyccatttgagtcactttcaagccatgctttttcaacttgactatacccaaatacagtagcagaaactagattttaaatcttcattycatgaggtcctgagtgccttcccactcctgttgaaatcattaagtatgctcaacacttttcagaattaatcctttttattttactattttctattttatttttagctggcattatcttcatagagagaattcttaaaaacatcatagtttcccttgtgatagtaaggaaaacttttttaagagtttgattttcattctaaattaaacatcaaaat

SEQ ID NO: 63956 - DNA, 600 bp, Chicken  19866894329354_3
tgtaaatgaccaactccactgcaggatgagtgggggcacaagggtctttcagatcatgagagaatgagctctcacagtcagtgatagacactcaattggctttaggtctggctgagctgttayggatgaggaaaaggaccggaccaaacacatgaacagatgtcagtccaagtaaattttcttttagtcggaaataattctattttttttaagtyccatttgagtcactttcaagccatgctttttcaacttgactatacccaaatacagtagcagaaactagattttaaatcttcattycatgaggtcctgagtgccttcccactcctgttgaaatcattaagtatgctcaacacttttcagaattaatcctttttattttactattttctattttatttttagctggcattatcttcatagagagaattcttaaaaacatcatagtttcccttgtgatagtaaggaaaacttttttaagagtttgattttcattctaaattaaacatcaaaatgagaaaaaaaggatcatgtttttatttttttaaataggcagatgaaagattttgttattaataattgacatgaaagcctttcgtc

SEQ ID NO: 63957 - DNA, 600 bp, Chicken  19866894329360_1
cttttaggatgctatacagctccagatgaagattctgtgccaaaaagcaaaccagcttattgttttcataacatcatacctacctttatttgtcataaggcacacacagatgccaagttgcatttaattattcagacaagcactgctatgttgtttcatgtgttcttattgttaacataaccattttaatgctttaggaagtgattaatttttaaaattagttagtcagtacatatatggaaaacaaactcaggtaatgttttccagatcagcattaagaggaagaaaaacaatcctttwcaaagcagttttgttccctcgcatcctgctttgcatctttttgaattgtaagtggcttctccccacacatccttatccagaaccatctgaccaaccaagttcagtgttaaaacttgattcatgtgcaagaatgggcccaaagatcgtatctctggtgaataaattcttatactgcacagtcacatagtgttcaataaaactaactgctcattcaccttgcctttttaagccagcatttaggcaacaaggagtgaagtcagtggtaatggtgggtgatgatgtacaagggatacttgcaac

SEQ ID NO: 63958 - DNA, 600 bp, Chicken  19866894329363_1
ttagcagcatggagccttccatccagcaggaaaaaggttatttactttgtttgtttaatgtctctgcattaatcctgtgccccataaaccaatttctcagctcttaccaaacaatttaaatggaagctaatttaaggcctctaaaatgaagcgatctcatgtcttgatgggcaaacattgctaattgcttttcaataaataagagtgaaatcatcatctctggtgcagaaataattttagtcacagcgtgtagatggcatcattttgaccccattaagaccggcagcaaggactgctgtkgtggctcttggtgtgccctgagctcgagcatcagccttgcacccacctgtrtgtgagtctcrtggccaggttggcagggttgytctttattttacaggcagaggcgttccagatacagggagagatgcaattgggcacaaagctgttcggagagcagtaagcactgcgccatacagatgttttttaagagcgagacctattgagcattaagccctgggtttccgtttgtgctttgtagaatgacactggttttggtttgcaatttcttcaaacttctcagaggaaatcttggactgaaaa

SEQ ID NO: 63959 - DNA, 600 bp, Chicken  19866894329363_2
tgtttaatgtctctgcattaatcctgtgccccataaaccaatttctcagctcttaccaaacaatttaaatggaagctaatttaaggcctctaaaatgaagcgatctcatgtcttgatgggcaaacattgctaattgcttttcaataaataagagtgaaatcatcatctctggtgcagaaataattttagtcacagcgtgtagatggcatcattttgaccccattaagaccggcagcaaggactgctgtkgtggctcttggtgtgccctgagctcgagcatcagccttgcacccacctgtrtgtgagtctcrtggccaggttggcagggttgytctttattttacaggcagaggcgttccagatacagggagagatgcaattgggcacaaagctgttcggagagcagtaagcactgcgccatacagatgttttttaagagcgagacctattgagcattaagccctgggtttccgtttgtgctttgtagaatgacactggttttggtttgcaatttcttcaaacttctcagaggaaatcttggactgaaaattaatttcgtgcttattatcttactgcaatgtaatgaggaataaatatatg

SEQ ID NO: 63960 - DNA, 600 bp, Chicken  19866894329363_3
tctgcattaatcctgtgccccataaaccaatttctcagctcttaccaaacaatttaaatggaagctaatttaaggcctctaaaatgaagcgatctcatgtcttgatgggcaaacattgctaattgcttttcaataaataagagtgaaatcatcatctctggtgcagaaataattttagtcacagcgtgtagatggcatcattttgaccccattaagaccggcagcaaggactgctgtkgtggctcttggtgtgccctgagctcgagcatcagccttgcacccacctgtrtgtgagtctcrtggccaggttggcagggttgytctttattttacaggcagaggcgttccagatacagggagagatgcaattgggcacaaagctgttcggagagcagtaagcactgcgccatacagatgttttttaagagcgagacctattgagcattaagccctgggtttccgtttgtgctttgtagaatgacactggttttggtttgcaatttcttcaaacttctcagaggaaatcttggactgaaaattaatttcgtgcttattatcttactgcaatgtaatgaggaataaatatatgttttcagaagg

SEQ ID NO: 63961 - DNA, 600 bp, Chicken  19866894329363_4
ataaaccaatttctcagctcttaccaaacaatttaaatggaagctaatttaaggcctctaaaatgaagcgatctcatgtcttgatgggcaaacattgctaattgcttttcaataaataagagtgaaatcatcatctctggtgcagaaataattttagtcacagcgtgtagatggcatcattttgaccccattaagaccggcagcaaggactgctgtkgtggctcttggtgtgccctgagctcgagcatcagccttgcacccacctgtrtgtgagtctcrtggccaggttggcagggttgytctttattttacaggcagaggcgttccagatacagggagagatgcaattgggcacaaagctgttcggagagcagtaagcactgcgccatacagatgttttttaagagcgagacctattgagcattaagccctgggtttccgtttgtgctttgtagaatgacactggttttggtttgcaatttcttcaaacttctcagaggaaatcttggactgaaaattaatttcgtgcttattatcttactgcaatgtaatgaggaataaatatatgttttcagaagggaaaatgagctttcagaagct

SEQ ID NO: 63962 - DNA, 600 bp, Chicken  19866894329372_1
ttgtggtgagccttgcagcacagcacgggagctgcttcccagggctgctcagaaggcgggctgaacatttggtgttagcaccttccaactctgtcgtttgcattgcctcttcccaattaaggatcctatggaaacccagatgtgtaacataaatagttgggttgactccactgagctgctcctgggcaggctttgttttatgagcaagaactgcttctttggggctttcaccttaccagctcctaccattggcagtgttatttttaaacagttctacaaatgcatgctgtaaataaaacycctgccatgaacacrgagaagagcctttccacagagcagtgcacagagcctctctgtgagcgagaaaactgttttcccttgtctgtcagatcagctcatttagattatttaagtcaagtacaattttgaaaacaatctgctttgctcgtgacagcttcttcattgtgcataatgatgctgaatgtaacaagcagcaaagggttattgacggcaaattttccacatactcaggcctgtgcttctcatgtcgacttataaaggagccccttgctttattttccccagacattaggcagaaag

SEQ ID NO: 63963 - DNA, 600 bp, Chicken  19866894329372_2
cagcacagcacgggagctgcttcccagggctgctcagaaggcgggctgaacatttggtgttagcaccttccaactctgtcgtttgcattgcctcttcccaattaaggatcctatggaaacccagatgtgtaacataaatagttgggttgactccactgagctgctcctgggcaggctttgttttatgagcaagaactgcttctttggggctttcaccttaccagctcctaccattggcagtgttatttttaaacagttctacaaatgcatgctgtaaataaaacycctgccatgaacacrgagaagagcctttccacagagcagtgcacagagcctctctgtgagcgagaaaactgttttcccttgtctgtcagatcagctcatttagattatttaagtcaagtacaattttgaaaacaatctgctttgctcgtgacagcttcttcattgtgcataatgatgctgaatgtaacaagcagcaaagggttattgacggcaaattttccacatactcaggcctgtgcttctcatgtcgacttataaaggagccccttgctttattttccccagacattaggcagaaagtatttcctaacatgt

SEQ ID NO: 63964 - DNA, 599 bp, Chicken  19866894329373_1
  misc_feature (1)..(37): n is any nucleotide
nnnnnnnnnnnnnnnnnnnnnnnnnnnnnnnnnnnnncttttcagtaggataaaaatgtgatagacaggtgaaagtttggaccttcaaatgtgcttatgttcctaactggattttgttttcagttcttgtgacccacctttgatatcatttaaagagaaagcttaatctgaattattgtggatattccaatacagcatgggcatagggaaagtgggaagttttccttaactccatacagttcagttaatgtatagaaatgaatcctgtgctgcagggacttcctgccacttctgaaagcyggttacaccccaaggaagggacacacaaggaaatagtgctgtgcctttcttctctcttactactgatggtacaggaagacacttggagtagtgcggggtattaagtgaatgtcaagcagggaggaagagacaaacagaggctggacatccaaaagctttgtgagatattttgttttgttttgaaagtcagaaaaatattattttgttgttttggaaggtcttcatactccactcgctgcaaaggtacaagcctgactgagaccaactttactattcttagaggtctgggttgctttgtg

SEQ ID NO: 63965 - DNA, 547 bp, Chicken  19866894329385_1
  misc_feature (1)..(54): n is any nucleotide
nnnnnnnnnnnnnnnnnnnnnnnnnnnnnnnnnnnnnnnnnnnnnnnnnnnnnnaaatgggggattggctaagagaaaacccgtgattttcggttaaatgggggattctcgaagagaaaacgcgtgattttcgcttaaatgggggattcttgtagagaaaacgcgtgattttcgggttaaatgggggatttgcgaagagaaaacgcgtgatttttggttaaatgtgggatttgcgaagagaaaacgcgtgattttcgggttaaatgggggatttgcgaagagaaaacgcgtgattttcgsttwaatgggggatttgcgaagagaaaacgcgtgatgttcacttaaatgggggatttgcgaagagaaaatgcatgattttcgcttaaatgggggatttgcgaagagaaaacgcgtgatttttgggttaaatgggggatttgcaaagagaaaacgcgtgattttcggcttaaatgggggatttgcaaagagaaaacgcgtgattttcgcttaaatgggggattctcgaagagaaaacgcgtgattttcg

SEQ ID NO: 63966 - DNA, 544 bp, Chicken  19866894329385_2
  misc_feature (1)..(51): n is any nucleotide
nnnnnnnnnnnnnnnnnnnnnnnnnnnnnnnnnnnnnnnnnnnnnnnnnnnaaatgggggattggctaagagaaaacccgtgattttcggttaaatgggggattctcgaagagaaaacgcgtgattttcgcttaaatgggggattcttgtagagaaaacgcgtgattttcgggttaaatgggggatttgcgaagagaaaacgcgtgatttttggttaaatgtgggatttgcgaagagaaaacgcgtgattttcgggttaaatgggggatttgcgaagagaaaacgcgtgattttcgsttwaatgggggatttgcgaagagaaaacgcgtgatgttcacttaaatgggggatttgcgaagagaaaatgcatgattttcgcttaaatgggggatttgcgaagagaaaacgcgtgatttttgggttaaatgggggatttgcaaagagaaaacgcgtgattttcggcttaaatgggggatttgcaaagagaaaacgcgtgattttcgcttaaatgggggattctcgaagagaaaacgcgtgattttcg

SEQ ID NO: 63967 - DNA, 600 bp, Chicken  19866894329389_1
tgtggtttggtcttcctctgtcccaggccaaaaacacagagaagcactgacgacctaaactctgtgtggaaaaagtgactcatgctctttttttgtaagatgctgcattttctgttctccttttatgcttctgaaaaaagagcatgtatagatccagactgaatgaagtcaaggaaacaatattatggtcttttgactagcatggaaaaaaaaagtgctgacacatttgtcatctcttaagcaataagtgaaaaacaagctgtgcccttaagctctgggaaacttattaccatttttttwaaaataaaattcccaagttaaatgctttggcagtgaaatttctgctcaggaccctggtccattactgttctcattcatgctggctttcgggaggtaaaaacccccacttgtggggagtgagttcagatgggaagctctgctaggcagttatcctccagatgaccttggctttgcagatcaaaaggtgcaaaagcaactgctgctttgttttatcagcttatgggatctctgaaaagcagaaatgcctgtgaagatgcccagaggcagtagccaagggcaggggtcagcactgtatcctaa

SEQ ID NO: 63968 - DNA, 600 bp, Chicken  19866894329395_1
tgggcatgcagagaagggatgggtgagcagcagggagcagtgcagaaggagatgttgcctccccccgtctccctaaggacccattattaaataactgctagagtaaattgtcagctgctgcttctgatagtcctcatcttctcaggctgagctctgggagtgagcagaaatgcacttcaccagctgtgagtggaaaggacaccacgggccacggagcctggcctctctgcagcctgttgtccatggtgatgtctgggtgtttggaaccccttccccccaaaagaaccaaggctgtctgcrcaaatgtgtgaagtgaaacacagtagggagcatggacgatgcctgccctgttgtaagctggtgggggtggaaataccctgtgtggggagaggtgtcaaggacctgaaagtgacagcatcttcaggcagctgggtctgaaggaggaggagatttccctacagcctcaacctgctgcgctctcctcttccttggtttcccattatgtgcaaaaagaaggtaagcaatgtcatctctgagggggggggaggtcattcattcagtaatgacaatcaaactgttataaactggaaaatcgctagg

SEQ ID NO: 63969 - DNA, 600 bp, Chicken  19866894329396_1
tcctctttctctcttttacaccacagcagtcatccccagcacagcaacccatctatcagcatgagaagggtgaatgttgctccctagtcactctttctatctcgctacagcttttaacattcctctactctctcaccctatctgcactttccgtcatcaacagccagtcatattaaggtgagataagagaattaaagcactgtgtgatacatcatcataaatgtttgagtcactgtggtctagtgattaaagtctccctctctattttacataggcttcttttgctagtatttaaacacmaagattcaagaaatcttggttaaaaaaaatatatataagtatacaaaatatacatatatttttaccaagtaatttttctctagattaacatgcacctcaatatgtggtactacatctgcagatctccaaacaagttgaggaatagagctcagtgtcgagccgattctataaaaggaaagtgaaaagttaggacaacattgtactgtggtggttaaactgaacaagcagggaaaaaaaaaaaacaagaacttgtgctataactctaccagaacttccacactgctaatgatagtaagtctg

SEQ ID NO: 63970 - DNA, 406 bp, Chicken  19866894329400_1
ctgcgacgcgcctgggctgctgggcgaggacggcctcaaccacagcttttacaactcacaataacccccccggagcccaccccgagccccctccccacggtcgcttgcagctccccgtgctggggatgcaccgcaccggcctcaccgcgcgcccggggctgctgggaaggggccagtgggggggccccggagcagggaaccttgagctggggggtcctggcctggccccgccgctgccccacacatgtgaagccaccgaggcacaataaaacccacacgcaaacccactgcttccgctgyggggaatggtgggggggggcagtgggacgctgtggcacggaggtgagatgagacagacaaggcacagggggggacgagaggatagcagaggggataggagagcaag

SEQ ID NO: 63971 - DNA, 600 bp, Chicken  19866894329403_1
caggggtatgatctacctgcactccaagaacatctaccaccgagatctcaactccaaggtacacagctggaagggagctgcgttgggggaccccacagtggccatgtagggcagtgacctggagagctcaggttgtgggtcctctgctccatacgaatagcgctgtgggcaaggaagatttcttggtaaaacctgccatggcactgtatttattgcttcccaaggaggaggcccagacagagagaaaaatacattcctcctaatgttattgctgtaagaaaaggaactaaatgcaaacaygtgcaatgcaaacatggtattctctgcctacagttgcaagggaagctctgccagatgtacatgttttccttcttttgccctccacttcttttttccctcctttgccctgatctgctgctgcttgatggagacaagaacagtactgtggctttgtcactgtcgggtttgtcggtgggcacagggctatggtgaggcctttcctctgacaccgatgtggcagtgggaatgcggtgaggccatgactttttgatttcccttcagcaaaagctgcacagcaagcatgagctgaggggttggcca

SEQ ID NO: 63972 - DNA, 600 bp, Chicken  19866894329403_2
ggccattggcctggtgtgtctgacctcagtgatgcacagatgtggagccctcaggtgctcgcagtcattgctgggtggttggtggtgtatctcttacacactatttttgttagagctctgtgagcttggtaagggaaactgagttattggtggagcttggcagtgtggaagccattcaagcagtacagttctgaaagacatcagtacaagaagcaaacctatctttgtaacctcagaccgtttgcttgtttctgttccaaaccacgaagccacaaaattcaggaaagacaaggcagtagyccagtttgctttgaccacagcttacctgctgtgtgagctctgaagccatctgaggtgcaatttcccatttggtgatgaccgatgagctcagagcctgcttgtggaaagcagagagtgctggtggactgcacctcacctttcagtgtcactgcagaggtgcagccctggaagagatttgtactggggaaacctgggaaacctgctgggaggggggctgaactgatgggaacctttaccttgtgtctggttgttagtgagaaccggagccatctgctaaaagaggcaagatttaagttagat

SEQ ID NO: 63973 - DNA, 600 bp, Chicken  19866894329407_1
gaatggagagagcaacctcacggagcatctctttcagccctaatgtaagtgtgctttccaaagatggaagtcccataattgatccctcctgtatcactgtccacagcagtgattgccaaatcaaacatcttagtagtagtaacacctcgagggctttgcagttccttttctgaaggagttggatcagtacttcagcggtacagtactgtaaatgtactacagtagtgtttaaaatgggtgtagacatttctgctcatgatgttcactgcctgtaaacttctggtttctggcgtacacttsttcgctgaaacttaaagttgcagctttgcttatgttttagtaatgcagaactggggtggggtggttattcagcattctggattaagtgtcttgtcaatacaagtaaacctcttgaagttgttgggtctttgtacatcctttacctttctagtatttaagaaatcaatttattttccagaatacaatggcaaagccagtacaacagaagccagcaagccatgttgttaaagaaccatcaatttctccaggaagagaagatgacagaaagggaagtccctatgggcagtgggttcctgtcaa

SEQ ID NO: 63974 - DNA, 600 bp, Chicken  19866894329411_1
aggtaagatgcaacaaaggtgttgtctttttaattagggagggtatgattggaaagtggtaacacctgctgctcagtgaggtgtaggcacctgcacactctgaccactcaaaggctttgtttgtgcctttctgcttgcaagatgcagacttgatggagtggcaatgtgggatccaggccaagtgttgctggaattccttgtgctgtgagactgccttgctctgtcatttgttttttctcatactgcagcacataatctgctgttacagactaagcaaacacactgtgttgtgaaaggctwtattccttggctctctctgctcacttagatattcatgtacccttcatgagcaatgtagcaatcagtaagtcaaggaagcatttaggctgtcaaatcagataagctgttagtgatgctctgttttatcatattttgagctaaaattgagctgcagttaatgtgtaaattattccagtagctcagaggtaagcttaagataaacctttctcccttatagtcctggaattggtctttctactgttttgacttcccccttttctagtaaggatatgaaaacagaaagcctttctaagctcttct

SEQ ID NO: 63975 - DNA, 508 bp, Chicken  19866894329414_1
ttaattgcaggttagtcatcagcctcatatcctggggcacctttaagagcaaggcagtgggtgcctgcagacagaggtgcacccacgctgctgcccagtggatgggtggctgcctccctcccttctgcagttgcttctgagccccctacagcgtctgcacccagagaactacagagcagtgtccttggcagaaccagtgatggggctttgagtttttgggcatgttgcttattctcagactttgcaaacagatttggtgctaaagaggaacccctcggatccttaccaatcaacgttcayggagggctacagaagttgcccagggcaccttgctcgcactgacagcatttctgccgagttcagtggcaagcaaatccatgtcattgtgcctagctggtgagatgcacccatccaccagcacagatgaggaaacacaagcgagctgcaacaggccaaggcaggacctcctgtacacaggcagcagtgtcacaagacacagtctctcagt

SEQ ID NO: 63976 - DNA, 600 bp, Chicken  19866894329427_1
tgtttttttcattttaattttatcattattgggaagaagctttagtaattgcatactcttgtgtgagtgttaatattactttaacttaactattttgacatgattgttaatgttttaattagactaataataaaaaattggatgtgtgtgtatgcatgtgtttatttagtctacataaatcacccagctattcagtctgcctccctgcctttgaggctcggttgtaatttcaacacaacatcttgaagaagctaatttagtcacgctgaaaattttatcacacattatccttgtattttrtttcttaaataagtggtttctttacttcaaaaacaacaatgaaagaccacagattgtttagcatgctgacactggatgacaataaacaaacatgctatttacaaaagtggtcatctctgttgatgaatctgtagaaaatatttacatttatgaaacagtttgacatttgtacacttcccattttgacttgtgtgtacaaggcttatactgaaaatgttagagcataggctcctccatttctctaggaatcactacaaagtactttttactcttgtattcttgtcttcacactgagctagc

SEQ ID NO: 63977 - DNA, 592 bp, Chicken  19866894329427_2
cccatccccagcacatgctctgttcaagttctgtgtgagatttctacttacatcattaaaacatttctggactgagtatcatgcaactggaaaaaaatgggacagaaaaaaaagactaaaaatgcattggaaacctttttagcagcatttattccctttcaaatattgtaaataatatattgagttaagcagtgggtttaactgacaggttctgcagaaggctaccatttgcattactgcaaaacgagctataactgagctatgctggatataatggcttagtattcttttgttcttttycttaaagacagattacatatgtaatttaactattttaccatactttctaaaccaggcacatctaacctgcaggcagcatgcggcctggtcccacccaccctgtggccacctcccaccccacaccgtcatggaggcagctctcctcaccaagtggcctggtccagccccaggtgcacacccattgctgaggaacagccaaacaccagcgtgctaataatgttgaaaccatggcatagagtgggcgcagtgcactgttagcttgagttatggcaaaaaatctccaataagcaca

SEQ ID NO: 63978 - DNA, 473 bp, Chicken  19866894329432_1
ccgcaccgcatacgttccagctgctgttagtggggcttagcagggctgaggactgagccgagcaaattgccaggcccggagatgggaggatctcagaactcttgctgcctcatctcccttacgggctggtaatttgattctcgggacctgaaatggggtatgcgtatttcaaattcctttcaaaagtctttcccatcctaactatgttgtttagggattaaaacagactttcagtaacagagtggcccattcagcagctttacaataattacaatgctgatgttgatttaagttagtttyttgagcaaattgtttctaatggtatttgcagtagggcagggtgcctggcagccacactgtgtgcrtgtcacatgccggtgcttcattctcttttcctcccatgtgcaggcacacaaaaagcactggctttggagaaatccaacttccccacccctgtgccccaaaaaagttta

SEQ ID NO: 63979 - DNA, 408 bp, Chicken  19866894329432_2
attgccaggcccggagatgggaggatctcagaactcttgctgcctcatctcccttacgggctggtaatttgattctcgggacctgaaatggggtatgcgtatttcaaattcctttcaaaagtctttcccatcctaactatgttgtttagggattaaaacagactttcagtaacagagtggcccattcagcagctttacaataattacaatgctgatgttgatttaagttagtttyttgagcaaattgtttctaatggtatttgcagtagggcagggtgcctggcagccacactgtgtgcrtgtcacatgccggtgcttcattctcttttcctcccatgtgcaggcacacaaaaagcactggctttggagaaatccaacttccccacccctgtgccccaaaaaagttta

SEQ ID NO: 63980 - DNA, 600 bp, Chicken  19866894329434_1
agaaattttcaggttgttgctccatcccattctgtactgagtgaagatgagaaccatggctgctctgtgctgtggggaacctaatctgattgtcatgttctcagaatacatcttggtacatgccctggaaggcagaggggtagggaacgtttgtgattctcccacaaatatgagggttgtggcgaatcatgtgtcactccaagatttaagatcttctgggcatgcacagcatccatgcataacagctatacaatattcattttgcttttaaaaacttaattgcttcccaagtcaggcagmaggtgagctcaagytgggcagcctggactttaggtctgggatcctgacctggcagtcagatgttcaaacttctcaatggatgacaactaatgtttatggcaaagtaggggctatrttttagatggaatctctgtaatattcatacgaatatgaatgattccagctttaccatayacgtgaattttgagctaggccaagtccatttgagacagtaaacatgtaaagtgaaaagaaataaggctgggaaaagaaaaaaagaaaaaagagaagtgagactacttctctgttgccagaatgtca

SEQ ID NO: 63981 - DNA, 600 bp, Chicken  19866894329434_2
tgttgctccatcccattctgtactgagtgaagatgagaaccatggctgctctgtgctgtggggaacctaatctgattgtcatgttctcagaatacatcttggtacatgccctggaaggcagaggggtagggaacgtttgtgattctcccacaaatatgagggttgtggcgaatcatgtgtcactccaagatttaagatcttctgggcatgcacagcatccatgcataacagctatacaatattcattttgcttttaaaaacttaattgcttcccaagtcaggcagmaggtgagctcaagytgggcagcctggactttaggtctgggatcctgacctggcagtcagatgttcaaacttctcaatggatgacaactaatgtttatggcaaagtaggggctatrttttagatggaatctctgtaatattcatacgaatatgaatgattccagctttaccatayacgtgaattttgagctaggccaagtccatttgagacagtaaacatgtaaagtgaaaagaaataaggctgggaaaagaaaaaaagaaaaaagagaagtgagactacttctctgttgccagaatgtcaaccaaatttttatt

SEQ ID NO: 63982 - DNA, 600 bp, Chicken  19866894329434_3
gtacatgccctggaaggcagaggggtagggaacgtttgtgattctcccacaaatatgagggttgtggcgaatcatgtgtcactccaagatttaagatcttctgggcatgcacagcatccatgcataacagctatacaatattcattttgcttttaaaaacttaattgcttcccaagtcaggcagmaggtgagctcaagytgggcagcctggactttaggtctgggatcctgacctggcagtcagatgttcaaacttctcaatggatgacaactaatgtttatggcaaagtaggggctatrttttagatggaatctctgtaatattcatacgaatatgaatgattccagctttaccatayacgtgaattttgagctaggccaagtccatttgagacagtaaacatgtaaagtgaaaagaaataaggctgggaaaagaaaaaaagaaaaaagagaagtgagactacttctctgttgccagaatgtcaaccaaatttttattctcagtctcacctgctgaaagtatagagtatatagataaatctgagaagcttaaaagatgcactgaaatgacatattagctcaagtctcccttttatatat

SEQ ID NO: 63983 - DNA, 600 bp, Chicken  19866894329434_4
ggttgtggcgaatcatgtgtcactccaagatttaagatcttctgggcatgcacagcatccatgcataacagctatacaatattcattttgcttttaaaaacttaattgcttcccaagtcaggcagmaggtgagctcaagytgggcagcctggactttaggtctgggatcctgacctggcagtcagatgttcaaacttctcaatggatgacaactaatgtttatggcaaagtaggggctatrttttagatggaatctctgtaatattcatacgaatatgaatgattccagctttaccatayacgtgaattttgagctaggccaagtccatttgagacagtaaacatgtaaagtgaaaagaaataaggctgggaaaagaaaaaaagaaaaaagagaagtgagactacttctctgttgccagaatgtcaaccaaatttttattctcagtctcacctgctgaaagtatagagtatatagataaatctgagaagcttaaaagatgcactgaaatgacatattagctcaagtctcccttttatatatttaacccttttgatctctcaggcaaaacagtttttttgaagtcatgagaatgactgact

SEQ ID NO: 63984 - DNA, 599 bp, Chicken  19866894329435_1
  misc_feature (1)..(26): n is any nucleotide
nnnnnnnnnnnnnnnnnnnnnnnnnnttttgtgcctgagactttgtgcagtacagcttggtgcggaatgcagataaataataccattcagaatgcagaagactcttgtactctcattaaaactatggcctgtcacagtctcaattatgacttatttcacatgctaaagacacaatagaaagtttaatcttggtgacagttcagatggaagaaagaagcaaaactcttcagtttttgcttgaacagaatattgttctgtcttatatatatcatttcaactgaaaatgagaatttcagacawctacattttagcagcattatttgaaaataaagccttactatgatwaaatcatgaatgcaaaagctgagttctaatttgtgcatggacattttgatggactgtggtcaatattaatatctttcagtttgatctagataaatgacttttgaattccacattttcacctcaaagctcttttataattgtcatattatacatgagagcacacttcaagatgaagtgactagatttttatttagctattatattcaaaactgtatagatatggttgagctagctagaattaacttgtatacata

SEQ ID NO: 63985 - DNA, 600 bp, Chicken  19866894329435_2
tgcagtacagcttggtgcggaatgcagataaataataccattcagaatgcagaagactcttgtactctcattaaaactatggcctgtcacagtctcaattatgacttatttcacatgctaaagacacaatagaaagtttaatcttggtgacagttcagatggaagaaagaagcaaaactcttcagtttttgcttgaacagaatattgttctgtcttatatatatcatttcaactgaaaatgagaatttcagacawctacattttagcagcattatttgaaaataaagccttactatgatwaaatcatgaatgcaaaagctgagttctaatttgtgcatggacattttgatggactgtggtcaatattaatatctttcagtttgatctagataaatgacttttgaattccacattttcacctcaaagctcttttataattgtcatattatacatgagagcacacttcaagatgaagtgactagatttttatttagctattatattcaaaactgtatagatatggttgagctagctagaattaacttgtatacataggacagtataaaaattctttgagagtactcagtataaacatatttg

SEQ ID NO: 63986 - DNA, 597 bp, Chicken  19866894329435_3
tacataggacagtataaaaattctttgagagtactcagtataaacatatttgcatttaggccagcagaatataagtaaagttcatttaataagattggttgccacagttcctacttgctttctgacctcaaattacagctgtgttaagaagtcctagttactgccactgtgttcatttgtatccattgtgttagcaaaataatgcatataatcaaagtgctcctacactaatgaagcattcttgttgtttttttttcttttgtttatggtttttttttgtttgtttgtttttctgttgtwttttttttttaatagaattatagccaaatctacagtgaaagaaaaaaataaatccataaaaaattaccacagtataataatgcagtaatttaacacaaataacattttttwaaaaaatgaaattcaaattgtatatttaatctgattttattttttttttaaatctttgaatttactgtaggcaaatcaactaagagttaatcttcatgatgggataggtagtgtgcactaaaaaccaattttcaggttggtatgatactctagagataataccgagacagttagtaataacaacag

SEQ ID NO: 63987 - DNA, 486 bp, Chicken  19866894329435_4
tacttgctttctgacctcaaattacagctgtgttaagaagtcctagttactgccactgtgttcatttgtatccattgtgttagcaaaataatgcatataatcaaagtgctcctacactaatgaagcattcttgttgtttttttttcttttgtttatggtttttttttgtttgtttgtttttctgttgttttttttttttaatagaattatagccaaatctacagtgaaagaaaaaaataaatccataaaaaattaccacagtataataatgcagtaatttaacacaaataacattttttwaaaaaatgaaattcaaattgtatatttaatctgattttattttttttttaaatctttgaatttactgtaggcaaatcaactaagagttaatcttcatgatgggataggtagtgtgcactaaaaaccaattttcaggttggtatgatactctagagataataccgagacagttagtaataacaacag

SEQ ID NO: 63988 - DNA, 599 bp, Chicken  19866894329436_1
  misc_feature (1)..(61): n is any nucleotide
nnnnnnnnnnnnnnnnnnnnnnnnnnnnnnnnnnnnnnnnnnnnnnnnnnnnnnnnnnnnnttttttttttgtctaaattagcctatgtgttttctgaaagtgaaacatagcattcatttatacttacacaccaatctaaagtgactgtaccttttgatacagacattgcaaatgctgcctttctttagaatgaactggaagatttagcatgtaaaatggcagtacgtgcttttgccacatggtggcaccaaggaaatagaaattgacatttataattagaaaatgtaactaacgtaccrgaggaaaaaagaaccatcatccatcccttgtgttggaaacttctctgagaattgctgtggaagtgaaatgcctccatacagtgattagacatatctaaaagataaagatctctctgttgccagccgctcctttaggcttggcacaagaagttcttacttcttaagtctacctcttcaaaatcacgttatgagtaagtttattactgtgagtttacggacttattgtttagtttggagtagcaggcttccataaaggcagctggggcagctcgtctgtcacgctcccgatgacctcagct

SEQ ID NO: 63989 - DNA, 600 bp, Chicken  19866894329437_1
ataaagactttacacagtcagaaatatatcaaaagatttaaacactgaaaatcacattttcaaagatctatcactgtgtactggcatccatgttagttcatctacttttataatgaagcttcctcaaagattgtctttaatatctaatgtgtagcaagtaaattttctaaagtcaaagatatgcactgcaaaggcagtaagttgcatttgaagctggggtaatttgtctgctaaccattatttggtaaaagttatgtcatctgttggaatggtccagtctgctgggatggaacagaatcmgatgactcagaagtgctgtgcttcaggccactttgaactaccacaagtacaatccaaacttcagcactttctgttcrgattaagaaaataaatcccatcctttcsctctggaataagacgtctcttttaaaaaacaacttccatattatacaggattcctatgagacaaagaccctgagttcccttgttaaagtcaacgtaaaattaacatgctgacacacttctttacctgttgacataggggtgaatatattttttggaatgacaaccctatcttctgaatttcgtgcccaatcaacc

SEQ ID NO: 63990 - DNA, 600 bp, Chicken  19866894329437_2
gtactggcatccatgttagttcatctacttttataatgaagcttcctcaaagattgtctttaatatctaatgtgtagcaagtaaattttctaaagtcaaagatatgcactgcaaaggcagtaagttgcatttgaagctggggtaatttgtctgctaaccattatttggtaaaagttatgtcatctgttggaatggtccagtctgctgggatggaacagaatcmgatgactcagaagtgctgtgcttcaggccactttgaactaccacaagtacaatccaaacttcagcactttctgttcrgattaagaaaataaatcccatcctttcsctctggaataagacgtctcttttaaaaaacaacttccatattatacaggattcctatgagacaaagaccctgagttcccttgttaaagtcaacgtaaaattaacatgctgacacacttctttacctgttgacataggggtgaatatattttttggaatgacaaccctatcttctgaatttcgtgcccaatcaaccattccttttcttcctttcatcgggaaattgatgtcagttagaacagatgcagcaggaagcttctgaatgctagccac

SEQ ID NO: 63991 - DNA, 600 bp, Chicken  19866894329437_3
ttttataatgaagcttcctcaaagattgtctttaatatctaatgtgtagcaagtaaattttctaaagtcaaagatatgcactgcaaaggcagtaagttgcatttgaagctggggtaatttgtctgctaaccattatttggtaaaagttatgtcatctgttggaatggtccagtctgctgggatggaacagaatcmgatgactcagaagtgctgtgcttcaggccactttgaactaccacaagtacaatccaaacttcagcactttctgttcrgattaagaaaataaatcccatcctttcsctctggaataagacgtctcttttaaaaaacaacttccatattatacaggattcctatgagacaaagaccctgagttcccttgttaaagtcaacgtaaaattaacatgctgacacacttctttacctgttgacataggggtgaatatattttttggaatgacaaccctatcttctgaatttcgtgcccaatcaaccattccttttcttcctttcatcgggaaattgatgtcagttagaacagatgcagcaggaagcttctgaatgctagccactagaaggagaaataaaaaaatcaaataa

SEQ ID NO: 63992 - DNA, 600 bp, Chicken  19866894329437_4
tttcatactttaaagcatcaaatagtgataaaagtaaaacaacaaaaaatattcaataatacatttcaagtaaagtaggaatttgtaggacattaaccaccattgaaagtgtcattttctgtgtattatgcagttctattatggattatcatagaattatagcatcatgtgatttgtatgggacccttaaaggtcatctagtccaactcccctgcaacaaacagagatacctacagctagatcaggttgctcagagccctctccagcctgaccttgaatgtctccagggatggggtatcwaccacctctctgggtaacctgtgtcactacccttattgtaaaaaaacatttttcttatatccaaactaaatctttcctcttttagtttgaaaccatttccccttgtcctatcacagcagactctgctagagtctgtccccttctttcttgtagcccctctttagatattgaaaggctgctcccagttcttcttgatatgactatgttgcattgatactattacttgtcagctagattctcctcttaacagggagtcttaaatgtacttgctcatactctggaattcacgttaggacacag

SEQ ID NO: 63993 - DNA, 600 bp, Chicken  19866894329439_1
ttcttgtcacaaccatatctgagtgcttcataatcattaatttatttacaaaataaccttgtgaggccatagaatgagaaagaagatgtagtccctagcagtgtccacatcattattttcactgatcgatgttgaatacaacaattaactttactagataagcatcctaattttgcaggtataattggatatccaaagtaaggaagtatgaagcagagtacaaaggactgaagggcaggttgagatttgtagctgcagatgcaaaaaaaaaaaaaaaaaaatcaaaaatgatggtagaargaacttaaaggcctaaagggtaaatatacatttgtttttattttagctacctgacactggatgtataagccattctcatactttgcagtgtgagcaaccagaaaaaatgaagttctaccagattagtgctgctattagtgctcactatagtgagatttaaatctgtcttcttaaggatctgagtgatgctgtagaaatgcaatacatgctcagcacgcattaatttcatccaaataaagtagatgttccgcaactacagaaatcagacccattacagcacgtgaatacgtagctaacgct

SEQ ID NO: 63994 - DNA, 600 bp, Chicken  19866894329442_1
aactaaaaataccttctagtcactatatccctttctacaaagtctcagaaattagatcaccatgtgccaaaaatctctacagaacagacataagaataagctccagaggaccaattcttaactaagcaggcatctcagctcaaagggtagcagcctagtctccaggcagtactgacactgctggttacagtagcttcagaaatgaagagagatgacaaaggagagaaatatgggatgcaaaaatagagaattattccttcatagattatctcatttttttgaatgctgcaggttggctgygctgtgctgcttctgttctgtttttcaaggctttatctgtcaagcaccttaaaaacatagctaaatgagcagtcagaaaaaaaaacccaaaacttttggttgttctgactcttctccttttgttttctgttaacaagtcattaagattcacatttgaagcacttctgtgcaacctggaaaggcaaggattttaaaagggggatagcaagatagtaatcagctgactctggaagacagtacgttaaggaatagtcagtcaatctgagcaaggctagagataacttcatgagtattggcact

SEQ ID NO: 63995 - DNA, 546 bp, Chicken  19866894329468_1
  misc_feature (1)..(27): n is any nucleotide
nnnnnnnnnnnnnnnnnnnnnnnnnnncccaaatccaaacccagtatctgagtgttggccaaacactccttgaactctggcagctcagggccgtgcccactgccttgggcagcccattccatacccaccgccctctggtgcagaccctttccttaatggttcacttcccactgttctgccccaaaggaggaggaggaggaggagggatgggaggaaggtgggctcagcctccacatgaggaccgagggcaccacagccttggacatccaatgacaacattgggtcgtgttcttcagctcyccgtgagcagacatctgtgcatggaatacatcggagaggagcacaggagagcctgaaaaaaatcaattaagtgcacaatcactgacctcctgaaggagctcagctcctgatgttcagcctcccgctcgtggggcactgcagataaaaagagtaattaaaaacgaggcgagaaatgcaccattttctttcccttccctctccgcttctttctaagcaggagtttgtcaaaggcggccgcacaaaagg

SEQ ID NO: 63996 - DNA, 600 bp, Chicken  19866894329474_1
ttacttctttacctctgactttttgggagtgtatggcttagctccaaatgaaagagcagatttatttttaaagcatgcaacattagtgtgcactgaaataaactcaccagaacaatcagtgctcttgtttcagggaacgcgctcgcaaatggaacaagaggtgctgatatgacttactgccaggctccacacactgaaaggatcctagctggatttacacatgcagtgtgcagcatccagcattcaaaatagttggtcagcatttgcctttggaaatgtttttcatcacagcactccgcygatgtgttctttctgtctagattccccagtttgggtctgacaaacaagcacagtgcttccatttgcttatttcattttctttaaaaataamgttcacgtgaatctgaaaaatcttcctattaaatatgtatatacacttctcagcttgacagaaaaataatcagtcccattaaaatctacattgtgtgtcctatgctgacatatttgaaaggcagaactaaaatggttattggaaaatgcagatgcgttgcattcgtgaacatatcctttttcctttaagttttgttggaagttttccct

SEQ ID NO: 63997 - DNA, 531 bp, Chicken  19866894329474_2
actgaaataaactcaccagaacaatcagtgctcttgtttcagggaacgcgctcgcaaatggaacaagaggtgctgatatgacttactgccaggctccacacactgaaaggatcctagctggatttacacatgcagtgtgcagcatccagcattcaaaatagttggtcagcatttgcctttggaaatgtttttcatcacagcactccgcygatgtgttctttctgtctagattccccagtttgggtctgacaaacaagcacagtgcttccatttgcttatttcattttctttaaaaataamgttcacgtgaatctgaaaaatcttcctattaaatatgtatatacacttctcagcttgacagaaaaataatcagtcccattaaaatctacattgtgtgtcctatgctgacatatttgaaaggcagaactaaaatggttattggaaaatgcagatgcgttgcattcgtgaacatatcctttttcctttaagttttgttggaagttttccctatagatccaccctttttaaatt

SEQ ID NO: 63998 - DNA, 599 bp, Chicken  19866894329484_1
  misc_feature (1)..(115): n is any nucleotide
nnnnnnnnnnnnnnnnnnnnnnnnnnnnnnnnnnnnnnnnnnnnnnnnnnnnnnnnnnnnnnnnnnnnnnnnnnnnnnnnnnnnnnnnnnnnnnnnnnnnnnnnnnnnnnnnnnntgtcttcctgtgttttctggggaggtctgtccactccaagcctactggatgcattttactgtctttaaatcactcctactgagatcttaccccttggccctggctcttgaaatcttctatttttgtaagcagaaagccattcgtttccattattccaaggttgcagtctcacaaaatcttgaagygcacactgctgtcaaaaggaatgtccctctctcccacttttgtgccatctgtctgacaatgcagtgaggcagaccgggaagttactcctgctggaaacaaaccagctgtgttggtccacctcactgtatagcatcacgggtgaagatccragagagagaagtgagagtacttggttaagaagcagagagaaagtgggatcattttttgattcagtaaaaagcacacatttgcatcacaagactgcatcccaaaactatctccctgcctccagcagctcttttccttcatgactttaata

SEQ ID NO: 63999 - DNA, 600 bp, Chicken  19866894329484_2
ccaagcctactggatgcattttactgtctttaaatcactcctactgagatcttaccccttggccctggctcttgaaatcttctatttttgtaagcagaaagccattcgtttccattattccaaggttgcagtctcacaaaatcttgaagygcacactgctgtcaaaaggaatgtccctctctcccacttttgtgccatctgtctgacaatgcagtgaggcagaccgggaagttactcctgctggaaacaaaccagctgtgttggtccacctcactgtatagcatcacgggtgaagatccragagagagaagtgagagtacttggttaagaagcagagagaaagtgggatcattttttgattcagtaaaaagcacacatttgcatcacaagactgcatcccaaaactatctccctgcctccagcagctcttttccttcatgactttaatagtaagcctacaaagacgtggcctcccaagctgttccctcctggaagccacaaaaccaccagctgtttgcagcctgaaggtcagtgttgtctaaacaggatagctttagttagcaaatggaaaacagccctgtaccaaaaatgactgtggga

SEQ ID NO: 64000 - DNA, 599 bp, Chicken  19866894329489_1
  misc_feature (1)..(144): n is any nucleotide
nnnnnnnnnnnnnnnnnnnnnnnnnnnnnnnnnnnnnnnnnnnnnnnnnnnnnnnnnnnnnnnnnnnnnnnnnnnnnnnnnnnnnnnnnnnnnnnnnnnnnnnnnnnnnnnnnnnnnnnnnnnnnnnnnnnnnnnnnnnnnnnnctgtggtctgcttgtctctgttctgctctcttttagaagtgataccagactggtctttgagctgattgaaatgatggttatattctgtgcctgcacagcaccagtagctgcaactcaggctgtggcactgccattgtcagtgccccgagctgtgasagggcttttctgcctattgtaatttgtcagaaactatgaccttcattcagattttgcttttgcacattgccccgtgtgagtggaggtgagatggtgagagccctggtttccctcgtacagaactaagaaatgtttgtcaaaaactttgttgtgaattttgtgaagtgctgtcaacacaacaggtttttgtgtcgtccgtgcttcacttcttgttctaaaaacattcaggatgaagcttcgcatttgcatttagcacagcttattttactgttatctctgtgtgtagagggaaatgatgc

SEQ ID NO: 64001 - DNA, 599 bp, Chicken  19866894329493_1
  misc_feature (1)..(44): n is any nucleotide
nnnnnnnnnnnnnnnnnnnnnnnnnnnnnnnnnnnnnnnnnnnnatcaaagttatcaaagtttgaagctgaagattggcgggggagggggggggtttccaaaggccctgagtggccatagacagtcgctgggttaggtggctgcgcactgtgccttagaaaactggcctgcaactgatgttagtggacattaagcacctcatgcttaaggtctgttccagtgtagtgcactggagacatgtcaaggtgcttgaaaaaatcaacagttgcaatccaggctatgccttgccattcttctacwtacgatgacacaattaattaagcatgtttgcttcgcaataargtgaatagctacaggtaagttaaagctcactttctgctctggttttctggtttgttttggttcccttcccccaagtctcattcacttaatagacattcttccacaaagaattcatcttaagagatttatctgctaatatcaggcacacaaacaggtctcagttaaaggccagttcatgaagctactggcagcagaaatgaacctccaatagtaataaaaaaaaaaatgattaaacttacaaatctaaaatattgtta

SEQ ID NO: 64002 - DNA, 599 bp, Chicken  19866894329493_2
  misc_feature (1)..(2): n is any nucleotide
nnatcaaagttatcaaagtttgaagctgaagattggcgggggagggggggggtttccaaaggccctgagtggccatagacagtcgctgggttaggtggctgcgcactgtgccttagaaaactggcctgcaactgatgttagtggacattaagcacctcatgcttaaggtctgttccagtgtagtgcactggagacatgtcaaggtgcttgaaaaaatcaacagttgcaatccaggctatgccttgccattcttctacwtacgatgacacaattaattaagcatgtttgcttcgcaataargtgaatagctacaggtaagttaaagctcactttctgctctggttttctggtttgttttggttcccttcccccaagtctcattcacttaatagacattcttccacaaagaattcatcttaagagatttatctgctaatatcaggcacacaaacaggtctcagttaaaggccagttcatgaagctactggcagcagaaatgaacctccaatagtaataaaaaaaaaaatgattaaacttacaaatctaaaatattgttaatgtctggctcattttgtctctttgtggtcatatagcwtgca

SEQ ID NO: 64003 - DNA, 600 bp, Chicken  19866894329493_3
ataargtgaatagctacaggtaagttaaagctcactttctgctctggttttctggtttgttttggttcccttcccccaagtctcattcacttaatagacattcttccacaaagaattcatcttaagagatttatctgctaatatcaggcacacaaacaggtctcagttaaaggccagttcatgaagctactggcagcagaaatgaacctccaatagtaataaaaaaaaaaatgattaaacttacaaatctaaaatattgttaatgtctggctcattttgtctctttgtggtcatatagcwtgcacttaaaagcataaaaaaaaaaaggaactcgagcttctgcaaatctatgttgcctgaagtgaatgctacccttgcataacacatctcttctgtctgattaacctcactttctcattcccaatatatggcagttgcaatcttttggggttccctgtgacatcttggagtctttatagttccttgaggtctaacactgtggacaggtaaacaacagaatttaaaatgaaaagcatgctcaaaagtggcagagaacagagaaaacttcagcatgagatgaaaactaaacaacaacaacaa

SEQ ID NO: 64004 - DNA, 599 bp, Chicken  19866894329498_1
  misc_feature (1)..(104): n is any nucleotide
nnnnnnnnnnnnnnnnnnnnnnnnnnnnnnnnnnnnnnnnnnnnnnnnnnnnnnnnnnnnnnnnnnnnnnnnnnnnnnnnnnnnnnnnnnnnnnnnnnnnnnnntgctaaagaggatttatgtaaaagaccataacagcttaagcttcaataaataacatgtagtaaaggacagaaataacaaatatttcctaaataaaaacaacatttttctgtatcagaaagggaaataatacatgtaatgttaaaatcaaaatgcactttttaaacaaaggtaaatagaatgtatgcagctgctttktatggyrttataagtgcatatttgcatgaattgatgtatgctctgaggcctggaagatcagaacaaaaggagcctttcttgtctctgcccattttatcaggttccatgataaaaaagaattttttctttttccctgtttgaagctcaaatcacagtccctgagggagttcatgaggcagtggaggaggtgaaaataacctctatatttgaatactacgaaagtcaagacatcacaaaggtatattacagctgatatttcattcagtgttgtttttttggttttttttatcccgtattcc

SEQ ID NO: 64005 - DNA, 599 bp, Chicken  19866894329498_2
  misc_feature (1)..(98): n is any nucleotide
nnnnnnnnnnnnnnnnnnnnnnnnnnnnnnnnnnnnnnnnnnnnnnnnnnnnnnnnnnnnnnnnnnnnnnnnnnnnnnnnnnnnnnnnnnnnnnnnnntgctaaagaggatttatgtaaaagaccataacagcttaagcttcaataaataacatgtagtaaaggacagaaataacaaatatttcctaaataaaaacaacatttttctgtatcagaaagggaaataatacatgtaatgttaaaatcaaaatgcactttttaaacaaaggtaaatagaatgtatgcagctgctttktatggyrttataagtgcatatttgcatgaattgatgtatgctctgaggcctggaagatcagaacaaaaggagcctttcttgtctctgcccattttatcaggttccatgataaaaaagaattttttctttttccctgtttgaagctcaaatcacagtccctgagggagttcatgaggcagtggaggaggtgaaaataacctctatatttgaatactacgaaagtcaagacatcacaaaggtatattacagctgatatttcattcagtgttgtttttttggttttttttatcccgtattccttttta

SEQ ID NO: 64006 - DNA, 599 bp, Chicken  19866894329498_3
  misc_feature (1)..(97): n is any nucleotide
nnnnnnnnnnnnnnnnnnnnnnnnnnnnnnnnnnnnnnnnnnnnnnnnnnnnnnnnnnnnnnnnnnnnnnnnnnnnnnnnnnnnnnnnnnnnnnnnntgctaaagaggatttatgtaaaagaccataacagcttaagcttcaataaataacatgtagtaaaggacagaaataacaaatatttcctaaataaaaacaacatttttctgtatcagaaagggaaataatacatgtaatgttaaaatcaaaatgcactttttaaacaaaggtaaatagaatgtatgcagctgctttktatggyrttataagtgcatatttgcatgaattgatgtatgctctgaggcctggaagatcagaacaaaaggagcctttcttgtctctgcccattttatcaggttccatgataaaaaagaattttttctttttccctgtttgaagctcaaatcacagtccctgagggagttcatgaggcagtggaggaggtgaaaataacctctatatttgaatactacgaaagtcaagacatcacaaaggtatattacagctgatatttcattcagtgttgtttttttggttttttttatcccgtattcctttttat

SEQ ID NO: 64007 - DNA, 600 bp, Chicken  19866894329501_1
tctgcactgattgcttaactcctctcagagaagttttcaatactgcaagagagaggacagaaaaaaaaaataataatatatattcatatgctctccagagtggaacttgaacacagaaattcaaatacattctcgtctgagaaacgggggaagaggaaaagtggttaaaagtgttctaggtatcttctgtcagtaatggtctctgccctttttgctaacctgtcttgccctagtacttaattctgttcttcctcaaattgcaacatataaacttgcagaaaataaatatactgaggtcaygatctctggagggctctctctcagtgtgatgactgtgctgattcaggaacgtgaaagctgtttcctcccgcaacccacgtttttcctttcactcagtccttcttctacatctcccccattcttcgtgtacagaactacagctgtcagtgctgacaaaaaatctgtgggcagcaatgccacggcaaacactgaaaactgtgatttgggcacgcccttacaaaaacacatatataacagaggaattaaatcaaatttgggtgccttttgttggatctgcagtgtttagattttcaggataga

SEQ ID NO: 64008 - DNA, 443 bp, Chicken  19866894329502_1
ctctccccgccccgccttgccccgcctcgccccaccttacctagcctcaccctgcctggccccaccccacgtaccacgcctcgcctcaccatgcctcaccccaactcgccccgcctctcccacctcgcaatgcatagccccaccccacctcgccccgcctcgccccatttcgtctcgccccaccccgcctcgcttcgcctcgccccgcctgccttgcacttcatcgccttgcctcgcctagcctcgccctgaccctcctcgcctcgccttgcccgcctcacctcgcctcgcctctccccrcctcgccttaccccgcctagcctcgccttgcctcgccccacctcgcctgccacgccttgcctcaccccgcctcgccccacctcaccccacttcgaccagcctctcctgcctcgcaacgcatagccgcactccgtctcgccccg

SEQ ID NO: 64009 - DNA, 599 bp, Chicken  19866894329503_1
  misc_feature (1)..(91): n is any nucleotide
nnnnnnnnnnnnnnnnnnnnnnnnnnnnnnnnnnnnnnnnnnnnnnnnnnnnnnnnnnnnnnnnnnnnnnnnnnnnnnnnnnnnnnnnnnnaaaaaaaaagtattgttttgtttaatagcagcttggacttgctgcaaatgaattattggtgggacaactggcaaatgtaactttgaggagccagtggagtaagctgtcctgtttttaagcaataggttacttgcatactacagatttcataggtttttaaggtgatgctttaaaaaactatagtgtactcctgcattgtaaatcaaaawacaacattgttctctgattcagagttaaatattcagctatctcacattatgcctgtttgctttttagggacaatgttgaaatatgtctatccttcagagatagttcttcagtacttgtgaatgaacctttaaatgtagggaaggtgcttgaattaagcaagatgaatttgaattatgaatttkaattatgaattgtgaattttgtctatacagtaacttacactgtgattttactgtttcctatatttcagctagcagagtaattacagaaagtggctggatgcacaacctggtgcata

SEQ ID NO: 64010 - DNA, 575 bp, Chicken  19866894329503_2
agtggagtaagctgtcctgtttttaagcaataggttacttgcatactacagatttcataggtttttaaggtgatgctttaaaaaactatagtgtactcctgcattgtaaatcaaaawacaacattgttctctgattcagagttaaatattcagctatctcacattatgcctgtttgctttttagggacaatgttgaaatatgtctatccttcagagatagttcttcagtacttgtgaatgaacctttaaatgtagggaaggtgcttgaattaagcaagatgaatttgaattatgaatttkaattatgaattgtgaattttgtctatacagtaacttacactgtgattttactgtttcctatatttcagctagcagagtaattacagaaagtggctggatgcacaacctggtgcatacttgtttgctgatttttgctagagctggtgctgatttaaatacatttggattgcttttcctaaagaacactcattttgatcatcatattgactttaggaagtctagccttagccttacaaaagccagcatttaatttctggctgattatgagagtttga

SEQ ID NO: 64011 - DNA, 600 bp, Chicken  19866894329505_1
aacttgatgatccttggggtcttttccaacccaagccattctatgattctgtgatcaaatgccttcactacgggacttgctcaaagcctagaaataaggattcagcaaaatgccaacaagaagccagaaaaaaagccagcgaaacatcaacagaatgtcaacaaaaagccagtgagaagccaataaaataccaacagaacgccaacaaaatgccaagaagccaatcagaagccaacaagaagccaactgaaaaccaactgaaaaccaacaaaaatcctccatttcccttccttaactccygcagtgatgctgtggctcacctctgtgttgtcacagcagggaggctgctatggtttcatttcacttgggatgttttctctcactattgttgcttaaggttgctattatggcagctcaaactcttctgagacaagcagcatgcaaatctagagagaaatctatccagcaagctatcgctttgctccagatttattgtaaattttgctttcctcctctccctggaattagagtgcctaatgccagagcccagcaattcctgggaattccttgcttaccttgtgttaccaccattgcccatag

SEQ ID NO: 64012 - DNA, 600 bp, Chicken  19866894329506_1
tgtgtaattacaaggaaccaatccctgggggtcatacaaataattccatgtactagctaaaaatgcactttctgagaacatttacactggtataatctgatgggatgcagagttctggaaaataaatgccaaaggggatgaaaacacagctaaagctaatttattttttaaatcaagcgaatattcacattcccccccttatttgctcagctctaatgaatagcttctttgctgcttcattttagtctcttccatctgggggaatacatcccaagttggggaatattatctgaggctcaycacaactgccagggagcgaagagcagcacacaaagctgcactgcacacaaaaaaacttctgcccattacctgaatggacagccctttcaggcagcttctaaaaaataacctctgttattaaattaatcaccttgtgtcaaatggtggagtgacaagagagaaaatttacctcagcaataactcagttctaaaggtatatacagaggaggaggaaattgggttgttgcagatacagcaataacatcatgaagcaaaatccaatattggaagtgataaaagtttctcattccaatattcctc

SEQ ID NO: 64013 - DNA, 471 bp, Chicken  19866894329506_2
tggacagccctttcaggcagcttctaaaaaataacctctgttattaaattaatcaccttgtgtcaaatggtggagtgacaagagagaaaatttacctcagcaataactcagttctaaaggtatatacagaggaggaggaaattgggttgttgcagatacagcaataacatcatgaagcaaaatccaatattggaagtgataaaagtttctcattccaatattcctcagtgacaagcatgaaagactatgcataagaacaaggaaaaaagattaaagatagcatcagttaaaaaaataaaraagcctctgaaaagggagctaacaggtaatgaatccctcaaaagcaagaagatcacagcatttgggaaacttgcacagataccaatctcagtaacacacactttcagtcctccccacttcattttgctaaacgttctgcaaagctgattttgagagatcccagcccaaggg

SEQ ID NO: 64014 - DNA, 497 bp, Chicken  19866894329509_1
tcctaatggcagacctgagaggttccttctgagaggtgcagacaggttgcttgctcacatcaagacaggggtgtcactgagcacatgtgatgtgcgtgtgacaagtagctgtcgtagaccagggtgttgggtggtagggaagcatttccatataaatgttacctaaaaacacattctaactcttgtacttctggtgtcattaaaatctatgtgcagtggaacgggtttgtcagaactgtgggaagacagaccagctagggagactttccctgtggcactcttccagatctattttttttkgtccagaaaatccttgtcgatgatacagagattttcatgattaaagctgggtaaaagattgtaaggggaattagatactgtaatcaaaatattctgtgaaattggtcaaagaactctattccctgcaaacctattgggttcgggtttgtttttaattgcctggcaggctcaacagcctgtgttcaaatcagcagaga

SEQ ID NO: 64015 - DNA, 599 bp, Chicken  19866894329511_1
  misc_feature (1)..(115): n is any nucleotide
nnnnnnnnnnnnnnnnnnnnnnnnnnnnnnnnnnnnnnnnnnnnnnnnnnnnnnnnnnnnnnnnnnnnnnnnnnnnnnnnnnnnnnnnnnnnnnnnnnnnnnnnnnnnnnnnnnnagccttaccacaatgatcctttccaacatctgcgctgtctgaccagcagcttcactcagccctctgctcagcttttcattctcttccattagagactggttcttctccatcagagactgcaggttctctgaaggtgccatgctactgaaatattaaagaaccattttgcttgtgagcatgacacrtgaccagaggttttgtaatagcactgaaactgcctccaagtttctgaaataacttacagcaaatacaggttatagcagatgaatagaaagactggaggaagactaatctgaattcaaagtctctgaggaatacagggtactgaaagcagaaatttgcaagaaaagaaaacatccttttaacacagtaacgttgcttaaccaatgccaagtctgtaaagcgcatcaacttgggttttaaaatwtacttaagagaaaacacccacwcagtctaacctcctcctctgctttgtgcttttaca

SEQ ID NO: 64016 - DNA, 600 bp, Chicken  19866894329511_2
ctgaaggtgccatgctactgaaatattaaagaaccattttgcttgtgagcatgacacrtgaccagaggttttgtaatagcactgaaactgcctccaagtttctgaaataacttacagcaaatacaggttatagcagatgaatagaaagactggaggaagactaatctgaattcaaagtctctgaggaatacagggtactgaaagcagaaatttgcaagaaaagaaaacatccttttaacacagtaacgttgcttaaccaatgccaagtctgtaaagcgcatcaacttgggttttaaaatwtacttaagagaaaacacccacwcagtctaacctcctcctctgctttgtgcttttacaaagagtggagacagagattcctaattttttgtggtgaaagrgggagaaagaatggaaggatgggtgggcctgagaaaggcatatcagagtacagtgcctagtttctctttctctcccacaactgattttggccatcatttaaactgagagtttatctacaaagcttacttgatagacactgggagagtccctccatgggcctgcagcaataacacctgtagctgttgtacctagaaacacaaa

SEQ ID NO: 64017 - DNA, 600 bp, Chicken  19866894329511_3
atattaaagaaccattttgcttgtgagcatgacacrtgaccagaggttttgtaatagcactgaaactgcctccaagtttctgaaataacttacagcaaatacaggttatagcagatgaatagaaagactggaggaagactaatctgaattcaaagtctctgaggaatacagggtactgaaagcagaaatttgcaagaaaagaaaacatccttttaacacagtaacgttgcttaaccaatgccaagtctgtaaagcgcatcaacttgggttttaaaatwtacttaagagaaaacacccacwcagtctaacctcctcctctgctttgtgcttttacaaagagtggagacagagattcctaattttttgtggtgaaagrgggagaaagaatggaaggatgggtgggcctgagaaaggcatatcagagtacagtgcctagtttctctttctctcccacaactgattttggccatcatttaaactgagagtttatctacaaagcttacttgatagacactgggagagtccctccatgggcctgcagcaataacacctgtagctgttgtacctagaaacacaaacaaacagtgcttacaagtctct

SEQ ID NO: 64018 - DNA, 600 bp, Chicken  19866894329511_4
tttctgaaataacttacagcaaatacaggttatagcagatgaatagaaagactggaggaagactaatctgaattcaaagtctctgaggaatacagggtactgaaagcagaaatttgcaagaaaagaaaacatccttttaacacagtaacgttgcttaaccaatgccaagtctgtaaagcgcatcaacttgggttttaaaatwtacttaagagaaaacacccacwcagtctaacctcctcctctgctttgtgcttttacaaagagtggagacagagattcctaattttttgtggtgaaagrgggagaaagaatggaaggatgggtgggcctgagaaaggcatatcagagtacagtgcctagtttctctttctctcccacaactgattttggccatcatttaaactgagagtttatctacaaagcttacttgatagacactgggagagtccctccatgggcctgcagcaataacacctgtagctgttgtacctagaaacacaaacaaacagtgcttacaagtctctcttgcagttatattccttcagccatttagttactaagattctccatcttaatgagtcatgtgctccacacctgagc

SEQ ID NO: 64019 - DNA, 599 bp, Chicken  19866894329514_1
  misc_feature (1)..(35): n is any nucleotide
nnnnnnnnnnnnnnnnnnnnnnnnnnnnnnnnnnnactgtaatgttaggttccttgctgctcatgtattatggctagctatccctggctcaatttttgttagcacagcacaagggaacttgatttgagaaagaacaaatagctgaaatgatatctgaaattcagtcacacatattatgcctgaatataggtactcagagcacagaaaaagctgctggtacagtacgttcggcatttgcctactggcaatgccaacaataatatcttccagagaactcataatgcatccgacactgaacartaccgtactttgagaaggatttccttgtggtcatatagctgaggagacaaacctgtaatacaatgcgcctaggcagtcatatcatcactgatggagatgtaaatctgaaggatttctgtcttaacactgctgagtcttgaacttcataagctgaagacttgtgtaattttctgtgcaacagacaatgtggaacctccctggctcatataatcatttttgctgattacagcagttaatgggctaactcgatttacatcagctgaaagactgtttcctgcatttttatttatttactttct

SEQ ID NO: 64020 - DNA, 600 bp, Chicken  19866894329516_1
cggtggttttattattatcacattttaatctggcaggtggtttattaaccagaaagaattctaacaagaaacccaaatgctctaacataataaaaacatcatatctttgtttttctttttaattaacaaccaacatcaatgcaaacttcttgtcctacgtgtgaactcagctacagtcaattcacttttatctgcgctcttgattaagaaggcctcctacgaagtagccccacgtatctaccctggaagcgatttcagcccctgtccttgtgctgatgaaaccctctccctctgtggaayccatgcagccagttgtagggctgcaaattgatcccccacggggaaaaaactatttaaagaactggccagggaggagttaattcaggttctttcagatgtgcaagtcacagccgtcactggaaatctcagaagatggggtatttttcatccatcagcccgtgcctcttccacagctgttatctttgctagacaggagttgcagcaatgtctgatttgttcaaggttttccagcactgcagtggcagagctagaaatgaaactagggtcctgtgcagcagtacagtgcatgaccctaagggc

SEQ ID NO: 64021 - DNA, 600 bp, Chicken  19866894329525_1
ttttttttctggcctgagttcaggccaaacccccaaacttgtgctttaagcctcttagggcaaataccacttttctgaggacaggctgtgctgttacatcccctgttgtgttacatcccctgtgctgttacatcccctatggtgttacatcccctatggtgttacatcccctgtggtgttaggtctgggacctcagtgcccagcccctgccagcagcagctctgtgttacaggctgagctggagctgcaccacgcagtgcttgtctgcagtttcagaattagaggggttcctctaaaacycctttcttctcagataatgactaatttcctgaacttggtcatctctccgcagaaaagttgctttcgcccttccccccargcacttgaaaagcagaagatgtctgcccagaactgctttaattcaggccaaatggaagagtttccatctaggtaggctgatgtcataccaccaagacctgtaacttggagcagctgattccttaagtctttttttgggccaggagcacccagggaggctcccatcctcagtgatgcactgcaggtaccattgctatgcacattctggcatgtgtcaaggga

SEQ ID NO: 64022 - DNA, 600 bp, Chicken  19866894329525_2
gacaggctgtgctgttacatcccctgttgtgttacatcccctgtgctgttacatcccctatggtgttacatcccctatggtgttacatcccctgtggtgttaggtctgggacctcagtgcccagcccctgccagcagcagctctgtgttacaggctgagctggagctgcaccacgcagtgcttgtctgcagtttcagaattagaggggttcctctaaaacycctttcttctcagataatgactaatttcctgaacttggtcatctctccgcagaaaagttgctttcgcccttccccccargcacttgaaaagcagaagatgtctgcccagaactgctttaattcaggccaaatggaagagtttccatctaggtaggctgatgtcataccaccaagacctgtaacttggagcagctgattccttaagtctttttttgggccaggagcacccagggaggctcccatcctcagtgatgcactgcaggtaccattgctatgcacattctggcatgtgtcaagggagaacacagtatgtcacaggaagggagagtctgcagtgagctgcactgctcctggagcaccacagcatcctcatcaaact

SEQ ID NO: 64023 - DNA, 600 bp, Chicken  19866894329526_1
ttgcatagctgctaatgtttaaatattcgttctgttccttacgtcttattttatttaattagataacttgtaatcttggatttataacattcttactgtattaaaaggacgtggctatttgcatgacctattcatcttgttttcagtctccctaagcacatcttgctctatcagccctgaaagcaggacaactccacaggctctgtccagcttcagccaggaaaaatcccaaataatttcggacagctcagaagtgtcaaagtgtggaagtggtgctttatggctgaagccccactgccrggggctcacagctgctctgtgacctagaagcattgacccagcccctgtgtgcagccacaggtcctcactaaaagcaaaaaccctcaggcttgtaatggcgtgggtgtgtgtacattaaggcagactctcatataggttgcatcctcggagatgcttcagtaacgctgctaaatgctgataaatatgcagccaatgaaagcaaagcagtcttttgtcagcatattcattccactgtagcttttcctcgtaaaggttataagctaattcatgtcaaatacgtgggttgttttattccaggta

SEQ ID NO: 64024 - DNA, 600 bp, Chicken  19866894329529_1
ctacagtgacttctaacactgactcatacctgctcaccccacagatattgtacagaatctttccccacatcctatatttacattttgcaatcaacacaaacccatactaataatgtataatttctaacaattagtgatgaattattatgaaacatttgaatgaataataattgcatttatgcaaaattagtctttttgttcagaagtccagcatcacattttcttccaaatcacctgtgctaagatttccttaaatgtatggttatgattgtattatttatataaatcaaaattttaaamaaagatgctaaagaaagcagcaggttatagagaggactaagatcttttaacagtgaagactgtgaagctttgagatagatttcctggggaaatgcttcactgagcatcactgaagacctctctcagcatgttaaccaaacttctgttaagatgtatgtattcttgatcttaccctgaggcaggagattggaccagataatatcctattgtccttcttctaccattctatgttatagtgactgtgactaataatttactgtttgagattcctttcttttgccagcttaagtttattcagat

SEQ ID NO: 64025 - DNA, 600 bp, Chicken  19866894329532_1
ctgagtcgtaagcacatgattttgaggatttattgtggtaggtttctaaaaattccccatccctttctcatgggatgtaccacaacagtggtgaaacatcacccaacattttataatcttgcaattaaaaaaaaaaaagtgctaactgactgataagaacggatcccagcatctgtcatgcagcagtaattgattgtgcaatctgtggatgaaggttgggtacaaggatttgggtatttgacagctacggaagagaacaatctggatgagaacagccccacttgctgagaaaattctcaygactaaagaaggatgggaaaaagacccagcgcaacacacaaccgtgattgctgcttttattgctaaattttactaagaaaaataactccgaaattacagcaaacaaacaaagcaagcaaacaatctttgtcttagaaaaatcgcaacctcgtgataaactgagataagaaatgctggaaaagttattgtgttgttgttgatgagggcccatatgtgctaaactgcaagaaaaacaagcgcctccccctcagattgaagaaaatgtttcttttcagttggagaaagaaaaacataaagcag

SEQ ID NO: 64026 - DNA, 600 bp, Chicken  19866894329533_1
ttcaaactccataacaaggagactgaggaaatgcacttattctttgccaagaaactggaggagaagttgcgatggctcagagctttcagagaagaaaggaagatggtaaaagaagatgaaaagataggtgaggaatatgaaatggatctgaaaggaggttgttggtaatgcttaatgtagccccaattgttggagaagcccacattttttttaattgtagcattacagttaaaccttgttcagatgtccttggctgctctcgttgccatgaagtagatctctttccagttcagttagtgstatttttggccctcagtgagcaaattctgcccatagcttcaagcctggacctccaggggtacatgtgaaacagaactcttgggtctcctgacccagagtctcctggctgcctcctttctgccctggctgtgcacattctgtgcggggtagggagggggcaagttggtgactgataagccatgcccttccctcagcatcagcccagaaactgactgcagcaagtgtcagttcaggctcagtttgtgttgctcagctgtaaactactgggcgtatttacgatcctgtttatagtaataataa

SEQ ID NO: 64027 - DNA, 600 bp, Chicken  19866894329550_1
acaagctgagcccgacctgcagttctgatctctctccttcctcttgaccctacaggaacctctcccaagctgctggcatcagtggttagcaggaactacagatcagttcgccccagtcacaacaccagggatgtactagtataagatgaacatgatgggatacttaaaagccactcttgctcccgtaacattgtcaacaccctgcttctagtctgctttgtatacacccatgttttactacagcagaagcctacaagaaggtaaagcagctcaggtcttgagaagaacgatgccaatgcrgaatgaaaggaactgtgtgtatccaatattgcaccatttgtccttgcatctgaggcatccaraacttctatcactctayggcacagtacgagagaagacagagctgagcaggatgaaatgcaaacgggtgtaaactgaacatcaaatgagtttgatccccacttgccctggctgtgaagtacatatgctcagacrttgcctcctgcttcaataaataaataagagaggggctgagcaatgtggtttaaaaagaaaattatatgacagtatgttttatttcacagcatgctagaaaatgat

SEQ ID NO: 64028 - DNA, 600 bp, Chicken  19866894329550_2
tcccaagctgctggcatcagtggttagcaggaactacagatcagttcgccccagtcacaacaccagggatgtactagtataagatgaacatgatgggatacttaaaagccactcttgctcccgtaacattgtcaacaccctgcttctagtctgctttgtatacacccatgttttactacagcagaagcctacaagaaggtaaagcagctcaggtcttgagaagaacgatgccaatgcrgaatgaaaggaactgtgtgtatccaatattgcaccatttgtccttgcatctgaggcatccaraacttctatcactctayggcacagtacgagagaagacagagctgagcaggatgaaatgcaaacgggtgtaaactgaacatcaaatgagtttgatccccacttgccctggctgtgaagtacatatgctcagacrttgcctcctgcttcaataaataaataagagaggggctgagcaatgtggtttaaaaagaaaattatatgacagtatgttttatttcacagcatgctagaaaatgattaaagaaatgtgaagaagagtaaaagatttcctcttttagctttactttcaaatacagtaat

SEQ ID NO: 64029 - DNA, 600 bp, Chicken  19866894329550_3
cagtggttagcaggaactacagatcagttcgccccagtcacaacaccagggatgtactagtataagatgaacatgatgggatacttaaaagccactcttgctcccgtaacattgtcaacaccctgcttctagtctgctttgtatacacccatgttttactacagcagaagcctacaagaaggtaaagcagctcaggtcttgagaagaacgatgccaatgcrgaatgaaaggaactgtgtgtatccaatattgcaccatttgtccttgcatctgaggcatccaraacttctatcactctayggcacagtacgagagaagacagagctgagcaggatgaaatgcaaacgggtgtaaactgaacatcaaatgagtttgatccccacttgccctggctgtgaagtacatatgctcagacrttgcctcctgcttcaataaataaataagagaggggctgagcaatgtggtttaaaaagaaaattatatgacagtatgttttatttcacagcatgctagaaaatgattaaagaaatgtgaagaagagtaaaagatttcctcttttagctttactttcaaatacagtaatataacagaaccactctg

SEQ ID NO: 64030 - DNA, 600 bp, Chicken  19866894329550_4
aacaccctgcttctagtctgctttgtatacacccatgttttactacagcagaagcctacaagaaggtaaagcagctcaggtcttgagaagaacgatgccaatgcrgaatgaaaggaactgtgtgtatccaatattgcaccatttgtccttgcatctgaggcatccaraacttctatcactctayggcacagtacgagagaagacagagctgagcaggatgaaatgcaaacgggtgtaaactgaacatcaaatgagtttgatccccacttgccctggctgtgaagtacatatgctcagacrttgcctcctgcttcaataaataaataagagaggggctgagcaatgtggtttaaaaagaaaattatatgacagtatgttttatttcacagcatgctagaaaatgattaaagaaatgtgaagaagagtaaaagatttcctcttttagctttactttcaaatacagtaatataacagaaccactctgatatgctgctgcatgtatcacttctatgcctattacccaacttcttagaaaaatgaaatccaagcctacacattctaccttagagcagcagcacagatctcatatagtgaaagctt

SEQ ID NO: 64031 - DNA, 600 bp, Chicken  19866894329550_5
attctaccttagagcagcagcacagatctcatatagtgaaagcttatgaatggtaaagcaggaatttagagcagtgaaaacacagtccaagcttaggggtttattctcctcttattgcttttatatagtttcagcactcatgaaaattacgtagaagctttaagagtcaaatagactcctgtgaaatgagctcacaaacgaaattaggagagggagagagcagtgaataactgaatcctctgagctggaagaatgtcatgccggcatgttgcaggagcatatacaacctgtgctactgcrcacccacttttctgtgggcctgtgtgatttatgaacctggcagcaatgccatacctacccacaggctcttcctaccctccctcacaacccatcagcatgctttcatagagaactgccaaggagactgacacaatgcaaatgcagtggtttggctgccctttcaacctttctatataccccggagacagaaggattacatattattagcaattatgaaatttaatcctctatactacattgcatatgatcaagctttattatactctagtgagtcttaccatagtatgaacatcagattat

SEQ ID NO: 64032 - DNA, 600 bp, Chicken  19866894329555_1
gttgggaggtttgtaggcgctgtatggccttgctgtctatcagggaaattacaactggttatgatggcgaaagcaagcctggctctgggtaaaatatatcggggagatttatggtgcagggcagcagttgtcatttcacagtctgtgccttcgtgacgatgccaccatcagtccctatatccatcattgacgctccacaagagtcggcttgttgcaccgtgttgctgccagcagcctgctcacagacaggctcttcttctgctgtctggggatatggagggaatctggaggttccaccastgtgagcagaaaacccacgtccccatccagctgtgtgcaggtgatggagaaaaagagcaaagtttctttgggaccttgaagagcggggagttattgaggggccaggttcaccctgccttgaaggaatggtccctttccttcccwcttgccagatttgctgagttatagccacaatgccattttcatccctttgcctcwgtgtccckcacctcccttaacacagcactgyctcctgccttgcagaaagcaaagggagattgtgggatttcctatgcatgcttcatcccagcaaacacagca

SEQ ID NO: 64033 - DNA, 600 bp, Chicken  19866894329555_2
gtgccttcgtgacgatgccaccatcagtccctatatccatcattgacgctccacaagagtcggcttgttgcaccgtgttgctgccagcagcctgctcacagacaggctcttcttctgctgtctggggatatggagggaatctggaggttccaccastgtgagcagaaaacccacgtccccatccagctgtgtgcaggtgatggagaaaaagagcaaagtttctttgggaccttgaagagcggggagttattgaggggccaggttcaccctgccttgaaggaatggtccctttccttcccwcttgccagatttgctgagttatagccacaatgccattttcatccctttgcctcwgtgtccckcacctcccttaacacagcactgyctcctgccttgcagaaagcaaagggagattgtgggatttcctatgcatgcttcatcccagcaaacacagcatgggcattggtcacattctgatttgcagagttttcaaagctcctcaccagacttkcacagtctttcacagctcttgtattaaactcatctccttttttccctgcattcccaagtggtaagagtcagaggtacttggtattcacc

SEQ ID NO: 64034 - DNA, 600 bp, Chicken  19866894329555_3
aagagtcggcttgttgcaccgtgttgctgccagcagcctgctcacagacaggctcttcttctgctgtctggggatatggagggaatctggaggttccaccastgtgagcagaaaacccacgtccccatccagctgtgtgcaggtgatggagaaaaagagcaaagtttctttgggaccttgaagagcggggagttattgaggggccaggttcaccctgccttgaaggaatggtccctttccttcccwcttgccagatttgctgagttatagccacaatgccattttcatccctttgcctcwgtgtccckcacctcccttaacacagcactgyctcctgccttgcagaaagcaaagggagattgtgggatttcctatgcatgcttcatcccagcaaacacagcatgggcattggtcacattctgatttgcagagttttcaaagctcctcaccagacttkcacagtctttcacagctcttgtattaaactcatctccttttttccctgcattcccaagtggtaagagtcagaggtacttggtattcaccaayatagaactcttcaaggccacatgtcagctcatttggagacagatgttggtt

SEQ ID NO: 64035 - DNA, 600 bp, Chicken  19866894329555_4
gcttgttgcaccgtgttgctgccagcagcctgctcacagacaggctcttcttctgctgtctggggatatggagggaatctggaggttccaccastgtgagcagaaaacccacgtccccatccagctgtgtgcaggtgatggagaaaaagagcaaagtttctttgggaccttgaagagcggggagttattgaggggccaggttcaccctgccttgaaggaatggtccctttccttcccwcttgccagatttgctgagttatagccacaatgccattttcatccctttgcctcwgtgtccckcacctcccttaacacagcactgyctcctgccttgcagaaagcaaagggagattgtgggatttcctatgcatgcttcatcccagcaaacacagcatgggcattggtcacattctgatttgcagagttttcaaagctcctcaccagacttkcacagtctttcacagctcttgtattaaactcatctccttttttccctgcattcccaagtggtaagagtcagaggtacttggtattcaccaayatagaactcttcaaggccacatgtcagctcatttggagacagatgttggttgcgttgct

SEQ ID NO: 64036 - DNA, 600 bp, Chicken  19866894329555_5
agcagcctgctcacagacaggctcttcttctgctgtctggggatatggagggaatctggaggttccaccastgtgagcagaaaacccacgtccccatccagctgtgtgcaggtgatggagaaaaagagcaaagtttctttgggaccttgaagagcggggagttattgaggggccaggttcaccctgccttgaaggaatggtccctttccttcccwcttgccagatttgctgagttatagccacaatgccattttcatccctttgcctcwgtgtccckcacctcccttaacacagcactgyctcctgccttgcagaaagcaaagggagattgtgggatttcctatgcatgcttcatcccagcaaacacagcatgggcattggtcacattctgatttgcagagttttcaaagctcctcaccagacttkcacagtctttcacagctcttgtattaaactcatctccttttttccctgcattcccaagtggtaagagtcagaggtacttggtattcaccaayatagaactcttcaaggccacatgtcagctcatttggagacagatgttggttgcgttgctgaaggcagcagggcaggagtgct

SEQ ID NO: 64037 - DNA, 588 bp, Chicken  19866894329555_6
agcaaagtttctttgggaccttgaagagcggggagttattgaggggccaggttcaccctgccttgaaggaatggtccctttccttcccwcttgccagatttgctgagttatagccacaatgccattttcatccctttgcctcwgtgtccckcacctcccttaacacagcactgyctcctgccttgcagaaagcaaagggagattgtgggatttcctatgcatgcttcatcccagcaaacacagcatgggcattggtcacattctgatttgcagagttttcaaagctcctcaccagacttkcacagtctttcacagctcttgtattaaactcatctccttttttccctgcattcccaagtggtaagagtcagaggtacttggtattcaccaayatagaactcttcaaggccacatgtcagctcatttggagacagatgttggttgcgttgctgaaggcagcagggcaggagtgcttggactcagcaatgagggcagagtgacagcagaactgcagcgagttatgcagaatttgtgctgggagaagcagacaggagtcggtgctgactgcaggacattgcattggagcag

SEQ ID NO: 64038 - DNA, 496 bp, Chicken  19866894329555_7
gccagatttgctgagttatagccacaatgccattttcatccctttgcctcwgtgtccckcacctcccttaacacagcactgyctcctgccttgcagaaagcaaagggagattgtgggatttcctatgcatgcttcatcccagcaaacacagcatgggcattggtcacattctgatttgcagagttttcaaagctcctcaccagacttkcacagtctttcacagctcttgtattaaactcatctccttttttccctgcattcccaagtggtaagagtcagaggtacttggtattcaccaayatagaactcttcaaggccacatgtcagctcatttggagacagatgttggttgcgttgctgaaggcagcagggcaggagtgcttggactcagcaatgagggcagagtgacagcagaactgcagcgagttatgcagaatttgtgctgggagaagcagacaggagtcggtgctgactgcaggacattgcattggagcag

SEQ ID NO: 64039 - DNA, 600 bp, Chicken  19866894329558_1
agaaaaaacgtgcattttattatatttaaaatgtgctcaattcaaaaatgccttcagcacttatgaatttcttagatatgcactgcttctttcacattaagaacgaacgtagcttaactcatttcgtgcacggcaattttcactgcactgagtcagagagagacacgaactgcagccaaacacactgcagtgcatcagataggatgaatggtttaccagcacctagacagaaaggacagacagacagacagtgaactatgcctgagatatcgcatgttccagttagactcaagtcactayattttacaacaattaaacgagacaaacacaacgtgccagaaccaacaaaatgagcatatctggagacaatcttttaaamgatgtcgtgaggcttatcaaaccacattatgattttgcagaccaagcagagttttacagggtcagttcctgggtgagagacagttaaacaaaatccacaattagcaacaagttattcaaaccattcactgagctttcctcagaattcatctattggcatgacattcctaggtgcaatgtacgttgaaataagtgttttccaaagaatgcttttgctagctt

SEQ ID NO: 64040 - DNA, 600 bp, Chicken  19866894329558_2
gcactgcttctttcacattaagaacgaacgtagcttaactcatttcgtgcacggcaattttcactgcactgagtcagagagagacacgaactgcagccaaacacactgcagtgcatcagataggatgaatggtttaccagcacctagacagaaaggacagacagacagacagtgaactatgcctgagatatcgcatgttccagttagactcaagtcactayattttacaacaattaaacgagacaaacacaacgtgccagaaccaacaaaatgagcatatctggagacaatcttttaaamgatgtcgtgaggcttatcaaaccacattatgattttgcagaccaagcagagttttacagggtcagttcctgggtgagagacagttaaacaaaatccacaattagcaacaagttattcaaaccattcactgagctttcctcagaattcatctattggcatgacattcctaggtgcaatgtacgttgaaataagtgttttccaaagaatgcttttgctagcttttgtattccttagcatacctaagcatacagctcctgcctccccagactcgttcttgatctcaaaggtgaacaacacttt

SEQ ID NO: 64041 - DNA, 599 bp, Chicken  19866894329560_1
  misc_feature (1)..(139): n is any nucleotide
nnnnnnnnnnnnnnnnnnnnnnnnnnnnnnnnnnnnnnnnnnnnnnnnnnnnnnnnnnnnnnnnnnnnnnnnnnnnnnnnnnnnnnnnnnnnnnnnnnnnnnnnnnnnnnnnnnnnnnnnnnnnnnnnnnnnnnnnnnnaatactacctagccttgaatttttgctttatttcattccaattttgcctgagatgcagtatagcaagtttccatattgagaacttaaacttgttatcctcaaaaatgctgcattctgggtgcagtgacctcaaaagcaacacagcaaagccaagatttcaycacaagcatttcaatgccagcttgaactgtgtacaaattaaacagacaatctttaacatcgmattactgttttgactgagtactgtcatctggttggtttcttcccttcttcaaaacacttggttggttatcatcttgagcgtcacaggaagtctgaaaagatacaaaagaatgygatgttattatgaaagctgacataaactatgtaccttttttccataaaagaactggtctgatttaccttttcattggtagttggtacatttttgcataaccttccaggagatttcacatgagaa

SEQ ID NO: 64042 - DNA, 599 bp, Chicken  19866894329560_2
  misc_feature (1)..(77): n is any nucleotide
nnnnnnnnnnnnnnnnnnnnnnnnnnnnnnnnnnnnnnnnnnnnnnnnnnnnnnnnnnnnnnnnnnnnnnnnnnnnnaatactacctagccttgaatttttgctttatttcattccaattttgcctgagatgcagtatagcaagtttccatattgagaacttaaacttgttatcctcaaaaatgctgcattctgggtgcagtgacctcaaaagcaacacagcaaagccaagatttcaycacaagcatttcaatgccagcttgaactgtgtacaaattaaacagacaatctttaacatcgmattactgttttgactgagtactgtcatctggttggtttcttcccttcttcaaaacacttggttggttatcatcttgagcgtcacaggaagtctgaaaagatacaaaagaatgygatgttattatgaaagctgacataaactatgtaccttttttccataaaagaactggtctgatttaccttttcattggtagttggtacatttttgcataaccttccaggagatttcacatgagaaactgatttctttactcctttggtgcttgggtggctttttccattactgtaactagcaaggat

SEQ ID NO: 64043 - DNA, 600 bp, Chicken  19866894329560_3
tccaattttgcctgagatgcagtatagcaagtttccatattgagaacttaaacttgttatcctcaaaaatgctgcattctgggtgcagtgacctcaaaagcaacacagcaaagccaagatttcaycacaagcatttcaatgccagcttgaactgtgtacaaattaaacagacaatctttaacatcgmattactgttttgactgagtactgtcatctggttggtttcttcccttcttcaaaacacttggttggttatcatcttgagcgtcacaggaagtctgaaaagatacaaaagaatgygatgttattatgaaagctgacataaactatgtaccttttttccataaaagaactggtctgatttaccttttcattggtagttggtacatttttgcataaccttccaggagatttcacatgagaaactgatttctttactcctttggtgcttgggtggctttttccattactgtaactagcaaggattaaacacagtgtcacacattaatagaaatgtttgtgattgtcagaagagaaatccaataaaagtttaccattaagtttcargaagagagagttggttgcaaatggtcttaacct

SEQ ID NO: 64044 - DNA, 600 bp, Chicken  19866894329560_4
tcacaggaagtctgaaaagatacaaaagaatgygatgttattatgaaagctgacataaactatgtaccttttttccataaaagaactggtctgatttaccttttcattggtagttggtacatttttgcataaccttccaggagatttcacatgagaaactgatttctttactcctttggtgcttgggtggctttttccattactgtaactagcaaggattaaacacagtgtcacacattaatagaaatgtttgtgattgtcagaagagaaatccaataaaagtttaccattaagtttcargaagagagagttggttgcaaatggtcttaaccttcatagymattatgcttktgttttttatacagctactataatactacatttttaatactaagactgcaaaatgcataattaaattagacaatatattaagagaacttagccttcatatagaaacttccatcagaggatcccaaagttcctttggagataataaatagcaaatattaattattaattgagctagcacagaatactcatggtcccagtgcactttaacagaattgattatgcagtacaatacgaatgccacagcaaatc

SEQ ID NO: 64045 - DNA, 600 bp, Chicken  19866894329560_5
ttatgaaagctgacataaactatgtaccttttttccataaaagaactggtctgatttaccttttcattggtagttggtacatttttgcataaccttccaggagatttcacatgagaaactgatttctttactcctttggtgcttgggtggctttttccattactgtaactagcaaggattaaacacagtgtcacacattaatagaaatgtttgtgattgtcagaagagaaatccaataaaagtttaccattaagtttcargaagagagagttggttgcaaatggtcttaaccttcatagymattatgcttktgttttttatacagctactataatactacatttttaatactaagactgcaaaatgcataattaaattagacaatatattaagagaacttagccttcatatagaaacttccatcagaggatcccaaagttcctttggagataataaatagcaaatattaattattaattgagctagcacagaatactcatggtcccagtgcactttaacagaattgattatgcagtacaatacgaatgccacagcaaatcttgctcgcctttttcatttgcatagtctcaacaaaattta

SEQ ID NO: 64046 - DNA, 600 bp, Chicken  19866894329560_6
tatgaaagctgacataaactatgtaccttttttccataaaagaactggtctgatttaccttttcattggtagttggtacatttttgcataaccttccaggagatttcacatgagaaactgatttctttactcctttggtgcttgggtggctttttccattactgtaactagcaaggattaaacacagtgtcacacattaatagaaatgtttgtgattgtcagaagagaaatccaataaaagtttaccattaagtttcargaagagagagttggttgcaaatggtcttaaccttcatagymattatgcttktgttttttatacagctactataatactacatttttaatactaagactgcaaaatgcataattaaattagacaatatattaagagaacttagccttcatatagaaacttccatcagaggatcccaaagttcctttggagataataaatagcaaatattaattattaattgagctagcacagaatactcatggtcccagtgcactttaacagaattgattatgcagtacaatacgaatgccacagcaaatcttgctcgcctttttcatttgcatagtctcaacaaaatttaa

SEQ ID NO: 64047 - DNA, 600 bp, Chicken  19866894329560_7
gacataaactatgtaccttttttccataaaagaactggtctgatttaccttttcattggtagttggtacatttttgcataaccttccaggagatttcacatgagaaactgatttctttactcctttggtgcttgggtggctttttccattactgtaactagcaaggattaaacacagtgtcacacattaatagaaatgtttgtgattgtcagaagagaaatccaataaaagtttaccattaagtttcargaagagagagttggttgcaaatggtcttaaccttcatagymattatgcttktgttttttatacagctactataatactacatttttaatactaagactgcaaaatgcataattaaattagacaatatattaagagaacttagccttcatatagaaacttccatcagaggatcccaaagttcctttggagataataaatagcaaatattaattattaattgagctagcacagaatactcatggtcccagtgcactttaacagaattgattatgcagtacaatacgaatgccacagcaaatcttgctcgcctttttcatttgcatagtctcaacaaaatttaaaccgttattc

SEQ ID NO: 64048 - DNA, 600 bp, Chicken  19866894329572_1
ccttactaacagtcctttgtcaggctgcctcagacttcgtgttcttatcctgctggctctgcctgcccactgtgcacttgcaggggacccagatgtcccagggagctcaggctcttgggttgttctgttttggtagggggctgctagtggaggtgcatcgtaagagcctgcaaaagggatgaaagcatgccatggtgcacagggtgccccaaatgggacatctgcttcctgtaactagctgggaagcaccacgtcagcagcaggagcacccaggcatctctcatgctggggtgtgctttrgtrccataagcctgcaaggccaggaggtggctcagggcagttctggtcagctctctgcctcccaggtctgtgctgggtacctgggacacagtagcaccaagcagacgcagcaacacctcagcaagcctgacacctgtcagggtgctgccttcagagcaaccacttttggatatggctttatctgcagacagaactgcaggaaaggtacaagcaggagatgctctgccccatcagtgctagcttagcattattccacctgcttgggggttgcacaagccgcaggccaaaagcacagtattt

SEQ ID NO: 64049 - DNA, 600 bp, Chicken  19866894329572_2
tactaacagtcctttgtcaggctgcctcagacttcgtgttcttatcctgctggctctgcctgcccactgtgcacttgcaggggacccagatgtcccagggagctcaggctcttgggttgttctgttttggtagggggctgctagtggaggtgcatcgtaagagcctgcaaaagggatgaaagcatgccatggtgcacagggtgccccaaatgggacatctgcttcctgtaactagctgggaagcaccacgtcagcagcaggagcacccaggcatctctcatgctggggtgtgctttrgtrccataagcctgcaaggccaggaggtggctcagggcagttctggtcagctctctgcctcccaggtctgtgctgggtacctgggacacagtagcaccaagcagacgcagcaacacctcagcaagcctgacacctgtcagggtgctgccttcagagcaaccacttttggatatggctttatctgcagacagaactgcaggaaaggtacaagcaggagatgctctgccccatcagtgctagcttagcattattccacctgcttgggggttgcacaagccgcaggccaaaagcacagtatttctc

SEQ ID NO: 64050 - DNA, 600 bp, Chicken  19866894329572_3
gaactgcaggaaaggtacaagcaggagatgctctgccccatcagtgctagcttagcattattccacctgcttgggggttgcacaagccgcaggccaaaagcacagtatttctcccatagctctgtatcatgctcccagctgcaggcagcaggagtgagaatacgggtcttggctggcacacgcagctgttgggtaacagctgtggacagaaacaccctgcaggtaataagtggcccagacttctgtttggtgttgtttctttttcccccagctaagccctggaagtacgaacagctcagygctccagcagsctatgcgggtgttctccttgctctgccaaagcctggccccatccctgcagtagaataccatcttccaggataagctgtaccttggctgcagagattggagcaggaaagcaaccttctgtcagggcaggcagggtgctgcacgtcgggacgaaatgactctgctcctggaactcctaggaataacctcatctgtgtggctttaacatcatctagagaataaatatatatatatgagtcaatttaggaatgtattgcccagccccttgttctgaatgagtttgcaatagca

SEQ ID NO: 64051 - DNA, 600 bp, Chicken  19866894329572_4
aaggtacaagcaggagatgctctgccccatcagtgctagcttagcattattccacctgcttgggggttgcacaagccgcaggccaaaagcacagtatttctcccatagctctgtatcatgctcccagctgcaggcagcaggagtgagaatacgggtcttggctggcacacgcagctgttgggtaacagctgtggacagaaacaccctgcaggtaataagtggcccagacttctgtttggtgttgtttctttttcccccagctaagccctggaagtacgaacagctcagygctccagcagsctatgcgggtgttctccttgctctgccaaagcctggccccatccctgcagtagaataccatcttccaggataagctgtaccttggctgcagagattggagcaggaaagcaaccttctgtcagggcaggcagggtgctgcacgtcgggacgaaatgactctgctcctggaactcctaggaataacctcatctgtgtggctttaacatcatctagagaataaatatatatatatgagtcaatttaggaatgtattgcccagccccttgttctgaatgagtttgcaatagcatcaccaaggat

SEQ ID NO: 64052 - DNA, 599 bp, Chicken  19866894329574_1
  misc_feature (1)..(195): n is any nucleotide
nnnnnnnnnnnnnnnnnnnnnnnnnnnnnnnnnnnnnnnnnnnnnnnnnnnnnnnnnnnnnnnnnnnnnnnnnnnnnnnnnnnnnnnnnnnnnnnnnnnnnnnnnnnnnnnnnnnnnnnnnnnnnnnnnnnnnnnnnnnnnnnnnnnnnnnnnnnnnnnnnnnnnnnnnnnnnnnnnnnnnnnnnnnnnnnnnnntatcttctctgggaattttctatcagtcagttagaaacactgcttctctgttttcttttcaaatgtctgttgcttggctaacaaaatacctgagcattctttctkaaaagcatgtgtgcatacttcttagtgaatagcttttttcagctgatttcaattcgttcatcagctgatttcacctcattctgtttagaagccatctatgaacagattaggagagtctcaatgacactttttacattaaagtactgcagcattcctttttttgagaacatttccatggctactgataatgccacaccactttctgccttgtcagaacctgtcactatctgtacaaccagcactctaaacatcaagatgatttgcaaccaatttacagaaaagctcaaaatgtcttctac

SEQ ID NO: 64053 - DNA, 600 bp, Chicken  19866894329578_1
caggccttcacatcattttccatttgaagctttaagaagtgctctgtgcttttggatttctttaaaaagaccaaaacagaatcagaagtgccagtcctgtttgcctgacacgtggcaggcacggtgcagttcacctggatgcacatgttttccaagaaccaaaaggcatcacaggcagggctctggcagcaggcagtctgacaggactgcacagtgtgaaagccttccagaagccgtaagtgatgatcttcccatgactgcaaacgtccaccaagcaggatcttccctggctcacatttmgatctgttccagtttgcatctgggaacgaggaagacaaaaacaattctcagttttttaaagcagtcaacaataaatcctcatcactactgtcaagacaaagttagcatgctctgcccatagtttcccttgcagtagtaacagtgccttgcttcacagtataaaagcaattatctgtcaaayatttcttyacaattaaagttacttcagatttcaggttgggggtaaagcagcaactgctttacatatggatttctttttctaacatgaagaattggagtgcttgcagggatcaatggatt

SEQ ID NO: 64054 - DNA, 600 bp, Chicken  19866894329578_2
tctggcagcaggcagtctgacaggactgcacagtgtgaaagccttccagaagccgtaagtgatgatcttcccatgactgcaaacgtccaccaagcaggatcttccctggctcacatttmgatctgttccagtttgcatctgggaacgaggaagacaaaaacaattctcagttttttaaagcagtcaacaataaatcctcatcactactgtcaagacaaagttagcatgctctgcccatagtttcccttgcagtagtaacagtgccttgcttcacagtataaaagcaattatctgtcaaayatttcttyacaattaaagttacttcagatttcaggttgggggtaaagcagcaactgctttacatatggatttctttttctaacatgaagaattggagtgcttgcagggatcaatggattaaaggcttccaaaattcagagctctgcagattaaggactccctaaaaatagactgatgacctatgggactgttacactgtgctgcgttcagcatccaagggataataggtcactggaagattactttaccaactatgccactggactttgtgttgtgatctgcccccctccccgttaggac

SEQ ID NO: 64055 - DNA, 600 bp, Chicken  19866894329578_3
caggcagtctgacaggactgcacagtgtgaaagccttccagaagccgtaagtgatgatcttcccatgactgcaaacgtccaccaagcaggatcttccctggctcacatttmgatctgttccagtttgcatctgggaacgaggaagacaaaaacaattctcagttttttaaagcagtcaacaataaatcctcatcactactgtcaagacaaagttagcatgctctgcccatagtttcccttgcagtagtaacagtgccttgcttcacagtataaaagcaattatctgtcaaayatttcttyacaattaaagttacttcagatttcaggttgggggtaaagcagcaactgctttacatatggatttctttttctaacatgaagaattggagtgcttgcagggatcaatggattaaaggcttccaaaattcagagctctgcagattaaggactccctaaaaatagactgatgacctatgggactgttacactgtgctgcgttcagcatccaagggataataggtcactggaagattactttaccaactatgccactggactttgtgttgtgatctgcccccctccccgttaggaccacaacac

SEQ ID NO: 64056 - DNA, 600 bp, Chicken  19866894329582_1
gagaacaaagcattaccttcttctccagcagcagaatttccaacagcctccctttcctggtcaacctggttggaaaccgcacttccactttttgtccttcgaagaacactgaatgccttgtttatttttttaaaagatctgcttcttatagtggagcgttcaaagtgtcgagctgcaagagcagcaaaaaaatcaatgtttcaacagttccagatccacatcatttctacatccttcagcagacaaagggcaaaaaagcaacgctttgttgttgtgaatccaacacccacctgcatggargtacaattatcctacctctgtcycacaccctggcactgccacctctcctgtctattctgccaaccacatgyagacatctgtacctgcaagcgtggcagtttgggagagaataatccttggtcagggcagaatcagcaacaatccagagaaaaatgtatagaagaggaagaaatgctgcccttctcaagctacataagttagatccccccccaccccaaaaatctggamgttgttgctgaaaatttttgttgaataaaaatcctctactgcttctaaaccctgcagtgcttccaatctgcc

SEQ ID NO: 64057 - DNA, 600 bp, Chicken  19866894329582_2
tccagcagcagaatttccaacagcctccctttcctggtcaacctggttggaaaccgcacttccactttttgtccttcgaagaacactgaatgccttgtttatttttttaaaagatctgcttcttatagtggagcgttcaaagtgtcgagctgcaagagcagcaaaaaaatcaatgtttcaacagttccagatccacatcatttctacatccttcagcagacaaagggcaaaaaagcaacgctttgttgttgtgaatccaacacccacctgcatggargtacaattatcctacctctgtcycacaccctggcactgccacctctcctgtctattctgccaaccacatgyagacatctgtacctgcaagcgtggcagtttgggagagaataatccttggtcagggcagaatcagcaacaatccagagaaaaatgtatagaagaggaagaaatgctgcccttctcaagctacataagttagatccccccccaccccaaaaatctggamgttgttgctgaaaatttttgttgaataaaaatcctctactgcttctaaaccctgcagtgcttccaatctgccaacaatagccaacagtttgatga

SEQ ID NO: 64058 - DNA, 600 bp, Chicken  19866894329582_3
ggaaaccgcacttccactttttgtccttcgaagaacactgaatgccttgtttatttttttaaaagatctgcttcttatagtggagcgttcaaagtgtcgagctgcaagagcagcaaaaaaatcaatgtttcaacagttccagatccacatcatttctacatccttcagcagacaaagggcaaaaaagcaacgctttgttgttgtgaatccaacacccacctgcatggargtacaattatcctacctctgtcycacaccctggcactgccacctctcctgtctattctgccaaccacatgyagacatctgtacctgcaagcgtggcagtttgggagagaataatccttggtcagggcagaatcagcaacaatccagagaaaaatgtatagaagaggaagaaatgctgcccttctcaagctacataagttagatccccccccaccccaaaaatctggamgttgttgctgaaaatttttgttgaataaaaatcctctactgcttctaaaccctgcagtgcttccaatctgccaacaatagccaacagtttgatgacaaaaattcagagatcatcaggtgggagggacctactaagtcacatct

SEQ ID NO: 64059 - DNA, 447 bp, Chicken  19866894329582_4
acatccttcagcagacaaagggcaaaaaagcaacgctttgttgttgtgaatccaacacccacctgcatggargtacaattatcctacctctgtcycacaccctggcactgccacctctcctgtctattctgccaaccacatgyagacatctgtacctgcaagcgtggcagtttgggagagaataatccttggtcagggcagaatcagcaacaatccagagaaaaatgtatagaagaggaagaaatgctgcccttctcaagctacataagttagatccccccccaccccaaaaatctggamgttgttgctgaaaatttttgttgaataaaaatcctctactgcttctaaaccctgcagtgcttccaatctgccaacaatagccaacagtttgatgacaaaaattcagagatcatcaggtgggagggacctactaagtcacatcttcta

SEQ ID NO: 64060 - DNA, 600 bp, Chicken  19866894329583_1
cacacacaatctccattctgtgcaattacatcaaagagaatattttggggacagatcctcagctgatttaccctctgttttcaaacccattgtaggaactcagttaagcatgtgatttttttacctaaatgtataggtgaataggaacatcaatccaacccctttagacagaatgactgtatcacttatttggaagggtagaaggagaaaattggaaaaggaagattctgggtaatgtataaggacctcacccacaaggccaagcatggaaatattctggcaagttctgggaaatactcygaggtcacagagagagcttaagctatcctgtatgtttcctttgcactactttcccatgcttcktayttagcaaaatctttcttcatctcttcctctcatattgccatttctgtcttgttgggctggtatttgttatgtgactgcaattcttgacrtggaattcctaaaygatctctggttggggggcacagagaggtcattctcgtcgatgtacattgatcactggatgtatgtgcaytggggcaaacagcatcagaaaatgtaaataggaagtgtgatccaggaaggagcttggtgaat

SEQ ID NO: 64061 - DNA, 600 bp, Chicken  19866894329583_2
tgatttaccctctgttttcaaacccattgtaggaactcagttaagcatgtgatttttttacctaaatgtataggtgaataggaacatcaatccaacccctttagacagaatgactgtatcacttatttggaagggtagaaggagaaaattggaaaaggaagattctgggtaatgtataaggacctcacccacaaggccaagcatggaaatattctggcaagttctgggaaatactcygaggtcacagagagagcttaagctatcctgtatgtttcctttgcactactttcccatgcttcktayttagcaaaatctttcttcatctcttcctctcatattgccatttctgtcttgttgggctggtatttgttatgtgactgcaattcttgacrtggaattcctaaaygatctctggttggggggcacagagaggtcattctcgtcgatgtacattgatcactggatgtatgtgcaytggggcaaacagcatcagaaaatgtaaataggaagtgtgatccaggaaggagcttggtgaatagaaggaagcacttacagcagttttgttagaagtcacaataaacttcatcagaaccaggactg

SEQ ID NO: 64062 - DNA, 600 bp, Chicken  19866894329583_3
tttaccctctgttttcaaacccattgtaggaactcagttaagcatgtgatttttttacctaaatgtataggtgaataggaacatcaatccaacccctttagacagaatgactgtatcacttatttggaagggtagaaggagaaaattggaaaaggaagattctgggtaatgtataaggacctcacccacaaggccaagcatggaaatattctggcaagttctgggaaatactcygaggtcacagagagagcttaagctatcctgtatgtttcctttgcactactttcccatgcttcktayttagcaaaatctttcttcatctcttcctctcatattgccatttctgtcttgttgggctggtatttgttatgtgactgcaattcttgacrtggaattcctaaaygatctctggttggggggcacagagaggtcattctcgtcgatgtacattgatcactggatgtatgtgcaytggggcaaacagcatcagaaaatgtaaataggaagtgtgatccaggaaggagcttggtgaatagaaggaagcacttacagcagttttgttagaagtcacaataaacttcatcagaaccaggactgaat

SEQ ID NO: 64063 - DNA, 600 bp, Chicken  19866894329583_4
caacccctttagacagaatgactgtatcacttatttggaagggtagaaggagaaaattggaaaaggaagattctgggtaatgtataaggacctcacccacaaggccaagcatggaaatattctggcaagttctgggaaatactcygaggtcacagagagagcttaagctatcctgtatgtttcctttgcactactttcccatgcttcktayttagcaaaatctttcttcatctcttcctctcatattgccatttctgtcttgttgggctggtatttgttatgtgactgcaattcttgacrtggaattcctaaaygatctctggttggggggcacagagaggtcattctcgtcgatgtacattgatcactggatgtatgtgcaytggggcaaacagcatcagaaaatgtaaataggaagtgtgatccaggaaggagcttggtgaatagaaggaagcacttacagcagttttgttagaagtcacaataaacttcatcagaaccaggactgaattaaaaagagatctgggcatgatgtgtcttctacttacatgcttgaagtatttaggggaaaagatcaaatatctaattataatcttctga

SEQ ID NO: 64064 - DNA, 600 bp, Chicken  19866894329583_5
agaatgactgtatcacttatttggaagggtagaaggagaaaattggaaaaggaagattctgggtaatgtataaggacctcacccacaaggccaagcatggaaatattctggcaagttctgggaaatactcygaggtcacagagagagcttaagctatcctgtatgtttcctttgcactactttcccatgcttcktayttagcaaaatctttcttcatctcttcctctcatattgccatttctgtcttgttgggctggtatttgttatgtgactgcaattcttgacrtggaattcctaaaygatctctggttggggggcacagagaggtcattctcgtcgatgtacattgatcactggatgtatgtgcaytggggcaaacagcatcagaaaatgtaaataggaagtgtgatccaggaaggagcttggtgaatagaaggaagcacttacagcagttttgttagaagtcacaataaacttcatcagaaccaggactgaattaaaaagagatctgggcatgatgtgtcttctacttacatgcttgaagtatttaggggaaaagatcaaatatctaattataatcttctgatgcatagcccagta

SEQ ID NO: 64065 - DNA, 594 bp, Chicken  19866894329583_6
ataaggacctcacccacaaggccaagcatggaaatattctggcaagttctgggaaatactcygaggtcacagagagagcttaagctatcctgtatgtttcctttgcactactttcccatgcttcktayttagcaaaatctttcttcatctcttcctctcatattgccatttctgtcttgttgggctggtatttgttatgtgactgcaattcttgacrtggaattcctaaaygatctctggttggggggcacagagaggtcattctcgtcgatgtacattgatcactggatgtatgtgcaytggggcaaacagcatcagaaaatgtaaataggaagtgtgatccaggaaggagcttggtgaatagaaggaagcacttacagcagttttgttagaagtcacaataaacttcatcagaaccaggactgaattaaaaagagatctgggcatgatgtgtcttctacttacatgcttgaagtatttaggggaaaagatcaaatatctaattataatcttctgatgcatagcccagtaggctctggcacactcacaagggaagaaggactgagtttaaggatctatgcacattttccatta

SEQ ID NO: 64066 - DNA, 600 bp, Chicken  19866894329599_1
taagttttcctagtctctaaaaatgtgctatttccagttaatgtgattattgtgtgtgaaaggtaggacagttattacatattacattctgaaccagatagttacctttgtatttgctgtaaactgcaagcaccgctctattcagaatgcatgttaaattcaatacatttttactaccaatgacaagttcccttcacagcttccagcttctgaaaacaaaacaagccaaattccagcaatgctctcttgttttcacagagaacatagtcaggttttaaatactcatggtaatgacagaargtttaatgatctcatcaaaaattgcatcagatgttttatcactatttcttctcctccacacagaagaagggagcaacaaaaagagacagcagaacgccaccacgaaagcaatattccctctattgagaggtagcttcctagcaattaacattatggattgtttgaaagctgtggcaaacagacctagagaatactgataagaagattaattattcatttcaaactccacttgttacctactagtgatgaaaaaataaaaatatggcttcaaccccccmaaattcagaaattaaaaatcct

SEQ ID NO: 64067 - DNA, 484 bp, Chicken  19866894329599_2
atactcatggtaatgacagaargtttaatgatctcatcaaaaattgcatcagatgttttatcactatttcttctcctccacacagaagaagggagcaacaaaaagagacagcagaacgccaccacgaaagcaatattccctctattgagaggtagcttcctagcaattaacattatggattgtttgaaagctgtggcaaacagacctagagaatactgataagaagattaattattcatttcaaactccacttgttacctactagtgatgaaaaaataaaaatatggcttcaaccccccmaaattcagaaattaaaaatcctccatgcttataatcaatgttattcacacatcttgttcagttccgaaacaccctctctcttttttaaaggagtaaaaaactggagttccttcatctcacatctgcttgtcattatttttgctttctatacctaatcagagtagacaaacaatctgaggaaaga

SEQ ID NO: 64068 - DNA, 600 bp, Chicken  19866894329606_1
aaatccattcacaaaaatcactaagacagttaattcactttattcctcctctgctctagttattctgtttggggaggcagggtgggaagagagagctaatttaaagggaaaaaaaaaagcacgagaatgagaagctagagccaataaacacacatcaaagcacgaaatggctctgcttcaactgactacagtattcaacctgggatagattaaggggagataaaaggtgctaggagagaaaatgctgcccctacagcagcacagaccccacgtgagtttggccccgaagcgccagccccrccaggtctgtcacactgcatgtggcaaatgcacaagatagatcggttcacagggacccaaactaagcaaactcaatggggttctgctgcacacagcaaggaggtccagagcccctcctgctcccccactgcagagcaggagctgcatccatcgatcctgtgagtcacagtgagccgcaggaggcaggagcaaaggtttagcacagggcattaaacctggctgcccgagctgtcacctcagttattccacaaacagagaaacaaattggagtcacggtgacagatgttactcatgttttat

SEQ ID NO: 64069 - DNA, 600 bp, Chicken  19866894329608_1
ttgttctagaaggaagtagcctttttttgtagataaaaaggcatgttaacatttgtgtataccagccttcacattcatgaaaacaaggataatatgcaagattctggaagaaagatataaaacagactgaactaagcccaacactgtgaagtgtccaaaggagcatcaagaaggtttgtccatcaacaactcccaccttatggccaaatcaaatagagaagaaattcctattattaggcttctataaatctgctgaaagtaagatgaatctgaaaaatacatttaattaatgctcatttkaaatgaaatcagaagtcctagtaatatcccagtatgaccatcccattacaattggcatcataaccctttcctattaaaaaatacaattgaaaaaagaaaaaycacattttcgaaaatcaacttctcagtcttctacttagtaactatatgcccagcataactttggagcaaatgtgaataaaatctacatgtatgaaaagaaacaaaaaaagaatacattaatctgaccttagtacattatctgaatatgcatcgctctggtcttattcactgtatcacccatagagatatctgtatatg

SEQ ID NO: 64070 - DNA, 600 bp, Chicken  19866894329608_2
tctggaagaaagatataaaacagactgaactaagcccaacactgtgaagtgtccaaaggagcatcaagaaggtttgtccatcaacaactcccaccttatggccaaatcaaatagagaagaaattcctattattaggcttctataaatctgctgaaagtaagatgaatctgaaaaatacatttaattaatgctcatttkaaatgaaatcagaagtcctagtaatatcccagtatgaccatcccattacaattggcatcataaccctttcctattaaaaaatacaattgaaaaaagaaaaaycacattttcgaaaatcaacttctcagtcttctacttagtaactatatgcccagcataactttggagcaaatgtgaataaaatctacatgtatgaaaagaaacaaaaaaagaatacattaatctgaccttagtacattatctgaatatgcatcgctctggtcttattcactgtatcacccatagagatatctgtatatgcgtggcatggaagaaataaatgcctcaaatgacctatcaagtattgaagtctactcagagtcttcttcaacttatgagtcattttattgtggggcatcgtac

SEQ ID NO: 64071 - DNA, 600 bp, Chicken  19866894329610_1
tatttaagttggacatcaggaaaaattgcctaacaatcaagtcaattagagtctgggaagggctctcaagggagtctcaatccatctaacccctgctctgaagaatatgtcctagtactgtgtctaacagcaggaatagcaggagatgaatgtgcttatttgagggtaaattgccctcaatatgaatgcacccagaaattttcagagtaataagagtaacttctcaactgacaaatgcttgttgtctgtttgttgctgccattcacagctgtgcatagtaagtagaatgagcacaaatgratagtatgacactctcttgagtgagtttgtgatatataaatacagtggtagtattacaaatgtctcctgatcctataggatactcactgttatgcaattgacagtatccagagtgttccaagcaagaagtagattttcatatccagatgaagaaaagtctgggtggaatgtggtgcgagcttggtggcattcttcctcttgactcaaacaggttttggggatctgcacagttcatgcactgagaattctgagcagtgccagagaatctgaagtgcaagtaggagatgaaacaaagactca

SEQ ID NO: 64072 - DNA, 600 bp, Chicken  19866894329611_1
ctagaggcatcccaccctttatataaaacctcgctgcttgcagcgttggcttatgggagccaacattgctcggctccccagggagaaagccgcagtgatactgtcactgctcattacctccagtgggtgctgctgtgaacaagcctatgggaaaaaaaacagggtaaaagaaaaaagtactacagaagttcataaacatgtcccacatctggaaagttcgcctgatctatacaaacagaaaagaacaaagttggccagaaactaaaccattgcaccgccttgccatttatgaccatcttycataccgatcagataaacacaaacgcttccttcttcatcagctgtgctagtgtaaggctgtgaaggagccaagccctccttttgcaatttcagactgctcccaggagccacgcagtgcagtgcagtgctgttcctacagcctcacaggaatgcccagcagtcgacatccatcacagggcaggccaacctcacagcttcaccacctccaagtggctgagaagctgtgataaataaagcattgcaatcccagatttgagaccctccctcttgaaaatgtaattggaattaggatggaaagta

SEQ ID NO: 64073 - DNA, 600 bp, Chicken  19866894329620_1
tggctgctagtgagcacgtcctttaacctgcagttaagattaaggcccttgttgctccgctcaaatcctccttcccatgcagaggaaacaccttgctgataataaagtaacccagaattggctttatacagagaagagagaacatctgagcagctgtcagtgcgcacaggcagcaatggctcagcatggcacgcagagcgagggctgctctgagccagttgtatccgtgtcacagctcttacctgcagcctctgtgctacgtgctcagagctgctttactctcctggggtctttctttcyrtaatacttaaattatcgtaatcaaatacttaatgatgctgtcttacaacaatgctaatgattttactgttcgtactaagctcagtgtctccaccattctgcctttcagaggaatcagattcattgtgtcccctgtctagaacgtgagatacagcactgtgtgaycagactcttcccttgctgacaggtttcaaaggtttggttctgcactgcagtgaattctgataacaaaagcaaaatcatacaccacaaactatctgccaataaaatctgctttaagtgggggggaaaaatggaaaa

SEQ ID NO: 64074 - DNA, 600 bp, Chicken  19866894329620_2
ggctgctagtgagcacgtcctttaacctgcagttaagattaaggcccttgttgctccgctcaaatcctccttcccatgcagaggaaacaccttgctgataataaagtaacccagaattggctttatacagagaagagagaacatctgagcagctgtcagtgcgcacaggcagcaatggctcagcatggcacgcagagcgagggctgctctgagccagttgtatccgtgtcacagctcttacctgcagcctctgtgctacgtgctcagagctgctttactctcctggggtctttctttcyrtaatacttaaattatcgtaatcaaatacttaatgatgctgtcttacaacaatgctaatgattttactgttcgtactaagctcagtgtctccaccattctgcctttcagaggaatcagattcattgtgtcccctgtctagaacgtgagatacagcactgtgtgaycagactcttcccttgctgacaggtttcaaaggtttggttctgcactgcagtgaattctgataacaaaagcaaaatcatacaccacaaactatctgccaataaaatctgctttaagtgggggggaaaaatggaaaat

SEQ ID NO: 64075 - DNA, 600 bp, Chicken  19866894329620_3
acaggcagcaatggctcagcatggcacgcagagcgagggctgctctgagccagttgtatccgtgtcacagctcttacctgcagcctctgtgctacgtgctcagagctgctttactctcctggggtctttctttcyrtaatacttaaattatcgtaatcaaatacttaatgatgctgtcttacaacaatgctaatgattttactgttcgtactaagctcagtgtctccaccattctgcctttcagaggaatcagattcattgtgtcccctgtctagaacgtgagatacagcactgtgtgaycagactcttcccttgctgacaggtttcaaaggtttggttctgcactgcagtgaattctgataacaaaagcaaaatcatacaccacaaactatctgccaataaaatctgctttaagtgggggggaaaaatggaaaattgaagtgaattatttcagaaagccctcagaaatggaatccaaacagaacgcttactgaaaggtaacagtaattattgttctccataaatgatttatccgacatgaaagtgatgcagttaccaagtcaaataacagtttacttctaatgattatgtcaggggagt

SEQ ID NO: 64076 - DNA, 600 bp, Chicken  19866894329620_4
tggtaacatcaaatctgaatcactaaagcaaatccaccagcggtttagaatcaccacctgcaagtcccaccttactgtactgaaggtttgtgatttgcaaggaatcgtgcaccacggaagcatctgcaatccagaaatatttggagaacaatcatccaacctttccccttgcgtttccagagagcaaagcagagggagagcaggagagagggggaactttctgctcccaccagccccctcctgctgaaaactcaggaaatggcacaaaccactgcagtgtgagactgaaacctgagcccyttcttgctgggaactcaaacatccagctggggcttggattaatggatttcaaatgcatggagccagcctccaaaggtgcattaaccagctacatttggaacrccacgctataaaaaaacatgagacttttaattaggtaacttttagcaaagtaaatctgcctcggatatttaataccagcataggaacatttagtgcttacgcagtgtttttcatattggaagagctttwtgtgtagtacctattagaaattaatccgcacatcctctgagctggctgcctgttagctccgtgcagagt

SEQ ID NO: 64077 - DNA, 600 bp, Chicken  19866894329620_5
aatcgtgcaccacggaagcatctgcaatccagaaatatttggagaacaatcatccaacctttccccttgcgtttccagagagcaaagcagagggagagcaggagagagggggaactttctgctcccaccagccccctcctgctgaaaactcaggaaatggcacaaaccactgcagtgtgagactgaaacctgagcccyttcttgctgggaactcaaacatccagctggggcttggattaatggatttcaaatgcatggagccagcctccaaaggtgcattaaccagctacatttggaacrccacgctataaaaaaacatgagacttttaattaggtaacttttagcaaagtaaatctgcctcggatatttaataccagcataggaacatttagtgcttacgcagtgtttttcatattggaagagctttwtgtgtagtacctattagaaattaatccgcacatcctctgagctggctgcctgttagctccgtgcagagtaatagttggaaaccagggctggtaaaagcaatgctcgaaaattcctgtaattattgtcctaaggacttaaagcacactcctcagaaaggatgtaaagcgtga

SEQ ID NO: 64078 - DNA, 600 bp, Chicken  19866894329620_6
agccccctcctgctgaaaactcaggaaatggcacaaaccactgcagtgtgagactgaaacctgagcccyttcttgctgggaactcaaacatccagctggggcttggattaatggatttcaaatgcatggagccagcctccaaaggtgcattaaccagctacatttggaacrccacgctataaaaaaacatgagacttttaattaggtaacttttagcaaagtaaatctgcctcggatatttaataccagcataggaacatttagtgcttacgcagtgtttttcatattggaagagctttwtgtgtagtacctattagaaattaatccgcacatcctctgagctggctgcctgttagctccgtgcagagtaatagttggaaaccagggctggtaaaagcaatgctcgaaaattcctgtaattattgtcctaaggacttaaagcacactcctcagaaaggatgtaaagcgtgagctgaggccctgcagcgagctgcaacacacaaggcagggctacagcaccagccctccagagatccatacagcacacaccaactctgacagcagttaccccagaactctcttcagcatcagtcgtggtga

SEQ ID NO: 64079 - DNA, 600 bp, Chicken  19866894329624_1
gagagctaccaactggaaataccaactccagcttccagcaggacccagccagcccttcctcgtggtttggagagcagatgctcccagggtggacagctgccttagaccacagcatggaatttgggtaagtcacacaactctgctttcgtgtttcatttcaagagtccacttgtccagaggagctgccttgcttactctttacttttctgcttttggtaccagatttagcaaacagaagaccataacaaatggcatcaactcagccttcagtgccttcattaatggtaatgaagaaagatrctaaagacaaatagataaatattaaggaggaagaacatgtgtcacatcagtaaattcatcagttaatataaattaattttaaaaagcaccaacagaaaatagcatccttagattgtaataaagcagagagaatataaattctatatatctttgcctttttttccttgccagcaaaatcaagggagaacacataaatcaacaacatcacagctttacacgctgtcaaaaaccaagatagaatatgaacataacccagcttcaagtggatctgaagaaaccgaatgttgtagtccatatgcc

SEQ ID NO: 64080 - DNA, 600 bp, Chicken  19866894329624_2
ttaaggaggaagaacatgtgtcacatcagtaaattcatcagttaatataaattaattttaaaaagcaccaacagaaaatagcatccttagattgtaataaagcagagagaatataaattctatatatctttgcctttttttccttgccagcaaaatcaagggagaacacataaatcaacaacatcacagctttacacgctgtcaaaaaccaagatagaatatgaacataacccagcttcaagtggatctgaagaaaccgaatgttgtagtccatatgccagctttgtaattactaaaacrctggacatacccttgcttctgagtactggcctagattagcaagtcayctgaaagtttacaatgggaaaactatatggatgtattcttgtagctacatgtgtacagtaattatggcacaggtaagcaataacacacgcctaaggcatcaaacttggtgaggcatgaggcttacgtgcatatctacagttatgacttcagacttcaaagcacttctactgctcagacaaaatcagtagcctacttttcttgtaaaacacacacaaggatctattactataaaacacatataggtgcttatat

SEQ ID NO: 64081 - DNA, 600 bp, Chicken  19866894329624_3
taaattaattttaaaaagcaccaacagaaaatagcatccttagattgtaataaagcagagagaatataaattctatatatctttgcctttttttccttgccagcaaaatcaagggagaacacataaatcaacaacatcacagctttacacgctgtcaaaaaccaagatagaatatgaacataacccagcttcaagtggatctgaagaaaccgaatgttgtagtccatatgccagctttgtaattactaaaacrctggacatacccttgcttctgagtactggcctagattagcaagtcayctgaaagtttacaatgggaaaactatatggatgtattcttgtagctacatgtgtacagtaattatggcacaggtaagcaataacacacgcctaaggcatcaaacttggtgaggcatgaggcttacgtgcatatctacagttatgacttcagacttcaaagcacttctactgctcagacaaaatcagtagcctacttttcttgtaaaacacacacaaggatctattactataaaacacatataggtgcttatataacgtgagaattaaagtgtgggtaccagaactggaaagtgtagggag

SEQ ID NO: 64082 - DNA, 599 bp, Chicken  19866894329627_1
  misc_feature (1)..(7): n is any nucleotide
nnnnnnncctattagttatgtttcgtaaacctctgacttaaataaagtttgacttaaagcttttaactccatatcttttttgttgttaataaaaagatgatgccttaatcatgtactaaatatttgttattaaatatattaattatctctgtttatcataaagtatgtgcatataaatatgcacatatacatatgcatatatacatatgcacatgcaaacataaaaatgttggagaaaactacaaaatattttaaatttgttctttaatggcatttcagtgtaagcaactgagataagcwaaaactaactcatcaagattcttgtcattcatactgtttatttgcaattacatcttaaaattattgtaaatgatctttgttattttattaacaggtgccatatatgtttcagataggttttcctcaaaaaagggatgacagatgtgctttaaatagaatcagctttactgattagtaaatcagtaaatctttactgattcgtactgattaaatagatcagtctttactgatgtctgtagtgctgtttgctagttctcttgtgggcaattgtagccaacaaattcattgcatctgccaaa

SEQ ID NO: 64083 - DNA, 600 bp, Chicken  19866894329630_1
tcagtcagcagatacagtcctcagataattagatcttacagaactgaaagaaagcagcactgtgtctgtagaatcttgaaaccctgctatgaagttaattgtacctccttggaattataaattggtattaaaaatgtcagaaagtgtcagaaagaatattcttttattaagctttggtttatgggaatcatttctctcggtttaatcttttatattctctagaccattcccctaggatataaacgcatgactgatacagccttaactgttagacatcagcattgcagccatttagtatarctcaaaattttctttagatgacctgaaaaagatctatactttaataaaaaacaatgttgtgtaactcagttgcagactagcctgttctgcacctctggttcaattcattatgtataccaatatcagatggcaggagatgaagtgtttaattttaaggtttcaggaagcatatatatcaaatagttatttgaggtgaagaaataaaatgtgctttaggtcaaactgctttagacctctactgctccaagaattgaaaagatttttgtttcatatatgcaacatttatgatacgtaaagact

SEQ ID NO: 64084 - DNA, 589 bp, Chicken  19866894329630_2
tgacctgaaaaagatctatactttaataaaaaacaatgttgtgtaactcagttgcagactagcctgttctgcacctctggttcaattcattatgtataccaatatcagatggcaggagatgaagtgtttaattttaaggtttcaggaagcatatatatcaaatagttatttgaggtgaagaaataaaatgtgctttaggtcaaactgctttagacctctactgctccaagaattgaaaagatttttgtttcatatatgcaacatttatgatacgtaaagacttttgttttgtttttctartggcaccaataacaaacaagacaacttcagaaagtttgaaggcatgtcatctccacagcccatttgaaatgatagctgtaacatctacttttttcacatgacccttcactctaagatgctcttgcaatgtacaggatttgggtggcacacctgtgtgaagctaagtactaaaagccaacgtaaagtttccaaagacacttgcagcccttgtaggctgacattacagaacagcttacgctcctgtgttctgcaattgctacactttcagccagggctctgcctaccttat

SEQ ID NO: 64085 - DNA, 599 bp, Chicken  19866894329632_1
  misc_feature (1)..(86): n is any nucleotide
nnnnnnnnnnnnnnnnnnnnnnnnnnnnnnnnnnnnnnnnnnnnnnnnnnnnnnnnnnnnnnnnnnnnnnnnnnnnnnnnnnnnnnttctgaactcctcttagacagatgcctgtactgacaacactacccttcctaaaaaagttgtggggataaagccagaggttctgggtggaagtgttgatgcttttgattgctggaatggtaggagatgtttggaccttttcctcaaacaggcaacaaaataggccttttgcagtttggggctatagatgcatccctcacactcttgacctacagragaggatgaaaatgaactaaaatagtccaaggtttccctgtaattccaaccctcagcatcccacttcctcctgccctgacctgccattgctgcatgctgtagagaaacccttkaattcaaagacatgctttttcatttatctgtgcaattgtttcaggcaactgctgagcaatgccgatagcatttttaaaaccttgttttgtacacatctatattttgatggatttacctaagcaacacagtggcaattagtggatttcactgtgaagatgatggctttaaaatcaagtaaaatattg

SEQ ID NO: 64086 - DNA, 600 bp, Chicken  19866894329632_2
gtactgacaacactacccttcctaaaaaagttgtggggataaagccagaggttctgggtggaagtgttgatgcttttgattgctggaatggtaggagatgtttggaccttttcctcaaacaggcaacaaaataggccttttgcagtttggggctatagatgcatccctcacactcttgacctacagragaggatgaaaatgaactaaaatagtccaaggtttccctgtaattccaaccctcagcatcccacttcctcctgccctgacctgccattgctgcatgctgtagagaaacccttkaattcaaagacatgctttttcatttatctgtgcaattgtttcaggcaactgctgagcaatgccgatagcatttttaaaaccttgttttgtacacatctatattttgatggatttacctaagcaacacagtggcaattagtggatttcactgtgaagatgatggctttaaaatcaagtaaaatattgcacgtaactgggatggtcatatgttcaatagtcrcactgaatccttcaatcmtgtccccttctacaaacaccagaacaggtgtgagaggtagggtaacaggctcagtgactccg

SEQ ID NO: 64087 - DNA, 600 bp, Chicken  19866894329632_3
ttccctgtaattccaaccctcagcatcccacttcctcctgccctgacctgccattgctgcatgctgtagagaaacccttkaattcaaagacatgctttttcatttatctgtgcaattgtttcaggcaactgctgagcaatgccgatagcatttttaaaaccttgttttgtacacatctatattttgatggatttacctaagcaacacagtggcaattagtggatttcactgtgaagatgatggctttaaaatcaagtaaaatattgcacgtaactgggatggtcatatgttcaatagtcrcactgaatccttcaatcmtgtccccttctacaaacaccagaacaggtgtgagaggtagggtaacaggctcagtgactccgtgtgcaacagatgaaaacatttcactggcgtcttggtggaaaacattggtgaccagaggtcatcacaacacatacatgctctgaaacagcatctccggagaactgctccagcattagaaatacaagaaactcagctctaatgggaccacttgtccaaaggtttttgacacaacagatttataagaagcattaataaggagagctcttggggcaataaaag

SEQ ID NO: 64088 - DNA, 600 bp, Chicken  19866894329632_4
ctcagcatcccacttcctcctgccctgacctgccattgctgcatgctgtagagaaacccttkaattcaaagacatgctttttcatttatctgtgcaattgtttcaggcaactgctgagcaatgccgatagcatttttaaaaccttgttttgtacacatctatattttgatggatttacctaagcaacacagtggcaattagtggatttcactgtgaagatgatggctttaaaatcaagtaaaatattgcacgtaactgggatggtcatatgttcaatagtcrcactgaatccttcaatcmtgtccccttctacaaacaccagaacaggtgtgagaggtagggtaacaggctcagtgactccgtgtgcaacagatgaaaacatttcactggcgtcttggtggaaaacattggtgaccagaggtcatcacaacacatacatgctctgaaacagcatctccggagaactgctccagcattagaaatacaagaaactcagctctaatgggaccacttgtccaaaggtttttgacacaacagatttataagaagcattaataaggagagctcttggggcaataaaagcaggtaagaaagaattat

SEQ ID NO: 64089 - DNA, 600 bp, Chicken  19866894329633_1
ataagaacaaaaaaaaaagtctgaagaaatttcagtttttatacatatcaacttgtatagcctttcagtagactttgagcacaaaatagaggattgtcttgaaagcaaatgaattttggtttgagtagttagtgctttatatgtagttattcatcatggttaaataaacaacgccttggtacgaatgtaatattataagccacatattagaattttccctctccagctttaacctatagcttaaatgaaaaataacatgcatcaaattgcaagaattatgcacgggcatttatttcagtrtcagagatgtttggatgcagttatgtgtttcagttgtgccaataaataaacaatacatttattctagctttatttttggagcattttacaccttcaagtatattaaatgcgttctgatcatacattatgcaccacgtactctttgtaattatggcaatctgactagttgttagggttgaaaaaggtaactgccactagaaatcagaaaaaagtgaattcattaatgcattttgttatgtaagagcactgtcaaagttgccattttatgtcaagttcagaaatatgctaaaatactgccct

SEQ ID NO: 64090 - DNA, 600 bp, Chicken  19866894329633_2
ggagcattttacaccttcaagtatattaaatgcgttctgatcatacattatgcaccacgtactctttgtaattatggcaatctgactagttgttagggttgaaaaaggtaactgccactagaaatcagaaaaaagtgaattcattaatgcattttgttatgtaagagcactgtcaaagttgccattttatgtcaagttcagaaatatgctaaaatactgccctttgagaaaatgtattcttaatatttcagttgcactgacagagattcacttcaggtttcaaagtcatatatgtatctygtgtcaaaaatctcggctgtaaatgatgctatatatgtgtggcagaatagaatgaggagaagtgaggtcagagtatatataatttatgttgtcaaaaatatgaaacaagagactaagagactaccacctcttttttttttttttaactgtcctgtaccaggtaggataaatggcacattaaaacttcgagcttggggtgctggctgaagaaaacttctctgttgaagaaagtgtttataaggttttacatccagtctagctagggtgaatatgtttaaagctttgctatacccttaggta

SEQ ID NO: 64091 - DNA, 600 bp, Chicken  19866894329633_3
aaagtgaattcattaatgcattttgttatgtaagagcactgtcaaagttgccattttatgtcaagttcagaaatatgctaaaatactgccctttgagaaaatgtattcttaatatttcagttgcactgacagagattcacttcaggtttcaaagtcatatatgtatctygtgtcaaaaatctcggctgtaaatgatgctatatatgtgtggcagaatagaatgaggagaagtgaggtcagagtatatataatttatgttgtcaaaaatatgaaacaagagactaagagactaccacctcytttttttttttttaactgtcctgtaccaggtaggataaatggcacattaaaacttcgagcttggggtgctggctgaagaaaacttctctgttgaagaaagtgtttataaggttttacatccagtctagctagggtgaatatgtttaaagctttgctatacccttaggtactctacatatctaatagataccagataacatgtgatattagatgttattacatagcacatttgcccagagagattgtggatgccccctccctgggaggtgttcaaggccaggctggttgaggctttgagca

SEQ ID NO: 64092 - DNA, 600 bp, Chicken  19866894329633_4
aagtgaattcattaatgcattttgttatgtaagagcactgtcaaagttgccattttatgtcaagttcagaaatatgctaaaatactgccctttgagaaaatgtattcttaatatttcagttgcactgacagagattcacttcaggtttcaaagtcatatatgtatctygtgtcaaaaatctcggctgtaaatgatgctatatatgtgtggcagaatagaatgaggagaagtgaggtcagagtatatataatttatgttgtcaaaaatatgaaacaagagactaagagactaccacctctyttttttttttttaactgtcctgtaccaggtaggataaatggcacattaaaacttcgagcttggggtgctggctgaagaaaacttctctgttgaagaaagtgtttataaggttttacatccagtctagctagggtgaatatgtttaaagctttgctatacccttaggtactctacatatctaatagataccagataacatgtgatattagatgttattacatagcacatttgcccagagagattgtggatgccccctccctgggaggtgttcaaggccaggctggttgaggctttgagcaa

SEQ ID NO: 64093 - DNA, 599 bp, Chicken  19866894329641_1
  misc_feature (1)..(132): n is any nucleotide
nnnnnnnnnnnnnnnnnnnnnnnnnnnnnnnnnnnnnnnnnnnnnnnnnnnnnnnnnnnnnnnnnnnnnnnnnnnnnnnnnnnnnnnnnnnnnnnnnnnnnnnnnnnnnnnnnnnnnnnnnnnnnnnnnnnnccattccctccattttctttcttaattctacaggctcattcattttactaaaatttttactgaactttatttttaaaattctcctaattaaacctataacttgttttagaatcatagaatggtttcatttggatgggatcttaaagatcatctagttccaagccccarccatgcacagggataccttccactagatcaggttgaccaaarcaaaaccacaatatttgcaaagaaagctttacacttaagttgccagggcgggagaatgttgaaggcagcatcaacagtggctgcccagagrgaggaaaaggagtagagattatcagaagagtacctgatgagcagcaaaaaagaaatgtcatccacttagtcagttttactagaggcccaatttacatagcataggaaataagtaaggggaactagaatttttaccctaatctcatgcctaggatactgtaggcctc

SEQ ID NO: 64094 - DNA, 599 bp, Chicken  19866894329641_2
  misc_feature (1)..(90): n is any nucleotide
nnnnnnnnnnnnnnnnnnnnnnnnnnnnnnnnnnnnnnnnnnnnnnnnnnnnnnnnnnnnnnnnnnnnnnnnnnnnnnnnnnnnnnnnnnccattccctccattttctttcttaattctacaggctcattcattttactaaaatttttactgaactttatttttaaaattctcctaattaaacctataacttgttttagaatcatagaatggtttcatttggatgggatcttaaagatcatctagttccaagccccarccatgcacagggataccttccactagatcaggttgaccaaarcaaaaccacaatatttgcaaagaaagctttacacttaagttgccagggcgggagaatgttgaaggcagcatcaacagtggctgcccagagrgaggaaaaggagtagagattatcagaagagtacctgatgagcagcaaaaaagaaatgtcatccacttagtcagttttactagaggcccaatttacatagcataggaaataagtaaggggaactagaatttttaccctaatctcatgcctaggatactgtaggcctcagtgagatgtggcaggatggctcacacaattgaaatgatata

SEQ ID NO: 64095 - DNA, 600 bp, Chicken  19866894329641_3
cattccctccattttctttcttaattctacaggctcattcattttactaaaatttttactgaactttatttttaaaattctcctaattaaacctataacttgttttagaatcatagaatggtttcatttggatgggatcttaaagatcatctagttccaagccccarccatgcacagggataccttccactagatcaggttgaccaaarcaaaaccacaatatttgcaaagaaagctttacacttaagttgccagggcgggagaatgttgaaggcagcatcaacagtggctgcccagagrgaggaaaaggagtagagattatcagaagagtacctgatgagcagcaaaaaagaaatgtcatccacttagtcagttttactagaggcccaatttacatagcataggaaataagtaaggggaactagaatttttaccctaatctcatgcctaggatactgtaggcctcagtgagatgtggcaggatggctcacacaattgaaatgatataatggatgcctacaagtccttcaagagagatagccagtgaaggacagtaggaggggtatacctctacagtggggaagttcttgactgcatggt

SEQ ID NO: 64096 - DNA, 600 bp, Chicken  19866894329641_4
agtgaaggacagtaggaggggtatacctctacagtggggaagttcttgactgcatggtgtttagttatggttattcagaggttcagtctctcagggtaagagtcagggaaagccctacgtgaccatctcaggcatagtgattatgagatgatagagttctccatccttggggaagggaggatcatagaatcagagaatgacctgggttgaaaaggaccacaatgatcacctagtttaacccctgctatgtgcagggtcgccaaccactagaccaggctgcccagagccacatccaacctkgccttgaatgcctccagggatggggcatccacaatctccttgggcaacctgttccagtgctttaccaccttctgtgtgaaaaagtttcttctaatatctgacctaaacctcccctgtctccgttttagactgttcccccttgtcctatcactctccacccccataaacagtcattctccttcctgtttatattctcctttcaagtactggaaggccacagtaaggtctccccagagccttctcttctccaagctaaacaagcccagttccctcaacctttcctcacagcagaggtgctcc

SEQ ID NO: 64097 - DNA, 600 bp, Chicken  19866894329642_1
tgtggggaaaaatcctctttaacagaaattcttacacaatatttcagtttttttctgattacttctagttcttcttttgaaaaggcagcagtttaaaaaaaaccaacaaaaccacaacagtttcaaacccagatttcttgtatgagtgggaggcaatgtttctgtatgaaaattcaaagctgactggtcacctgcacctgacaatgagataagggacttctttatttgttatcatctttgttacattggttaacatatttattacaaaagatgttgaaaaacaaacaaaagagcatttcmtatcccaaactaaatgtttgatgaaagtgagctgtggctgaaaattctaagtagtaataatgcattgaacctatacattattgaacagacagttaccaacagaaggtccacggtgagttagatggccatcatccactgaagccagaaaactgaataaggaattagtcaatatgaatcactggttcattctctgcactgaatgaggaatgactgctgagaagcacagcctgcataaccattaaaactttgggctgagaatctaaactttttttttcccagtattctttcagcttgattaat

SEQ ID NO: 64098 - DNA, 600 bp, Chicken  19866894329646_1
aaaccccacattttttatggatggcagaatgtcatgcttttccagttaagagcagacacgtttaagagtctggcacattggactagagaatttggctttaacaaagaagcttataccaagccaaatacaacaacaaaactaaaaataacctctctgtgtggtacttttctcccataggtagtagccagttacttgtggtatgatccttcaaatattaccatgttttgggtatagtggtgaagtcgctgagttcaagaaagctcccatttgtggctctacttaatgcaggatttcacccamagagctgtaactaaaawtatatttaccgttctttctgtcttcttcccagcagacattcattactgatatcatctgaacctctccagcaaataaaggagccatccrcttctccagcatctccattctcacagcatgcatttttccagcaccttgagggatgagtctgcagatacaaaaggacattagctcaagcagtgatgtaccagcttgcagcagtggtgtactccagcctaaagtcaatactttcagcctttctatmgyagatttctagggtttctcataaatttgttaactatgcac

SEQ ID NO: 64099 - DNA, 600 bp, Chicken  19866894329646_2
tggatggcagaatgtcatgcttttccagttaagagcagacacgtttaagagtctggcacattggactagagaatttggctttaacaaagaagcttataccaagccaaatacaacaacaaaactaaaaataacctctctgtgtggtacttttctcccataggtagtagccagttacttgtggtatgatccttcaaatattaccatgttttgggtatagtggtgaagtcgctgagttcaagaaagctcccatttgtggctctacttaatgcaggatttcacccamagagctgtaactaaaawtatatttaccgttctttctgtcttcttcccagcagacattcattactgatatcatctgaacctctccagcaaataaaggagccatccrcttctccagcatctccattctcacagcatgcatttttccagcaccttgagggatgagtctgcagatacaaaaggacattagctcaagcagtgatgtaccagcttgcagcagtggtgtactccagcctaaagtcaatactttcagcctttctatmgyagatttctagggtttctcataaatttgttaactatgcactagtgtctacatgcagg

SEQ ID NO: 64100 - DNA, 600 bp, Chicken  19866894329646_3
gaagcttataccaagccaaatacaacaacaaaactaaaaataacctctctgtgtggtacttttctcccataggtagtagccagttacttgtggtatgatccttcaaatattaccatgttttgggtatagtggtgaagtcgctgagttcaagaaagctcccatttgtggctctacttaatgcaggatttcacccamagagctgtaactaaaawtatatttaccgttctttctgtcttcttcccagcagacattcattactgatatcatctgaacctctccagcaaataaaggagccatccrcttctccagcatctccattctcacagcatgcatttttccagcaccttgagggatgagtctgcagatacaaaaggacattagctcaagcagtgatgtaccagcttgcagcagtggtgtactccagcctaaagtcaatactttcagcctttctatmgyagatttctagggtttctcataaatttgttaactatgcactagtgtctacatgcaggactggcacaggagaggcacctctgcctttgatagagttggaatgtcaaactctttcaggtctgtctacatccagacacggcaactcac

SEQ ID NO: 64101 - DNA, 600 bp, Chicken  19866894329646_4
gctcccatttgtggctctacttaatgcaggatttcacccamagagctgtaactaaaawtatatttaccgttctttctgtcttcttcccagcagacattcattactgatatcatctgaacctctccagcaaataaaggagccatccrcttctccagcatctccattctcacagcatgcatttttccagcaccttgagggatgagtctgcagatacaaaaggacattagctcaagcagtgatgtaccagcttgcagcagtggtgtactccagcctaaagtcaatactttcagcctttctatmgyagatttctagggtttctcataaatttgttaactatgcactagtgtctacatgcaggactggcacaggagaggcacctctgcctttgatagagttggaatgtcaaactctttcaggtctgtctacatccagacacggcaactcaccctgtgagaaattaacaacagtgacaaaggacaactctttctccagagctagcagggggattatttcatgtactctgaatcaaatggtacattaacagtactacaggaactggcaaggaactggtgaggaaatgtccattaatttaacatctga

SEQ ID NO: 64102 - DNA, 600 bp, Chicken  19866894329646_5
tcccatttgtggctctacttaatgcaggatttcacccamagagctgtaactaaaawtatatttaccgttctttctgtcttcttcccagcagacattcattactgatatcatctgaacctctccagcaaataaaggagccatccrcttctccagcatctccattctcacagcatgcatttttccagcaccttgagggatgagtctgcagatacaaaaggacattagctcaagcagtgatgtaccagcttgcagcagtggtgtactccagcctaaagtcaatactttcagcctttctatmgyagatttctagggtttctcataaatttgttaactatgcactagtgtctacatgcaggactggcacaggagaggcacctctgcctttgatagagttggaatgtcaaactctttcaggtctgtctacatccagacacggcaactcaccctgtgagaaattaacaacagtgacaaaggacaactctttctccagagctagcagggggattatttcatgtactctgaatcaaatggtacattaacagtactacaggaactggcaaggaactggtgaggaaatgtccattaatttaacatctgaat

SEQ ID NO: 64103 - DNA, 600 bp, Chicken  19866894329651_1
aaggaaaaggagaaagtaatacatactgtcagcaaaataaatttgctgtgttgcctgcaagaaatccagaatgctatctgccttctcatctgtgtcttttacgtctgctgctccttctctgttgttttcgtcaggctgatatgtaaaatccacaccggtagtttttgttagcaagccagctgctctcattttttctttctgtcgcttctttttcatttttctccttttgtttttgctgattttctctatctgctgcagctgtaaattatcttgaacaagtgtctcctgcattccagattstacttgttctccatgtaaaatattagagtcttgtaaactgttctttagtttctttcttcgaatgcgttttctcttggtttgtacttcatgttcctcctctgcagattcaaaaacgaaatgacagttgtaaataagatctgtaataagcactttggaactgcataaaatgatacattactcctttcaaattttgggacatctgagtggctctagctttacttttatgattaaaatgcctttgagttctacaatgtcaaaaccaacttccgtgaatgcattaagaaaagctcttctcccttt

SEQ ID NO: 64104 - DNA, 600 bp, Chicken  19866894329656_1
atgataaccattttcacattaattataaatacagctttacaaacacaagttgcattttcatcctttcagcatccttagatctgtgtgctgtaatccagaagtttttatttgctttatggtgcttcaagcaaccttatgaaactaatcttttctgctttcttttcttatataagctccaattgctcaagcaaaattgttttcttttagtttcctcttcaccacttactgtaccctggtgagctccattgggttcaggtgctgtgcctaggacatattatctagccttgcaagcccaatttktcttgtccttttcctactgggcaatattttaaccattcttcatctcaggaagcttaagtatggactatatatatggacaaaggagaatttatgttaggatgggtgggacaagcaacatactattttttttaaacgtgaattgtaggttctttctacaataatttcatttaaatagtttcattaaaaaacaacaacatataaacagagaatgaagaacgtaaacactgatttatagaaaatgcacaatgtatgttgtgaaaatatgttcagcagtcttaatactaattctgatcatcttca

SEQ ID NO: 64105 - DNA, 599 bp, Chicken  19866894329661_1
  misc_feature (1)..(26): n is any nucleotide
nnnnnnnnnnnnnnnnnnnnnnnnnntctccttagactgtgaatcattattttcatttgtattgttatcttgaatgcatttgtactcagattcttatgggttagcattgccatctgttccttcaacagtcacacactcaggatggcacgagtgctttttgcattatgcaagcagcttccgtgatgaagccagcacggtgtggatggattttgttatgaaacactggcacacttctgagctctctgccttctattatcaataactgtgaggctctagaaagcccgtccattacattaaacyacttctaagctgcagcttgcgtttcagaactcatgttaactgtgattgattaatgtaatttaaggaaagatttccaacggtctatggagacagtgatgtgattagcagcaagctctgatctttcctaatctagtgataacatgctgaagaggaagcaatgggctatatatttcaagtagggtctgtgacttgtctaaattgctttctttttttacrtaaaagattgaatttagaacataaaaactttgcaattatatgacagtgtagcagaaatgctaagtcatggcttgaaacagtaa

SEQ ID NO: 64106 - DNA, 564 bp, Chicken  19866894329661_2
gaaacactggcacacttctgagctctctgccttctattatcaataactgtgaggctctagaaagcccgtccattacattaaacyacttctaagctgcagcttgcgtttcagaactcatgttaactgtgattgattaatgtaatttaaggaaagatttccaacggtctatggagacagtgatgtgattagcagcaagctctgatctttcctaatctagtgataacatgctgaagaggaagcaatgggctatatatttcaagtagggtctgtgacttgtctaaattgctttctttttttacrtaaaagattgaatttagaacataaaaactttgcaattatatgacagtgtagcagaaatgctaagtcatggcttgaaacagtaattgagcacctggtgggaaggcagggccaaggagggggagctcaggtgcatgcaatgcaccttagtaacaggaaggggtgggtcctgccgccaccctttcccaaaggtcacttaagggttggccctggaggtgaggttatcttgttggagattcctgtctacttgaggttttctgaaggtaa

SEQ ID NO: 64107 - DNA, 600 bp, Chicken  19866894329663_1
cttcccaggggtttgaatttatacatactgagttaaatgattaatgaaactatggcacattaaatattcagtattttaagtttctgcaaagtgttcatcagtgttaagatgattttaatttaaaacatcacagtcaaaatttctgttttcatttgtaatttcatctttcattttgttgcagtcatcaaccatcatattatctaaattccatcttgcaaggttctgaccttccttaaaattgctgtctttcttaggagttgatggttttacttatttcagagaaagacttgctatctttcrggtttgaatccactaatatcaaggatgagttgactaagtagtacaaaataggagtgcatttttggatatcattttttgacttagggcttaagaaatcagatctctcctttataaaatcagacatttatttaaaataataaatgtattgcttcctgtgagataaaagctgttattttggaatttttgcctgttaagaatcacagcagatatttataagattaagaaggaataggcatgaatgtatttgggatgaacatagtctagtcatgttaagtactgtgacaccactgttagcccccg

SEQ ID NO: 64108 - DNA, 600 bp, Chicken  19866894329665_1
tcctttggatgaatcagtgaactgatgagtatcagagacaacagaagtaactaacctcttccttcagtactgctgtactgtgcctcttattatagatcccttttcacaccagttgcatgtagctacctggcatttccttgcagcctggtaaggaacaatagtctgtcataaaaaatattagctgaagtagttttgaaaggggaaaaataggaatatttatttcctgggcaggtgaatatggtagctttactttcagataggagagtcactctgaaagattagcagatatcacctgaatgygccttattaatgggacaacactgggagaaaatagagatttatattattttgggatatatttacagaatgtatwaagatattttcatcctttctttaagaagagrtcagaagtaaggtgaggataagttactctagtgatagttccaagtaacagaaraaagacagctatggtatacaacaaggatgttccatctccaccaaactatggtttgttagctaatctaaaactgctagttttgctgcgtaagtcaaagatggaaagaatggcaaggatcttactactttaggtaatatgatcac

SEQ ID NO: 64109 - DNA, 600 bp, Chicken  19866894329665_2
tgtactgtgcctcttattatagatcccttttcacaccagttgcatgtagctacctggcatttccttgcagcctggtaaggaacaatagtctgtcataaaaaatattagctgaagtagttttgaaaggggaaaaataggaatatttatttcctgggcaggtgaatatggtagctttactttcagataggagagtcactctgaaagattagcagatatcacctgaatgygccttattaatgggacaacactgggagaaaatagagatttatattattttgggatatatttacagaatgtatwaagatattttcatcctttctttaagaagagrtcagaagtaaggtgaggataagttactctagtgatagttccaagtaacagaaraaagacagctatggtatacaacaaggatgttccatctccaccaaactatggtttgttagctaatctaaaactgctagttttgctgcgtaagtcaaagatggaaagaatggcaaggatcttactactttaggtaatatgatcacaatataagagacgactcaaagcagccatagtaaacttgggttaaataaggtctttacagtcctgttcttgaag

SEQ ID NO: 64110 - DNA, 600 bp, Chicken  19866894329665_3
cacaccagttgcatgtagctacctggcatttccttgcagcctggtaaggaacaatagtctgtcataaaaaatattagctgaagtagttttgaaaggggaaaaataggaatatttatttcctgggcaggtgaatatggtagctttactttcagataggagagtcactctgaaagattagcagatatcacctgaatgygccttattaatgggacaacactgggagaaaatagagatttatattattttgggatatatttacagaatgtatwaagatattttcatcctttctttaagaagagrtcagaagtaaggtgaggataagttactctagtgatagttccaagtaacagaaraaagacagctatggtatacaacaaggatgttccatctccaccaaactatggtttgttagctaatctaaaactgctagttttgctgcgtaagtcaaagatggaaagaatggcaaggatcttactactttaggtaatatgatcacaatataagagacgactcaaagcagccatagtaaacttgggttaaataaggtctttacagtcctgttcttgaagcagatttcagcagccagctgtattttagatg

SEQ ID NO: 64111 - DNA, 558 bp, Chicken  19866894329665_4
atagtctgtcataaaaaatattagctgaagtagttttgaaaggggaaaaataggaatatttatttcctgggcaggtgaatatggtagctttactttcagataggagagtcactctgaaagattagcagatatcacctgaatgygccttattaatgggacaacactgggagaaaatagagatttatattattttgggatatatttacagaatgtatwaagatattttcatcctttctttaagaagagrtcagaagtaaggtgaggataagttactctagtgatagttccaagtaacagaaraaagacagctatggtatacaacaaggatgttccatctccaccaaactatggtttgttagctaatctaaaactgctagttttgctgcgtaagtcaaagatggaaagaatggcaaggatcttactactttaggtaatatgatcacaatataagagacgactcaaagcagccatagtaaacttgggttaaataaggtctttacagtcctgttcttgaagcagatttcagcagccagctgtattttagatgtacaatacaaa

SEQ ID NO: 64112 - DNA, 600 bp, Chicken  19866894329674_1
ccactgccccgtggttcccttcctcctggtgcaccccatgccgctgtcctgccctggggtcctgtgggagcatctccccactggggacgatggctttgtcctgaccccatgccctctgctccccaccgggatgggtgtcccctccctgggccacgctcgatgctcacggtgcggtggggatttggggagcggtgcacaaggaggggagggggctgaggggctggaggccatttctggggtgcagagcccccaaggtgctactgaagacagggagggctctgctgggtcggtgctcacacrggtgccggtggttccttctctgcctgtaaacattctcctctccgcccttcgagaggggaagggacacctacagacctcactgccrctgctcatggagctgcacagcgtatgggcacagcgctgcagggatggatgcccacagccaagcgtggcacaaagctgtgtggcagcagcaggaaagcagagagcgggaggaagaggaggaagcaaggaaggctcaacccccagtacggctctgccttccctgcacagctcctgccctggacacacgatgggttttcaccatccagaagctgtgac

SEQ ID NO: 64113 - DNA, 600 bp, Chicken  19866894329674_2
gacgatggctttgtcctgaccccatgccctctgctccccaccgggatgggtgtcccctccctgggccacgctcgatgctcacggtgcggtggggatttggggagcggtgcacaaggaggggagggggctgaggggctggaggccatttctggggtgcagagcccccaaggtgctactgaagacagggagggctctgctgggtcggtgctcacacrggtgccggtggttccttctctgcctgtaaacattctcctctccgcccttcgagaggggaagggacacctacagacctcactgccrctgctcatggagctgcacagcgtatgggcacagcgctgcagggatggatgcccacagccaagcgtggcacaaagctgtgtggcagcagcaggaaagcagagagcgggaggaagaggaggaagcaaggaaggctcaacccccagtacggctctgccttccctgcacagctcctgccctggacacacgatgggttttcaccatccagaagctgtgaccttgccctctgcttcagcagcacccccacagagccccccgcccggcgactcgcattcatttccatccccgatgagccacgctcca

SEQ ID NO: 64114 - DNA, 482 bp, Chicken  19866894329678_1
ttcagtgaaactgttacaaagaagaatagctcccctgactctgatcaagcacttcagaaattcagccagatactacaaacttgctttaccaatgaatttcagtgtgaaacttaaagataggtacttgtttaggtatttttctgaactgggatctaagaaaatcacaagatgtaaaaaggggttcttttcagtagttaagatagcagtttcagaatcacctcaagtcaacctaactgacgtatgccagaagggcaacaaggctgatgaaggatcttgaacacaagtcccatgaggagcagytgagggaacttggattgtttagtctggagaagaggagactcaggggagataaggggagaccttattactctttacaaccacctgaaaggaggttgtaacaaggtaggagttggcccgcttctcccagctaactagtgacagaatgaagttaatggcctcaagttgcactagtggggggttca

SEQ ID NO: 64115 - DNA, 600 bp, Chicken  19866894329679_1
tctacctattgttgaacagtacttgcacgctgaagttttttttttttttttttctctcacttcacccttgcagtgagtaggctgggggtgggcaagaatctgggagggtatgcagccaggccaggtgacctgagggatattccatatgaaataataacttgaggagttctatcttacaaagtagatattgctcagaggctatctgtcattattctctttcctttacttattaaattgtctttgtcatgattcaaaattcttctggcttttgctctttgagttgtcttccccatcctggtrgggtggtgagagagtraatggctgcgtgggtgcttagctgctggctagggtcaacctaccacactggttttagtaagaacattttcaaggcaaggattaggtcttgtatcaagaaaagaacaggagatccaaacaagttttgttcattttattttcctagttaatacatacagtgagacaactggagaaagttgtgtcaggtttatgtggcaaggttttggaggcaggaggctgtaggggtggcctctatgagcaaagtccagcagatgctgcatgtcagaactgagctgtgagcaacac

SEQ ID NO: 64116 - DNA, 600 bp, Chicken  19866894329679_2
cagtacttgcacgctgaagttttttttttttttttttctctcacttcacccttgcagtgagtaggctgggggtgggcaagaatctgggagggtatgcagccaggccaggtgacctgagggatattccatatgaaataataacttgaggagttctatcttacaaagtagatattgctcagaggctatctgtcattattctctttcctttacttattaaattgtctttgtcatgattcaaaattcttctggcttttgctctttgagttgtcttccccatcctggtrgggtggtgagagagtraatggctgcgtgggtgcttagctgctggctagggtcaacctaccacactggttttagtaagaacattttcaaggcaaggattaggtcttgtatcaagaaaagaacaggagatccaaacaagttttgttcattttattttcctagttaatacatacagtgagacaactggagaaagttgtgtcaggtttatgtggcaaggttttggaggcaggaggctgtaggggtggcctctatgagcaaagtccagcagatgctgcatgtcagaactgagctgtgagcaacacaggttgtgtctctggg

SEQ ID NO: 64117 - DNA, 600 bp, Chicken  19866894329681_1
cagaaaacgttgtccattatgccctaagaatgctgtgagaaggaaattcattaaaagcaagatatggcagtcgtatgaaataactagcgtcaaagaaaagtgttttttcagaagtttctacaatatgctagtttttcatttgttatgaaattatgagaaacaagaattgaaaatgatgacaattataacaaaccgagcaactgaaaaatggaattttgcagttttgtacacaatgacatttatgaccatatcatagaactaaacagcataggatttgaaaacttgataaataatggacaygaatgctattctattcagtaattaggaaagggagaatgagtgtgaatagaaaaaaacattctatggctgtgcttcctgcttattagattgttcttccgctgatctctgtctagataagttttagaatttactccatcaaatgtgctggtattgcagaaaacattttttttcacactgaagacatcaggaaatatggaacaataatgaaagaacaccaaacaaacatagcaacagctatgttctctgtatttgttttattttcagtaatgttgcatgccatatgtattacaatattgaatt

SEQ ID NO: 64118 - DNA, 600 bp, Chicken  19866894329681_2
taattaggaaagggagaatgagtgtgaatagaaaaaaacattctatggctgtgcttcctgcttattagattgttcttccgctgatctctgtctagataagttttagaatttactccatcaaatgtgctggtattgcagaaaacattttttttcacactgaagacatcaggaaatatggaacaataatgaaagaacaccaaacaaacatagcaacagctatgttctctgtatttgttttattttcagtaatgttgcatgccatatgtattacaatattgaattatttctgaaatccttcastaaagatttcctaaaacttcaatgttctgaagaaactaggttagaatsaaatggctttgtatgtatgatctactgtttctaacatatttatttttcacgtttgaaatgttgcaatctatcaaagttagtagaaagcttctaaaaaatttgaatgagttctaaataaggtgtgatgaaatttttcttctctcaccatcatacagctctgaatgaatttggttcaggaaaattagctgaagtctgaaataaaagagtgtagctttccctgtgggaactgattgacttattcttcagaaacat

SEQ ID NO: 64119 - DNA, 600 bp, Chicken  19866894329681_3
ctgtgcttcctgcttattagattgttcttccgctgatctctgtctagataagttttagaatttactccatcaaatgtgctggtattgcagaaaacattttttttcacactgaagacatcaggaaatatggaacaataatgaaagaacaccaaacaaacatagcaacagctatgttctctgtatttgttttattttcagtaatgttgcatgccatatgtattacaatattgaattatttctgaaatccttcastaaagatttcctaaaacttcaatgttctgaagaaactaggttagaatsaaatggctttgtatgtatgatctactgtttctaacatatttatttttcacgtttgaaatgttgcaatctatcaaagttagtagaaagcttctaaaaaatttgaatgagttctaaataaggtgtgatgaaatttttcttctctcaccatcatacagctctgaatgaatttggttcaggaaaattagctgaagtctgaaataaaagagtgtagctttccctgtgggaactgattgacttattcttcagaaacatagacctcagtgacataaaaactaatagacgttatttttgtcactactg

SEQ ID NO: 64120 - DNA, 600 bp, Chicken  19866894329688_1
ctcccttagggctggttgtggccagagcaatgaggatgctggcacaggtggcaaaaccaagctgggttttccagggtgaccacggaagctaggaacatcagaacttcagggccctgcagccctttgagatgacctgagacaaggaatccaaaccacaaagttaaaggagggaggacacatcctcatcctggtttcaattatcttgatggaaatctgggaccaacaccttggcttgctgtcagtaatataatttggcatcgagatcaagatttggctcccatcaactactgaaagtcatcktgatttgtacgcattaagttggctgaaaaacattccctgccacatttttaatcaaacaggagtgagaacgtatcctggtacaaggcataagtcacagctggcactcctgcacacgctgaaaggaacgcagcaccatcacaaatgccaagcaagcgtttcaaagcactgctgacttcacaggatctctttcactcaagcttcctggaggaaagctcaccctctaagagcactctgttacaccaaagcagctgtcattggctggtgtgttaatctcctgcagagataaaatccagtgtccca

SEQ ID NO: 64121 - DNA, 599 bp, Chicken  19866894329690_1
  misc_feature (1)..(127): n is any nucleotide
nnnnnnnnnnnnnnnnnnnnnnnnnnnnnnnnnnnnnnnnnnnnnnnnnnnnnnnnnnnnnnnnnnnnnnnnnnnnnnnnnnnnnnnnnnnnnnnnnnnnnnnnnnnnnnnnnnnnnnnnnnnnnnnctttctgctttttttattaagcctttgttaccctcccggtagtcaagaaattctcacctctctcataaaggcccacgtggtgatagttgcaggcagaaactgctttagattttcttattatagcagctctgtgccaccattctcacgtgcacaaacttcagctgttttgaacrcagccctgcgctggttcaaggcaggtaacagccagggagttcccgaggaactggtgtttcattggcgagtattatttgaactctgttcagataagttgtaactgtattcttctgggttatctggtcagcagagatattgtgttacagmactggtatcagatctgttttcgagatgcacaaaaatggatgtagtctctggaagcaagtagtcaggaagctgttctgcagtgtttcattaagggtggggggatgcggtagtgaagcgttgggctgggaaagggctgtacagcccagctccc

SEQ ID NO: 64122 - DNA, 600 bp, Chicken  19866894329690_2
cctttgttaccctcccggtagtcaagaaattctcacctctctcataaaggcccacgtggtgatagttgcaggcagaaactgctttagattttcttattatagcagctctgtgccaccattctcacgtgcacaaacttcagctgttttgaacrcagccctgcgctggttcaaggcaggtaacagccagggagttcccgaggaactggtgtttcattggcgagtattatttgaactctgttcagataagttgtaactgtattcttctgggttatctggtcagcagagatattgtgttacagmactggtatcagatctgttttcgagatgcacaaaaatggatgtagtctctggaagcaagtagtcaggaagctgttctgcagtgtttcattaagggtggggggatgcggtagtgaagcgttgggctgggaaagggctgtacagcccagctcccaaaggagacaccacaaggagagtgacatcctgcaacttggtgcgtctgcagatcagttctcttgcacagaactgtgatctctggggggacaaaattaataaagaagctctgaactcaatgaaagatggagccattcgcccacacatcta

SEQ ID NO: 64123 - DNA, 600 bp, Chicken  19866894329695_1
tttttgctgtgtgggggggaaaaaacagaatttgctttttgggaaaaagccaccataaatgcaagatgtatgtttggtaaatggctaatacagcaattaactttcaattaaaaccatatttctgtttatcaaggctgattagcaaggctttagtgtaaagtgtttaattaacttagggaccattcaggtttccacagagggtaaagaaaactttacctccaggcccttcccggtgggagatgagtgggctgtgagtttggacagagggcacctgtccctgcaaataccacgcaggcttcrtggcacttttgtctggacctgygctctgtacaggctccaggcctcatctgcctatgtagtgatatcaggcagaaaagagtgaccagaatgttttcccttctttgtggccatcatgtttcacgaagaaggcttgaagatgtctgctgctagggtagatggggctttgtggtggcctgacctgaacactagggactgcgccagccttggataatgaagctggctatggaatttaccaatgatttggtacttagggattattctcacaggacccatttgcctttcattgtatgtcacttgcct

SEQ ID NO: 64124 - DNA, 600 bp, Chicken  19866894329695_2
aaacagaatttgctttttgggaaaaagccaccataaatgcaagatgtatgtttggtaaatggctaatacagcaattaactttcaattaaaaccatatttctgtttatcaaggctgattagcaaggctttagtgtaaagtgtttaattaacttagggaccattcaggtttccacagagggtaaagaaaactttacctccaggcccttcccggtgggagatgagtgggctgtgagtttggacagagggcacctgtccctgcaaataccacgcaggcttcrtggcacttttgtctggacctgygctctgtacaggctccaggcctcatctgcctatgtagtgatatcaggcagaaaagagtgaccagaatgttttcccttctttgtggccatcatgtttcacgaagaaggcttgaagatgtctgctgctagggtagatggggctttgtggtggcctgacctgaacactagggactgcgccagccttggataatgaagctggctatggaatttaccaatgatttggtacttagggattattctcacaggacccatttgcctttcattgtatgtcacttgcctccaaaaatattcttttggaggt

SEQ ID NO: 64125 - DNA, 600 bp, Chicken  19866894329696_1
ttacagataagggtaactaagcgtatgtaataatactaaaaatactataataaataataattattaataacaaataataaaaataagaaacaataaagtcacaccactctagcacttgccgctacctgctgagctcagagaaatgaaaggcagcccggtggttctggttcgtttattgagtacatgacagacagacagacagtgtaaaatcacatgtagtagctgtactttaaaaaaaggacaataaattactgaataattagtaaaagcagtttaactaatggccgctctccagctacrrggcagaggaggcagaaaaaaaaaccaaggaatatgtaccagctgtgaatacataatgctgcaaaggaattcacacggaggagcacaccgagtagtgttaatgggaacatccaaccgcagggtccttcccctcccttagtgccaaatgccagcccgatcctgcagcactccttgccttcagcaccggatccgttcccgctgagcaccagcatcccctccggccctgtgaggcagatgcctgtgcactgagatgagtttatctgttcaaacagcattcatttgtcgtggagcagatgctct

SEQ ID NO: 64126 - DNA, 600 bp, Chicken  19866894329696_2
tacagataagggtaactaagcgtatgtaataatactaaaaatactataataaataataattattaataacaaataataaaaataagaaacaataaagtcacaccactctagcacttgccgctacctgctgagctcagagaaatgaaaggcagcccggtggttctggttcgtttattgagtacatgacagacagacagacagtgtaaaatcacatgtagtagctgtactttaaaaaaaggacaataaattactgaataattagtaaaagcagtttaactaatggccgctctccagctacrrggcagaggaggcagaaaaaaaaaccaaggaatatgtaccagctgtgaatacataatgctgcaaaggaattcacacggaggagcacaccgagtagtgttaatgggaacatccaaccgcagggtccttcccctcccttagtgccaaatgccagcccgatcctgcagcactccttgccttcagcaccggatccgttcccgctgagcaccagcatcccctccggccctgtgaggcagatgcctgtgcactgagatgagtttatctgttcaaacagcattcatttgtcgtggagcagatgctctg

SEQ ID NO: 64127 - DNA, 599 bp, Chicken  19866894329700_1
  misc_feature (1)..(28): n is any nucleotide
nnnnnnnnnnnnnnnnnnnnnnnnnnnncatatttaagaagctataggaagtctgtgcatctttgagaggaaagctcaaatatgcaagtatgttgcaaggtcctttcgcctctcaggagaagatgatgggagactgccagtgtggagtctttgttgcttcttgttgtgtaccttgacattgggatagagctctggaaaaccaaaaaaccaaaaaacaagcatcattttaaatgtggaatatggataaatctgtctggtagttaattctgcagagtgccatgtcttgttgtatttgcagtrttgagcaggtagctgtgggcagccttgcatgctactcactagttagtgatctgttaatggtagcacaggctagttgtttggttcttaaaagcagtttgccaggagagaaaatgtacttaatgaaaagctctgtgtcaattgcagaatcaccaaaagtagaagcccaggctgcctgcttgcaaaacccagcggyggcaattgaatttcatttgggatgttcagctgcggtgactttgaggttctgctgcagcaggctgaggtcatgctgtacttgtgcttttttcctggccacagctcag

SEQ ID NO: 64128 - DNA, 600 bp, Chicken  19866894329700_2
ggaaaaccaaaaaaccaaaaaacaagcatcattttaaatgtggaatatggataaatctgtctggtagttaattctgcagagtgccatgtcttgttgtatttgcagtrttgagcaggtagctgtgggcagccttgcatgctactcactagttagtgatctgttaatggtagcacaggctagttgtttggttcttaaaagcagtttgccaggagagaaaatgtacttaatgaaaagctctgtgtcaattgcagaatcaccaaaagtagaagcccaggctgcctgcttgcaaaacccagcggyggcaattgaatttcatttgggatgttcagctgcggtgactttgaggttctgctgcagcaggctgaggtcatgctgtacttgtgcttttttcctggccacagctcagacctgcatgctctggtcatgccagggctgtcagtggcattgatgtgcactcacaggccctgtggtcaggggcagcttgctcgtggccagtggatggaggccactgagctgtttgcgctggttgtggtttaatgcataaccctaactgcagattattttttccccacacctattataggggcaagtaaccttcag

SEQ ID NO: 64129 - DNA, 600 bp, Chicken  19866894329712_1
acactctaatcttcctcttttggctttagcaatatttctggagctcaagggagagtaaaaagggattctggagagcacctctgtgattcccattcttagtcaacagaaactgggcttttctgctcaggaaaacactgaggtccaacatctgtgctgttggcctgggaaaaaaacatggtccagaaccgtagggtcctaaatgtcaggagatttctatgcagtcagtgtggttcaaacaaatgaagagcaagggatgatgtacatgtcctgactttttcacttggctaaggtgagaaattkgtgtctgagaacagaatgtgtcctaaaaacaaaaagcttcctcttctgtatgcaaaagcctgggaaactgactgtaagacacmtgtgataaacacctgtgctgtggtcagcacacctggggatgagatgccatccagagacacctagacaggctrgagcagtgtgcccatgtgaaccctgtgaggtccaacaaattcaagtgcaagatcttggggctataagaagaaaggtacagactacttagtgttgtgataggacaaagggagatgctgtaaatatccgtgttcattgcaagggatt

SEQ ID NO: 64130 - DNA, 600 bp, Chicken  19866894329712_2
tgattcccattcttagtcaacagaaactgggcttttctgctcaggaaaacactgaggtccaacatctgtgctgttggcctgggaaaaaaacatggtccagaaccgtagggtcctaaatgtcaggagatttctatgcagtcagtgtggttcaaacaaatgaagagcaagggatgatgtacatgtcctgactttttcacttggctaaggtgagaaattkgtgtctgagaacagaatgtgtcctaaaaacaaaaagcttcctcttctgtatgcaaaagcctgggaaactgactgtaagacacmtgtgataaacacctgtgctgtggtcagcacacctggggatgagatgccatccagagacacctagacaggctrgagcagtgtgcccatgtgaaccctgtgaggtccaacaaattcaagtgcaagatcttggggctataagaagaaaggtacagactacttagtgttgtgataggacaaagggagatgctgtaaatatccgtgttcattgcaagggattttaactagatgatctttaagggtcccttccaactcaaatggttctatgattctaagtcttagaagattagttttactatctta

SEQ ID NO: 64131 - DNA, 600 bp, Chicken  19866894329712_3
gttggcctgggaaaaaaacatggtccagaaccgtagggtcctaaatgtcaggagatttctatgcagtcagtgtggttcaaacaaatgaagagcaagggatgatgtacatgtcctgactttttcacttggctaaggtgagaaattkgtgtctgagaacagaatgtgtcctaaaaacaaaaagcttcctcttctgtatgcaaaagcctgggaaactgactgtaagacacmtgtgataaacacctgtgctgtggtcagcacacctggggatgagatgccatccagagacacctagacaggctrgagcagtgtgcccatgtgaaccctgtgaggtccaacaaattcaagtgcaagatcttggggctataagaagaaaggtacagactacttagtgttgtgataggacaaagggagatgctgtaaatatccgtgttcattgcaagggattttaactagatgatctttaagggtcccttccaactcaaatggttctatgattctaagtcttagaagattagttttactatcttactacagctctggaaattattcagaaagaaagaggtacaggaatttaacttaccataactgatacatttgaaa

SEQ ID NO: 64132 - DNA, 594 bp, Chicken  19866894329714_1
agcttgcctgaatatccacaaatccttctcacgtgcctcagaccgcacagtatccagtgataaagcacggagtggcagcgacagagtcagcaggctttggaaacagggccacagctaatggttattttagttttaatttatctttccctactttacagaagtgtatttcgctgagtttcacattccagatcattttctcagaaaagcttttcttctcatttgttaaaaagccattttatttatataaaaaagtaaacaaaaattataaagttcactttaagttaaaaataactaaaaaaygaagctagtttggcatggtaaaattcactgttctttcagctgtattgtctggacctgtgacattttctctcaggacagcagtgaccgaatgacattaatgttaattccaaagtagtgattcagcttgcagaaggttcttgtttttttggctttttttttcttctttgttaagcaagggataaacatgaagtcttctttaaaaaaagaactatgaaaggattctctttaccagaaccacagtccttttttgtagtcagtaaatgaaataattttgtactgttttctgttcccaca

SEQ ID NO: 64133 - DNA, 600 bp, Chicken  19866894329725_1
agccatgtagaggaacagagcatgggccagggagcacgctaggcttttgatccaaactctccttgcagaaaagctgtcttcaccagtgctcactctgtgcagatctcaagtgcaaacgatcgaagagctaagaacaactcagctgcctggacttcaaaagtataaggaggtgaaaaacagcaaagctgagaaggcaaatagagcctctctgttgcaggagatatctgtccatacatgaggctttcaagagcccacacccaacctgcagctgcaatgaccctccccaaacacatcccataygctctcctcatcacatggcaccagacccagaatctctggaggcattcaaggccaggttggatgggatcctgagcagcctgattgagtggttggcaaccctgcccacggcatggaggttggaactagatgaccttcaaggcctcctccaaactaagccattctatgattctacgaatgcatggaaaaagcagggagagtgcaatcaacaagtgtccaagagcacggagacggaattggttatgaagatggatgggtcaatgcatcaatagtagccagcacactgtcaacaccagccaggga

SEQ ID NO: 64134 - DNA, 600 bp, Chicken  19866894329729_1
tcattgtctggaaagacaagattaggacatgtttcacatacagttcagtcatttctactgcaggaatgctaacttagatgaaaaggaaatcagagcgcgctttgtccagcagctcaatcaaaacacaagggcatatggtccccaaagtacaagtacctctgagcagaaatgcatcacttgagtgttgttttgtgtggttaattcattggtgaaggagaggtaggttttaaaactgctggaggcagcaagtctaatatgtgaacactgatagccaccaaaacagtgagagaaaatgttttrgatgagwaactatatgtaagggatgagagtctgtgtgaagaagattcttgctggtgtctggattcttgcagtagtgcaggaarcaggatttgtacaggctttttaaataaacaggaatgatactaagaaaaaccttttttgttcatctggttgtcatctaaactggaacacctacaagaattcataagactggctaaacagttatatccaacagatagaataggagccatcagcaagttgtctacattraagagacccataaatggcttcaaattctcctggtgtaaaacattaagatac

SEQ ID NO: 64135 - DNA, 600 bp, Chicken  19866894329729_2
ctggaaagacaagattaggacatgtttcacatacagttcagtcatttctactgcaggaatgctaacttagatgaaaaggaaatcagagcgcgctttgtccagcagctcaatcaaaacacaagggcatatggtccccaaagtacaagtacctctgagcagaaatgcatcacttgagtgttgttttgtgtggttaattcattggtgaaggagaggtaggttttaaaactgctggaggcagcaagtctaatatgtgaacactgatagccaccaaaacagtgagagaaaatgttttrgatgagwaactatatgtaagggatgagagtctgtgtgaagaagattcttgctggtgtctggattcttgcagtagtgcaggaarcaggatttgtacaggctttttaaataaacaggaatgatactaagaaaaaccttttttgttcatctggttgtcatctaaactggaacacctacaagaattcataagactggctaaacagttatatccaacagatagaataggagccatcagcaagttgtctacattraagagacccataaatggcttcaaattctcctggtgtaaaacattaagatacaaatctc

SEQ ID NO: 64136 - DNA, 600 bp, Chicken  19866894329729_3
aggaaatcagagcgcgctttgtccagcagctcaatcaaaacacaagggcatatggtccccaaagtacaagtacctctgagcagaaatgcatcacttgagtgttgttttgtgtggttaattcattggtgaaggagaggtaggttttaaaactgctggaggcagcaagtctaatatgtgaacactgatagccaccaaaacagtgagagaaaatgttttrgatgagwaactatatgtaagggatgagagtctgtgtgaagaagattcttgctggtgtctggattcttgcagtagtgcaggaarcaggatttgtacaggctttttaaataaacaggaatgatactaagaaaaaccttttttgttcatctggttgtcatctaaactggaacacctacaagaattcataagactggctaaacagttatatccaacagatagaataggagccatcagcaagttgtctacattraagagacccataaatggcttcaaattctcctggtgtaaaacattaagatacaaatctcgtattctcttgcagcttgcatcacgaagcttgctgtcttcatgtttttctaagtcttgatacaacctcttggcttt

SEQ ID NO: 64137 - DNA, 600 bp, Chicken  19866894329729_4
tctaatatgtgaacactgatagccaccaaaacagtgagagaaaatgttttrgatgagwaactatatgtaagggatgagagtctgtgtgaagaagattcttgctggtgtctggattcttgcagtagtgcaggaarcaggatttgtacaggctttttaaataaacaggaatgatactaagaaaaaccttttttgttcatctggttgtcatctaaactggaacacctacaagaattcataagactggctaaacagttatatccaacagatagaataggagccatcagcaagttgtctacattraagagacccataaatggcttcaaattctcctggtgtaaaacattaagatacaaatctcgtattctcttgcagcttgcatcacgaagcttgctgtcttcatgtttttctaagtcttgatacaacctcttggctttctatctgacttccgtgtcattatcagttgcttttataaattgatttctggtctcaagcacagtgttataacttagtgttgcagatatacatctggagaacatcgtttcatagaatgccttggtttggaatggaccttaaggtccatccagttccaaccccctgcta

SEQ ID NO: 64138 - DNA, 600 bp, Chicken  19866894329733_1
agcaaatactctcacctgcttcaaaaaagtttctgtaactgaaggtttaaaacagagataactagatgaaaacaacagtcaggtggttctcagcctgtgctacagttccagcagacattaaccctggtatcccagaccataactgggccatgcttccttccaaaaagtatttatttctcaagtgctgcaattttgatttctagtttaaaactgaatgctttgcaacgtgcagaggttaaaattccattcctgttatcatgggttatgtccatcctccaggcaccattcagatttagcccmaaacccagagtytagcagactgaactgcagcacataatgcttttacttatattatttytaaaaggaacgaggccaacgtaagcagaaaccattttaatcttcatcccttttatgctggagtagtttgatcaccttaaagggattgaaaacaaaggtctgaaagccatatgggacagcacgaatggtaatctagttaacatttctgctctctgtgtttcctcccccctgggcacgctccattggcggtactcagagctgactccaagatgaggtcaagcagcatgtgggatggaactgttt

SEQ ID NO: 64139 - DNA, 600 bp, Chicken  19866894329733_2
cacctgcttcaaaaaagtttctgtaactgaaggtttaaaacagagataactagatgaaaacaacagtcaggtggttctcagcctgtgctacagttccagcagacattaaccctggtatcccagaccataactgggccatgcttccttccaaaaagtatttatttctcaagtgctgcaattttgatttctagtttaaaactgaatgctttgcaacgtgcagaggttaaaattccattcctgttatcatgggttatgtccatcctccaggcaccattcagatttagcccmaaacccagagtytagcagactgaactgcagcacataatgcttttacttatattatttytaaaaggaacgaggccaacgtaagcagaaaccattttaatcttcatcccttttatgctggagtagtttgatcaccttaaagggattgaaaacaaaggtctgaaagccatatgggacagcacgaatggtaatctagttaacatttctgctctctgtgtttcctcccccctgggcacgctccattggcggtactcagagctgactccaagatgaggtcaagcagcatgtgggatggaactgtttcactcaccattc

SEQ ID NO: 64140 - DNA, 600 bp, Chicken  19866894329733_3
taactagatgaaaacaacagtcaggtggttctcagcctgtgctacagttccagcagacattaaccctggtatcccagaccataactgggccatgcttccttccaaaaagtatttatttctcaagtgctgcaattttgatttctagtttaaaactgaatgctttgcaacgtgcagaggttaaaattccattcctgttatcatgggttatgtccatcctccaggcaccattcagatttagcccmaaacccagagtytagcagactgaactgcagcacataatgcttttacttatattatttytaaaaggaacgaggccaacgtaagcagaaaccattttaatcttcatcccttttatgctggagtagtttgatcaccttaaagggattgaaaacaaaggtctgaaagccatatgggacagcacgaatggtaatctagttaacatttctgctctctgtgtttcctcccccctgggcacgctccattggcggtactcagagctgactccaagatgaggtcaagcagcatgtgggatggaactgtttcactcaccattccctcggattatcccaaatggtgagattaaagcagtgctaggcagct

SEQ ID NO: 64141 - DNA, 600 bp, Chicken  19866894329734_1
aaagtctcacataaactaggacatatatgggctgcgagacccaggaatgcttcttgagcttttatcagtttttcattctggctgcatttggatgtcaggatagaatgaaacctgaatattcatattttgatctcttgagttattcctctctctgggccctccagctcctcactcttgataacccggtttcttctgaaaggaattggaaatgcatgtaggaagacagatgaagggcactttgactgtctttcagtttacataatcaaaggactaggactgtacatgtcccacggaattcaygtgtaaagtagttctatgccagtaggtttttactatagagaaatgattcaataatggatgactttaattaaataaaaacgaaaacaaaaacaagaaacaccccaccaaaacaaaacaaacaaaaaagaaaaacacaaaaaaactcaagccaaaacaaacagcatgattatttaatatgggaaattatactttttgggtttctcaatttattctttaaaattatatttttatttccttatgtgtttatctcagcatcatgaataaaacagaaatataaccaggttaaatgcagacatactt

SEQ ID NO: 64142 - DNA, 600 bp, Chicken  19866894329747_1
tccagatagatttgggtcagcacgggttcaatgccaaagccattatggtacatttcctattatagcgttcttcgctgcagcaagccagttgcagaggggcctgtaagctcaaagcatttcagatgttttcattccctttacttacggagcaaagacatagtcatcatatctttattcttcttcccctaagaatgatgaacatagggctgagagaaaccccctggctcactgagttcaattctttactattgttggcatcatgtcatataacctcttctgcaactgctcctagatagtttyaagttcaaaaggagcaaccagcattttagcctgcagacgttcccgactctgagcaaacagggtgtgggtggaagtggtcagttctgtttctgatccttattctgtctgctgtgcaagttgtaatgtttatagaatcatagaatcttcattgcaaaagaccttcaggatcaccaagtccaactaacaacatcacctactgaattccatcactaaatcatgtcccttattgccatacctactcatctcttaatacctccgaattgtgggactctgccacttcccagtgcagtcctttccaat

SEQ ID NO: 64143 - DNA, 600 bp, Chicken  19866894329750_1
tcaagatgacatgaaattttgctaatggcagcataaagtagcataatgctatgactcagtttacaggatacctttattagtcaatattaattgttgacagtatcgatagaagttatagcctttagctgaagtcaataaggagctttatgaacctgccatcaatagaagattttacggggcccattaaaccaacttttccaatgaaggttaacgtcagcgatttttatgttgttcattatttatccaaaatgaataatcagaatttatttctgatgcttctaaatccaaagctgtcgaacmgcaattctaccaagatattcattttgttcttagaaaataagagatccagctccctcagcttttgcaggtttctttgaggagtggtgataccttgaaggaagagatattctgttcagtaagttcagccacaatctacccttgtctttaaggaaaccgatgaagtgatctggttccatggcatattgcagtccataaatcacttgcacaggcaactggcatgaaaaaccatgtgatgttttatctaaactgttcccaggctttccaagaggttgaatacctttactacgttatgagtttgtt

SEQ ID NO: 64144 - DNA, 600 bp, Chicken  19866894329752_1
ggctactgttggggaatcccaagagataggcaagagaaagaaaaatgcaagacagagagggataaagttaaatgaaacaagaggaaggattccaataagttaaagttaattaaaaacataaatagtaaacatttgtcttttgaagattcccagcaccctgctagcttggaaagcagctctggaagtggaaggtagaaaacatccattcattttcatacatctgtgtaccaaactcaatgtgttaatctgtcattcaatactactgtctttccatacatatgcataacggagtggaagacrctgtctgagacctagtcccacagttccatctctgcttggaatagtcaagaaactccattgattcttgtaaggtaaggtaagatgtagtaagataatrgaggcagaaagcaaaggtttctctttgaaggcaggccggtatgtcagtcctcacacgcttaatgtcacccaggtgaacgtaaggacctttgtcctggtataccctgctgtcatgattttatgattcttgttattggtattccacatcataacatcatgtaaagcacggggaattaaagagttaatactgcagttctgtggact

SEQ ID NO: 64145 - DNA, 600 bp, Chicken  19866894329752_2
agttaaagttaattaaaaacataaatagtaaacatttgtcttttgaagattcccagcaccctgctagcttggaaagcagctctggaagtggaaggtagaaaacatccattcattttcatacatctgtgtaccaaactcaatgtgttaatctgtcattcaatactactgtctttccatacatatgcataacggagtggaagacrctgtctgagacctagtcccacagttccatctctgcttggaatagtcaagaaactccattgattcttgtaaggtaaggtaagatgtagtaagataatrgaggcagaaagcaaaggtttctctttgaaggcaggccggtatgtcagtcctcacacgcttaatgtcacccaggtgaacgtaaggacctttgtcctggtataccctgctgtcatgattttatgattcttgttattggtattccacatcataacatcatgtaaagcacggggaattaaagagttaatactgcagttctgtggactgacaactttctggatacctggttctcagaagagaagaagaactacataccccagaagactttgcattcagagaggaagatacatcatggaggaagtt

SEQ ID NO: 64146 - DNA, 600 bp, Chicken  19866894329754_1
acacactaaccctcagggaatttgataggcataattgttaagccaatgctgtgattttaaggctatatattccctgctatttaaatgtcacgcaatagttttcagataactgttgtctgagtgagtcatatcctttcccacttgttcggtgatgcagaggcaggttaacaagaactgagcaaagttctaccagatgttctgtccaaacacacgaggtggtgataacgtgaggaagaaaagaaggaggcaacagctgttgcagctcagaggatctatcagtctcccttagggagcgtcagragacaacagcctgttgggttttggttctaaagtcatccactctcttccagtgcaattaatgtagccaagagacaggaaatgaaatactagcaactcagagggttatcccttgtgctttgacttcaagraaagcatgtccttgtacatgacccactacagaagtagtaggttgcaaggaaaaattcactgctgtgccagctgtataccatgaccacccagaccttctgcagtgggtgacgcaaggcttgggtactcgatcaaatctcttctttttgtaggactgcttttgggttggccgat

SEQ ID NO: 64147 - DNA, 600 bp, Chicken  19866894329754_2
tatcctttcccacttgttcggtgatgcagaggcaggttaacaagaactgagcaaagttctaccagatgttctgtccaaacacacgaggtggtgataacgtgaggaagaaaagaaggaggcaacagctgttgcagctcagaggatctatcagtctcccttagggagcgtcagragacaacagcctgttgggttttggttctaaagtcatccactctcttccagtgcaattaatgtagccaagagacaggaaatgaaatactagcaactcagagggttatcccttgtgctttgacttcaagraaagcatgtccttgtacatgacccactacagaagtagtaggttgcaaggaaaaattcactgctgtgccagctgtataccatgaccacccagaccttctgcagtgggtgacgcaaggcttgggtactcgatcaaatctcttctttttgtaggactgcttttgggttggccgatttcattgagtacccaaagccttgatggatggggaggcacaacagggctcttttctgcaggatcgtgtgtataatgatgtctggtttgtataaggacactggttctgcctctgcttgctggctgtagca

SEQ ID NO: 64148 - DNA, 600 bp, Chicken  19866894329755_1
cagagcgcaagctttcctagcatgaagttatgctgcatacagagatgctggggactctgggtcgttgcgtaacttccctgggcacagctgcttgctgtggcacaggtgtaaggtaggactgttttcacctgatgtgaaataggtaacaaatggtgcatcccaaggtgcatctgattatttgtgccaagtccttttttccccaagatgtacctgtgccaggatgggttggattgtctctcaggctatgtgctctggttctggctcagataaattttccccatttatgcctgtgtgcagtayagatactgggcattcagcattacctcygtctggcgtttcaagtggcagtctgaacagtgccagggtcttcttgagcgatgttctgtgtatcctggtatgaaaataggagtgtttgcttttcacagaaggctctggctgaatcctgaggtgacaaggagcacgtttgcttcccctacagcccaccaacattaagcatttactctgcaatagccagtgcccaaggcctgatttctatgcagggtctgcagggaaggaagcgagaacaaaaagaaaaggaggttttaggatttgcttttgcaa

SEQ ID NO: 64149 - DNA, 600 bp, Chicken  19866894329755_2
ttatgctgcatacagagatgctggggactctgggtcgttgcgtaacttccctgggcacagctgcttgctgtggcacaggtgtaaggtaggactgttttcacctgatgtgaaataggtaacaaatggtgcatcccaaggtgcatctgattatttgtgccaagtccttttttccccaagatgtacctgtgccaggatgggttggattgtctctcaggctatgtgctctggttctggctcagataaattttccccatttatgcctgtgtgcagtayagatactgggcattcagcattacctcygtctggcgtttcaagtggcagtctgaacagtgccagggtcttcttgagcgatgttctgtgtatcctggtatgaaaataggagtgtttgcttttcacagaaggctctggctgaatcctgaggtgacaaggagcacgtttgcttcccctacagcccaccaacattaagcatttactctgcaatagccagtgcccaaggcctgatttctatgcagggtctgcagggaaggaagcgagaacaaaaagaaaaggaggttttaggatttgcttttgcaatggcagttcattctgatcctttgtgta

SEQ ID NO: 64150 - DNA, 600 bp, Chicken  19866894329763_1
tcaactgaagcctttagcaaaattaagggttggtctgtgtgcagacttgtgctgacgtcaggatatcaagcctacaacacgcctttcattgttccaggggaattggtggacactcattttggtgtgccccacttcagttagagaggtagaataaacttggtaggagctaacttgcatggcttgtgaaaaatgaaaattgtatctttgtagtatgtttgactgaaaactgtgaatgaaaatttctgttcctaatgctcttaatctctgcatggaacaagcctctatggctaccccctatayataaacaattcactgaaactctcacaccctctgaaggatgccacaagtcttgcttaatgcacgcagtataatttggggaagaagctacagaagcacaaagtggtgctatgcatttatataatgaggattacaaaacacttctttgctcattaaaacacgaaaacccaaagcaagtaaaatattatcagacagtgttgattgagggtgtaccagttcttgacttgctgattcaaacatgctttgctgcagcctttggttttagcctgtcttgcttatctgtcatttgatgtattttactag

SEQ ID NO: 64151 - DNA, 600 bp, Chicken  19866894329764_1
aggaacactaaggaaaatgtgggcctgctgctgaactgaatgggtgccttggtgacaaaggatacagagaagacaattactgaatgccttctgctaaggccagccctcaggaatcccagatcctggagaccagggagaaattctaaggaaagaaagactttccattggtcaaggaagactgcattagagatcatgtagacaaatctgacaccaacaaatctgtgggatgcacccaaattgctgagggagttggcacatattattgctccccatcacctttcacaggtcatggagaacagkagaggtgtcttcagattacaggaaagccagtgccaatctagtctttcaaaacagcaaggggggtgacccaaggaactacagaccagtcagcttcacctctgcccttggaaaggtaatggaacagctcatcctggatgtcacctccacgcttgtggaggaaaaggaggtgatcatgactagtcagcatggattcacaaaaggtgaaccgtgctcaaccaaactgatggccttctatgatgctatgcttggctgagtagatgaaagaagagcagtggatgttgtctaccttgacttgagcaa

SEQ ID NO: 64152 - DNA, 599 bp, Chicken  19866894329767_1
  misc_feature (1)..(50): n is any nucleotide
nnnnnnnnnnnnnnnnnnnnnnnnnnnnnnnnnnnnnnnnnnnnnnnnnncctaacacagagaaaaacaatgtcacatccactactgtggcttacctccaccagttaaggaaagaaaaaatctggccaaaaagctcctatttgttttccctccgcattgtacagcctctcaacttcaagagagcagcctgagttcttcatagcaccatttccaaggggaaaacaggctgagccttccagttctttcagtaagtacatcaaggtggttacacgatcaaaatcccttgctccttcactgcaytgcctcagtgaaaggcttacagtcaccatcatcacagcgaccattttggctgagcctaaaaaagtcaacagcattcacaacagcacctactgtgcctccaagcaggccctcacgcagccacatccaatacccatcactrcttgcagtgcttgtggccagcagggaaggctcaccgaggcggagcacagccggcagcttggccacgggtactgctgcagctccgggacacatcctggccacgtcagctctggaagctacctccaytccctgtgacaagccctgacccccacccactcttc

SEQ ID NO: 64153 - DNA, 600 bp, Chicken  19866894329767_2
tttgttttccctccgcattgtacagcctctcaacttcaagagagcagcctgagttcttcatagcaccatttccaaggggaaaacaggctgagccttccagttctttcagtaagtacatcaaggtggttacacgatcaaaatcccttgctccttcactgcaytgcctcagtgaaaggcttacagtcaccatcatcacagcgaccattttggctgagcctaaaaaagtcaacagcattcacaacagcacctactgtgcctccaagcaggccctcacgcagccacatccaatacccatcactrcttgcagtgcttgtggccagcagggaaggctcaccgaggcggagcacagccggcagcttggccacgggtactgctgcagctccgggacacatcctggccacgtcagctctggaagctacctccaytccctgtgacaagccctgacccccacccactcttcatgctttgggagcatcgggacagcagcaacgcagtgggcctgctcaatgccgttacaacccatggtggctacgtggccacacagccaagcagccaagcccacagccactgaggaacggactccaagaaggcagggtagtt

SEQ ID NO: 64154 - DNA, 538 bp, Chicken  19866894329767_3
gttacacgatcaaaatcccttgctccttcactgcaytgcctcagtgaaaggcttacagtcaccatcatcacagcgaccattttggctgagcctaaaaaagtcaacagcattcacaacagcacctactgtgcctccaagcaggccctcacgcagccacatccaatacccatcactrcttgcagtgcttgtggccagcagggaaggctcaccgaggcggagcacagccggcagcttggccacgggtactgctgcagctccgggacacatcctggccacgtcagctctggaagctacctccaytccctgtgacaagccctgacccccacccactcttcatgctttgggagcatcgggacagcagcaacgcagtgggcctgctcaatgccgttacaacccatggtggctacgtggccacacagccaagcagccaagcccacagccactgaggaacggactccaagaaggcagggtagtttcctgtgcagagagctgattgaaaaagcattctcatgggaacacccaaaataatgacaaatgt

SEQ ID NO: 64155 - DNA, 600 bp, Chicken  19866894329771_1
attatacgtaacaacagagaaggtgagagaatgtagacatgaagaattaattaatcaattaattagttttttttttccttctggctaaatttctactaggagtgagtgattgcatgctcacatggcacttagcaattgaagttatactttccactctgctacttaagcaacattaagcagaacaaaagtttaagaaatatctccctcatgagctactttgtttctcagactattgttcattcataaattcgaagcataacagctacagtctgtgtgctggagtttccaatacgtgaaccyggtgttggactttatcttcattctagcatagctgctgaagtgatgtctaaagggacaaaagaataccaggtggatattttagcatctaaggcacaggtagcactgactgataagctagttaagaaaaattttaaacaaaaccaaggttttgtggatttatgcagagcccactaacatcaaagggaagatgcccatatggaagcgtttgagaacaccagatgacatgaagaaggtggaaggttcttgggctcctaaaaataaaacatctataacttaggccttactgttggcaataaacat

SEQ ID NO: 64156 - DNA, 600 bp, Chicken  19866894329777_1
tgttattattattttattatgttggggggttttgttttcagaatattaaccaaaaggtgttttaaattcatggcatgaaaaaccctaaatgtaaatctgagtacattgtggtgttgattaacagattttttctgaaacttatgtgatgctcaatatttttcttagggagttttgtttaatgttagatcattgttctgaaggatgttggtcctactggaatcaaactaatggaaataaaatgcatgtgttacaagtgtagaaacggtgaagaattaagtgtgaacttactgtacaataccrattctgttttcaaacgatctgtttcgctgttcagtagttgacatataaaaatgcaaatgtactgtaatttagcactttttcaattgaccctgttctcactatgccagaagtaaggagcttctggggctgtcaggacccgtctctcttgacgtgcagacctgtgaagcgcgtcagggaagggtcaagctcttcatccttcctgcacattttggtaccagaattggccagaaggaaaggaaagtgagagagtctcttagtcccctagtgttaacagggtgcaaagtgttacatgttccgtac

SEQ ID NO: 64157 - DNA, 455 bp, Chicken  19866894329778_1
tgttctgtacattaacaaatggcctttgaagcaatccaatataatttcagcttttttaattcaatctactttttatccttgaaacagtttttgactttgcagaagccagtgtttgcatgtaatgtaacaagtactgtaaattgcccttaagtgcttaagaattagttccagaccacgtctggcatccatttgtcacataaaggcagcaactataagtttttttagcagcaacatccaacattcgtgtctgaaagccagtggaggacagccaaatggcaacaaactgtgtttgactagaamaaatagagtaaagtgaaaaattctgtagccagttaacttaacaagctagacagttctcatcacacacatgggaagccataatttcaagcagatactcagtacttcatccatgatttggcacatgcatatcatacttcgattaccagcctctagtt

SEQ ID NO: 64158 - DNA, 600 bp, Chicken  19866894329782_1
cagtggcttcttccatcaatacagaatttaggagaattgacaaatttgccaccggagccccaggagcaagggtgattgttacagacacatgggtgatcaaggtgaccacctactgcctacacgttgcccagcagcaggacattcatttgactgtgacagactccagacagcatgaactcacaccagactcaaacatgcccgtgcaattcctcaccatccgtgttgccagtgttaatccctatgtgaaggcgtttgatatccggtaaaacaaaataacactttgcaattatgacatatatrtgatatatgatggtgttcrtgaagtgtttttggggcaaatctgaaagctctttgagtctctcctctctccctgcctggtgctcagygatgctgtatgcacggttctaccatgcaatgcagtgaaaaaaggtttagaaagattcaggtatccacagtaataaatgcacagtggttaaacagaaacagagggactgccctgtgtggtcctctcttaggaaaagggttgtgctggatgcagaaagaagcaggtggaaaaacttcagtgaaaggtggatattggaagagagcaataagaagcaa

SEQ ID NO: 64159 - DNA, 600 bp, Chicken  19866894329782_2
tacagaatttaggagaattgacaaatttgccaccggagccccaggagcaagggtgattgttacagacacatgggtgatcaaggtgaccacctactgcctacacgttgcccagcagcaggacattcatttgactgtgacagactccagacagcatgaactcacaccagactcaaacatgcccgtgcaattcctcaccatccgtgttgccagtgttaatccctatgtgaaggcgtttgatatccggtaaaacaaaataacactttgcaattatgacatatatrtgatatatgatggtgttcrtgaagtgtttttggggcaaatctgaaagctctttgagtctctcctctctccctgcctggtgctcagygatgctgtatgcacggttctaccatgcaatgcagtgaaaaaaggtttagaaagattcaggtatccacagtaataaatgcacagtggttaaacagaaacagagggactgccctgtgtggtcctctcttaggaaaagggttgtgctggatgcagaaagaagcaggtggaaaaacttcagtgaaaggtggatattggaagagagcaataagaagcaatagagaataagatagagag

SEQ ID NO: 64160 - DNA, 600 bp, Chicken  19866894329782_3
acatgggtgatcaaggtgaccacctactgcctacacgttgcccagcagcaggacattcatttgactgtgacagactccagacagcatgaactcacaccagactcaaacatgcccgtgcaattcctcaccatccgtgttgccagtgttaatccctatgtgaaggcgtttgatatccggtaaaacaaaataacactttgcaattatgacatatatrtgatatatgatggtgttcrtgaagtgtttttggggcaaatctgaaagctctttgagtctctcctctctccctgcctggtgctcagygatgctgtatgcacggttctaccatgcaatgcagtgaaaaaaggtttagaaagattcaggtatccacagtaataaatgcacagtggttaaacagaaacagagggactgccctgtgtggtcctctcttaggaaaagggttgtgctggatgcagaaagaagcaggtggaaaaacttcagtgaaaggtggatattggaagagagcaataagaagcaatagagaataagatagagagagaatcttcaagtctttggtctcacaagttttggtggtgaagaaatagtgatatgtctaaacttggc

SEQ ID NO: 64161 - DNA, 600 bp, Chicken  19866894329784_1
gtggggcgttggctaaggggcagttgatgtttgggggttgctgagtgttggtcagaaggtgatgaggcctcgagctactagtgggcgtttgtgttgtcacctggacgtcagtcaatgggtggcaagtgattgcattgcagacacatatacatacatatttttatcatagcataattgattccattttcctcttctgtcttggtaaatagtttttgtctcaatccacaagatctattttgtttccagttctcaaccctatcccacttggaaggaaggagtaatcaaatgactgtggtgttwacctgcctgctgattttatcaacagtccttttagagtactgtggaaggatggctgacccaaggaggtcacgtttatctccccctgggtcagagcaagaaaaacagccgctatggatcactgtctcacacagaacaatgatgggagtagacaaaaggaatgcagagctgtgatagagaccgctctgccaggtgccgtgagacaagctgcaagcaaccgcaagttatgagaaccatgccttgttagcatgctatttgtaccgctctatataaatggctgtgtgccattattaaatggcttgg

SEQ ID NO: 64162 - DNA, 527 bp, Chicken  19866894329785_1
ttgtgtcatctatttgactgggaaagcttaactgagaagacagaaagagttttctaactttaaaagattattgaaaattttaaacctgtcttaggctgcaaaaggttttcacataagaagatgagaatattccttcagtgttccattagcatttatctacctgtctgttgtgaatgaaagggagaaaaatcttttacaagcttcggataaaatagctgaagtaaataacagaaaatgtttttctatatctgcatgaatggaaatatagcacttatttgtatagctccctttaataacgtrctttttccatgtaacttggatgccctgccttcactttgaccttctcccttaccatcacctggagagaattaaaggccttacaagaagctgcatttgattcatttcaggatttctgcttcagtcaaatgaatgcctgactgttgcccatgcttagacataggtctctctgaaataaggcttcctatttatttccatggaaactacaacagattcaaagagcaaaataa

SEQ ID NO: 64163 - DNA, 600 bp, Chicken  19866894329791_1
tgttgattctgcctagaatcatagaaccatagaatggcttaggttggaggggaccttaagtatcatctagctccaaccccctgctatgggcagggtggccagccagcagatcaggctgcctgggatcccatccaatctcacctggcatttctccagggatggggcatcgacaacctctctgggcagcctgtgccagcacctcaccaccccatgtgcaaaaactgtcttccctgacatctaagctaaatctctcctttttagtttaaagtcattcccccttgtcttgtcgctaccagacastgtaaaaaggtggtcttccttctgcttgtaagctcccttcaagtagtggaaggttgcagtgtagtctccccagagacttagacgatctctgactaaatcctccttatcaaatgagaagtcttcccttctccagattccctcttgtctccagagtctgggattcccaaggggcagtcagtagtaaagayggaagcaaagaaggcattcagtaactgccttctcagtgtcctccgttatgagggcacccacctcattcagcagcaggcccatattctctagtcctcttttcgctactcataa

SEQ ID NO: 64164 - DNA, 522 bp, Chicken  19866894329791_2
tgtgccagcacctcaccaccccatgtgcaaaaactgtcttccctgacatctaagctaaatctctcctttttagtttaaagtcattcccccttgtcttgtcgctaccagacastgtaaaaaggtggtcttccttctgcttgtaagctcccttcaagtagtggaaggttgcagtgtagtctccccagagacttagacgatctctgactaaatcctccttatcaaatgagaagtcttcccttctccagattccctcttgtctccagagtctgggattcccaaggggcagtcagtagtaaagayggaagcaaagaaggcattcagtaactgccttctcagtgtcctccgttatgagggcacccacctcattcagcagcaggcccatattctctagtcctcttttcgctactcataaactgaatgaagcctctcctcttgcccttcaccttccttgcaagaattaattccaaatggggcatagcctttccttggtgcatccgtgcatgccctgacaatgtacctata

SEQ ID NO: 64165 - DNA, 600 bp, Chicken  19866894329792_1
ccagagctgaggaggaattcagaacggctttcctcatgccactccagtctgagctgtttgccactgcattttttttttctgtgtattttccatatagctatgtgttaaatttttatttcaaagacttagtttgaaaataggtgaataaatgattgagttctatatatgaaagggtattttgattaaaagccccaaagcttaattaccactgcagaagttttaatatgagcattttgatcaaaaagcactgaagcaccttacattctagatccagtaaactacagacttatcccataaaakgagaaataagagccctatgctttcaaaaaaattaagtcgataaattagggaaaactatatttacgaaccaacaaagaaaaacaaacacagaaagcttgctttcagttattggtgattaaaaatatggccactgtgggaaaaatgtgttgatcagtgcagtggaaatgactgtgtgcattaaaaagaaaactttgaaaaatactttattattattatttagattaaaaataattatctcctaattggcaaaaagtgaggttgggagaagaatttttcaaagctgacatattaagcttggaa

SEQ ID NO: 64166 - DNA, 600 bp, Chicken  19866894329794_1
taaggccacagcatgctcaagcaatgccatgcatcaagcttggtgtggcagactctctgatgactaggagcatttttattcagaatatagatgttaaaaaaatggaaagactctaacaaagaagcctactctaacaaagaaggctactctaacaaagaagtctggatcccacctgaacaaaaacaacttctgggaattgtgacgtgcagaggagaatactctgtgagactctactgtaagccagttggattgaggtgatgtgcttagaagtcagccatgccaagagggctcacaggactygtctaatgaagactttttgagcttgcttctggtcccagcagtgatgccagagagcacatcctccagctgctagcctgtccctcttctgtctgttctttcaccactgaagcttatctgtctctgccacacaggagacagggagcacagccaaggctctttcgctggcttgagttcagctccctgctgtgtttcatcaatgaatgaagcagaatgatggattactgatgtgttgcactgataccttgccagcagatcaatggctgtcacacagcgttgctgttctgtagacttaaatgagaa

SEQ ID NO: 64167 - DNA, 600 bp, Chicken  19866894329796_1
agccctgcctttcagctgaattagagacaactcttggctacaaaaggaagcatcttcattccaacaccgagtggaaaaccctagacagatagcacaggtaccaggaagagggagaatctgagtgatgaagtggaggttttaccaagccacagcccacgaggacaacctctcatcacaagaagcgtttctggctgacccattgggtatcccaaccctggcagtggacaaactgtatgtgagttctgatctatcttctatcatgtaaaacaagctgggttttgtgaccagagcaaaaagatratgctatttacatagccagtgctagaggtctcaggtacgtacattgcagctaggtcttsgataacaacagcagagagagaattccaggggtagggtaggtggcaactgctatctttctcatttgaaaacttytttctccttgacattctgacaaccactgcgttaaaggtaaggaagttctataggtgtccaagtggaacttgtattagaaatgccaaatcctctacctcaagaagtaaaagagaacagttctccagcctatttgtgtgaatgggatttatctatctcccaagaagtaat

SEQ ID NO: 64168 - DNA, 600 bp, Chicken  19866894329796_2
tccaacaccgagtggaaaaccctagacagatagcacaggtaccaggaagagggagaatctgagtgatgaagtggaggttttaccaagccacagcccacgaggacaacctctcatcacaagaagcgtttctggctgacccattgggtatcccaaccctggcagtggacaaactgtatgtgagttctgatctatcttctatcatgtaaaacaagctgggttttgtgaccagagcaaaaagatratgctatttacatagccagtgctagaggtctcaggtacgtacattgcagctaggtcttsgataacaacagcagagagagaattccaggggtagggtaggtggcaactgctatctttctcatttgaaaacttytttctccttgacattctgacaaccactgcgttaaaggtaaggaagttctataggtgtccaagtggaacttgtattagaaatgccaaatcctctacctcaagaagtaaaagagaacagttctccagcctatttgtgtgaatgggatttatctatctcccaagaagtaatttacttacacatctagctagcatccaagacaaaaaaggcataaaagttaagtccttgcc

SEQ ID NO: 64169 - DNA, 600 bp, Chicken  19866894329796_3
gaggttttaccaagccacagcccacgaggacaacctctcatcacaagaagcgtttctggctgacccattgggtatcccaaccctggcagtggacaaactgtatgtgagttctgatctatcttctatcatgtaaaacaagctgggttttgtgaccagagcaaaaagatratgctatttacatagccagtgctagaggtctcaggtacgtacattgcagctaggtcttsgataacaacagcagagagagaattccaggggtagggtaggtggcaactgctatctttctcatttgaaaacttytttctccttgacattctgacaaccactgcgttaaaggtaaggaagttctataggtgtccaagtggaacttgtattagaaatgccaaatcctctacctcaagaagtaaaagagaacagttctccagcctatttgtgtgaatgggatttatctatctcccaagaagtaatttacttacacatctagctagcatccaagacaaaaaaggcataaaagttaagtccttgccttaagaatcttacctggaaaagcaataaaactacagcaaaactactgccttggcttcagacaggaggatcatc

SEQ ID NO: 64170 - DNA, 599 bp, Chicken  19866894329800_1
  misc_feature (1)..(101): n is any nucleotide
nnnnnnnnnnnnnnnnnnnnnnnnnnnnnnnnnnnnnnnnnnnnnnnnnnnnnnnnnnnnnnnnnnnnnnnnnnnnnnnnnnnnnnnnnnnnnnnnnnnnntgcctgtacctctggagccttaggagcacaaaaagttctgctctcctggaagggacttcaaagaagaaaggaaaaaaaagccatcggttcaacaatttacatattcctctcacgaaagaaaaatggggagaaacagtacatatgcttactacccagcttccttccttgtgaggtaaaccatttctttctgtgcaatgcrtaaaattctgtaattgacggtgctgtcagtctggaatcgttcacacttatctaaatactccaaatttaatatatgtatattctaaatttctttttcatatatctattagcaacacagtgagccaatttttatgtgttcctgtgatcccaggctcaaactgaattatcatcattctgtttaataaccaacttctgcacaattcgtgtaattaaaataggccaatattacatattgtacacaaaaatgagccctttgattttttcaataaataggtacgagttgatttttttattcataaa

SEQ ID NO: 64171 - DNA, 600 bp, Chicken  19866894329800_2
ggtgctgtcagtctggaatcgttcacacttatctaaatactccaaatttaatatatgtatattctaaatttctttttcatatatctattagcaacacagtgagccaatttttatgtgttcctgtgatcccaggctcaaactgaattatcatcattctgtttaataaccaacttctgcacaattcgtgtaattaaaataggccaatattacatattgtacacaaaaatgagccctttgattttttcaataaataggtacgagttgatttttttattcataaaatacagatatatgccctcytaaatatttcagttacctgacatagtttaacttctccaaatatatataatattcttcagagagtagaaaataaattcctgaaaagcgatacgaaacccctccagagaagacaatgaagcctcttcatttcagagcccatttctattcccaaaggaaacagggatttgatggacctgacagactttattcccaagccaaattcctcttacataaaaaaccctgctggctaagccattctttcatactcaacgagctccagcacagcctctgatccaaagctggcagtttgacactagaaga

SEQ ID NO: 64172 - DNA, 600 bp, Chicken  19866894329802_1
atacttgctgcatagctgtccttgatattatatgtatcttgaaaagtatgaatctgctatgtctgatgtggagagaaaagcacaataaaatcaaaagcttgttaataaaattgttgagatgtcagttccacaaaggatattctttacagggaaaaaaaaaaaaaagagaatgaatgttgctcctgtcaacagtaactgatgaaattgaggtaactgcatacagaactgtaattgcattgttagtgtcaaaggaagaaacatgaagaaattagaagtaatatttttggaaatcagaaggartaaataatctacataataataattatatctatgaatgtctctatgatttggttacttttaaggaaaaaaagaaatagtctatcaaatgaaatactagaaaaaagattgagtaacattttagggagtaacttaaaaattgagataaaagtaaattaaaaatgacaatatcgcagggctttgagaaagaatattaaattcaatagtgaacataggcccatccttatcatgttcattataatttattgaagtatagataggtgtaaattcaaagtaaattctgaagcttaccaagtccactat

SEQ ID NO: 64173 - DNA, 599 bp, Chicken  19866894329807_1
  misc_feature (1)..(79): n is any nucleotide
nnnnnnnnnnnnnnnnnnnnnnnnnnnnnnnnnnnnnnnnnnnnnnnnnnnnnnnnnnnnnnnnnnnnnnnnnnnnnnntcctgcacaaggagtggttcttcattaacagaggatgacatgaggagcagctaacctacatctcactgctgcgaggaacgtgatggcaatttgggcattatggcattagaaagggactgatattacagaagggaccgaggggtgatctggagttctacctcaagcttaatctgaagaccttttttatgtttttaagtttctgtgattcctgatccagatgycctctcaaaacagctttctgctgcggagtatgttctttcttgtgtagactgtctgcatgtctttttatggtgaaattggccttttaaaccttgaaaatgacctgttattggcagaatgcatacagctagctctttgcagaatatcaagagtataaattatttgtgatgatctgttgttgtgactgcctcaagggtttattttctttcgctactgtttaggtctttggaggttattgctggtttggaaagtaacagcaagatcttcactgtctacgtgcatggcttgctgcagctgcagg

SEQ ID NO: 64174 - DNA, 600 bp, Chicken  19866894329808_1
cctccttttaatgcaatggctgacacacggcttctgggcaggatgagaagtaggacttgcagctgagctgtaacacagaaaaccttgctgaagaaagcaagacatgaggcatttcaaaacgtggcctttttttgcagcttctgtgttcaggtgaataggtcccattctcactgttcagacaggagagctgctctctagcctcatgagtatcctagaatcctgttttatcttgtgttattttaggaacccaaaataattccttgctctacaatggcttcttccagtcttttcttacacagyccagattcagaatcttgcacrtgtaggaatacagtacttctgtcttaaaaccctgtttttccctcagtgcccacttgagctttgaaataactcatttagtgtttaacaacattagctcagagtccaaagcaaacccttgtgagtcagcgtgctcatctctttctccagcagaaatgaatacaaggtggtggttctcggaaagatgctgttctttatctccaagtgttgcacagcattccagcctctggtggcacatagccctacacctcccaccacagtcttcttacacagcccattata

SEQ ID NO: 64175 - DNA, 600 bp, Chicken  19866894329808_2
gacacacggcttctgggcaggatgagaagtaggacttgcagctgagctgtaacacagaaaaccttgctgaagaaagcaagacatgaggcatttcaaaacgtggcctttttttgcagcttctgtgttcaggtgaataggtcccattctcactgttcagacaggagagctgctctctagcctcatgagtatcctagaatcctgttttatcttgtgttattttaggaacccaaaataattccttgctctacaatggcttcttccagtcttttcttacacagyccagattcagaatcttgcacrtgtaggaatacagtacttctgtcttaaaaccctgtttttccctcagtgcccacttgagctttgaaataactcatttagtgtttaacaacattagctcagagtccaaagcaaacccttgtgagtcagcgtgctcatctctttctccagcagaaatgaatacaaggtggtggttctcggaaagatgctgttctttatctccaagtgttgcacagcattccagcctctggtggcacatagccctacacctcccaccacagtcttcttacacagcccattatactaagcatgcttacagggtta

SEQ ID NO: 64176 - DNA, 600 bp, Chicken  19866894329814_1
tttcgaatattttatgaggaatttattgctgttaattgaaggggagagattgatcgctgaggaatctagcgcattacttaacaaaaccctgataaattgtgtgtcacttctctgttctgcttagcattctcctccagaaggctttctgtttatggaaaagaaaatatttcaaaccagatacaaagtgatgccccaggttcccccccttcccacataaatagataataaaatagagacaggcaggcaataattctctctcttttttcttttccttttctttctggcaccccaagcaagggrggtgagagcagggggagagagggaacccctgtactgtgccccatcttcccctctcccagggcttcccatggctatgtgtagcagaggatgaggacgttgagagcagtgggctgcagcagtgatgtgccaaggagccctgccagcaatcgatccagttgtgggagtcacctcggtgcaactgtgctcagggcctgattcgcaccagcaggacagctttgataacgaggatgtctacgtgaggtgctttaaaaggtcttggctgttaatttggtagggaaagaagcagagaaaggtgaaaag

SEQ ID NO: 64177 - DNA, 599 bp, Chicken  19866894329816_1
  misc_feature (1)..(1): n is any nucleotide
nccagatatgattaaaaaattggatttctagctctacctacctattgttgctgaaaaaaagcagaggaaaaaggtagtgtgacacatagagtacacctataatgatttcattcactgcagagccatccatcaacaaaacgataactaaccaacccttttgtcaacaaagcactattcaatttatcatttaagttggtaggtaaacaagagagttaatgaaccagggacaagttggtcatgatggacaagaaatatagggattctgcattgctttttcccttgttcatcctttcatacctktgctattttgatttggcaccaatttcactcccattttacacttgccttgcaccgcaagtaaataattactcaaagatgaagacaattgcaaatcaggcttgacatatttcagakagcaaattgcaggaagtgcagttaggactccttaggtgcttgccctggttctgcaaaccacttgctaagtgaccctggacaattaacctctctgtgtttctgtttatctaactgtactacctcccaggggtattattaggcttaatttatcaatcgttcaatacactcatgttgagtattttgaa

SEQ ID NO: 64178 - DNA, 600 bp, Chicken  19866894329816_2
ctgcagagccatccatcaacaaaacgataactaaccaacccttttgtcaacaaagcactattcaatttatcatttaagttggtaggtaaacaagagagttaatgaaccagggacaagttggtcatgatggacaagaaatatagggattctgcattgctttttcccttgttcatcctttcatacctktgctattttgatttggcaccaatttcactcccattttacacttgccttgcaccgcaagtaaataattactcaaagatgaagacaattgcaaatcaggcttgacatatttcagakagcaaattgcaggaagtgcagttaggactccttaggtgcttgccctggttctgcaaaccacttgctaagtgaccctggacaattaacctctctgtgtttctgtttatctaactgtactacctcccaggggtattattaggcttaatttatcaatcgttcaatacactcatgttgagtattttgaaatgcctgctgaaagagaccatctaagtgcagaacagtatttagaaggttaattcacctgttaaaatcggtttgtagctggttcaatttacttggttttatggacaaaaaatgatc

SEQ ID NO: 64179 - DNA, 600 bp, Chicken  19866894329816_3
tcacctgttaaaatcggtttgtagctggttcaatttacttggttttatggacaaaaaatgatccaaaatatttagcaagtagaaactgaggaaaaccaggagagggttatcaaaatcatggctatttaaaaagatgtgcaatttcgaggagtggctcatgggtctcttaggtatatgatatatatgatactgagtctttcaaagttaaataaattaattgagagaaaaaaaaaaaacctgtaaataaggctactcagaaaagacaatttccaaattttcttcttctcttttaaatgaaartttcagtcacctcagagaggaacagagtttgcaaggtacatgtctgagctcctgtttctgtgactgcagggcttaaggttgcagtccacacctgaagtaggcaaaaaaggtgtttttttttttttttgccagaaatttcttcttggatgtaggaaatcaccttcatataatcaaatttcctaatgaagatggttatttttggtcattacaaaaatcctatgtagactatcctgcaaactgtttgaagttttatccactggaaactaccctttacagaatcacaaaatcacagaatggtag

SEQ ID NO: 64180 - DNA, 599 bp, Chicken  19866894329817_1
  misc_feature (1)..(127): n is any nucleotide
nnnnnnnnnnnnnnnnnnnnnnnnnnnnnnnnnnnnnnnnnnnnnnnnnnnnnnnnnnnnnnnnnnnnnnnnnnnnnnnnnnnnnnnnnnnnnnnnnnnnnnnnnnnnnnnnnnnnnnnnnnnnnnnctttgattattttcctctgggtctttttttaaaaaagaaaaaagaaaaaactagcattcctaaaaaagaagttgcaagcacaacaatacaaacactcctgtaatatttcattacacatgggcataaccctttgttttgcttatctttacattcattccacatatatcttgttytaatgctttatttccttcacacaaaaccatttgctctaagaaacaagctgttcaatgtattgtgctctactgagagctgtctaattttgggtttgccattttaccgattcagtgcccttaggaagtatgatacatatccattaattcatcatctgtaaaaacttgtggaggtacgtcctagcctttcattagcgttaatgatgcccaacccctgaatgtacactgtgtctcagcactacacaagttaactgagttcatgctataaacatcttgttttcatgtctgtaacacaggctagc

SEQ ID NO: 64181 - DNA, 600 bp, Chicken  19866894329820_1
gcagtaaaaatgaataggtctattgcatctttcagtaaattcacagtctgtccagttcacccagttccatcctccacctgagagcagcaagttgcatgtaattacaaacagtccaatccagttctgaattgtaaacaatgcagcaggaacgtccatctactggcattaccaaatctgaggtgcaaacgggctgatcttcagtcttatacctgtcagggtaagaaagaatttgaggaatgagaaggaagcacagaatacagcagaactaacaagttatagttatgtcaaaccaaagtaacrtaagccagacaacactgcattttagctatcagtatgcattggttttgcctgcatccagagagaataatcaaacaactcatctgtatgatgagtagccttccctacctcaagtgagggaaggaacgcctaggataagtcttacaaatctggggtgtttaacacaatgtctctgtaagtggcatatggtacaactggatagtttgtgtgctttggagaaaagtttcagggtctgccattctgaaattaaaatacttctgggagaaactgatatataaatccagctattgtcagcaagatctt

SEQ ID NO: 64182 - DNA, 599 bp, Chicken  19866894329828_1
  misc_feature (1)..(40): n is any nucleotide
nnnnnnnnnnnnnnnnnnnnnnnnnnnnnnnnnnnnnnnnctgtgtcgtgcatggcaggcggtgggtgcgttctgacgagatctgagctgtgtcaccatggctgccatgacccatcacagcctccacataaggatgcggtcgctgggtttggctggaagctttggatttggggctcagtgaccatgggtactgctggtgctgggtagtaccagcctcactgctgggaaaggaggcacacctcaactcatctgctgcaggatgagtctttgcttgccccagcagtcaccccactgcatgtytgamggatgatcctgctgctccccagggcycccaaacacagtggtggtattctcttttggcaggcgtgtggcaagtgtcacccaatccagtcagagcgaagcccagagctgcagccccttygggaagaaaaagaagtacaaagataaatacctggccaagcacagctcaagtaagtgtaagcagggtgctgtgcccccaaaccctgcaggctgccgaatgtggggcaggtgctggccctgcacagccagcagtgtcrctgtcggggcacgtgyctgtcatctgcttgtytaaaccccgt

SEQ ID NO: 64183 - DNA, 599 bp, Chicken  19866894329828_2
  misc_feature (1)..(36): n is any nucleotide
nnnnnnnnnnnnnnnnnnnnnnnnnnnnnnnnnnnnctgtgtcgtgcatggcaggcggtgggtgcgttctgacgagatctgagctgtgtcaccatggctgccatgacccatcacagcctccacataaggatgcggtcgctgggtttggctggaagctttggatttggggctcagtgaccatgggtactgctggtgctgggtagtaccagcctcactgctgggaaaggaggcacacctcaactcatctgctgcaggatgagtctttgcttgccccagcagtcaccccactgcatgtytgamggatgatcctgctgctccccagggcycccaaacacagtggtggtattctcttttggcaggcgtgtggcaagtgtcacccaatccagtcagagcgaagcccagagctgcagccccttygggaagaaaaagaagtacaaagataaatacctggccaagcacagctcaagtaagtgtaagcagggtgctgtgcccccaaaccctgcaggctgccgaatgtggggcaggtgctggccctgcacagccagcagtgtcrctgtcggggcacgtgyctgtcatctgcttgtytaaaccccgtgcta

SEQ ID NO: 64184 - DNA, 599 bp, Chicken  19866894329828_3
  misc_feature (1)..(10): n is any nucleotide
nnnnnnnnnnctgtgtcgtgcatggcaggcggtgggtgcgttctgacgagatctgagctgtgtcaccatggctgccatgacccatcacagcctccacataaggatgcggtcgctgggtttggctggaagctttggatttggggctcagtgaccatgggtactgctggtgctgggtagtaccagcctcactgctgggaaaggaggcacacctcaactcatctgctgcaggatgagtctttgcttgccccagcagtcaccccactgcatgtytgamggatgatcctgctgctccccagggcycccaaacacagtggtggtattctcttttggcaggcgtgtggcaagtgtcacccaatccagtcagagcgaagcccagagctgcagccccttygggaagaaaaagaagtacaaagataaatacctggccaagcacagctcaagtaagtgtaagcagggtgctgtgcccccaaaccctgcaggctgccgaatgtggggcaggtgctggccctgcacagccagcagtgtcrctgtcggggcacgtgyctgtcatctgcttgtytaaaccccgtgctaagcggtgcttggcctgctccaggcca

SEQ ID NO: 64185 - DNA, 600 bp, Chicken  19866894329828_4
ctccacataaggatgcggtcgctgggtttggctggaagctttggatttggggctcagtgaccatgggtactgctggtgctgggtagtaccagcctcactgctgggaaaggaggcacacctcaactcatctgctgcaggatgagtctttgcttgccccagcagtcaccccactgcatgtytgamggatgatcctgctgctccccagggcycccaaacacagtggtggtattctcttttggcaggcgtgtggcaagtgtcacccaatccagtcagagcgaagcccagagctgcagccccttygggaagaaaaagaagtacaaagataaatacctggccaagcacagctcaagtaagtgtaagcagggtgctgtgcccccaaaccctgcaggctgccgaatgtggggcaggtgctggccctgcacagccagcagtgtcrctgtcggggcacgtgyctgtcatctgcttgtytaaaccccgtgctaagcggtgcttggcctgctccaggccagcaaaggcagcgggctgaggacgtgctggctcctagcccaacctgcagctctgaccgatggcaaacaaggccgtaaatcagtgagataaata

SEQ ID NO: 64186 - DNA, 600 bp, Chicken  19866894329828_5
ggatgagtctttgcttgccccagcagtcaccccactgcatgtytgamggatgatcctgctgctccccagggcycccaaacacagtggtggtattctcttttggcaggcgtgtggcaagtgtcacccaatccagtcagagcgaagcccagagctgcagccccttygggaagaaaaagaagtacaaagataaatacctggccaagcacagctcaagtaagtgtaagcagggtgctgtgcccccaaaccctgcaggctgccgaatgtggggcaggtgctggccctgcacagccagcagtgtcrctgtcggggcacgtgyctgtcatctgcttgtytaaaccccgtgctaagcggtgcttggcctgctccaggccagcaaaggcagcgggctgaggacgtgctggctcctagcccaacctgcagctctgaccgatggcaaacaaggccgtaaatcagtgagataaataaagcttccccagcaacaagctctctgcgacttcccactgcttccctgcctggctcctgagtcctactgtcctgagcagaaatagaatgagaaaacatctaacttctgtaggggcttctggtccagcctcccagcag

SEQ ID NO: 64187 - DNA, 600 bp, Chicken  19866894329828_6
gccccagcagtcaccccactgcatgtytgamggatgatcctgctgctccccagggcycccaaacacagtggtggtattctcttttggcaggcgtgtggcaagtgtcacccaatccagtcagagcgaagcccagagctgcagccccttygggaagaaaaagaagtacaaagataaatacctggccaagcacagctcaagtaagtgtaagcagggtgctgtgcccccaaaccctgcaggctgccgaatgtggggcaggtgctggccctgcacagccagcagtgtcrctgtcggggcacgtgyctgtcatctgcttgtytaaaccccgtgctaagcggtgcttggcctgctccaggccagcaaaggcagcgggctgaggacgtgctggctcctagcccaacctgcagctctgaccgatggcaaacaaggccgtaaatcagtgagataaataaagcttccccagcaacaagctctctgcgacttcccactgcttccctgcctggctcctgagtcctactgtcctgagcagaaatagaatgagaaaacatctaacttctgtaggggcttctggtccagcctcccagcagcacacatatgccatgt

SEQ ID NO: 64188 - DNA, 600 bp, Chicken  19866894329828_7
cactgcatgtytgamggatgatcctgctgctccccagggcycccaaacacagtggtggtattctcttttggcaggcgtgtggcaagtgtcacccaatccagtcagagcgaagcccagagctgcagccccttygggaagaaaaagaagtacaaagataaatacctggccaagcacagctcaagtaagtgtaagcagggtgctgtgcccccaaaccctgcaggctgccgaatgtggggcaggtgctggccctgcacagccagcagtgtcrctgtcggggcacgtgyctgtcatctgcttgtytaaaccccgtgctaagcggtgcttggcctgctccaggccagcaaaggcagcgggctgaggacgtgctggctcctagcccaacctgcagctctgaccgatggcaaacaaggccgtaaatcagtgagataaataaagcttccccagcaacaagctctctgcgacttcccactgcttccctgcctggctcctgagtcctactgtcctgagcagaaatagaatgagaaaacatctaacttctgtaggggcttctggtccagcctcccagcagcacacatatgccatgtactggttgctgctggg

SEQ ID NO: 64189 - DNA, 600 bp, Chicken  19866894329830_1
attcccagtaatggtcagcagggaaacttcagcttcaggtgtctgcaggagcactctgcactcagggcaggcacggggaaactgagataggcattcagggcagactgagagaggctgatgaagcacatttctcacctggacctttctggatcatcgtgtgtttccaaggaaaagaaacaaattcccatgcttcctcctctctctcattcaccattatccattttggctaaattgccaaagtctaaacacaggcctgaaatattcaattatgacttccaaattattagaaaaaaaaaaaawaaaactaaaagcctccttcccaactaaggctgtagtcagtatcagctttccaaatgagtagggtataaatcctgctttgcagttaccaatccccactgacacgcagtgaatggggaaggcagacttttggggggcagccactcaggagatgcaaaagcaaagatggaattgcagagcagctccacctggttcagcaacccatctgacagtgccagatgcttcaaggaagatgtcagtagacagatgcgggataaactgtgtttagggagagctgtttcctcctgaccccgcaagtttgca

SEQ ID NO: 64190 - DNA, 600 bp, Chicken  19866894329832_1
gtgagcaaggagtgtaaaagaaggggattaggatttaagcataaggatgcttcctcccatgcccgtggcacaagcaagtcaacctcctcagtgccacacatcctgcgggacagcagccagtagaaaagcaagccccttggcaagggctgggtggtcgagatgctgagcattaggacatgcatcagggtgtgggtcaagggagctcagctccaaccccagggacaggaatgattgggggcactgcctggggctggaggatgttgatagagtacagggaccatgggccagcttggtgagggracaggaaaggagctgccttgggatgcatggacttttcttctggacccagcacctggggtgccagcagccacagggttgcagtcagctgtgatccatgactccaaccaagaaacccattcagaaataagcacctccagggttcccagccagctacagcagtcccaggcagtgcctccacgtgtcctgttctcaggagggtgcgaggttcccttgtcccttagtcctcctccaggaatcccagaccctcactgagggcttgtttgtctccagagctgtgtgattaactcctgctctggaacg

SEQ ID NO: 64191 - DNA, 600 bp, Chicken  19866894329843_1
tactaattagtttgttaaaatattctattggtaaaatacttatttcttccctggtaaaacttaaaaatgtagcgcaatcttataggggccatcttgccaatagtaagggcagaattagaagtagtatagaaatagtttaaaaaaaataattagcaagtaagtgatgaaggaagctgccataattagcatcaaagatcactctctgacattttacagcaaaatctgaaagagcataggagtgaatcttccatagaaatcaagcagtcttaggaacaaggacaaggcaggcatcttgtgatratgctaggtgtcttggattcctgactacccaaagtgacagctggaggaagggtgaatagcacccaattttcagccctgggggctgcagtgctgtggaattaaagcgtatgtcttcagatggaagataaccagtatttctcattttccaattggaaaccagtatttctcaatttccattgttagggtggtgcgatactttgttcagttagaagtaagaaagtatgctttatttgattgattgattgattgattttgtatcccatatcccctacatcctgactgtaaaatttaggtatactt

SEQ ID NO: 64192 - DNA, 600 bp, Chicken  19866894329844_1
cggacctggcatgctgcagccccgtgtttacactgctatctcatattacgagatgaaaacacttcttcctactttgaagggagctctggaaacaacccgcagcatctcagtgggccattatgcttcccgcccaccccgcctccttcccagctcctctgtttacagacgtggccaacccgctccttttatctttttgttgccctcttttcttttttatgttttaataaaaattataaaggaataaaaagagctttcctacttgtatacattaaccatacggtgtgtattttatgtgcagcycaagacagctagctcagtgcggtgcagaccagccagaggtgggatgcatacatttacagcctcatacacaaggcacgtgccaagctggcactgtgtgggctgaggctgtgtggctgaagcaaggtgatgctagcagagaggggaatggatcacacgttactgtgctatgcttttgcccccaggttctgggatccaggctggtaccaagagccaggatctggctctgatcgctcccttccagtggagccaaaggctctgtgaagctcctggacagcccwgctcacggctcacggcgcccaa

SEQ ID NO: 64193 - DNA, 600 bp, Chicken  19866894329844_2
ggtgtgtattttatgtgcagcycaagacagctagctcagtgcggtgcagaccagccagaggtgggatgcatacatttacagcctcatacacaaggcacgtgccaagctggcactgtgtgggctgaggctgtgtggctgaagcaaggtgatgctagcagagaggggaatggatcacacgttactgtgctatgcttttgcccccaggttctgggatccaggctggtaccaagagccaggatctggctctgatcgctcccttccagtggagccaaaggctctgtgaagctcctggacagcccwgctcacggctcacggcgcccaacctgaggtttggagcaggagacagcctggagccaacagcatcacccagaagctgaggctacaacctgaaaaatccatctgcaaatacagctgcrgtgcagagcaggtgctgactgcaagcctgagcgggggctgagccacacactgggacttaccaccccgatgccttcaaaagcaaagatggctgtgccaaaaaacagagggtaggtcttccaggctgcggcgagaggcagagctttgggatccgggatgtcctggaaaacagcccgcatgaagctc

SEQ ID NO: 64194 - DNA, 534 bp, Chicken  19866894329844_3
gtgggctgaggctgtgtggctgaagcaaggtgatgctagcagagaggggaatggatcacacgttactgtgctatgcttttgcccccaggttctgggatccaggctggtaccaagagccaggatctggctctgatcgctcccttccagtggagccaaaggctctgtgaagctcctggacagcccwgctcacggctcacggcgcccaacctgaggtttggagcaggagacagcctggagccaacagcatcacccagaagctgaggctacaacctgaaaaatccatctgcaaatacagctgcrgtgcagagcaggtgctgactgcaagcctgagcgggggctgagccacacactgggacttaccaccccgatgccttcaaaagcaaagatggctgtgccaaaaaacagagggtaggtcttccaggctgcggcgagaggcagagctttgggatccgggatgtcctggaaaacagcccgcatgaagctcagagcacagctcatccccacagctcccttccccatggggcagagggaaaa

SEQ ID NO: 64195 - DNA, 600 bp, Chicken  19866894329850_1
ctgccctatacaaaccacagagacttgttggcaagctagcctacatactttcctcagcctaagaggacactgcaatagcaatatgtgtacgtatatatgagagctacaaatccctctatgtcctaagcagttttcaaaatttcccagaatgctaccttcagttctcaacaaaacatcaaagtccatttcatgtgagcatgacactttctccttctacctctaagaccctttttttccacctatcattcactctcattatttctgttcttcaggaaagagtacatatgtcttgagtaccaytggaaataagaatttttttaggacttcttgtctttttgtcctggaattagttgccattaatggccagttgccattaatctctcctactgtctttgttcagtttccattgaagtcaaagcttggaagaaaagtggagcagtgtacawtaatagatggaaaagtaaagcaaggtgagataactttgctgctactagttatttgttaccaagttgtagggtagatctcttggcagaaaatgcgtgaaagatttcyttctccacttacaagtagattgagggcttttgtttaattccttgtgtc

SEQ ID NO: 64196 - DNA, 600 bp, Chicken  19866894329850_2
gaatgctaccttcagttctcaacaaaacatcaaagtccatttcatgtgagcatgacactttctccttctacctctaagaccctttttttccacctatcattcactctcattatttctgttcttcaggaaagagtacatatgtcttgagtaccaytggaaataagaatttttttaggacttcttgtctttttgtcctggaattagttgccattaatggccagttgccattaatctctcctactgtctttgttcagtttccattgaagtcaaagcttggaagaaaagtggagcagtgtacawtaatagatggaaaagtaaagcaaggtgagataactttgctgctactagttatttgttaccaagttgtagggtagatctcttggcagaaaatgcgtgaaagatttcyttctccacttacaagtagattgagggcttttgtttaattccttgtgtctgttacactcattgtggatataagcagctggcaacaatcccctaaaaaaaggatgggagaaaatgagtgcaacatgggattttaccacacatataaattcaaaaatatccactcactgttttatgaagaagtatgatatgaaggag

SEQ ID NO: 64197 - DNA, 600 bp, Chicken  19866894329850_3
tcattatttctgttcttcaggaaagagtacatatgtcttgagtaccaytggaaataagaatttttttaggacttcttgtctttttgtcctggaattagttgccattaatggccagttgccattaatctctcctactgtctttgttcagtttccattgaagtcaaagcttggaagaaaagtggagcagtgtacawtaatagatggaaaagtaaagcaaggtgagataactttgctgctactagttatttgttaccaagttgtagggtagatctcttggcagaaaatgcgtgaaagatttcyttctccacttacaagtagattgagggcttttgtttaattccttgtgtctgttacactcattgtggatataagcagctggcaacaatcccctaaaaaaaggatgggagaaaatgagtgcaacatgggattttaccacacatataaattcaaaaatatccactcactgttttatgaagaagtatgatatgaaggagatagagcatactgttgatagtaaggactgattagcattttatggtgcgtgaaacatggaacaaaggacaagggctaaatagctatgttcatttaaggctgtgggga

SEQ ID NO: 64198 - DNA, 599 bp, Chicken  19866894329851_1
  misc_feature (1)..(25): n is any nucleotide
nnnnnnnnnnnnnnnnnnnnnnnnntatttcctgcatggcaggaatttagtaaagctaaataaagcatatcccttcaactcaagaactctctcaactccagaagaactgttcccatccctcccaaagattacatgatgtttctggtgatgattgcactatttttttctttggaataggaaggaacttttctctcatcaacagactgactaaagcagaactatcttccaggcaactgaaaagaaaagaagcaggtgcaagtaatcacacgagaagtgttcatttaagacaatgcagaaggkatcttgttcactaaagcattttctgaactggtttattaagacatcttcaaaaggaggaagaaaaaaaagataaggcaacaagactgaggaacaaagataagaacagaggcaacacttctttctagtcacttaatctccacatatacgaagctcagtgctgtttcagcagaggctgaggccagctctgaactgtggtagtgctgaagggagtgttccatcagctggaaattattaaggaagaaatgacctatattgaataagttattactggatagttcccagaccagtaaatacaattg

SEQ ID NO: 64199 - DNA, 600 bp, Chicken  19866894329855_1
caaatgaagaagctgcattgctaacactgtcacatgcctgaaacgcaacatgaggcaattgctttatggcttcaccatttattattcaagtgacctctctgcaatattttctttaaaattgtgggttttttttctaaataggatatgggttgctacagtcatgtcataagcagtacatataattttttcatgtatttccattacgttcaagagcctattctgaagccacatatatttatgctagccagtgcccagaaagcgtatgtcactgtattataactgagctagctcataactgasttgtataaacaacctcaagtcagtgcttttccaactgatgttttcagtagttatacaacatccatcattttcagtaatacataacaaatacctgtatttattgggactgttgatgcctgatatctctaaagaaacattagaacactagcatgatctttccagcctttactgttcttaccacttgcagtggtaagctatcatgtcaaatatgattctgtgtctttactattaccttgtgtttcaaacagttgtacacgttctcaaatacagctgcactggcacattaaaatcaaatgtata

SEQ ID NO: 64200 - DNA, 570 bp, Chicken  19866894329857_1
cagactgtgcaaaattatatacttccagtttaggaagttaagtttttgcgtcacaaaaataaaaatttctacttgcaacttgtattcttgtaccaagtgccatattacagtagtaatattagtataacttcttgcatttcagatttgaagatagagcctctgttcttgagacatgatggatgtttgggctgcttctgactttgtgattaaatagaggaacatttatttatggaaaatcttgtaaagaaatttgtatataggagtgctgaatctctgtataatactttaatttataagaarctgttaatgacagtgaagtctttatttgcaatgcatctcattgtgttgcatcttggaataccacaatcaaataacttttacaaacttcagggataagttacagtatttcctttagaaataagatgtttctttaaggaaataattatttctgttgcccttccttttgaaaaggaaagttttgtttttgtaattatatttacatgtgatctttcatctgttcacattctacgttctaccaagttaaaaaaatcaggtatttgagaatgtggt

SEQ ID NO: 64201 - DNA, 600 bp, Chicken  19866894329867_1
aggagatgagcagttgccttaactttctccattatttgtggacatgttgtgttcatatacaagagagcatttgtggagagagaagggctttaaccccccccccccccaaacacacacacgctcagaacagtaacttgtgagtgcaggtacttaacaagtaagcagtactgcccatgtaaagggaaaaattccacagctgctctgtcattgctgctgtgggatagaccagcacagacggagtcagtgcttcagcactgatgtgatgtacactgaacttcctgagcctgatacccagcctarctcacgtttagcatcagwgagatgccagcctgttctgtgttctgacactaattcttcwttttctctgaaagccgcagaactagttacagttgcattaaaagacacagcatattgttcttccctaatcggcagagtcagagaatttataacccacatgattttcttcctttcctgaatacttcagatttctgctaatccttctgtaaggatttcttatctgctgggaccagaccatctcaagcgtttctgcactgccctagaaacagccccaaacccactaggatttctcagaatgcacac

SEQ ID NO: 64202 - DNA, 600 bp, Chicken  19866894329867_2
ttaactttctccattatttgtggacatgttgtgttcatatacaagagagcatttgtggagagagaagggctttaaccccccccccccccaaacacacacacgctcagaacagtaacttgtgagtgcaggtacttaacaagtaagcagtactgcccatgtaaagggaaaaattccacagctgctctgtcattgctgctgtgggatagaccagcacagacggagtcagtgcttcagcactgatgtgatgtacactgaacttcctgagcctgatacccagcctarctcacgtttagcatcagwgagatgccagcctgttctgtgttctgacactaattcttcwttttctctgaaagccgcagaactagttacagttgcattaaaagacacagcatattgttcttccctaatcggcagagtcagagaatttataacccacatgattttcttcctttcctgaatacttcagatttctgctaatccttctgtaaggatttcttatctgctgggaccagaccatctcaagcgtttctgcactgccctagaaacagccccaaacccactaggatttctcagaatgcacacaaacaggacataacttca

SEQ ID NO: 64203 - DNA, 600 bp, Chicken  19866894329867_3
acaagagagcatttgtggagagagaagggctttaaccccccccccccccaaacacacacacgctcagaacagtaacttgtgagtgcaggtacttaacaagtaagcagtactgcccatgtaaagggaaaaattccacagctgctctgtcattgctgctgtgggatagaccagcacagacggagtcagtgcttcagcactgatgtgatgtacactgaacttcctgagcctgatacccagcctarctcacgtttagcatcagwgagatgccagcctgttctgtgttctgacactaattcttcwttttctctgaaagccgcagaactagttacagttgcattaaaagacacagcatattgttcttccctaatcggcagagtcagagaatttataacccacatgattttcttcctttcctgaatacttcagatttctgctaatccttctgtaaggatttcttatctgctgggaccagaccatctcaagcgtttctgcactgccctagaaacagccccaaacccactaggatttctcagaatgcacacaaacaggacataacttcagaagccaactctcagcacagtactcccaaggtaagctaac

SEQ ID NO: 64204 - DNA, 600 bp, Chicken  19866894329873_1
aatattacattgaaagagaaggtcattacatcagaccatggcttgcacagactggtgataaaagtcaatgacctaggacagccagagtctctttatactatagctcttgtgcatttatttgtgaatgagacagtcaccaatagttcctacatacaagagctagtgcgcaggaatatggaaactccagttggccagaacattggggatggtgagataaccccacaaaccaatgattatgtcaagatcataattgcaattattgcaggcacaatgacagttattctggtaatttttgttackgctttagtacggtgccgccagactcccaggcacaaagttgttcagaaaaataagcagagtggtgagtgggtttctccaaaccaagagaacaggcagatcaagaagaagaagaagaagaagaaacgctctccaaaaagtcttctcctcaactttgtgactattgaagaatctaagcctgatgatcctggccatgagcacataaatggcactttagacattcctgtagaactagaagaacagactatgggaaaatataactgggccactacaccaaccacatttaagcccgatagcccagat

SEQ ID NO: 64205 - DNA, 600 bp, Chicken  19866894329873_2
tagcccagatttagcgaagcactacaagtctgcttctccacagccaaccttccaaattaaacctgagactcctgtaccccccaagaaacaccatgtcattcaggaactgcctctggataacacctttgtggtgggctgtgactcactctccaagtgctcatcaagcagctcggacccttacagtgtttctgaatgcagttgtcaaggaggcttcaagaccccaggccccattcacaccagacaggtaatggaaattttaagcttctctctttctccttcgactctttcttttccattaayttagctctaattctaagcgctgcaaaataaaattttccacaaggattaaaagttatgaaaagtcatgtttgatagaagaactgaaatgtaaggaatttgagattcatcagtgttaaggggaaaaattaaaatgactgtcagctgcaagcaaatcgagctgtgaattattacattggtgggtattccagactgcagatggcagtatggcgcttcctgcattacctctgcatactgtgcagctatgtgaaacaaagagggtttatgggactgtcctctgtagtattgtatgctgaagcgttg

SEQ ID NO: 64206 - DNA, 600 bp, Chicken  19866894329875_1
ataaataaataaacctgtaacctgtttaagaactgattacaaggataatggtaaagaacaaatcagatgaacttcttactgaaggtctggggtgataatcaacgtacagtcctgaatgtaatgaaaccctttttgaaagctatgcagaatgaggagtaaaagattaaagttatttatgtacctttctgcatcctccagcaaaattttattgactttcttgctgtgcctttgtcttgatagttctctataatataaacctgaggtggccttaggtaatgtgtagcttcatcctctctctcrtttgtgaagcagcttgttgtagtcatcaacatcatacagaggctaactgaagctatcatcagagtttgtatttgataattgagatgtttattttgtcttttgttaaaaaggacttatgtaaaggttaagaatttgggcagggcttttgttcttccatccaaaatacaggcagtaaagtgtcttgagttattgatttctctgttctgtgacaaatgaaattttgagatggaacatatgtctaatgtgcaaaacactgtcagatacctcttaaatagcaggggaaatgtatcaaaacaagca

SEQ ID NO: 64207 - DNA, 600 bp, Chicken  19866894329878_1
agaaacatttgtgtgctataccagataaatcagaggagctagaaaaaactgatacaagtatatagcaagttttagaataagtagccaagttagatgtcaataagtaacaaggaccagatgacaatttgctgagtcttgtcaataaatgaatagaattggatgcagtttgctgaagggatggatatctttggtgaggaaaagctttctggaaaatattacagagttacatagaaaatgtgtaacaccaaaaaaaaaaaaaaaacacagcaaaataagtgtgttcactacaacatggaaaasaagatctttccttgctttttatttacaaacaattatttatatatttatcattatgtaattattatgtaaataagtattataagtaaataatgagacaagataaataaaagaaggcacttctttggaaagcaggaaatttacacatggacttctgaaacttgtacttctggggactgtggaaggtgcagcctcaaaagagattgagacaaacttasgtattcaggtctaaacttcaggtcacaggtctaggtagagatgtaccctctaacattccttatacagctatctgaatacagggat

SEQ ID NO: 64208 - DNA, 600 bp, Chicken  19866894329878_2
ttacagagttacatagaaaatgtgtaacaccaaaaaaaaaaaaaaaacacagcaaaataagtgtgttcactacaacatggaaaasaagatctttccttgctttttatttacaaacaattatttatatatttatcattatgtaattattatgtaaataagtattataagtaaataatgagacaagataaataaaagaaggcacttctttggaaagcaggaaatttacacatggacttctgaaacttgtacttctggggactgtggaaggtgcagcctcaaaagagattgagacaaacttasgtattcaggtctaaacttcaggtcacaggtctaggtagagatgtaccctctaacattccttatacagctatctgaatacagggatttcagaaaggcagaggttaacagaacctgataaggcacctcttgctaaaggaaaaacctgaatgttgatctatatgaatcactgatctggtaaggtagggcttttttttttctcccctctcattccataaaaaaaaaaaaatctagaaggcccacttgaagagcacagatgattgataaagaaacaaaacacagtcctagcacaaagcagacaca

SEQ ID NO: 64209 - DNA, 600 bp, Chicken  19866894329878_3
aagcagacacaacatcttcaagagtattgcaataattgcatctccagatagtactgcaatacatacaaggttaagtatgcaaaaagtaattcttaaagcttacaaaaagccctcacactgctagcttggaaagaaaatatctctataatacttgactttcagggcatctgatttataatcaccacattagatcagatatatttaaaaggcctgtctgggacttcccaagaagctgaaaatgattagagaaatgctcattgtaggtaccatacctttcgttttcttgatatactgctcacwctgtatttgttctttcagcacacttgatggtttgacagattgatctctagcatgtatttagcaaaaagtttcaagaactctgatggtctattaaaataagacttaatagttgatttttgaagaaaatctctgacttccatcagatgatagacaaaaaaagatgctacttccatcaataatttgacactcccattaaagttatctatgtttttcctagtgtacaatcaacaaatatacaagtaacagagtagcacagttaggctggcattttacaggtttgtataaatggaaagattacca

SEQ ID NO: 64210 - DNA, 599 bp, Chicken  19866894329885_1
  misc_feature (1)..(57): n is any nucleotide
nnnnnnnnnnnnnnnnnnnnnnnnnnnnnnnnnnnnnnnnnnnnnnnnnnnnnnnnncaagaatggcttttggtgccaagaatggctttaactacttatatacactacccatggcgtgtggaaacatggggtcaaagcagggttgtgtctccaaataattgagctcactctggtttcagaataaatccatccattccaggaactctcctctgatgcactccttgtaattcactcattatgaatgcccactcagtgactggtttagaaacaacgttgtatgagcaaatggatgttttctaytaggaatccttgagacaaactacttgctgctatcagccccaggcctatgygatgcaattaaatgggacygtggcagtctayatcttgtatacaactcattcttcctctgggaactggaagatctaattttattaggttcattatccttttctcaagaattaatagctcctgagactgttggcctaatgtggctgattttacattgtaattgaatggaatcaggaatattgctgtcttgatcaaaagtgtctaccrgcccttcttgcctgttagtgaggatgctgtgtgtgcaccaggag

SEQ ID NO: 64211 - DNA, 599 bp, Chicken  19866894329885_2
  misc_feature (1)..(7): n is any nucleotide
nnnnnnncaagaatggcttttggtgccaagaatggctttaactacttatatacactacccatggcgtgtggaaacatggggtcaaagcagggttgtgtctccaaataattgagctcactctggtttcagaataaatccatccattccaggaactctcctctgatgcactccttgtaattcactcattatgaatgcccactcagtgactggtttagaaacaacgttgtatgagcaaatggatgttttctaytaggaatccttgagacaaactacttgctgctatcagccccaggcctatgygatgcaattaaatgggacygtggcagtctayatcttgtatacaactcattcttcctctgggaactggaagatctaattttattaggttcattatccttttctcaagaattaatagctcctgagactgttggcctaatgtggctgattttacattgtaattgaatggaatcaggaatattgctgtcttgatcaaaagtgtctaccrgcccttcttgcctgttagtgaggatgctgtgtgtgcaccaggagttgccttccagctgctttgcttttcacagtgctgttacatgtgaytggga

SEQ ID NO: 64212 - DNA, 600 bp, Chicken  19866894329885_3
ttggtgccaagaatggctttaactacttatatacactacccatggcgtgtggaaacatggggtcaaagcagggttgtgtctccaaataattgagctcactctggtttcagaataaatccatccattccaggaactctcctctgatgcactccttgtaattcactcattatgaatgcccactcagtgactggtttagaaacaacgttgtatgagcaaatggatgttttctaytaggaatccttgagacaaactacttgctgctatcagccccaggcctatgygatgcaattaaatgggacygtggcagtctayatcttgtatacaactcattcttcctctgggaactggaagatctaattttattaggttcattatccttttctcaagaattaatagctcctgagactgttggcctaatgtggctgattttacattgtaattgaatggaatcaggaatattgctgtcttgatcaaaagtgtctaccrgcccttcttgcctgttagtgaggatgctgtgtgtgcaccaggagttgccttccagctgctttgcttttcacagtgctgttacatgtgaytgggaagagattaaaataagaggaa

SEQ ID NO: 64213 - DNA, 600 bp, Chicken  19866894329885_4
atggctttaactacttatatacactacccatggcgtgtggaaacatggggtcaaagcagggttgtgtctccaaataattgagctcactctggtttcagaataaatccatccattccaggaactctcctctgatgcactccttgtaattcactcattatgaatgcccactcagtgactggtttagaaacaacgttgtatgagcaaatggatgttttctaytaggaatccttgagacaaactacttgctgctatcagccccaggcctatgygatgcaattaaatgggacygtggcagtctayatcttgtatacaactcattcttcctctgggaactggaagatctaattttattaggttcattatccttttctcaagaattaatagctcctgagactgttggcctaatgtggctgattttacattgtaattgaatggaatcaggaatattgctgtcttgatcaaaagtgtctaccrgcccttcttgcctgttagtgaggatgctgtgtgtgcaccaggagttgccttccagctgctttgcttttcacagtgctgttacatgtgaytgggaagagattaaaataagaggaaagaactggagat

SEQ ID NO: 64214 - DNA, 600 bp, Chicken  19866894329885_5
actggtttagaaacaacgttgtatgagcaaatggatgttttctaytaggaatccttgagacaaactacttgctgctatcagccccaggcctatgygatgcaattaaatgggacygtggcagtctayatcttgtatacaactcattcttcctctgggaactggaagatctaattttattaggttcattatccttttctcaagaattaatagctcctgagactgttggcctaatgtggctgattttacattgtaattgaatggaatcaggaatattgctgtcttgatcaaaagtgtctaccrgcccttcttgcctgttagtgaggatgctgtgtgtgcaccaggagttgccttccagctgctttgcttttcacagtgctgttacatgtgaytgggaagagattaaaataagaggaaagaactggagatggtagtgaggggaaaaggcaacaaagccctgccctgaacctcggggtctcgcaccgggaacatttgcatcacccacaggcagagaagtttatcaggtctgatgcaagccaagaatctgccatgaagtttcacaaggcaaaatgccacgagctgcaattgggtatctgaagttag

SEQ ID NO: 64215 - DNA, 600 bp, Chicken  19866894329885_6
ctatgygatgcaattaaatgggacygtggcagtctayatcttgtatacaactcattcttcctctgggaactggaagatctaattttattaggttcattatccttttctcaagaattaatagctcctgagactgttggcctaatgtggctgattttacattgtaattgaatggaatcaggaatattgctgtcttgatcaaaagtgtctaccrgcccttcttgcctgttagtgaggatgctgtgtgtgcaccaggagttgccttccagctgctttgcttttcacagtgctgttacatgtgaytgggaagagattaaaataagaggaaagaactggagatggtagtgaggggaaaaggcaacaaagccctgccctgaacctcggggtctcgcaccgggaacatttgcatcacccacaggcagagaagtttatcaggtctgatgcaagccaagaatctgccatgaagtttcacaaggcaaaatgccacgagctgcaattgggtatctgaagttagattagggtgaatccaggctttgtatatcctttggatggaatccgctgaaacggtggttacagcccatttggggagaattgtgtgggagt

SEQ ID NO: 64216 - DNA, 600 bp, Chicken  19866894329890_1
aaatgttatatcctattctgaagataataagaataactgaaatgtcaaggccactaaaactgtctctagtttaagattaagttttcaacaacttttaaatttaatattaaattaggaatgaaaacacagaaggatctagataaaagcagtactgtcgcttggtaattaatgaattgaagtgaagaagcacttgaactaagtacactcctaacatcagcataagcacattcttcatttagtctgagattaacactgtcagtgactaaaacattgtcaccttggcaatggaatatagatagwttttttccagcaggactcttttcatgataaacctatctctcatctgcctatatatattatttattctttaaataaagacattgatccaaaaataatactgagatctttaagtgcacaaagaacacrgcactatcaaattaccggtttggagaaggtgtcgttgcacgcttgtgccatgagatgattagctttgcttccatcttgtttaaattcactttaaaattaaggtgtttggttttgaatttatgccaaacactgcgacaaagcataggctgcagctgaagcatcaggaaagagagg

SEQ ID NO: 64217 - DNA, 552 bp, Chicken  19866894329890_2
cagaaggatctagataaaagcagtactgtcgcttggtaattaatgaattgaagtgaagaagcacttgaactaagtacactcctaacatcagcataagcacattcttcatttagtctgagattaacactgtcagtgactaaaacattgtcaccttggcaatggaatatagatagwttttttccagcaggactcttttcatgataaacctatctctcatctgcctatatatattatttattctttaaataaagacattgatccaaaaataatactgagatctttaagtgcacaaagaacacrgcactatcaaattaccggtttggagaaggtgtcgttgcacgcttgtgccatgagatgattagctttgcttccatcttgtttaaattcactttaaaattaaggtgtttggttttgaatttatgccaaacactgcgacaaagcataggctgcagctgaagcatcaggaaagagagggagagagatctgggagccattaacaaagcaaaattgtagtggtgaaaaatcgaagtaggaggcatattaaagaatcaa

SEQ ID NO: 64218 - DNA, 600 bp, Chicken  19866894329896_1
tctgcatctgccttcacgccgcagtgaccacagggatgtagtggacccccacgcagcacagcggtgcccttccccagctggaagccccaccgcctccatgcccaccccgtccccccccgcgccccctgacctggagttctgcttgctgcattttctgcctcttcatcagcatttggttccagacgtcctcgtaggggtcagccaccaacgtgtgccggttgtaggatcgcagctgtgaaaacacccaaggggaggagatgggttgaaaaacggaaaggcaaaagggaggtcacggcaccrtcacccgtgggagatgggatgaaacgggcagggaacgtccgtcccctcacggctcatcccgtgggatggcagagctcacccagcacggcccgggaaggactgagccaacaaggcagcccccccccagcaccatcccagtgtctcctggggagggaacgcagaccgggaacacacggggcagagatcgggatgggcagaggggcgcagtcggtgctgagggctgcagactgaaggccaccccatcaaaaggggggccggggggcacagcacggggcacggctcaccctctgcctggttttc

SEQ ID NO: 64219 - DNA, 599 bp, Chicken  19866894329908_1
  misc_feature (1)..(126): n is any nucleotide
nnnnnnnnnnnnnnnnnnnnnnnnnnnnnnnnnnnnnnnnnnnnnnnnnnnnnnnnnnnnnnnnnnnnnnnnnnnnnnnnnnnnnnnnnnnnnnnnnnnnnnnnnnnnnnnnnnnnnnnnnnnnnntgctttgaattacactggatttccagaactaaaaccaacattttgatggtatttctacttgtgattgccattcaaatgccttgcaaacgcacgtttgagaagcggggtgagttctcttggctgtgtcttcacatcagggttagcactacttctatctggggagctgctcccagycttttccttgcctccatggagaatgggatcccagttagctggtgtcccagcaggatacactgccttgtgcaytgtatctactttcactcagctatctgccaccactcctggcaagatttggattgtattactcagctgctaataactctctctttccccagtgtacatcttcaccaaagagagtggtcccagtgcactgggacagccccatgatgcacagagcagtgcacacttcatggccacatcagaagaagtaaccatttaatttagagtttgtgtctgggtaatctggggctgaa

SEQ ID NO: 64220 - DNA, 599 bp, Chicken  19866894329908_2
  misc_feature (1)..(54): n is any nucleotide
nnnnnnnnnnnnnnnnnnnnnnnnnnnnnnnnnnnnnnnnnnnnnnnnnnnnnntgctttgaattacactggatttccagaactaaaaccaacattttgatggtatttctacttgtgattgccattcaaatgccttgcaaacgcacgtttgagaagcggggtgagttctcttggctgtgtcttcacatcagggttagcactacttctatctggggagctgctcccagycttttccttgcctccatggagaatgggatcccagttagctggtgtcccagcaggatacactgccttgtgcaytgtatctactttcactcagctatctgccaccactcctggcaagatttggattgtattactcagctgctaataactctctctttccccagtgtacatcttcaccaaagagagtggtcccagtgcactgggacagccccatgatgcacagagcagtgcacacttcatggccacatcagaagaagtaaccatttaatttagagtttgtgtctgggtaatctggggctgaaccaactagcatcataggtggagatgttgctgcctacaaataggtttttctgaccatgcaaacactggctgtt

SEQ ID NO: 64221 - DNA, 599 bp, Chicken  19866894329915_1
  misc_feature (1)..(2): n is any nucleotide
nncatgcagatgctggccttcctgctggaaattttgcctatccagattaccaaagttactgtagctttaaagcagaaatacaaactctcaaattgcctttttttttctcctcttctagctggaagatgacttcgttattggctattataatgcagtcttgctgtttggacatattctgaagaaatttatcttctcccaaagccccgtgttacctaccagtttcatcaatgaattccgaaatatcacttttgaaggtaaaaatgtatagtcctgagcagggttcactgaactgaagagggraaagagatttgttttgaagtactcttaggataagtcccttctacacttaaaaaagtccaagcatttcagtgaattttattactactgtaatttttttttttttacttttttatcattttttttcacataagttatcttcagtattaacaaaagcactacatagcagtcatgcagaatcacctcagtgccactgcaattagcaacagcctgtttgaggagcagattcctttctgggtcacggccttttcatagaatcacagaatcatagactcattaagtttgaagaaggtctcttaggt

SEQ ID NO: 64222 - DNA, 600 bp, Chicken  19866894329917_1
tctccctccctcatgcacccagggctttatcaacaacagcttatcagtagcagccactctgaggaacagccccacgggcactatcggtgacgtgatgcaaggctggatcactgctgtcagctggtctcaccaggcagatggatcgggctggttttgtgcctccaggaaaagccagacccctcccatgcatcatcagaaagacccagaagcaaaacccatgcactcccagcacagagctgcctgcagtacttcagttctcctggcctcaaagtccaacaggagcactgcacacctctgtcygtgagctcaraagctctgactgcagtaattctgcaacagcacaaccgcctcccatgtccacctgcaggggaaccatttggtccttgcaagactttccctccttcagtgactcagcacaactccccrtgcccagacagaggtaaaacacattaaaaaaacagtacctggaaggacagagtctgcagagtctctcccattcaggggctgtttttctcctgccccagctggtgaggagtcagagccctgcacagcttctttcaatatcacaatcaacagctctcagaggagaacttggaaacg

SEQ ID NO: 64223 - DNA, 600 bp, Chicken  19866894329917_2
tcatgcacccagggctttatcaacaacagcttatcagtagcagccactctgaggaacagccccacgggcactatcggtgacgtgatgcaaggctggatcactgctgtcagctggtctcaccaggcagatggatcgggctggttttgtgcctccaggaaaagccagacccctcccatgcatcatcagaaagacccagaagcaaaacccatgcactcccagcacagagctgcctgcagtacttcagttctcctggcctcaaagtccaacaggagcactgcacacctctgtcygtgagctcaraagctctgactgcagtaattctgcaacagcacaaccgcctcccatgtccacctgcaggggaaccatttggtccttgcaagactttccctccttcagtgactcagcacaactccccrtgcccagacagaggtaaaacacattaaaaaaacagtacctggaaggacagagtctgcagagtctctcccattcaggggctgtttttctcctgccccagctggtgaggagtcagagccctgcacagcttctttcaatatcacaatcaacagctctcagaggagaacttggaaacgaactcccttt

SEQ ID NO: 64224 - DNA, 600 bp, Chicken  19866894329917_3
tcaccaggcagatggatcgggctggttttgtgcctccaggaaaagccagacccctcccatgcatcatcagaaagacccagaagcaaaacccatgcactcccagcacagagctgcctgcagtacttcagttctcctggcctcaaagtccaacaggagcactgcacacctctgtcygtgagctcaraagctctgactgcagtaattctgcaacagcacaaccgcctcccatgtccacctgcaggggaaccatttggtccttgcaagactttccctccttcagtgactcagcacaactccccrtgcccagacagaggtaaaacacattaaaaaaacagtacctggaaggacagagtctgcagagtctctcccattcaggggctgtttttctcctgccccagctggtgaggagtcagagccctgcacagcttctttcaatatcacaatcaacagctctcagaggagaacttggaaacgaactccctttacaacaattagcagaagtcccggtgcaaacacatcgcctcaatattcaaatacaaaaccacattcaatctttggtttgtaaaaggctttcactgaagctgacccccatccttccca

SEQ ID NO: 64225 - DNA, 600 bp, Chicken  19866894329921_1
atgcttttggtagtttattttatgtcttttaatgatttcctccagatgtttggttacctacactgagtatgatgtgctagtgaaaagataagggctgctgaaaggatacttctgcttattaaatcttggtaatgttttaattctttccaagtgatttgctgttgacatgcaaattccacttccaagtgaatggtaactgttagtccctatgtactgtgcgtaagtttctgcaaatatgaaggctttaatgcatgcatttgaacctatttcttgtgatggtgtagtttctgataatctccratgagtgagaaggggagagaggatttctttcttaaccaacaattgtttcttgtatgtcttttattttaacctggaaacagtgatctgtttttctgttatccagatacgtgaggttcatccatgaccagtaatatttcgcgttgctaatcaattatgtgattccactgaaaatatattttgaccttaagcctgctgtcttttttatttcagagttgattttcagtgtttcaactgttttcagtggaattttaaactggagatgaattgctaataatgctatatactgtagtcaacaactta

SEQ ID NO: 64226 - DNA, 600 bp, Chicken  19866894329924_1
accctttgttcattgtgtcttctctgaagagcttcctctctctatttctgtcccttatgaagtcaagacttgcatgtcagtggccataggatgcagtcaaagggtgctcaatgccactaacccacatcacactgcctggatgtttgcatcttggccacaggattgggctggaggctcaagtgccatattccctccagccagtcctgccctggggcaaagtgctacttccctgtctgctccatcctagaaatgtcagcactgggccctccggctatagcctcctcacatgtttgccatgcrgtggaggaacmctcagtgagtcagaaatcttgttcttggcacactggtctgatttggtgtagggagttctttcacttactcagcattatgttcgatgtccactgttgctgcttttcccttaagctactctgtgtgaagtgaaggctgtatcctgagcttgtatgagaaactggtacagacttgtcaatctgatgcgtcccagtagctaagagtgcaaaagctggtgctggaaatactcttaccatcttctaatgtgtcttacagactaatctggtggcctctggtgctaatgagtctgaa

SEQ ID NO: 64227 - DNA, 600 bp, Chicken  19866894329924_2
attgtgtcttctctgaagagcttcctctctctatttctgtcccttatgaagtcaagacttgcatgtcagtggccataggatgcagtcaaagggtgctcaatgccactaacccacatcacactgcctggatgtttgcatcttggccacaggattgggctggaggctcaagtgccatattccctccagccagtcctgccctggggcaaagtgctacttccctgtctgctccatcctagaaatgtcagcactgggccctccggctatagcctcctcacatgtttgccatgcrgtggaggaacmctcagtgagtcagaaatcttgttcttggcacactggtctgatttggtgtagggagttctttcacttactcagcattatgttcgatgtccactgttgctgcttttcccttaagctactctgtgtgaagtgaaggctgtatcctgagcttgtatgagaaactggtacagacttgtcaatctgatgcgtcccagtagctaagagtgcaaaagctggtgctggaaatactcttaccatcttctaatgtgtcttacagactaatctggtggcctctggtgctaatgagtctgaaatctatatctg

SEQ ID NO: 64228 - DNA, 600 bp, Chicken  19866894329925_1
cagaaataagaatgttccaaaataattaaaactatcatcatcaatgccttaatggaggagaaacaagaaaaaggcgagaccactggatgggtcaattcgtagggcactgaaatcaatatccaattatcagacagctcttgaagaacactcatggaaaaaaaaatcaccaagggtgaccttagcttggagttaatttactcttattaatttgagtaacatttcttctgaatgcacaaattaaaacttagggcacttatttcaggcacagctgtgggctttaagagtgcagatgtgtgcagrgaaaggaaaccccttctatgcagtgctgcaaggcatgtcargggacagtgctcagtgcagtgctgagggacaggccagaactgtgcattgggaagatgctccagcaaagagagcaaagagcaagtgttttgttaccatggtagagccagacgtgagtcaagtcctgttctggggaaaaatagggaaagggtgtgggtatgcagtgcttcttccagtctgctctgccattcttggcatccgaaatgacttgtaacaactcgctgtgcttcagaaggaggagtgaaaccaaacaaggtgtgc

SEQ ID NO: 64229 - DNA, 600 bp, Chicken  19866894329925_2
caatgccttaatggaggagaaacaagaaaaaggcgagaccactggatgggtcaattcgtagggcactgaaatcaatatccaattatcagacagctcttgaagaacactcatggaaaaaaaaatcaccaagggtgaccttagcttggagttaatttactcttattaatttgagtaacatttcttctgaatgcacaaattaaaacttagggcacttatttcaggcacagctgtgggctttaagagtgcagatgtgtgcagrgaaaggaaaccccttctatgcagtgctgcaaggcatgtcargggacagtgctcagtgcagtgctgagggacaggccagaactgtgcattgggaagatgctccagcaaagagagcaaagagcaagtgttttgttaccatggtagagccagacgtgagtcaagtcctgttctggggaaaaatagggaaagggtgtgggtatgcagtgcttcttccagtctgctctgccattcttggcatccgaaatgacttgtaacaactcgctgtgcttcagaaggaggagtgaaaccaaacaaggtgtgctctgccgaagtgcagcatcagctccatgttgccatagcaat

SEQ ID NO: 64230 - DNA, 600 bp, Chicken  19866894329926_1
gttagtgggaacaaatctttttgtaatgaaggataaacatgaaaactggtggactttgaggccaacaaagttaaaaataactgtttagcagtaagtacagtagttgctgcctttcaggatttgagaagattaaggtgagttccatgagcagtgagcacagaatcagtgacaaatcaaaatgattagcaaattcggcttgaaagtggagctctaaaacagtattaaaaggaaagactgcatgcatgatgttgagagatgatgaaaattaatctttagtcaactggaaagccaaaccactcrtttarctcatcaaaattagccactgcaggcagtctgtagaaggaagtagaataaataaataaaaaaaaatatgagagatagcagatataattcaggtaagctcgtgttttatgattgactagctgcttctaatctgaggagtactgtccttcatgctgtacctgttttctcctttgttctccatcaattcatttttatggtttatgtttgtttttttcattttctaaattttaattacatttcatttgaatatgtgatatgaccttctctagagaatatgctgaaaatttttggtatttg

SEQ ID NO: 64231 - DNA, 600 bp, Chicken  19866894329926_2
tgggaacaaatctttttgtaatgaaggataaacatgaaaactggtggactttgaggccaacaaagttaaaaataactgtttagcagtaagtacagtagttgctgcctttcaggatttgagaagattaaggtgagttccatgagcagtgagcacagaatcagtgacaaatcaaaatgattagcaaattcggcttgaaagtggagctctaaaacagtattaaaaggaaagactgcatgcatgatgttgagagatgatgaaaattaatctttagtcaactggaaagccaaaccactcrtttarctcatcaaaattagccactgcaggcagtctgtagaaggaagtagaataaataaataaaaaaaaatatgagagatagcagatataattcaggtaagctcgtgttttatgattgactagctgcttctaatctgaggagtactgtccttcatgctgtacctgttttctcctttgttctccatcaattcatttttatggtttatgtttgtttttttcattttctaaattttaattacatttcatttgaatatgtgatatgaccttctctagagaatatgctgaaaatttttggtatttgggaga

SEQ ID NO: 64232 - DNA, 599 bp, Chicken  19866894329927_1
  misc_feature (1)..(87): n is any nucleotide
nnnnnnnnnnnnnnnnnnnnnnnnnnnnnnnnnnnnnnnnnnnnnnnnnnnnnnnnnnnnnnnnnnnnnnnnnnnnnnnnnnnnnnntttttgctattgcgggagcattaatgggcagaaattcctgcaggcaatggaggaaggagttctcaaacttcctgtcttttaacttaaaatggaaacacatctgaacttcttgcttccacatgagaagtgtaagaacactcactaaaggctttacctgagccgtaggttccctgctatgtcctgtaggcagtctgtggactacccagctctgasttctgtctctagggtgtacatttcagcaggagagtggccaagagctggagctgggggtggagagcagacccagggtaccagagactgagttgctgagcatgtcctcccgtagcatacttggttggcttctcagtatttcctcaaagtgtcgaccaggatgaggccagagcttgcacaaagtctttagggcttaccctgcaactggacacagcaccatgacctgacttccttttgtattgtgactaaaggctcagtctcttttggaagtgcttggatctctgtcagagcattttgtggtc

SEQ ID NO: 64233 - DNA, 599 bp, Chicken  19866894329929_1
  misc_feature (1)..(44): n is any nucleotide
nnnnnnnnnnnnnnnnnnnnnnnnnnnnnnnnnnnnnnnnnnnnagtagaggggaatattcacctcccctcaccctgctagtcacctttttgatgtagcccagggtacagctggccttatgggctacaagtgcattgctggtttgcatcaaactttttgtccaccaggacatagcctgggcttgatttggtgagagaattgttggtagaggtgaacatggttctggttcccatatgaagaaccagttttcagtctgtgactagtaaggtaatggcagtggtactgtctcaaatggcaatrtgttgatagctctagataataatgactgagtgtgttggaaggttttaggatgcaagctctgcacagtggtttgcaggtttagcaacccagatgaagtgtacttactttgtaagagggaatggaaagataccttatctgtaattcgatctcataaaattactttcaagcatgccatgtggttttttgaaagcgttcttcacaccttgataatatgtgaatattttctcttattaatttgcagtgctctgaaatgcttatattttacacctttacattattgaaagtgtattcattttaaa

SEQ ID NO: 64234 - DNA, 600 bp, Chicken  19866894329938_1
cttcaatttgcaatcaccaacagcagactggttcccttcacttaaggtatcaattcaaagatgtttttattattctgttttttattatttaggaactggcccagctgagctctcagcctctcagaaggaaactaaagaaactgcacctggccttttcatctgcaagtctagctgtactcagtgttgtttgggtaggagaaataggtatcgtgtcaaacacactacttatgagagctagaattccagaacactactcagtttggactctggcacaagttgttgctcacataccaacatttrcccagctgcagagaggaggccctccactcattttagagagccaagagaatcagataccacagtacattcagaagatcaaccaccttgcttctctagggcaacaaaagcttaaacaagaaaacaaattattaaaggcttatcatacaattgccacaggcattccctaactgcagtgcaaaccaactgaagttggatgttagaaggaacaacacacagtccaaattccacttcattaaacggtatcaaagtaccttatggctcatcttggcaataagaccaacagaaacaagctgcaacaag

SEQ ID NO: 64235 - DNA, 600 bp, Chicken  19866894329945_1
ttacaaattgagaaatatttggtgaagtcctactttcttctcctttaaaaaaaaggattgagaacaatctaatgcatcaagactgacaggttggtcccaacctattttttttccccacaccatttacaaaagacaacaagggagagctgcagtcctgtttaccctgaagattttgctgaagcaacacagtccaggtgtgcatctcagttttgtccatatcctggataagggcactctacaaccactctcctacatcccagactcaacaccttcacacccaactattcccaaccccaatayccaataccctgcaactttccccatttttctgtaatgggaccagatgggcccaggtgatttcagttctggaaatacactgcaagcagttctgtgctggctctgaagaccctgcatatttcacatcacaactcactgacttctgggaacgcatcactgcttgaaagccttgttccagatgaacaacatcacacagtccagcactgagaaggggcccaacccagcatctcctagcagaccaaacaagtctcaatctccacataaaaagccataagaaacatttcaaacctgttttatttttct

SEQ ID NO: 64236 - DNA, 600 bp, Chicken  19866894329946_1
cacgtggcaaggctcacacactgtgagaaagtgactcacctcttcctggataagcccctgatctccgataactagttaggaaactgtatggcagatacgatatgcactatctgagtggaaacatacaacctaaagggatcaattgttttaactgattctaaccacatctaaatgtaccaaacaacaaagagcttaaccatttcttacacggcatgtggtctgccccatatttagttactggtagaaatcttcctaattggaattagcagtacagagctttccacaggtaaactttaagasaaatcagacagaaaagagatttgcctccctagaataagccattagctgtcctcgacctgtggatcagggaaaaatttatttgtagatcttctgctttgagaactgaactcagtgtgggattataaaaataaatccagccctgatttgaaacacaaataaaagcaacatgaaagaacacagatccacctgaacaccataaatgataccytgctccaccaactgggcagtaacagacacatggaaccccaacatccaacaaagactyttccttggtaacataagtgtggtgaaggagagagg

SEQ ID NO: 64237 - DNA, 600 bp, Chicken  19866894329946_2
cggcatgtggtctgccccatatttagttactggtagaaatcttcctaattggaattagcagtacagagctttccacaggtaaactttaagasaaatcagacagaaaagagatttgcctccctagaataagccattagctgtcctcgacctgtggatcagggaaaaatttatttgtagatcttctgctttgagaactgaactcagtgtgggattataaaaataaatccagccctgatttgaaacacaaataaaagcaacatgaaagaacacagatccacctgaacaccataaatgataccytgctccaccaactgggcagtaacagacacatggaaccccaacatccaacaaagactyttccttggtaacataagtgtggtgaaggagagaggtagctgcccagaccagcttctattatccttagtaaattaattaacacatmaataacacggtcagaagagtaggatgggagcagacaggcaaaggactggggatgcacccatgtggctgrtgttccccttttgccccagacagctcccctgtgatgtgcttaccgggatccctagagcttttaaaatattcattttacacatagggcag

SEQ ID NO: 64238 - DNA, 600 bp, Chicken  19866894329946_3
gcagtacagagctttccacaggtaaactttaagasaaatcagacagaaaagagatttgcctccctagaataagccattagctgtcctcgacctgtggatcagggaaaaatttatttgtagatcttctgctttgagaactgaactcagtgtgggattataaaaataaatccagccctgatttgaaacacaaataaaagcaacatgaaagaacacagatccacctgaacaccataaatgataccytgctccaccaactgggcagtaacagacacatggaaccccaacatccaacaaagactyttccttggtaacataagtgtggtgaaggagagaggtagctgcccagaccagcttctattatccttagtaaattaattaacacatmaataacacggtcagaagagtaggatgggagcagacaggcaaaggactggggatgcacccatgtggctgrtgttccccttttgccccagacagctcccctgtgatgtgcttaccgggatccctagagcttttaaaatattcattttacacatagggcaggtacgatggtctagcagccaagggtctacacaggacttgtgaaaaagatgcctgcaa

SEQ ID NO: 64239 - DNA, 580 bp, Chicken  19866894329946_4
ctcgacctgtggatcagggaaaaatttatttgtagatcttctgctttgagaactgaactcagtgtgggattataaaaataaatccagccctgatttgaaacacaaataaaagcaacatgaaagaacacagatccacctgaacaccataaatgataccytgctccaccaactgggcagtaacagacacatggaaccccaacatccaacaaagactyttccttggtaacataagtgtggtgaaggagagaggtagctgcccagaccagcttctattatccttagtaaattaattaacacatmaataacacggtcagaagagtaggatgggagcagacaggcaaaggactggggatgcacccatgtggctgrtgttccccttttgccccagacagctcccctgtgatgtgcttaccgggatccctagagcttttaaaatattcattttacacatagggcaggtacgatggtctagcagccaagggtctacacaggacttgtgaaaaagatgcctgcaatgagaaacaagatattttaattcaaatccacgatagcactatttaccacttagcaccagacgctt

SEQ ID NO: 64240 - DNA, 511 bp, Chicken  19866894329946_5
ttataaaaataaatccagccctgatttgaaacacaaataaaagcaacatgaaagaacacagatccacctgaacaccataaatgataccytgctccaccaactgggcagtaacagacacatggaaccccaacatccaacaaagactyttccttggtaacataagtgtggtgaaggagagaggtagctgcccagaccagcttctattatccttagtaaattaattaacacatmaataacacggtcagaagagtaggatgggagcagacaggcaaaggactggggatgcacccatgtggctgrtgttccccttttgccccagacagctcccctgtgatgtgcttaccgggatccctagagcttttaaaatattcattttacacatagggcaggtacgatggtctagcagccaagggtctacacaggacttgtgaaaaagatgcctgcaatgagaaacaagatattttaattcaaatccacgatagcactatttaccacttagcaccagacgctt

SEQ ID NO: 64241 - DNA, 600 bp, Chicken  19866894329958_1
aaaatgtcaagccagggcacaccattgtaattcatatcaggatcttccagcattgacccatctttgcatcttatttcaaagttgaatttgtctaccttcaggttgcagtcgtggaattatcattttacatttctcagaaactcaaagccaccccatcctcagaagttttcctggtgtataagtatctctacccagtcagaagtttcctctcagccttctatgtcatgagcaggatgtgctgagccacaggaatcctcatgttgcacaacgttgtttgttgggtgtttaaatgcatttgtsattttcctttggactctcaccagtaactctgcatcgttagacaaaaactgaagttctggatgtttttaaaagagatagaagttcactacatcttcagtttttgagtacttttagccgtgcttaggaaggtattatttgcgctgagataaacacaggggcaaagtcctccctcccttttccatttaaattgggcagctaagcaagaacctttactttttttccttggttgtttgtggttttttttccatggagagtagagtcaccgttgactgatccacaaacctttatacaatgaaaggc

SEQ ID NO: 64242 - DNA, 600 bp, Chicken  19866894329964_1
tgaatcctttccgtggatgttgggtcagtggttacctcagcctgtgataacctcataaatgctacaaacattaagaaaaggacattatacttggagaaaagggagatctcacctctgtatttttctaatagcaaacatgaaagtcaaatgagaagggatatgtacaagtttgaaaagcctctgagaaagtgtctcccctcatagaagtaatagtttcagtaccgtgaaactgcagaagctaataaggaaactcacgctcagagtactcataggagagagacgaatttcagcaaaattacrtctttaaaattcagaaagaatcattttaaataatcccagaacaactgactttttaaatacgttttacttactttagatcaacactttaagagagtggcagtcggcaactttgacactgcgttgtgggagctgcctgctttcacctagctgttggcggggccacttctcatcacttttcccastgaggaccctcacaaccagtttcaaacttaaaaagaccttgattgcctaccggcaaaatataytgaaatttgagaaaaggttacattttaaaactgggacgacygtttgyggaattta

SEQ ID NO: 64243 - DNA, 600 bp, Chicken  19866894329964_10
atttcagattgttgtaaaacaaatacygcttccctgtatctttatcaaaatgaagctataagcacaattagcctgggtgactacatgtggactgctattactgtgcactggctgcactgagttagacagcaaggctccaaacgaggatactcataaatgccccaagccaatcaccacatacacctgagggcacgatctgctgcacagttctcatccaaaaacacacacctgggaaggccagatgaaccatggcctaaaaaagaaccttcttttatttttatctgactacagagaaccaargatgatgggcttggagcagctgggctcacataaaagctacttctttgtcagataaatgacactctggttttcagaaaacaatgcagttatttctgkctttggcacattcctcagaatagtgctatctaagtgctttgaaaaataacatgtcggtatcctgacaataccactgtaagactgtaaaatctctctcttggtgttatttatgaggatctgaggcctgcatgctgtctctacagctatacttctgtgagcaacaaagcttggcttgcattcaggttgcacacagatgtcatcttc

SEQ ID NO: 64244 - DNA, 600 bp, Chicken  19866894329964_11
attactgtgcactggctgcactgagttagacagcaaggctccaaacgaggatactcataaatgccccaagccaatcaccacatacacctgagggcacgatctgctgcacagttctcatccaaaaacacacacctgggaaggccagatgaaccatggcctaaaaaagaaccttcttttatttttatctgactacagagaaccaargatgatgggcttggagcagctgggctcacataaaagctacttctttgtcagataaatgacactctggttttcagaaaacaatgcagttatttctgkctttggcacattcctcagaatagtgctatctaagtgctttgaaaaataacatgtcggtatcctgacaataccactgtaagactgtaaaatctctctcttggtgttatttatgaggatctgaggcctgcatgctgtctctacagctatacttctgtgagcaacaaagcttggcttgcattcaggttgcacacagatgtcatcttctcttctggaggaacatgtctggccccttttagaaccgagaccatgctatcttgtgtcctgacacgtgatgccaacacgaagattgctgggccacaa

SEQ ID NO: 64245 - DNA, 600 bp, Chicken  19866894329964_2
gagaaagtgtctcccctcatagaagtaatagtttcagtaccgtgaaactgcagaagctaataaggaaactcacgctcagagtactcataggagagagacgaatttcagcaaaattacrtctttaaaattcagaaagaatcattttaaataatcccagaacaactgactttttaaatacgttttacttactttagatcaacactttaagagagtggcagtcggcaactttgacactgcgttgtgggagctgcctgctttcacctagctgttggcggggccacttctcatcacttttcccastgaggaccctcacaaccagtttcaaacttaaaaagaccttgattgcctaccggcaaaatataytgaaatttgagaaaaggttacattttaaaactgggacgacygtttgyggaatttataaaaatcatggcagaatttaccagtaaatctgcaagaactgtagtccttcctccttagtggcataaggtgtagtatgagcccctcatcatgaggcatgggatttgtattataaaataattagcaaaacgtcacacactcgaattagtaaataggtakcttctccccctctcccagatacac

SEQ ID NO: 64246 - DNA, 600 bp, Chicken  19866894329964_3
ggaaactcacgctcagagtactcataggagagagacgaatttcagcaaaattacrtctttaaaattcagaaagaatcattttaaataatcccagaacaactgactttttaaatacgttttacttactttagatcaacactttaagagagtggcagtcggcaactttgacactgcgttgtgggagctgcctgctttcacctagctgttggcggggccacttctcatcacttttcccastgaggaccctcacaaccagtttcaaacttaaaaagaccttgattgcctaccggcaaaatataytgaaatttgagaaaaggttacattttaaaactgggacgacygtttgyggaatttataaaaatcatggcagaatttaccagtaaatctgcaagaactgtagtccttcctccttagtggcataaggtgtagtatgagcccctcatcatgaggcatgggatttgtattataaaataattagcaaaacgtcacacactcgaattagtaaataggtakcttctccccctctcccagatacacatcttttcacagraattctctgatcacatttgttcaggactctcactggagctatgaaatcat

SEQ ID NO: 64247 - DNA, 600 bp, Chicken  19866894329964_4
tcagcaaaattacrtctttaaaattcagaaagaatcattttaaataatcccagaacaactgactttttaaatacgttttacttactttagatcaacactttaagagagtggcagtcggcaactttgacactgcgttgtgggagctgcctgctttcacctagctgttggcggggccacttctcatcacttttcccastgaggaccctcacaaccagtttcaaacttaaaaagaccttgattgcctaccggcaaaatataytgaaatttgagaaaaggttacattttaaaactgggacgacygtttgyggaatttataaaaatcatggcagaatttaccagtaaatctgcaagaactgtagtccttcctccttagtggcataaggtgtagtatgagcccctcatcatgaggcatgggatttgtattataaaataattagcaaaacgtcacacactcgaattagtaaataggtakcttctccccctctcccagatacacatcttttcacagraattctctgatcacatttgttcaggactctcactggagctatgaaatcatctgctcgcttcctgaggttgtgctttaaaatacagtttata

SEQ ID NO: 64248 - DNA, 600 bp, Chicken  19866894329964_5
aaattacrtctttaaaattcagaaagaatcattttaaataatcccagaacaactgactttttaaatacgttttacttactttagatcaacactttaagagagtggcagtcggcaactttgacactgcgttgtgggagctgcctgctttcacctagctgttggcggggccacttctcatcacttttcccastgaggaccctcacaaccagtttcaaacttaaaaagaccttgattgcctaccggcaaaatataytgaaatttgagaaaaggttacattttaaaactgggacgacygtttgyggaatttataaaaatcatggcagaatttaccagtaaatctgcaagaactgtagtccttcctccttagtggcataaggtgtagtatgagcccctcatcatgaggcatgggatttgtattataaaataattagcaaaacgtcacacactcgaattagtaaataggtakcttctccccctctcccagatacacatcttttcacagraattctctgatcacatttgttcaggactctcactggagctatgaaatcatctgctcgcttcctgaggttgtgctttaaaatacagtttatatataag

SEQ ID NO: 64249 - DNA, 600 bp, Chicken  19866894329964_6
gccacttctcatcacttttcccastgaggaccctcacaaccagtttcaaacttaaaaagaccttgattgcctaccggcaaaatataytgaaatttgagaaaaggttacattttaaaactgggacgacygtttgyggaatttataaaaatcatggcagaatttaccagtaaatctgcaagaactgtagtccttcctccttagtggcataaggtgtagtatgagcccctcatcatgaggcatgggatttgtattataaaataattagcaaaacgtcacacactcgaattagtaaataggtakcttctccccctctcccagatacacatcttttcacagraattctctgatcacatttgttcaggactctcactggagctatgaaatcatctgctcgcttcctgaggttgtgctttaaaatacagtttatatataagaaacaaacastatttcagattgttgtaaaacaaatacygcttccctgtatctttatcaaaatgaagctataagcacaattagcctgggtgactacatgtggactgctattactgtgcactggctgcactgagttagacagcaaggctccaaacgaggatactcata

SEQ ID NO: 64250 - DNA, 600 bp, Chicken  19866894329964_7
aaccagtttcaaacttaaaaagaccttgattgcctaccggcaaaatataytgaaatttgagaaaaggttacattttaaaactgggacgacygtttgyggaatttataaaaatcatggcagaatttaccagtaaatctgcaagaactgtagtccttcctccttagtggcataaggtgtagtatgagcccctcatcatgaggcatgggatttgtattataaaataattagcaaaacgtcacacactcgaattagtaaataggtakcttctccccctctcccagatacacatcttttcacagraattctctgatcacatttgttcaggactctcactggagctatgaaatcatctgctcgcttcctgaggttgtgctttaaaatacagtttatatataagaaacaaacastatttcagattgttgtaaaacaaatacygcttccctgtatctttatcaaaatgaagctataagcacaattagcctgggtgactacatgtggactgctattactgtgcactggctgcactgagttagacagcaaggctccaaacgaggatactcataaatgccccaagccaatcaccacatacacctgagggca

SEQ ID NO: 64251 - DNA, 600 bp, Chicken  19866894329964_8
aaaatcatggcagaatttaccagtaaatctgcaagaactgtagtccttcctccttagtggcataaggtgtagtatgagcccctcatcatgaggcatgggatttgtattataaaataattagcaaaacgtcacacactcgaattagtaaataggtakcttctccccctctcccagatacacatcttttcacagraattctctgatcacatttgttcaggactctcactggagctatgaaatcatctgctcgcttcctgaggttgtgctttaaaatacagtttatatataagaaacaaacastatttcagattgttgtaaaacaaatacygcttccctgtatctttatcaaaatgaagctataagcacaattagcctgggtgactacatgtggactgctattactgtgcactggctgcactgagttagacagcaaggctccaaacgaggatactcataaatgccccaagccaatcaccacatacacctgagggcacgatctgctgcacagttctcatccaaaaacacacacctgggaaggccagatgaaccatggcctaaaaaagaaccttcttttatttttatctgactacagagaaccaa

SEQ ID NO: 64252 - DNA, 600 bp, Chicken  19866894329964_9
ctgcaagaactgtagtccttcctccttagtggcataaggtgtagtatgagcccctcatcatgaggcatgggatttgtattataaaataattagcaaaacgtcacacactcgaattagtaaataggtakcttctccccctctcccagatacacatcttttcacagraattctctgatcacatttgttcaggactctcactggagctatgaaatcatctgctcgcttcctgaggttgtgctttaaaatacagtttatatataagaaacaaacastatttcagattgttgtaaaacaaatacygcttccctgtatctttatcaaaatgaagctataagcacaattagcctgggtgactacatgtggactgctattactgtgcactggctgcactgagttagacagcaaggctccaaacgaggatactcataaatgccccaagccaatcaccacatacacctgagggcacgatctgctgcacagttctcatccaaaaacacacacctgggaaggccagatgaaccatggcctaaaaaagaaccttcttttatttttatctgactacagagaaccaargatgatgggcttggagcagctgggctc

SEQ ID NO: 64253 - DNA, 600 bp, Chicken  19866894329968_1
gtagactggttttgggataaaatccagtggattaaatccatttggatcccagtgcctaaatttgccattaccatctgttagtcagcaataaatttactggactgtgaacatgttcatatcacatgaatgttttcaaaactgttgttttggaatttgcatgtggtgcatagctaagtccttgcatggctgaagctggatggaatcagtttcattctttgacatagacaaatagaaaaatgttttctaatgttatcaactgttccttttatacaggtatgcagacaacaaatttggacagtyctttagaacatctctggcaaaagcacctatattttcttgaaagtatcttgatttgcaaagagaatagagacaagtttggcacttcttaggctagagaaagatggtgtcacattaaaattgtacgcaggtcattagtcatgaagagattgcagtatttcactgaggcagtgaatccaatctcaatttgtatctcagataaactctgcaaaatatcctgtgttggacctgagtttgatcacaaagttatcagaatctttgactggtgttttgattgctttgtacctcttcatttgaattctg

SEQ ID NO: 64254 - DNA, 599 bp, Chicken  19866894329972_1
  misc_feature (1)..(1): n is any nucleotide
nttttgaaatacaaaactaattagttcataggcatatagaaaatggtctattcatgtacagggaattccagatcaaaatatattatgtaataatcattcccaaaatatcacttaagactttaatatccaataacataatctatgtagtcttagtttggtggagaactgaatttcgcttctgtcagaaataacttggttcctgtttatatgttaaaaatagcccaattttcaagtcttgcatgtgaaaatcacaggaaggacatcacaactgaatactatagaattagcattaacaaacargggaaaaaaaaaaaaaaaaaaaggaagagaaagcaaaaaagcaaaaagaaaaaaaaaggcagaatttggaagcaaaaaaaaaaggcagaaaatgtgacgaacagaagataaggaaaatatcaaagaacaaaatcagattctgtttctgacctgttttcttttagggcaagagagaacaatggtcatgcaaggaattctggagagagaatggtagaatggttacaacgagctcactgggagatctggtaataaattaatgttgtactataatgagtagatgaagttagaatagctagtac

SEQ ID NO: 64255 - DNA, 600 bp, Chicken  19866894329972_2
attcatgtacagggaattccagatcaaaatatattatgtaataatcattcccaaaatatcacttaagactttaatatccaataacataatctatgtagtcttagtttggtggagaactgaatttcgcttctgtcagaaataacttggttcctgtttatatgttaaaaatagcccaattttcaagtcttgcatgtgaaaatcacaggaaggacatcacaactgaatactatagaattagcattaacaaacargggaaaaaaaaaaaaaaaaaaaggaagagaaagcaaaaaagcaaaaagraaaaaaaaggcagaatttggaagcaaaaaaaaaaggcagaaaatgtgacgaacagaagataaggaaaatatcaaagaacaaaatcagattctgtttctgacctgttttcttttagggcaagagagaacaatggtcatgcaaggaattctggagagagaatggtagaatggttacaacgagctcactgggagatctggtaataaattaatgttgtactataatgagtagatgaagttagaatagctagtaccttgagagatgtaggcccacttagaaattgctaaaagcccaatccagacc

SEQ ID NO: 64256 - DNA, 600 bp, Chicken  19866894329980_1
acctgttgtgcatgtaggcagggtgggctctgttagtaccaaggagatctcttacctgcgcggagagcccaagtgtgacagataagacacagataataattcttttcagatcactagcacctaaatgccatgcatttacgctccataaaccacctgcagtttttctcctattcactgtgatggatgaaacagtgcccaagggctggctccaaactcaagaaacgtggaggagttgctgtcttgaaatttgagtaaagcaaattcttctcatagcttaaatgttacctaagtgtaattttrctttttgtttttatttgattttttgtattttgtttccatatgggcagtgttgatatgattagttggagttacttgaggtgagcattccaacagatgtgagcagtattatcaacgtgttagactgactttgatattgtgaccctttttgacagcagtggtcaaacagatttgttcctcacagtgcagtcagagatgcggcaggggagttagaggtccttctcttactgattaaaacacaggcgggacttggagctgctgttcagtgcacacaggacaggagcacctgtgtcacccctatca

SEQ ID NO: 64257 - DNA, 600 bp, Chicken  19866894329980_2
acagtttggtgttaattaacttgtggatggaaaagaacaaattcatggaatcataagagtagtttaggttggaagagactcttcatgaacatctaatccaacccccctgtcatggacaggatcatctctcactataccaggttgcccaaagccccattcaacctgaccttgaatacttccagggatggggcatctacgacttctcttggtagtctcaccaccctcatgttccagctggtgcttttccaaaatagcatccgtgggggcttttggtggcagaggcagtgatacctgtgttcytggagcatgggcagcatcccctggtgtctgcatccttcatgtggtccttggttccttctgagactgatcacatggaggtggaggagatggcccagaggtcttgcatgggctcccagcattgtctgcgtaaaggagatttgtgtttaactctgaggagttgtcaggctgtcttgtaattgctcaatccatcttacatagcaaaagcgtcatgctcaaaggtctctggcaaggtgtcagaccagtgaagtgtttctaaatgtcagccagctcctagcagtgggaaggagccagcaatgagct

SEQ ID NO: 64258 - DNA, 600 bp, Chicken  19866894329980_3
aaggagatttgtgtttaactctgaggagttgtcaggctgtcttgtaattgctcaatccatcttacatagcaaaagcgtcatgctcaaaggtctctggcaaggtgtcagaccagtgaagtgtttctaaatgtcagccagctcctagcagtgggaaggagccagcaatgagctggggcagggcagacaagcccgtggtttggaataacacagtcccattcactgttcctttccaggatttagcacaaaactgaggtggaaaattacatgtgtttttccagggacaagctttctgctgccctrtggtgatatcttctaaaacatttgggaccttcatttgtacagtaaagcaagatttcattttgcatcttcatggtgcctcccaggacagggctctgagagccaaggttggaaagtcctaaaacaacaggaagcgtgcttgaggaaatasagcttgtgttgccgaaaggcttgacaacaatatagctatcagtaccttacctggaaaaataacttgggtttgggtttttttgcaggaagggtaactggagcagtgctcctgaaaatgggcacgtgttgttctgctgcaatctttctaacaca

SEQ ID NO: 64259 - DNA, 600 bp, Chicken  19866894329980_4
tgggaaggagccagcaatgagctggggcagggcagacaagcccgtggtttggaataacacagtcccattcactgttcctttccaggatttagcacaaaactgaggtggaaaattacatgtgtttttccagggacaagctttctgctgccctrtggtgatatcttctaaaacatttgggaccttcatttgtacagtaaagcaagatttcattttgcatcttcatggtgcctcccaggacagggctctgagagccaaggttggaaagtcctaaaacaacaggaagcgtgcttgaggaaatasagcttgtgttgccgaaaggcttgacaacaatatagctatcagtaccttacctggaaaaataacttgggtttgggtttttttgcaggaagggtaactggagcagtgctcctgaaaatgggcacgtgttgttctgctgcaatctttctaacacagaatagtgacttgaaataaaactgcagcaattctctactccttgacttcttcattttccaaccatgcagtactagggcttgtataaatgtgctgtgcaatggttaccctcatgggagagctgaagcaagtcaccttgtccctcagcac

SEQ ID NO: 64260 - DNA, 600 bp, Chicken  19866894329981_1
gcattaactcatacagttgccattgcatcagagatggtgctaatagtaggaccactttctctattcccttcccctcatgaatccagtgtgattaaatgtagaccagcgctcagccccaaaacaagcggtatatatttgtatgtgctagcacacacaaagcctagttaggggctcatgccctaatgcatacatcccccatgctcatgttcctcatgagtcttttctgaagaagtattagctctgaaatgttacaagttctccaagagttgcttcagaccttgcaagcaaggctacctgccyagagcacagccttctggggaaggcacagtgcactgggatttcatgaagagatgggaaagaccagaggaatgcattttctttaacggataaaaaattgtaaatattatctctttgtgtgttgaaagccttttgtagccaggttaccagggacactccgtgcggacagctgtgcctgaactcacattcagtttgtgttgtaactccctttcttggcattggtaccagtgagtttgtaatcaaatacatggcagctgcaccagtgggccaacagggtcacttttaattcatgtctgtggttcg

SEQ ID NO: 64261 - DNA, 600 bp, Chicken  19866894329981_2
gttgacaaggctccccattctgagtattcattttatagttagagagggattgtttataatttacagttttaagtctgagcgccgttattttgcactgtcaaatggcatctgttatcgtacatagctcatcatatgtcagtgccacaaaaaacaaagcaaaccagccacagaagcagccagttttatgagcacgctgcagtgttcaacagcgtagaggcaaatctattttgaaagggcagggggcttgtacagtggggtgagcctgtgttacgtgtgtgcgattcattcacaccagccacrtgattcaggttcaacactgtgctttcctgagtggggtaaaatccagggtaagatttgtttgtaggcattaggttgtctctatcacccagctatcgctgcaggcatcctgaggctctaaccacaagctttccaggaggcagccaatgtatgttcagcctctgtagtacaactcacaaggaggctgtaactggaagatctaaataagatacaaccatgtggaggcaaactccagcatagctgtctttgccagtacagacaggagcaagccatctcaaagcacgctggaattaatgctattta

SEQ ID NO: 64262 - DNA, 600 bp, Chicken  19866894329984_1
tcaaactgccagactgaatttagtgatagactgtgtgggatgtgaagttactttacaggattagtgcctgactgacatggtgttttcataaggatgaacctgcagatcccttacggtgcatgggatatagaatgttgcacatgcataaaagataaaacaagcttgtaaatgttgcataggatttcccagatttttaaagcagtaaaaattgctgtttaaagacctgggttaacttaaaatattttgttttatctgaaaccaaggatttctttctttttcacttgaactgggaccactccrttttatttctaaactgttgttaagtgcaaatcacattactagtaatacttttacttatttattgaatgcttcaattttctgacttaagggcaacataaactttttgggggtgtgaaattcatcctcagttgaacccctcggtttcttcttagaactgctttagtttcacattgatgtttgcctccaaaagcatggttttattttgctactgttattcttatttaatcttgtgtttatttttttgtatctcttctggcttgaattttaagggattcctatgcaaaaaggaattctgaactt

SEQ ID NO: 64263 - DNA, 599 bp, Chicken  19866894329994_1
  misc_feature (1)..(178): n is any nucleotide
nnnnnnnnnnnnnnnnnnnnnnnnnnnnnnnnnnnnnnnnnnnnnnnnnnnnnnnnnnnnnnnnnnnnnnnnnnnnnnnnnnnnnnnnnnnnnnnnnnnnnnnnnnnnnnnnnnnnnnnnnnnnnnnnnnnnnnnnnnnnnnnnnnnnnnnnnnnnnnnnnnnnnnnnnnnnnnnnnnatcactgtcaaattgatgtggagcttgcctgtagcttcatgttgtctcatgctgcgttttttactgtggcagtgttccagagagctgctgtgcatggatttctgttctggcagcatagagcygtgagctcattacaatgtaaatagagatcattctatgacttctgcactctgagcatggcagctgatgtggaagcctagaggagtggaattagctcaggacaagctagagaaagcaagtagcagagcctggaggattggtagcagaagaaagcaggcctgcagacatgcaactctccgcaagtgccctttttgagctgaagtggctgctgtgtccaattgctgctgctcctctgctctcctcttgaagttattttcccctcaagrtctgcaggttgagccttttctaagactgctctgtt

SEQ ID NO: 64264 - DNA, 600 bp, Chicken  19866894329994_2
gctgtgcatggatttctgttctggcagcatagagcygtgagctcattacaatgtaaatagagatcattctatgacttctgcactctgagcatggcagctgatgtggaagcctagaggagtggaattagctcaggacaagctagagaaagcaagtagcagagcctggaggattggtagcagaagaaagcaggcctgcagacatgcaactctccgcaagtgccctttttgagctgaagtggctgctgtgtccaattgctgctgctcctctgctctcctcttgaagttattttcccctcaagrtctgcaggttgagccttttctaagactgctctgttcacaagtacaacaaggtaattttgttagctcctctcattagctcaagtcaaggagaggacacccatccaggttagtcaataagtttgaagtggctgatgacaacctattcctaatgggctgggtgaaataacctctagtaggaacagcaggaaccagcagatgcattggagaagtatttttttcatgtcttaccacccatcagtagcaacttctgacttttcagctgtatctgtgtgtcaaaactacatttcaagttttctaaat

SEQ ID NO: 64265 - DNA, 600 bp, Chicken  19866894329998_1
caggcctgcagcgggagggggctggcggtgacacagcagctgctcaccgagataccgaacgctctggcaattgagcacctacgtgcggggggttttaaaatgtcaccggccagcaggagaaaacagtgctcccgaaaacagcgtgctctgctgctccggagcactggtgaggaaagggaagggagcagcctcgctaatgaggggaaggcagggtgggagggcatggagaatgggttcggcaatgaatccatgattttagcgtacttctgagcatctgggaagggaaggcaggcccaagtkaattctagctgattgtagatgaaggagagcagggaaaaacctgcctctgaaatgttgtttgttctgtgtgtttggcagtcccgtccccttcgtgcagatcagcaccacctgaagctctgtttgccctgaagtgtctcaaatgggcatcttcatagagaggtttaaaagtaaaatgcacacgtattgagctttatactgaggctgggagacctgctgaccccygcttccaatttccccttttctttttccccagcctggtcatttggctagaaatctctttcttattgcagacgcctgctc

SEQ ID NO: 64266 - DNA, 465 bp, Chicken  19866894329998_2
atggagaatgggttcggcaatgaatccatgattttagcgtacttctgagcatctgggaagggaaggcaggcccaagtkaattctagctgattgtagatgaaggagagcagggaaaaacctgcctctgaaatgttgtttgttctgtgtgtttggcagtcccgtccccttcgtgcagatcagcaccacctgaagctctgtttgccctgaagtgtctcaaatgggcatcttcatagagaggtttaaaagtaaaatgcacacgtattgagctttatactgaggctgggagacctgctgaccccygcttccaatttccccttttctttttccccagcctggtcatttggctagaaatctctttcttattgcagacgcctgctctgactctgaggttagagtgcaaaagcttcattattgctggtattatttgttattattaaagctcctatctagtccagttcctgtagg

SEQ ID NO: 64267 - DNA, 599 bp, Chicken  19866894330001_1
  misc_feature (1)..(90): n is any nucleotide
nnnnnnnnnnnnnnnnnnnnnnnnnnnnnnnnnnnnnnnnnnnnnnnnnnnnnnnnnnnnnnnnnnnnnnnnnnnnnnnnnnnnnnnnnntgaaatatgactacatggaataaccgtagtactgcttcaccaggcacttattgtgataagcatttgtaaaattatttgcattctggatgaacttcctgtagggtattttataaaatccttcattgtaacattaaatttgctgttaaatctcagttataattacgtattttgatgaaaatattggtattttcagagaaacactgaaaaatygaaagcatacatataaattatgtagtaattaaaacttaaacaaatgaacatgaatatttcagactttccacatctgtactatttcgccatggctttgctgagcaactcttattactaaagacagtagccttttgaagaagaacttaaatatcttagatgaaccaaatcattatttccagtggtgtagcaacagtatatgattataattttatgtattttttctttgctagagtgggaaaaagaaaaaaaaaaaaaaaaacttgatcaaaaatgaatgtgttctcgcatataaagtttta

SEQ ID NO: 64268 - DNA, 600 bp, Chicken  19866894330004_1
atctatggctatggatccatccattatagacatgaaggaacattgtcaaatacacactcaactgcatatttgagcagtaaaagtaacgttacttctttagatttccctcttctagtcagaaccccacacacccattaatttttgcctcttttgcaaaaagaggatgatgcaaaaatgaagttttctctgtgcaaataaaccaatccttggcctttatgtctgagctacctttttccctatgaggatcttctcactcaaaaccatagtgaccaatcaacaaagtgatccaacacagctgcrgccagccaataagccctacctgcgcatcttctactctgctgtgtaagaaaatagagaattatcacattttaagaccaacaatgtcattgattggctcgtgatttctgaacataaaaaggaaatctaagattttagtggtaggcttaacagtaaacaagtaagcaataacaaaagaacatcataatcaccttgtttatctgtgtcataattgcaactttttttttttttttttttttaacagtttgaacattttggaaactcatccaactcctgtaaagaattctgtggcaaagatgtggt

SEQ ID NO: 64269 - DNA, 600 bp, Chicken  19866894330005_1
cttcacggcgtgctcttggtggatggcatgcctttgtaggactccggacattggaatgaactcttagtgtacgtgtatttatatggtaggcatcaaatgcttcagccaccggcgggctgcatgagctctgtttgtgctctactgagaactgtccacgatgctaattaacacttatttaattttttaccaaggaaggcacgtgtgccactcacagcagtgaggaggagctcatggccctgcgagaggggagatggactgaccctcactctgcattgttcccaggcttttctgggacttctraagtagccacacatctgtygttttcatcaaagtgaatgcaggcaagggcaggataagggaagttattttcctcttccattttatctttcggttttaaatctgtaggtttctcactcttagcttccttgtgactgcattgtcctgacgactggcacttagcaattaaaaaaaggaaagaaacaagcaggacttaacaaagaacagtttcttaaatgtacttttctcttggattgaaggatgttactcggagaagtgaaggggcttttgttgtgtccgtgtccatccccacctctacagaag

SEQ ID NO: 64270 - DNA, 600 bp, Chicken  19866894330005_2
tggatggcatgcctttgtaggactccggacattggaatgaactcttagtgtacgtgtatttatatggtaggcatcaaatgcttcagccaccggcgggctgcatgagctctgtttgtgctctactgagaactgtccacgatgctaattaacacttatttaattttttaccaaggaaggcacgtgtgccactcacagcagtgaggaggagctcatggccctgcgagaggggagatggactgaccctcactctgcattgttcccaggcttttctgggacttctraagtagccacacatctgtygttttcatcaaagtgaatgcaggcaagggcaggataagggaagttattttcctcttccattttatctttcggttttaaatctgtaggtttctcactcttagcttccttgtgactgcattgtcctgacgactggcacttagcaattaaaaaaaggaaagaaacaagcaggacttaacaaagaacagtttcttaaatgtacttttctcttggattgaaggatgttactcggagaagtgaaggggcttttgttgtgtccgtgtccatccccacctctacagaagtcatacagccgtgttacgc

SEQ ID NO: 64271 - DNA, 600 bp, Chicken  19866894330014_1
gacctgaggaatttgatggttctataattctatgttgaaatagattgacaggaagaggagagctaaggagaatctccatcctttactggatatggcaaggattatgactgctgaggtgaaggaaaatacggaagttctcagtgccgtctttaagtccgtcttcagaagtgagacccgttatcctggtctgcccccaaacctgggggtgtcggatggggagaagaataaagttcccacgattaaggtgaaaactacggaagacctactactccacctggactgccacaagtccatggggcyggacgggatccactygagggtgctgagggascrggtggaggtgacaggcaagccgccttccatcatatctcagtgttccttgtgaaccagagaggtctcataggattggaggcttgtcagtgtgactcccatctactggaagggtcgcaaggaggatctagagaactacaggcctgtcagcctccccttggctcccgaagaggttatggagcagactgtcctgagggaaatcacactgcgtgtgcaggacagtcgggagatcaggagcagccagcacgggttcatgaaaggcaggtcctg

SEQ ID NO: 64272 - DNA, 600 bp, Chicken  19866894330014_2
atggttctataattctatgttgaaatagattgacaggaagaggagagctaaggagaatctccatcctttactggatatggcaaggattatgactgctgaggtgaaggaaaatacggaagttctcagtgccgtctttaagtccgtcttcagaagtgagacccgttatcctggtctgcccccaaacctgggggtgtcggatggggagaagaataaagttcccacgattaaggtgaaaactacggaagacctactactccacctggactgccacaagtccatggggcyggacgggatccactygagggtgctgagggascrggtggaggtgacaggcaagccgccttccatcatatctcagtgttccttgtgaaccagagaggtctcataggattggaggcttgtcagtgtgactcccatctactggaagggtcgcaaggaggatctagagaactacaggcctgtcagcctccccttggctcccgaagaggttatggagcagactgtcctgagggaaatcacactgcgtgtgcaggacagtcgggagatcaggagcagccagcacgggttcatgaaaggcaggtcctgcttgagcaaccggat

SEQ ID NO: 64273 - DNA, 600 bp, Chicken  19866894330014_3
atgttgaaatagattgacaggaagaggagagctaaggagaatctccatcctttactggatatggcaaggattatgactgctgaggtgaaggaaaatacggaagttctcagtgccgtctttaagtccgtcttcagaagtgagacccgttatcctggtctgcccccaaacctgggggtgtcggatggggagaagaataaagttcccacgattaaggtgaaaactacggaagacctactactccacctggactgccacaagtccatggggcyggacgggatccactygagggtgctgagggascrggtggaggtgacaggcaagccgccttccatcatatctcagtgttccttgtgaaccagagaggtctcataggattggaggcttgtcagtgtgactcccatctactggaagggtcgcaaggaggatctagagaactacaggcctgtcagcctccccttggctcccgaagaggttatggagcagactgtcctgagggaaatcacactgcgtgtgcaggacagtcgggagatcaggagcagccagcacgggttcatgaaaggcaggtcctgcttgagcaaccggatctccttttctgactga

SEQ ID NO: 64274 - DNA, 600 bp, Chicken  19866894330014_4
gttgaaatagattgacaggaagaggagagctaaggagaatctccatcctttactggatatggcaaggattatgactgctgaggtgaaggaaaatacggaagttctcagtgccgtctttaagtccgtcttcagaagtgagacccgttatcctggtctgcccccaaacctgggggtgtcggatggggagaagaataaagttcccacgattaaggtgaaaactacggaagacctactactccacctggactgccacaagtccatggggcyggacgggatccactygagggtgctgagggascrggtggaggtgacaggcaagccgccttccatcatatctcagtgttccttgtgaaccagagaggtctcataggattggaggcttgtcagtgtgactcccatctactggaagggtcgcaaggaggatctagagaactacaggcctgtcagcctccccttggctcccgaagaggttatggagcagactgtcctgagggaaatcacactgcgtgtgcaggacagtcgggagatcaggagcagccagcacgggttcatgaaaggcaggtcctgcttgagcaaccggatctccttttctgactgagg

SEQ ID NO: 64275 - DNA, 600 bp, Chicken  19866894330018_1
tgatgagtaggtggaagaattttgtctcgtttggttatatatgttggcatttttcattgcaatagctgtagctgtttgtaatgctgtctgcaaccacctcacttgaggatgaattttttctgccctgcatttgcctttgattcctgtagagcacccatcaactgtgaagaaaacagcagtgcttaagcatagtctattcaagtatattcaaaatgtgttatttttagcattattgttaatatgaaatgttccaccaaccagctggaattatgcaaatcctaacacatgcattcctcactragctgtactcttggatgtactctttacattcatttcgttttatgaatgtctttccagcatacttctctacaatgggagattgaaaagcctgcaattttcttcttgcctgattctcccattgggttttgttcacattcaaaaaataaattgatgtctattttttattagtatagattgaggaaaaaaatctacctgccagcatagatgaatggggtgaaaaagaaaggttcacaaacttgaaaaactgtgttattcaagtagctctttggtgactcactgttttcagtagaaatattcagg

SEQ ID NO: 64276 - DNA, 600 bp, Chicken  19866894330025_1
gaaccattgggagactggcctctaaagcacctacaaccctgactacatctgtgatggcgacaagctcccagtgggtcacaataaatacccagtggcaatggagacaagtgggtggagtataagagtgcctggagttaacataatgaaactgaatccttttcttgaacaagaagtgaaataaactttaaatcaaagtctccattaaggccccttctgcaagatgctactttcagtttctgataatcattataaatggagcagattggaaaaactcaaatggatccaatatgaaaagcctcrctgcctccagtcactgcagggggagaggaatgcagccccacttacctccaaactcattttggtcttcctacaccccgacastaaaatacatgtggaaaaccagaaatgctgtgaggtgatgacaattacctgaagatatgaagatgagcagtgaacagaccagagaagagaagtcaggtgtggatggccaggccacaccatacttctgtactcattaagaaaataaayaaactcttagttggatacattaaaaaagagttggtggtttccagctgcaactcactttagttctttaaaatt

SEQ ID NO: 64277 - DNA, 600 bp, Chicken  19866894330025_2
taaatacccagtggcaatggagacaagtgggtggagtataagagtgcctggagttaacataatgaaactgaatccttttcttgaacaagaagtgaaataaactttaaatcaaagtctccattaaggccccttctgcaagatgctactttcagtttctgataatcattataaatggagcagattggaaaaactcaaatggatccaatatgaaaagcctcrctgcctccagtcactgcagggggagaggaatgcagccccacttacctccaaactcattttggtcttcctacaccccgacastaaaatacatgtggaaaaccagaaatgctgtgaggtgatgacaattacctgaagatatgaagatgagcagtgaacagaccagagaagagaagtcaggtgtggatggccaggccacaccatacttctgtactcattaagaaaataaayaaactcttagttggatacattaaaaaagagttggtggtttccagctgcaactcactttagttctttaaaattatccttgcgtttctgtttaagaatttaccttgaggagggatgggaatctgctgcatgctaccatctgtctttccttagaaa

SEQ ID NO: 64278 - DNA, 564 bp, Chicken  19866894330025_3
ttcagtttctgataatcattataaatggagcagattggaaaaactcaaatggatccaatatgaaaagcctcrctgcctccagtcactgcagggggagaggaatgcagccccacttacctccaaactcattttggtcttcctacaccccgacastaaaatacatgtggaaaaccagaaatgctgtgaggtgatgacaattacctgaagatatgaagatgagcagtgaacagaccagagaagagaagtcaggtgtggatggccaggccacaccatacttctgtactcattaagaaaataaayaaactcttagttggatacattaaaaaagagttggtggtttccagctgcaactcactttagttctttaaaattatccttgcgtttctgtttaagaatttaccttgaggagggatgggaatctgctgcatgctaccatctgtctttccttagaaatacagcacaataaaagtgagattgttttgtctcttttataaggttagtaagaaagctttgattgcttcttctcttattcactagaaatttatagtaagatgttattttttc

SEQ ID NO: 64279 - DNA, 600 bp, Chicken  19866894330030_1
gccagattcagtggaataggtactaatagagacatattttcaaatatcttagaaattaattctgctaaagtaaatgtctatctctctctctctctcttttctttgtaggggggatccgatcttattattaacagctatgggcctgtcacaaaggccaactgcaagaagaggtggctgttcttccaggatactaagaagatgaagactgaggaggtaattggtctaatgtgcagagatacgcagtctttactaccctctgtttgcaaaggaatttaaggagttttctgtgtgttgaaaagmgttagtggtccaatttttaatggaatagttttacttctgttaaggttgatggtgttctaccttgtagcaaagtcatgtggacttttcattttctgtcccaagttgtcaaatattttaactyttttcagtctactgataattttcttgcctgttctcttttgtgagcagacakatttctgtatactgtctgtgcaaagcatttacagttcacctgcagagactttgcataaatgcaaatgaagcataaacatctaaaaaatcccctgctatcttgacagctaaaaccttatgtttgcygaa

SEQ ID NO: 64280 - DNA, 600 bp, Chicken  19866894330030_2
ttattattaacagctatgggcctgtcacaaaggccaactgcaagaagaggtggctgttcttccaggatactaagaagatgaagactgaggaggtaattggtctaatgtgcagagatacgcagtctttactaccctctgtttgcaaaggaatttaaggagttttctgtgtgttgaaaagmgttagtggtccaatttttaatggaatagttttacttctgttaaggttgatggtgttctaccttgtagcaaagtcatgtggacttttcattttctgtcccaagttgtcaaatattttaactyttttcagtctactgataattttcttgcctgttctcttttgtgagcagacakatttctgtatactgtctgtgcaaagcatttacagttcacctgcagagactttgcataaatgcaaatgaagcataaacatctaaaaaatcccctgctatcttgacagctaaaaccttatgtttgcygaacaaatgagaaatctatccaaagtactgaagaaatgtagaatctgagctataactgccttgattctaaagctgttgtcctggttgaacgtgctaattgaattagaaaaatgtcagttcaaaa

SEQ ID NO: 64281 - DNA, 600 bp, Chicken  19866894330030_3
ggctgttcttccaggatactaagaagatgaagactgaggaggtaattggtctaatgtgcagagatacgcagtctttactaccctctgtttgcaaaggaatttaaggagttttctgtgtgttgaaaagmgttagtggtccaatttttaatggaatagttttacttctgttaaggttgatggtgttctaccttgtagcaaagtcatgtggacttttcattttctgtcccaagttgtcaaatattttaactyttttcagtctactgataattttcttgcctgttctcttttgtgagcagacakatttctgtatactgtctgtgcaaagcatttacagttcacctgcagagactttgcataaatgcaaatgaagcataaacatctaaaaaatcccctgctatcttgacagctaaaaccttatgtttgcygaacaaatgagaaatctatccaaagtactgaagaaatgtagaatctgagctataactgccttgattctaaagctgttgtcctggttgaacgtgctaattgaattagaaaaatgtcagttcaaaactgaaatgttaaaccaaattctgaacatgatagtgaaaattcgcacatatg

SEQ ID NO: 64282 - DNA, 600 bp, Chicken  19866894330030_4
agmgttagtggtccaatttttaatggaatagttttacttctgttaaggttgatggtgttctaccttgtagcaaagtcatgtggacttttcattttctgtcccaagttgtcaaatattttaactyttttcagtctactgataattttcttgcctgttctcttttgtgagcagacakatttctgtatactgtctgtgcaaagcatttacagttcacctgcagagactttgcataaatgcaaatgaagcataaacatctaaaaaatcccctgctatcttgacagctaaaaccttatgtttgcygaacaaatgagaaatctatccaaagtactgaagaaatgtagaatctgagctataactgccttgattctaaagctgttgtcctggttgaacgtgctaattgaattagaaaaatgtcagttcaaaactgaaatgttaaaccaaattctgaacatgatagtgaaaattcgcacatatggaacatctagcttatttttatagaatactaaattgtattgtgcttctgtatccttaagaaataataaagctagagcagctgtagatttctgatgttcctgtgagcaaaatacttgctatgaccca

SEQ ID NO: 64283 - DNA, 392 bp, Chicken  19866894330034_1
agatatcaccgtgaaccagcttccagccaaattcctcctgcgcatcttcctgtaaaggaaatccatctattttaatacagcagatcaccacttaggtagcctgtaacaaaacagcttcttgtagaaagaaattacattccacatatacttgaggaggtacgtttcagacttacagtggaatccatctgattgtatcttgcaatgtctttatgcagcgtcctcaacataatcatagcaaccattccagacagaaaaaggacaatcaccaaggaattcataatgctgcattgatagaaaaayagcagtgagtcatmattcatatcacartgttaaaacatttttgtacagtatgtttgaagccaaactttcttctcacctaaaccactgaatat

SEQ ID NO: 64284 - DNA, 378 bp, Chicken  19866894330034_2
accagcttccagccaaattcctcctgcgcatcttcctgtaaaggaaatccatctattttaatacagcagatcaccacttaggtagcctgtaacaaaacagcttcttgtagaaagaaattacattccacatatacttgaggaggtacgtttcagacttacagtggaatccatctgattgtatcttgcaatgtctttatgcagcgtcctcaacataatcatagcaaccattccagacagaaaaaggacaatcaccaaggaattcataatgctgcattgatagaaaaayagcagtgagtcatmattcatatcacartgttaaaacatttttgtacagtatgtttgaagccaaactttcttctcacctaaaccactgaatat

SEQ ID NO: 64285 - DNA, 365 bp, Chicken  19866894330034_3
caaattcctcctgcgcatcttcctgtaaaggaaatccatctattttaatacagcagatcaccacttaggtagcctgtaacaaaacagcttcttgtagaaagaaattacattccacatatacttgaggaggtacgtttcagacttacagtggaatccatctgattgtatcttgcaatgtctttatgcagcgtcctcaacataatcatagcaaccattccagacagaaaaaggacaatcaccaaggaattcataatgctgcattgatagaaaaayagcagtgagtcatmattcatatcacartgttaaaacatttttgtacagtatgtttgaagccaaactttcttctcacctaaaccactgaatat

SEQ ID NO: 64286 - DNA, 600 bp, Chicken  19866894330036_1
gaaattccatactttttacagaaatacctaacttagtgggtgccacaagaacactaaggcaaccaataatggtatatttactaatagctgcagtgtctgtgtgtatgctttagattaaatataatttaaaatggaaagctctgaatttaagctcaaatattagagctagcaagccttcatttctatttgtgaaattaacaacaacaataagtctgcatatgagaagcacagctgtatctatagctaaatctgtatctaaatataattagatgaaaaatacatagtaaaacacacagcctyctaatgattaaacattgttttcccctgtggtatttttgaaaaatatgatactaggcttaactgtggcattataaagaaaaataacttccttgtaaggatctttgctttgttggttaagtgttccaaatggcagcataagctctgctgtaaaatataccatagcactcagcagtgagtactctgtgggcaggtaacataccttgtccaaaagcctgtcaggctgggtaatgcttgctgggcacaacttagatgagcagtgaactttggatctcaaattccccttgtgatgagagaaggaag

SEQ ID NO: 64287 - DNA, 600 bp, Chicken  19866894330036_2
gattaaacattgttttcccctgtggtatttttgaaaaatatgatactaggcttaactgtggcattataaagaaaaataacttccttgtaaggatctttgctttgttggttaagtgttccaaatggcagcataagctctgctgtaaaatataccatagcactcagcagtgagtactctgtgggcaggtaacataccttgtccaaaagcctgtcaggctgggtaatgcttgctgggcacaacttagatgagcagtgaactttggatctcaaattccccttgtgatgagagaaggaagaaatwtgtggtaagtctccctgcctgcctgtcyctctcttcacagtcatgcaaaaagagaagaatgttttttccttgaggagtgtaggataaatagctaggacaactgccaaagaaaagaagaaaatgtcttttgcttaagcgtgcagcttaagcaacttgtgcaagatcatagaatcatagaatgtcttgggttggaagaaatctcaaagatcacttaattctgaagcactgctgtgggcacagttgccaaccactaaatcaggtgtagtcaggctgcccaggactccatccaacctgttccag

SEQ ID NO: 64288 - DNA, 600 bp, Chicken  19866894330036_3
ttttgaaaaatatgatactaggcttaactgtggcattataaagaaaaataacttccttgtaaggatctttgctttgttggttaagtgttccaaatggcagcataagctctgctgtaaaatataccatagcactcagcagtgagtactctgtgggcaggtaacataccttgtccaaaagcctgtcaggctgggtaatgcttgctgggcacaacttagatgagcagtgaactttggatctcaaattccccttgtgatgagagaaggaagaaatwtgtggtaagtctccctgcctgcctgtcyctctcttcacagtcatgcaaaaagagaagaatgttttttccttgaggagtgtaggataaatagctaggacaactgccaaagaaaagaagaaaatgtcttttgcttaagcgtgcagcttaagcaacttgtgcaagatcatagaatcatagaatgtcttgggttggaagaaatctcaaagatcacttaattctgaagcactgctgtgggcacagttgccaaccactaaatcaggtgtagtcaggctgcccaggactccatccaacctgttccagaacagcttcagggatggggcattcacag

SEQ ID NO: 64289 - DNA, 599 bp, Chicken  19866894330038_1
  misc_feature (1)..(19): n is any nucleotide
nnnnnnnnnnnnnnnnnnntcccttcagggaagaaatttcccaaatacattctttaaagccaagaatgaccttttttcattatttacaacctcgtgtttctgaaaaggccctctcaactgcttctgtagaagttggcactgatctgtacctgtcttggtccctcagcccagtctgtcacactgacctccgtgctttgtctcccagcgccccgctgcagccacacttcagctctttgccccttccatcctgagcagacaagaaggcagtaacattttaaagtaacaaacctctcatttctrttgctacttcyagagctgtgttcctaaggggaacacaccaaacagttttccaccccccaaagccattttcttattaaatctcacacgaagttccacttgtttgcacttgagaaacaaatggaacaaataccaaagtcagtgatggagaagagcacagcagacagcggccgcccaaacacccttctcaaggaatcccaggagcaaaaaaggaataaaagaagccacgttttaaagatgtttcttaaccttgaatggagttacaaaaattttgtcagcaatggtttctgggcatagcatct

SEQ ID NO: 64290 - DNA, 599 bp, Chicken  19866894330038_2
  misc_feature (1)..(8): n is any nucleotide
nnnnnnnntcccttcagggaagaaatttcccaaatacattctttaaagccaagaatgaccttttttcattatttacaacctcgtgtttctgaaaaggccctctcaactgcttctgtagaagttggcactgatctgtacctgtcttggtccctcagcccagtctgtcacactgacctccgtgctttgtctcccagcgccccgctgcagccacacttcagctctttgccccttccatcctgagcagacaagaaggcagtaacattttaaagtaacaaacctctcatttctrttgctacttcyagagctgtgttcctaaggggaacacaccaaacagttttccaccccccaaagccattttcttattaaatctcacacgaagttccacttgtttgcacttgagaaacaaatggaacaaataccaaagtcagtgatggagaagagcacagcagacagcggccgcccaaacacccttctcaaggaatcccaggagcaaaaaaggaataaaagaagccacgttttaaagatgtttcttaaccttgaatggagttacaaaaattttgtcagcaatggtttctgggcatagcatctaagattataca

SEQ ID NO: 64291 - DNA, 600 bp, Chicken  19866894330038_3
ttaaagccaagaatgaccttttttcattatttacaacctcgtgtttctgaaaaggccctctcaactgcttctgtagaagttggcactgatctgtacctgtcttggtccctcagcccagtctgtcacactgacctccgtgctttgtctcccagcgccccgctgcagccacacttcagctctttgccccttccatcctgagcagacaagaaggcagtaacattttaaagtaacaaacctctcatttctrttgctacttcyagagctgtgttcctaaggggaacacaccaaacagttttccaycccccaaagccattttcttattaaatctcacacgaagttccacttgtttgcacttgagaaacaaatggaacaaataccaaagtcagtgatggagaagagcacagcagacagcggccgcccaaacacccttctcaaggaatcccaggagcaaaaaaggaataaaagaagccacgttttaaagatgtttcttaaccttgaatggagttacaaaaattttgtcagcaatggtttctgggcatagcatctaagattatacaggggttcacttactcagaagctagttcatctactgaagcccaa

SEQ ID NO: 64292 - DNA, 600 bp, Chicken  19866894330040_1
caattgaaaaaaggttagtacatggtctcttcctgacaggaactcagcatgtgtcaagagcacataaaacaacctgcaagattattctggacctcacggactagatgtatctttgctgatcagctgatcaacatttcaccacagtctgatccgtatcttcctatctggtaaattaaatgttatgctctctgtgcttggacgcaatacagaatcccttcagctgacataacagacgtctgatggccttagcctcatgttacgcactgaggacctaacagttcttcatcagagtaatactgyggaaattgcttttgtaaagtatttatctgtttaaaataacaaagtcagccacaagacaacaaaacaaaaactattgtcacttcacaagtgccacaaactctcccacattcaaaactcagaccctggactctgctgatctaccagtaggctgagggaaaacagacaaatacttcaagtcttctctctttgctacttttccttaccattgcagtatactaagttatctcttgattacttgttccctgtcttcataattcttgcattcttgattgtacagagcctaagagtgataaatacata

SEQ ID NO: 64293 - DNA, 600 bp, Chicken  19866894330055_1
gtcataattttacttgcttcagatggatttccctcatgactccgcctcctgcaggcaccaacaaaatgttgtttttacagatgagttatggtcaatttgaatgtaaagactcagattctttgcagcgtgaggacaagaacaacttttctttattagctcttagcagtcagtatgctaacagccaacgcctgtatgtgaggtacagtgttctccacagccctctctgaaaccttttatgtagcagggctcttatgtctaaagatactggggagaactttaggatatcatggagataactgrtgagctgctattttcttggctattctaggaaaaacagggtgcttgctgaaagcaggattcctttcttatctcaggcaggctacctgtagtaactggaaggtttaattttctagtcaccttttttgaatgttttaggctctgtgttattcaagctgctatttctcagaagaaacattctctcatgtaccttttatcattgttggagaagtacaagtacagagcctcatcttgtctctccagcagttccctcagaagaagacaggctatgtgttaacttgtcttccagagaacatgaagcat

SEQ ID NO: 64294 - DNA, 600 bp, Chicken  19866894330055_2
attttcttggctattctaggaaaaacagggtgcttgctgaaagcaggattcctttcttatctcaggcaggctacctgtagtaactggaaggtttaattttctagtcaccttttttgaatgttttaggctctgtgttattcaagctgctatttctcagaagaaacattctctcatgtaccttttatcattgttggagaagtacaagtacagagcctcatcttgtctctccagcagttccctcagaagaagacaggctatgtgttaacttgtcttccagagaacatgaagcatacttattaygtgttaagtcatttggtcaagtattactctttcagctgatgttggcaaatttatttctgctggtgtttatggtgcatctgtagttcagccactgcatatgtgtgtatatgtatgcatgcaatttatatatatatataatatatatattattagctattatgtacattatggtgctcaggtattactctctatagaatagtctacaaaggctagaatggcttctcccttgaagtttgccagtacagcctaagcagttctgctctcatgccctgtttagggtacttctctccccagcagcca

SEQ ID NO: 64295 - DNA, 600 bp, Chicken  19866894330061_1
gagtttatgttgggccacctacaagcaggtttaagcctgtgactatcacctggacgctctcctgaaagtacagtagcctgtatttcctcaagcacaaagtgatgatgcccagccaagcaccaacagcctcctcttgtatccacagcccaatgcatctattgattctcctgcctaaaacaacctggagagtgacacttgcaaagctgacagaacaataccaccctggtgtaaaacatttggagatcctctcccagagagcatgaatgggaatgaagcataattagcaactgtggctccacmcagaagcatcaaaagagaccatcaaagccactgtgaatgagatattctgccttttccttgttacaaacagatttctacaggataaaaacatcaccctggcagtactgtatgaagccaacagaacatgaaatgggaaatgttgtgaccattgagccttacagcagtccatctgtcctgtgtaaaggactggacatgtttcccgtgtgtccactacatacatgatgctggtttgtagatcatcagcaagcagtctgtacttgttctgcttgagyttctctgttactggactcacaccaaacc

SEQ ID NO: 64296 - DNA, 600 bp, Chicken  19866894330061_2
aagcataattagcaactgtggctccacmcagaagcatcaaaagagaccatcaaagccactgtgaatgagatattctgccttttccttgttacaaacagatttctacaggataaaaacatcaccctggcagtactgtatgaagccaacagaacatgaaatgggaaatgttgtgaccattgagccttacagcagtccatctgtcctgtgtaaaggactggacatgtttcccgtgtgtccactacatacatgatgctggtttgtagatcatcagcaagcagtctgtacttgttctgcttgagyttctctgttactggactcacaccaaacctgtggttttcacactgcaaaaagtttcccaccaatctgaaagatcatcataaaaagcayccatgttgcaaataaacaagaggtaaggctactactgtcttccacgtctgtagaccccaaaggaaatcccaytgaaaactactgaagaagacaatttyaacagcatatcaccagaagtcaatcattcacaagcattgtttcattataatcagcatttatcattacaggtttggacacagtgctgagattattgattaaccacttaaatgattt

SEQ ID NO: 64297 - DNA, 600 bp, Chicken  19866894330061_3
gttacaaacagatttctacaggataaaaacatcaccctggcagtactgtatgaagccaacagaacatgaaatgggaaatgttgtgaccattgagccttacagcagtccatctgtcctgtgtaaaggactggacatgtttcccgtgtgtccactacatacatgatgctggtttgtagatcatcagcaagcagtctgtacttgttctgcttgagyttctctgttactggactcacaccaaacctgtggttttcacactgcaaaaagtttcccaccaatctgaaagatcatcataaaaagcayccatgttgcaaataaacaagaggtaaggctactactgtcttccacgtctgtagaccccaaaggaaatcccaytgaaaactactgaagaagacaatttyaacagcatatcaccagaagtcaatcattcacaagcattgtttcattataatcagcatttatcattacaggtttggacacagtgctgagattattgattaaccacttaaatgatttccaaatctcatattggatctcaatctggaatacaaaatgaattctccagttcttagttcagttcagtaagcaataggtcagggtaag

SEQ ID NO: 64298 - DNA, 600 bp, Chicken  19866894330061_4
gggaaatgttgtgaccattgagccttacagcagtccatctgtcctgtgtaaaggactggacatgtttcccgtgtgtccactacatacatgatgctggtttgtagatcatcagcaagcagtctgtacttgttctgcttgagyttctctgttactggactcacaccaaacctgtggttttcacactgcaaaaagtttcccaccaatctgaaagatcatcataaaaagcayccatgttgcaaataaacaagaggtaaggctactactgtcttccacgtctgtagaccccaaaggaaatcccaytgaaaactactgaagaagacaatttyaacagcatatcaccagaagtcaatcattcacaagcattgtttcattataatcagcatttatcattacaggtttggacacagtgctgagattattgattaaccacttaaatgatttccaaatctcatattggatctcaatctggaatacaaaatgaattctccagttcttagttcagttcagtaagcaataggtcagggtaagtagcattcaccatagccctctccctgaggaaagcaagccatgtaagggaggtgtacatttttatcatgttcc

SEQ ID NO: 64299 - DNA, 579 bp, Chicken  19866894330061_5
acagcagtccatctgtcctgtgtaaaggactggacatgtttcccgtgtgtccactacatacatgatgctggtttgtagatcatcagcaagcagtctgtacttgttctgcttgagyttctctgttactggactcacaccaaacctgtggttttcacactgcaaaaagtttcccaccaatctgaaagatcatcataaaaagcayccatgttgcaaataaacaagaggtaaggctactactgtcttccacgtctgtagaccccaaaggaaatcccaytgaaaactactgaagaagacaatttyaacagcatatcaccagaagtcaatcattcacaagcattgtttcattataatcagcatttatcattacaggtttggacacagtgctgagattattgattaaccacttaaatgatttccaaatctcatattggatctcaatctggaatacaaaatgaattctccagttcttagttcagttcagtaagcaataggtcagggtaagtagcattcaccatagccctctccctgaggaaagcaagccatgtaagggaggtgtacatttttatcatgttcctcatg

SEQ ID NO: 64300 - DNA, 600 bp, Chicken  19866894330066_1
gtcagacagcctcccctatgacccaacacaccagctgcctctgctgtgagttctctggtagattacttgccccacgtacccactgggatgaacacacacaaggttcgtccccccagtgctctcctctcagtagcaccaattgatggtgcccccatccctagcaccaatattctctctcgtccactcccctggatcttataatgcttagagggccaatgactggggacctttcctggggtccttgttggtttaaccataggaggtgaaggtggagaaaatagaataccaggcaactgaaamatcagaagttcrtagaagtccgaggaggaaaaagatggacaagcttttcattcccaaattgctacagattaggatagattgatgagaaggaatagacaaagaaatgtttactggggagagggaaggactacagaaggcgttaatattaggcagtaccccgatataaagcgctgtacaaaatcrtaaggacagaatttttatactggcaagattaaaagctgatcagaagagtcagaatgttgcttaccaacataagacaaacaccaactgtgggtttagaaagactagcagtcccttttt

SEQ ID NO: 64301 - DNA, 600 bp, Chicken  19866894330066_2
cccctatgacccaacacaccagctgcctctgctgtgagttctctggtagattacttgccccacgtacccactgggatgaacacacacaaggttcgtccccccagtgctctcctctcagtagcaccaattgatggtgcccccatccctagcaccaatattctctctcgtccactcccctggatcttataatgcttagagggccaatgactggggacctttcctggggtccttgttggtttaaccataggaggtgaaggtggagaaaatagaataccaggcaactgaaamatcagaagttcrtagaagtccgaggaggaaaaagatggacaagcttttcattcccaaattgctacagattaggatagattgatgagaaggaatagacaaagaaatgtttactggggagagggaaggactacagaaggcgttaatattaggcagtaccccgatataaagcgctgtacaaaatcrtaaggacagaatttttatactggcaagattaaaagctgatcagaagagtcagaatgttgcttaccaacataagacaaacaccaactgtgggtttagaaagactagcagtccctttttgaccctgataag

SEQ ID NO: 64302 - DNA, 491 bp, Chicken  19866894330066_3
ctcccctggatcttataatgcttagagggccaatgactggggacctttcctggggtccttgttggtttaaccataggaggtgaaggtggagaaaatagaataccaggcaactgaaamatcagaagttcrtagaagtccgaggaggaaaaagatggacaagcttttcattcccaaattgctacagattaggatagattgatgagaaggaatagacaaagaaatgtttactggggagagggaaggactacagaaggcgttaatattaggcagtaccccgatataaagcgctgtacaaaatcrtaaggacagaatttttatactggcaagattaaaagctgatcagaagagtcagaatgttgcttaccaacataagacaaacaccaactgtgggtttagaaagactagcagtccctttttgaccctgataagctgaaggtggttcacctaaacatggaaaagccaaatactctgacacttaaaattacataggt

SEQ ID NO: 64303 - DNA, 600 bp, Chicken  19866894330070_1
gcagtcaacttagaaatggggtggtaagggcaggtttccacttagtgttaccctgtcaaactaagatatcaaagaagtgatgggctgagagtatcttttttaataatggattattagctggataggaattcagttaaaatcatagtagggtaaacataaggaatctacaatactatactatgtcacaaacttttcactttcctctctagtttggatgatactgtgcagtaaaaactgccttatgctaaatggtagacaatgactggtattctcagcaaccaaagatggtgcttcaaactrcctgtgttttyagatgaggaactgaatcgtacttctttttagagaggctgttgcctagctgaagggcacacattcactttcttcagaatctactctatgtccatttaaatgagtgaaaacctgagctgagcattcaaatggaaaattcagcacaaacccttccttttatattgcttataaatattggagtagagttcgtgaataaattcattgaatatcaaaatattgaggcttttcacaatgtaattatgtagctaagctttatttaaattcattgcctaagaaacttcaaacccatgt

SEQ ID NO: 64304 - DNA, 600 bp, Chicken  19866894330070_2
agaaatggggtggtaagggcaggtttccacttagtgttaccctgtcaaactaagatatcaaagaagtgatgggctgagagtatcttttttaataatggattattagctggataggaattcagttaaaatcatagtagggtaaacataaggaatctacaatactatactatgtcacaaacttttcactttcctctctagtttggatgatactgtgcagtaaaaactgccttatgctaaatggtagacaatgactggtattctcagcaaccaaagatggtgcttcaaactrcctgtgttttyagatgaggaactgaatcgtacttctttttagagaggctgttgcctagctgaagggcacacattcactttcttcagaatctactctatgtccatttaaatgagtgaaaacctgagctgagcattcaaatggaaaattcagcacaaacccttccttttatattgcttataaatattggagtagagttcgtgaataaattcattgaatatcaaaatattgaggcttttcacaatgtaattatgtagctaagctttatttaaattcattgcctaagaaacttcaaacccatgttctgtcattca

SEQ ID NO: 64305 - DNA, 600 bp, Chicken  19866894330070_3
aattttgtctgaaaaaattcaacatgtcattgcttcaaaatcagcagagcctaacaaatcccaaacagagagtaaaaatagcaaactggaaattgggattttagtagttgagcatcaattccattcactgttccacattttcatgcaaagtaaaaactgtaagatgttgctgagtatcagaacatgaaaaaggaaggagagacatgtaagtggatttgtttcttcatccttaaatgcactgttaaagccataaaaatgtagcatatttttagtaatattctattttagttatctatttaraatacatagtagtcttccaaaagtaattacttctgtttaaaagctgattaatattccagtcattccctcatttgtacagcagtgtgggctgaactgctgatagattttttctgtcaagcttgtctattcatcctaaaacactgtgctgctattggccaatctaactgctaaagaaattgccaaagagcagggattcttggtaaattgctgccctagagagtgtatacaaagcttagtgagtgaaaaacagggaagaaaacttgtatcattgcatttgttttttaaggtcataaaatgaaa

SEQ ID NO: 64306 - DNA, 600 bp, Chicken  19866894330071_1
tctcttttggacttttccctcccttaagaacatcctctcctctttctgatatccacagttccatgaggacgacaaaccaagttctcccatctcacaacaataaaccctggccagtatgttaaaactggcatcgtagcacactctttcagtgcactcaggtcatcaggaaggttcaaatcccagtcttcagctttgtttggtgatgggatggtcacggaagtatcttacctgtcattcaagacttatgtgcgaggcctagcacccttcaccttcacccagatctcccacaaaacagctcaytggagccaagacatctgacaggagcagccctgggcaatgcactgaacactagtgcctgctgagtgcttcggtgaagattgttctggcaaccagagtcctccctcagaaatttcatctgattgaatgtcacagcagaagccatcctgggtcagggcactgatcaggtgcagaataggactggctaagggcaggcattcacatggaaatacgagatgcaaaccatgcagcagacagagctgtccgttacgatataggagaaagaagtatagagaatgagagttgctcagctgcctgtggtcc

SEQ ID NO: 64307 - DNA, 599 bp, Chicken  19866894330074_1
  misc_feature (1)..(39): n is any nucleotide
nnnnnnnnnnnnnnnnnnnnnnnnnnnnnnnnnnnnnnnctggaaggagagcattacagaaactgcagaggcaaggcatgctgctctcatgatcaagtgatcttgtgagcagattctctttgacaatcctgtacccataacacaatttgaatagtcaaaagggaatacgaatgaagaacagatgagctgtttggtcttttgaaagaaaggataagcagatgcgttgatatgcgtgcagaggaggaaccttgatttttagcaaagataagaagagacagtcagaggttccaacaggaggcrttgcacagactggcggtggggragaagcaacgaaaaagtctcttttctttcytggcacaggacaggaggagttaaagacaccccacagagaacaatttggtgacagcacaaagggtgataacaggraagtagctcaaagagcagrtgtgtttgttggggttgcattgctcctcttaaacccggatccatccagtattgattcagctgatgcaggacagtacctgtcattacctgtcaaacgttcctactaaacatcacacacgctaacaagaacaaaatggatactcccgtcctggtac

SEQ ID NO: 64308 - DNA, 599 bp, Chicken  19866894330074_2
  misc_feature (1)..(17): n is any nucleotide
nnnnnnnnnnnnnnnnnctggaaggagagcattacagaaactgcagaggcaaggcatgctgctctcatgatcaagtgatcttgtgagcagattctctttgacaatcctgtacccataacacaatttgaatagtcaaaagggaatacgaatgaagaacagatgagctgtttggtcttttgaaagaaaggataagcagatgcgttgatatgcgtgcagaggaggaaccttgatttttagcaaagataagaagagacagtcagaggttccaacaggaggcrttgcacagactggcggtggggragaagcaacgaaaaagtctcttttctttcytggcacaggacaggaggagttaaagacaccccacagagaacaatttggtgacagcacaaagggtgataacaggraagtagctcaaagagcagrtgtgtttgttggggttgcattgctcctcttaaacccggatccatccagtattgattcagctgatgcaggacagtacctgtcattacctgtcaaacgttcctactaaacatcacacacgctaacaagaacaaaatggatactcccgtcctggtactgctagaatacacagcgggcag

SEQ ID NO: 64309 - DNA, 600 bp, Chicken  19866894330074_3
attacagaaactgcagaggcaaggcatgctgctctcatgatcaagtgatcttgtgagcagattctctttgacaatcctgtacccataacacaatttgaatagtcaaaagggaatacgaatgaagaacagatgagctgtttggtcttttgaaagaaaggataagcagatgcgttgatatgcgtgcagaggaggaaccttgatttttagcaaagataagaagagacagtcagaggttccaacaggaggcrttgcacagactggcggtggggragaagcaacgaaaaagtctcttttctttcytggcacaggacaggaggagttaaagacaccccacagagaacaatttggtgacagcacaaagggtgataacaggraagtagctcaaagagcagrtgtgtttgttggggttgcattgctcctcttaaacccggatccatccagtattgattcagctgatgcaggacagtacctgtcattacctgtcaaacgttcctactaaacatcacacacgctaacaagaacaaaatggatactcccgtcctggtactgctagaatacacagcgggcagggcgagtttaacaactgagccgagttgaaag

SEQ ID NO: 64310 - DNA, 600 bp, Chicken  19866894330074_4
tcctgtacccataacacaatttgaatagtcaaaagggaatacgaatgaagaacagatgagctgtttggtcttttgaaagaaaggataagcagatgcgttgatatgcgtgcagaggaggaaccttgatttttagcaaagataagaagagacagtcagaggttccaacaggaggcrttgcacagactggcggtggggragaagcaacgaaaaagtctcttttctttcytggcacaggacaggaggagttaaagacaccccacagagaacaatttggtgacagcacaaagggtgataacaggraagtagctcaaagagcagrtgtgtttgttggggttgcattgctcctcttaaacccggatccatccagtattgattcagctgatgcaggacagtacctgtcattacctgtcaaacgttcctactaaacatcacacacgctaacaagaacaaaatggatactcccgtcctggtactgctagaatacacagcgggcagggcgagtttaacaactgagccgagttgaaagcttgataacaggcatttcaggaygctactgtttgtgttttcattctcagtgttacatctcaaaccagcttgaat

SEQ ID NO: 64311 - DNA, 600 bp, Chicken  19866894330074_5
tttgaatagtcaaaagggaatacgaatgaagaacagatgagctgtttggtcttttgaaagaaaggataagcagatgcgttgatatgcgtgcagaggaggaaccttgatttttagcaaagataagaagagacagtcagaggttccaacaggaggcrttgcacagactggcggtggggragaagcaacgaaaaagtctcttttctttcytggcacaggacaggaggagttaaagacaccccacagagaacaatttggtgacagcacaaagggtgataacaggraagtagctcaaagagcagrtgtgtttgttggggttgcattgctcctcttaaacccggatccatccagtattgattcagctgatgcaggacagtacctgtcattacctgtcaaacgttcctactaaacatcacacacgctaacaagaacaaaatggatactcccgtcctggtactgctagaatacacagcgggcagggcgagtttaacaactgagccgagttgaaagcttgataacaggcatttcaggaygctactgtttgtgttttcattctcagtgttacatctcaaaccagcttgaatttgtaccagttgtaggact

SEQ ID NO: 64312 - DNA, 600 bp, Chicken  19866894330074_6
agacaccccacagagaacaatttggtgacagcacaaagggtgataacaggraagtagctcaaagagcagrtgtgtttgttggggttgcattgctcctcttaaacccggatccatccagtattgattcagctgatgcaggacagtacctgtcattacctgtcaaacgttcctactaaacatcacacacgctaacaagaacaaaatggatactcccgtcctggtactgctagaatacacagcgggcagggcgagtttaacaactgagccgagttgaaagcttgataacaggcatttcaggaygctactgtttgtgttttcattctcagtgttacatctcaaaccagcttgaatttgtaccagttgtaggactgtttgataaagacttggatcaacacagatatattgactgggttaagaaggaatccaatgaactctcagcttttacagacacgtttagacaggcaacagggatttcttccttccctcttcttcatctaaatcttaagttctcacactagcccagcccattcagactaagaacaaaaacttcatgggccccatctagaaggtgaggaggaagtgccccagtgaagacagaac

SEQ ID NO: 64313 - DNA, 600 bp, Chicken  19866894330076_1
atgtggtttcacatgggttttcttgttggtgctttttgggatgtgtgttctgatgtttgtctccagtgagtggaattcttatttagagatgggggtaataattcagctggaattaggcaagctaccgctgcagagagaaggaaacataatttagattaaatgtgaagttaccttgaatggaacaaacatgatttgtttgaagtgaactaagacagagttactttataagctgatttacaattgtctgtgttaaattcaaaactgccattaaatgcctcagccgcagtctcttcttagcaygcatgtggggaacccattactgtgctgttcttcttgacaagcagtcactgcttttatgtctgtcaaatgtggattaaaagaggagcgaagtgtatatccacaatgctgaaatggatggtacctggcagaacttggtttctgttctgatctgaaaaatctggtcagtaacatggaattttggaggaggggttcgtttgttttttaataatacctggaaagggctgcaagttgagcataggctttctgtagagatcttgtgcgtgtatatttttctcattttaacacactacttaaatgtca

SEQ ID NO: 64314 - DNA, 600 bp, Chicken  19866894330081_1
aaggctttgcttcagcatctgcaagattctgaaatgtaaatgctggtgttttcccttgatcagcatgaccaaacttaaagctttttcctaagaattcacacttaaaacctgttcccagctgtcctgcaacaggttcagatgatttatttttcaaatcagaagtaaacaatgaagcattactggtaggcttactagatggatttggtgtttggcaagctacacaagctggtgaggagctttcgttccttacaagacaagtattacaatcccactgtccttcctttttaccgaaaagctctrcgaatgcatttttctgtggtttacttgcatcagcagcagaaccaaagctgggagcaggaagygcctgaacagcagatactggcacatttgcttgactttgagagttaggactctgacaagaatgacagttttcatcatttgcttcattctggacgaggcatacagagcagttccactgacctttcagtgaaaaagcagtccccaagtcactctggggtggtctttggagcatccacatgttcaagtttaaaggaaaattgctgaggagatacttctgaattagttttgcttggattctgg

SEQ ID NO: 64315 - DNA, 600 bp, Chicken  19866894330081_2
gcatgaccaaacttaaagctttttcctaagaattcacacttaaaacctgttcccagctgtcctgcaacaggttcagatgatttatttttcaaatcagaagtaaacaatgaagcattactggtaggcttactagatggatttggtgtttggcaagctacacaagctggtgaggagctttcgttccttacaagacaagtattacaatcccactgtccttcctttttaccgaaaagctctrcgaatgcatttttctgtggtttacttgcatcagcagcagaaccaaagctgggagcaggaagygcctgaacagcagatactggcacatttgcttgactttgagagttaggactctgacaagaatgacagttttcatcatttgcttcattctggacgaggcatacagagcagttccactgacctttcagtgaaaaagcagtccccaagtcactctggggtggtctttggagcatccacatgttcaagtttaaaggaaaattgctgaggagatacttctgaattagttttgcttggattctggcaggcaatacatttagtggcagtaggttcatttcttacagaacagatgttacagtcccactg

SEQ ID NO: 64316 - DNA, 600 bp, Chicken  19866894330082_1
tgcatgcattggagcagggagtgatccaatatcaataagctaagcagccctccatgtaggagaaggcagcagacactttttatttttgcagcctcctacagcccttcatgtatgaaggtgtagctgtaaaaatccaaaccacttcagcaagaggtctaattgttgtcagaaaaaggatacagagagcctgaaattatccagctcaggcaaatgagagcaaacaggaattggaacagttcattttccacaggcagacaaaaagacggaaatgaaattaaccttaaagttttgttacaggcrgcgggataatgagtcttttgctgcttaaatgaactgagagttctcacagacaaagtctcattctcagagccacacaactctcctcgtagtcattattctcttctacccacgttctgagatgtttcatacgtgaggaaaagcagagtatcttgacatgtatgagatgaggattttacctcatgggtttacaactagtacttgtaaaaacctgaacttttgcccttgaagttctttgtttgtcagtcaaatacagattgcatgaggagcacgacaaaagcagtcccatcgccattgtccaca

SEQ ID NO: 64317 - DNA, 510 bp, Chicken  19866894330082_2
cctcgtagtcattattctcttctacccacgttctgagatgtttcatacgtgaggaaaagcagagtatcttgacatgtatgagatgaggattttacctcatgggtttacaactagtacttgtaaaaacctgaacttttgcccttgaagttctttgtttgtcagtcaaatacagattgcatgaggagcacgacaaaagcagtcccatcgccattgtccacaaagcattatcccagaacagaagcactatcaccagtgaggagaatgctattattttcaggcacactgtgtcttgatttctakagtaaaattgccaacgggtagcatcaatgtggacttgactgtacccacatcccatcttttaaatgcgctattcagctgctgtcaggtggattccttttgggtgatacaacattatcatagacaaatcagaccctcttcatgtgaaattcacataaaccagtcacatttttcacaatttctttaacatatagggaatcctgccctttaaaa

SEQ ID NO: 64318 - DNA, 599 bp, Chicken  19866894330085_1
  misc_feature (1)..(110): n is any nucleotide
nnnnnnnnnnnnnnnnnnnnnnnnnnnnnnnnnnnnnnnnnnnnnnnnnnnnnnnnnnnnnnnnnnnnnnnnnnnnnnnnnnnnnnnnnnnnnnnnnnnnnnnnnnnnnncacactgaatactgcagagcgatctgagcagaacagcaattctgcttaagtagcagagatgggacacggaacgtaataaaacaaggcatgtgttggttcatgttgactcacaagagcagagcttggagcagctcccagacacgtgcctcccgtgcaggacagctgctggctcagcccatgtctggatgcrctgttgtaggttgcagatggcagcaccagagcgggtccattaatgcaagcccacagcttgctgcaactgcagatgctgaagcagcttcaagacargcaggagacggagttagagcactaatctgaaagctgattaaggtttgcggcctgaagcaggctgtggcagctcagagtaccatagaagactcatgtgagagaggtgcgagcacacacaaacccagagctaagccagacctgaagaaattcgggaaacaaatctaatycgtaaccacttaatttgcaaagtgtttacaaatacct

SEQ ID NO: 64319 - DNA, 599 bp, Chicken  19866894330085_2
  misc_feature (1)..(15): n is any nucleotide
nnnnnnnnnnnnnnncacactgaatactgcagagcgatctgagcagaacagcaattctgcttaagtagcagagatgggacacggaacgtaataaaacaaggcatgtgttggttcatgttgactcacaagagcagagcttggagcagctcccagacacgtgcctcccgtgcaggacagctgctggctcagcccatgtctggatgcrctgttgtaggttgcagatggcagcaccagagcgggtccattaatgcaagcccacagcttgctgcaactgcagatgctgaagcagcttcaagacargcaggagacggagttagagcactaatctgaaagctgattaaggtttgcggcctgaagcaggctgtggcagctcagagtaccatagaagactcatgtgagagaggtgcgagcacacacaaacccagagctaagccagacctgaagaaattcgggaaacaaatctaatycgtaaccacttaatttgcaaagtgtttacaaatacctggtgctgtcacgtagccggatgtcagagcagcaggaaagcacttatcagctacaaccttcccgtgaatcaccccctgcaaaattatctacgttcc

SEQ ID NO: 64320 - DNA, 600 bp, Chicken  19866894330085_3
tgcaggacagctgctggctcagcccatgtctggatgcrctgttgtaggttgcagatggcagcaccagagcgggtccattaatgcaagcccacagcttgctgcaactgcagatgctgaagcagcttcaagacargcaggagacggagttagagcactaatctgaaagctgattaaggtttgcggcctgaagcaggctgtggcagctcagagtaccatagaagactcatgtgagagaggtgcgagcacacacaaacccagagctaagccagacctgaagaaattcgggaaacaaatctaatycgtaaccacttaatttgcaaagtgtttacaaatacctggtgctgtcacgtagccggatgtcagagcagcaggaaagcacttatcagctacaaccttcccgtgaatcaccccctgcaaaattatctacgttccaacagccactggaggagcaatgggcttgtaaagctcacagcaaacagggcacaacacaaccagcctaagaactctgactggtagcttaattctacgtgtgtacacacaccattctccctctctgcactggctgtaaacattcttggttcccacagaccgacacaaatg

SEQ ID NO: 64321 - DNA, 494 bp, Chicken  19866894330096_1
  misc_feature (1)..(116): n is any nucleotide
nnnnnnnnnnnnnnnnnnnnnnnnnnnnnnnnnnnnnnnnnnnnnnnnnnnnnnnnnnnnnnnnnnnnnnnnnnnnnnnnnnnnnnnnnnnnnnnnnnnnnnnnnnnnnnnnnnnngtggcccccaggctgactgcagggggaacggccggaaggcagtggggtggggctgtgggaacccccctgggacccccgagctgccttaggctcacagcagcaaacgcatgggcagtgaggggcaggtggcagcacagccccttgattggaggctgggggttcgtggtggggtctgggagccacygcattcggctgcaggctgctgaagttaatgctgtcctgggaaatgatggcttctgtcacctgcatggggtcaggtgtctccccagtcccacttcttgccyctatgggcacgtagaaatggtgtaagggcagcaaggctcygtctcatcactgcaattccatggctctagggatggggggggggagaagctgcaa

SEQ ID NO: 64322 - DNA, 394 bp, Chicken  19866894330096_2
  misc_feature (1)..(16): n is any nucleotide
nnnnnnnnnnnnnnnngtggcccccaggctgactgcagggggaacggccggaaggcagtggggtggggctgtgggaacccccctgggacccccgagctgccttaggctcacagcagcaaacgcatgggcagtgaggggcaggtggcagcacagccccttgattggaggctgggggttcgtggtggggtctgggagccacygcattcggctgcaggctgctgaagttaatgctgtcctgggaaatgatggcttctgtcacctgcatggggtcaggtgtctccccagtcccacttcttgccyctatgggcacgtagaaatggtgtaagggcagcaaggctcygtctcatcactgcaattccatggctctagggatggggggggggagaagctgcaa

SEQ ID NO: 64323 - DNA, 354 bp, Chicken  19866894330096_3
gtggcccccaggctgactgcagggggaacggccggaaggcagtggggtggggctgtgggaacccccctgggacccccgagctgccttaggctcacagcagcaaacgcatgggcagtgaggggcaggtggcagcacagccccttgattggaggctgggggttcgtggtggggtctgggagccacygcattcggctgcaggctgctgaagttaatgctgtcctgggaaatgatggcttctgtcacctgcatggggtcaggtgtctccccagtcccacttcttgccyctatgggcacgtagaygtctcatcactgcaattccatggctctagggatggggggggggagaagctgcaa

SEQ ID NO: 64324 - DNA, 599 bp, Chicken  19866894330097_1
  misc_feature (1)..(133): n is any nucleotide
nnnnnnnnnnnnnnnnnnnnnnnnnnnnnnnnnnnnnnnnnnnnnnnnnnnnnnnnnnnnnnnnnnnnnnnnnnnnnnnnnnnnnnnnnnnnnnnnnnnnnnnnnnnnnnnnnnnnnnnnnnnnnnnnnnnnnagccaggagtcagggtttaatgacttcatgctctgcttgaggaagctgtggcgagcgctggacacggatgagaatcttcccaaaaaactggtgagttctgctgtggctcaaaggctgactgcagcagctcttgttattggaagggaaataccttaggttcacatagygcagaaattcactgtagcagctattgctcatgttgcacagattactgaggcttttaagcatgacrtgtagctttgctcttttaaagagtttgatggtacagaagagggaaggcagatggctgggaactccattttattctttgcaacagggcagttctacagtaagaggctttgaagtgctgcaggctctgctctgcagccgggagtgttggtgaagagcagctgtgatgaaggattgggttgcggccctttcctccttccccatcctgaagctctctccaagctgtttttcctgarca

SEQ ID NO: 64325 - DNA, 599 bp, Chicken  19866894330097_2
  misc_feature (1)..(68): n is any nucleotide
nnnnnnnnnnnnnnnnnnnnnnnnnnnnnnnnnnnnnnnnnnnnnnnnnnnnnnnnnnnnnnnnnnnnagccaggagtcagggtttaatgacttcatgctctgcttgaggaagctgtggcgagcgctggacacggatgagaatcttcccaaaaaactggtgagttctgctgtggctcaaaggctgactgcagcagctcttgttattggaagggaaataccttaggttcacatagygcagaaattcactgtagcagctattgctcatgttgcacagattactgaggcttttaagcatgacrtgtagctttgctcttttaaagagtttgatggtacagaagagggaaggcagatggctgggaactccattttattctttgcaacagggcagttctacagtaagaggctttgaagtgctgcaggctctgctctgcagccgggagtgttggtgaagagcagctgtgatgaaggattgggttgcggccctttcctccttccccatcctgaagctctctccaagctgtttttcctgarcagagatataaccctggatagaaatgcaaagtcagagtgctaagggcagtgccgtgtcttctctccc

SEQ ID NO: 64326 - DNA, 600 bp, Chicken  19866894330097_3
agygcagaaattcactgtagcagctattgctcatgttgcacagattactgaggcttttaagcatgacrtgtagctttgctcttttaaagagtttgatggtacagaagagggaaggcagatggctgggaactccattttattctttgcaacagggcagttctacagtaagaggctttgaagtgctgcaggctctgctctgcagccgggagtgttggtgaagagcagctgtgatgaaggattgggttgcggccctttcctccttccccatcctgaagctctctccaagctgtttttcctgarcagagatataaccctggatagaaatgcaaagtcagagtgctaagggcagtgccgtgtcttctctccccgcagcgtgcttcagctcagcacttggagtggttgaaaacagtgaaggagagccatgggtcggtggagctgtcgtcactgtccctggcagccaccatcaacagcagaggggtgtacattctcaaagcaccggctgatggccggaaggtgaggctgcttctctctgcttgagctgctgctgtgtcagactgctgttctctgatgagtatcacctgcagacagcactgctggcac

SEQ ID NO: 64327 - DNA, 600 bp, Chicken  19866894330097_4
atgcaaagtcagagtgctaagggcagtgccgtgtcttctctccccgcagcgtgcttcagctcagcacttggagtggttgaaaacagtgaaggagagccatgggtcggtggagctgtcgtcactgtccctggcagccaccatcaacagcagaggggtgtacattctcaaagcaccggctgatggccggaaggtgaggctgcttctctctgcttgagctgctgctgtgtcagactgctgttctctgatgagtatcacctgcagacagcactgctggcacgtctgaaacgtgctgtaacttcrctgccactttgcgtggtttttttggggggtctgatgcgctcttcttgctgcctcagcagtggaacctcactgcacatcagcactgatgatttaatttctgttaggtttctttggacaatgtcctgcacctcaccctgctggagagctctgagaatcacaggccatcatggaaatactctctggcagagcttcgtgagctgcagaacaaactgatgctcatgtcagcaaagggagagcaaggcctggaggtggagaagttctctgaggtcagatttcaaacccaatggcttattgacgttg

SEQ ID NO: 64328 - DNA, 600 bp, Chicken  19866894330097_5
ttccttacagacttcctgggggtattgcagttaagccttttccagggagccttttgtacagggcctgacatacctggcctggcacagagcctttgtgattggaagtctcttgtgtggttttgctggctgggactcgtcttggtaaaatcaggtggttgttgttttttttttgtcctcacacagaccttttccaacgtccaaagacttgcacaggcctttattgacctttactcagctggcaacatgctcttccgctcctggcttgcccatgtacactgctcaccaaaaagcgagttgtgygttcttatagacttcactctgagactgatcccagagctggaagggcaaggagagctggcagatgtgctccctcgcctctgcaagacgatggagagctttctggagagctggcaaagcttcatgtccaagaagcgattccagcatttctacttgaacttctacactgctgagcagctggtttatttgtgcacagagctgggacaggggcagcccagccagaaagccctgatgatgctttcgttcctaaaaagtaactgcactgcagaggacgtcctcagagcgtctgaaggccacgagccc

SEQ ID NO: 64329 - DNA, 600 bp, Chicken  19866894330106_1
ttccttgtttttgtatggaacttcctatgttccagtgtgtgcccatagccccttgtcccattgtttctcacctccaaaaagtctgtccccatcaacttgactcctgcactttagaaatttattaacagtgatgagatgctctctcagccctctcttctccagattgaagtgtcccaggtctcttagcctttcctcatttgggagatgctgcaggcccttaattctctttgtggccctttgcaggattttttctaggagatccctcttttctgaactaaggagcccagaactgggcacagygttccagatgtggcctcaccagcacagagtagagggggaagatccattgcttaaactttcggaaggaactgctcacaggtcgcagtttatatatgcggtatacagtacaaaatacctgtggacagccatttggtttacattagggtgtgaaacacagagcagaatttgtaatttcttatcagtatagcactcatcctgtcaaatgtgtcttaaattgtttagttctagacagaccattacctgataaatggcataaaagggataatgtttagctaacagcagtaaataaagaagctgaaa

SEQ ID NO: 64330 - DNA, 600 bp, Chicken  19866894330107_1
gaagctgcccatctccaacaagcagcacgggcagatccggggctaccaggtgacctacgtgaagctggaaaacaacgagccccgcgggcagcccgtcatcaaggacgtcatgctgtcggaagcacaggtacgacatggggacagcgggctggcgggcacggcaccttccctctgtgcagagggctgggctggctggacccaagcattgcttggcagatatgaagcacaggatacagccctgcctgagcagggcaaatggtttatccatgagctgtaaccggtaaaaagctaattgggaawgagttgctgtaggagagatgttgtatcgggtgatgctcctctcttaccccttctcccacacgtacctctctctgcctgcctcatcctgtgctcactccagaggatcttcagagggtcttaaacaagcttcaggtctgctacttctgtgctgmtgactgtatccagagcaaagcctccacccaggcagagcccacgggagctgcctgcctgtgggtggctctgcacactttccagctgccaggcagggcagccctgagggctcagcagaaccttccttcccttctgtttgtgcaaggcagg

SEQ ID NO: 64331 - DNA, 600 bp, Chicken  19866894330107_2
cgggcacggcaccttccctctgtgcagagggctgggctggctggacccaagcattgcttggcagatatgaagcacaggatacagccctgcctgagcagggcaaatggtttatccatgagctgtaaccggtaaaaagctaattgggaawgagttgctgtaggagagatgttgtatcgggtgatgctcctctcttaccccttctcccacacgtacctctctctgcctgcctcatcctgtgctcactccagaggatcttcagagggtcttaaacaagcttcaggtctgctacttctgtgctgmtgactgtatccagagcaaagcctccacccaggcagagcccacgggagctgcctgcctgtgggtggctctgcacactttccagctgccaggcagggcagccctgagggctcagcagaaccttccttcccttctgtttgtgcaaggcagggactctgtatccttcaccaagctgtgagccaaggccctgttcccacccggtcctccagacatggttatgggctctgtacagcccaataagttgctctgcctcttcccagtggtcagggaagttgtcggtgccctgygatgaagcacaactct

SEQ ID NO: 64332 - DNA, 600 bp, Chicken  19866894330107_3
gctacttctgtgctgmtgactgtatccagagcaaagcctccacccaggcagagcccacgggagctgcctgcctgtgggtggctctgcacactttccagctgccaggcagggcagccctgagggctcagcagaaccttccttcccttctgtttgtgcaaggcagggactctgtatccttcaccaagctgtgagccaaggccctgttcccacccggtcctccagacatggttatgggctctgtacagcccaataagttgctctgcctcttcccagtggtcagggaagttgtcggtgccctgygatgaagcacaactcttttttgcagcaagggtccttcatcctggatgacccgtgctgttctcaacaaagataatcatataaatgaagtacaggatctgctgctgttggaagcgacgagtaatcgattctgagctggcttgcttgaatgatgcccaatataaatactggagagctgcaacgattaattgatctgtctcctgaacgcagctgtgaatcatttatacgttcgtcagtggggagcgtggtgcacagaggcagccttcctccccattcatattctggaggatagaattcagtaat

SEQ ID NO: 64333 - DNA, 600 bp, Chicken  19866894330111_1
tgttccaagagacttttccttatatccaacctcaatctaccctcttgaagcttgaagccatttctcctagtgttcccctatgtacctgcatatggatgaagcctatatgaaaactccacaacattaatatcccttagacagcattcaaaatatttagtaaaatatgatacaggagaatttgagaaatctgtaacaatattctctagaccacagttgtcaaagtccatctctgtatttgctgttacctagtattcctacaaatttacacctacctgactgaactgattccattaacatcartttctagctttcaaaagctattttattaattattctaaagaaagttaacatttataactccagcctaagaacctgaacacagaatgctcaaagtttatttctaaagttgtgttttattgatgatgcatataaagaggatttaaatattcaaaaacctagtaggatatagaattgtttgacaaaatcagttttgtatctgctaattcctttcctttgagcttacaggcaaactatttattttatcaattgtttctgtaaatcttttttgagcttaagatctcagggtaaaaataaggcttt

SEQ ID NO: 64334 - DNA, 599 bp, Chicken  19866894330112_1
  misc_feature (1)..(29): n is any nucleotide
nnnnnnnnnnnnnnnnnnnnnnnnnnnnnccactaggcatgcgagatgtctgacatcattcatttagatgtagatatttagtgagatacaacaaatgaaaatgagaggaaaattagaataaatgtgtttaacaaaattagttgctctaaattatatgcccaggatactgacattttcttacagatacttggaaggcagttgcaaagaaatttgaaatgaaaagatgcaacataacttcagtcctttcttttccttatctttacctgttagaagctgttggcttgtatttgtactttttcratatgtcaggcagaatagctgtctttttagtacaaaaaaagaaatggatattatctttttaagaatagtaagaagcaatgaatggtatgaggtttcggtaaaatgttttcagttcctgacatttaatttatgtattttacttctgttaattctataaacagagattgctctctaacaggaagagcttctgaactgatcatctgatatggacctgtaatgctgaatgtgagttatactcattccttatttctggtttaagagaaagtacataattcagatggaataaaatgcttatttac

SEQ ID NO: 64335 - DNA, 541 bp, Chicken  19866894330112_2
tgtaacaacgtactaaacattttgaaatttgcaacaaaacagtgcataagactcatcagtaaattacctcgaagatgttgtgaagtactataaataaccagtggagaatattgtgaaagcaatacctcagttgatgtgatttgtgactataatttatccacatatgacttcaaaagaaaataccaagccacaaataacccaaagattagttttctcctagctgttttaatttggcaggcttgtagatgttgaaagaaatgctaaaactgaagaatgatccaccattaaatcaaatttagraacaagtgcctgatattatttatcagcttgaatgaatgtattttcacactgttatcatttatttttaacatacatgctgcatatatgtgaatttcagttttatagttcatctgagccatctttaaatttattaaagtctaaaagattcacacagttcatgtttatttcagcaacctactatcactcaaaagatccttatgccatgtatgtctatggtatgcctattattttttactcaatt

SEQ ID NO: 64336 - DNA, 600 bp, Chicken  19866894330113_1
aagattgatttacatatctgaaaagtttcttgtttcccaaagccaatataaattcttagagaaatatgtaactggaaaaaaaaactggttgatcataaacttggggcatttgaatatttattagtttctggaattctctgatgatgttttctaccccagtcgtagctcaacgcaggtcttaaaatgcagttcgcaaaaccagaaaggccaggtatgcgaacagtctgtgtttgctcctggatatgtacctcggtggagcactggctgtggtgtgggggacggcagtttgcataacatcgmctgctctcaatttcaaggagctcctcatttttattttcagatatttcttcttttcttcattagaaaagggaagagaaattaagcggcaggttattaaactattccttgcacctatgctttggaaatgacaatagagctatcacaactaaatgtgacagtggctagtaaattagctcaaatgtagactagatttgtaagaaatgcaggtcctgctgcatttcagctgctcagcttcgcttctcacacagaacacacacagcatctctgtgttttatagaaataatagcaattataagtaca

SEQ ID NO: 64337 - DNA, 600 bp, Chicken  19866894330120_1
ggttgctaatcccaaggaacaggggcacgcaatgcacaagactgtgatagaggcttggaatgcaaagcggattatcacttcagctgcagaaatgctcttattgtaaccctagtgacagaaattcgttttattcacaaaagaaattcagtaatgaaagcaatgcattcaactagacatcacctttgatgtaaaaaggaaagagtggtaaaaattgcaaacatgcgagatgaagtattaaaactgaaagcacaggaaaaattatgccatagctaagattaatcacaaaattcattactactrtctaaacttcgttatatacagcatattctcatgacttgttttactgataagacattttcataaataagggactacactctacgatagctcttctgaactttgagaaaacatacttcatcaagagtttatgccataagaaagacacgaagattgttctcctgcaactaatacattctgactggaaatctagtccacaaaaaaacctgagaaatgaacaaccccaaggtacaaatcaggattctcatcctcctctggcattcacctggaatatgaattccactgatttcaaaggtgaattta

SEQ ID NO: 64338 - DNA, 600 bp, Chicken  19866894330121_1
tgcatgtgttaatttttgttttcctagtaggctctgaagatgaagagcctgaagtaaatcgttatttgtatgtgatgtatgtataatgtgtatttgtaaggtgataaacagaacaataccaagcttattttcattatcatcatcagtataatagtgttcacttcctttcatttctatcttcaaaataaaatcagaaactattaagatggacaaaatacaaaacacaatttattattaacttctaaagttcttatgtaagaaaggagaaaaatagattacatttactttattgtaattttratatcttctctaatcttagacagcaaaacgttttgtgattgcaagtgaaattctagccattaaaaatgacaaataagtgacaaaacaaatgaaaaaagagaaacaactacaagctacaaaaattgatctacagcctgaaataatctgtttgagtgcattactttatctcattcttccagaaatttgtacatatttctttgtttcaatttgtctcatcacgtatttaacccctaggataattttcaggatcatcagaattaaagtaataaattggacaggtagatcggaaaagtttatata

SEQ ID NO: 64339 - DNA, 600 bp, Chicken  19866894330124_1
gaaatttgtagccctagttttaagtagggatctgagccaatgtgaaatcgcttctctctatttaacagttatgcacttgaaaaaggtgactatgttggaagatggtttttcttttcagtgttgctggaaataaacagtttccttcactcagatcttcccttagtttagctggccccgtgtcttggatgtgtgctttataaagtgtgctaagatatttatgtaattcttttggctataaaacagcctaggtgttctttttgtacataaatattttgggaaatgaagttgtgaagggtctgragcacagatcttacggggattggctgaaggaactaaaaaacctaaaaaaccttcacactcaatagaaatrtatgttaaaaggacagttccaaaatttagaagctaggatgactgtctctcttcagttgcagaggcaaagaatgaacacgtttggatgggtagaaaaaggttaaacgtgtaaatagaatcttttgtcttaagcaccagagaggtgcccaaagtgaggttgaacctcagcacagtttgaatgcagtgcactctgggctgttccctgcatagtcctcagtgaaagcactttta

SEQ ID NO: 64340 - DNA, 600 bp, Chicken  19866894330124_2
atgcacttgaaaaaggtgactatgttggaagatggtttttcttttcagtgttgctggaaataaacagtttccttcactcagatcttcccttagtttagctggccccgtgtcttggatgtgtgctttataaagtgtgctaagatatttatgtaattcttttggctataaaacagcctaggtgttctttttgtacataaatattttgggaaatgaagttgtgaagggtctgragcacagatcttacggggattggctgaaggaactaaaaaacctaaaaaaccttcacactcaatagaaatrtatgttaaaaggacagttccaaaatttagaagctaggatgactgtctctcttcagttgcagaggcaaagaatgaacacgtttggatgggtagaaaaaggttaaacgtgtaaatagaatcttttgtcttaagcaccagagaggtgcccaaagtgaggttgaacctcagcacagtttgaatgcagtgcactctgggctgttccctgcatagtcctcagtgaaagcacttttagatctcctggaaaggcaaacacaacataaatgtcagacttctattaaatatgcttcatggttgaaaatgg

SEQ ID NO: 64341 - DNA, 600 bp, Chicken  19866894330126_1
catgcagtatgagaatgttaatcactggaacagtatcttctcctgtaggtatattgtctcacatcagcagtgactggaccatctaaacacatgctaaggtagcccaatgtaatatttgaagcccttcaggagatacgaatttccttttttttaatgcccttttgtcctgtcattctagatgcaatgcttgcctttttcacatctaaccattttgaaattgtatggtgagatggtaaaaccaccaggtttcaggaagactctattctaataagcattgttgagcaaaagtttgaaatggtwaatgatgcccttcattcacaggcacctttgaaattaatgtgcgactgaggcagggaaaacaaggatacatttctggttttggaaatctgtgcttgtagcaatgctaactttctaaaacacaatgttaaagaaatgttgcagttttttcttcattttctttttctgattattcatataattacacgttctttcctggattcagattcatttataaattgcagctgagacagacagctcttgtaggataattgggtagtttacataaattagatcccttaggtatacccaggccaaagttaa

SEQ ID NO: 64342 - DNA, 600 bp, Chicken  19866894330133_1
tttcacaaactggcatatctttgtaaaaaaaaatatttgtgtgtgcctgatttttggcatttctctggcagccttgactgtccctgccacctacctggagatcacaccccttttctgtggcccaggatgccacttctgcccctggaaccatcaataactgccacagctgaagctgaacaatacttaatacataatttgttatggtggtggaagttgctttaattgtaccattttgcaaatgcttccttaatactttgtcagttgttgtcatgtagaatttgagaaactccactagaagtstgaaataattaagatttgtatgggaaaaaaagaatgatgatagaaaaaaatctatcaattgcttttgtcttagcaaggaagcctatttcatactaaggggatccttcaagtgctaattagatcgaaggaaatgtmttaagcttccttgcttccttattgacatttttggatttgattttacttatgcaaatgaatatggtgccatggattaatatatttgttgcaaaacaatacattaatgtcaaagttctattttcacagtggaaatcaaatggcttgaaacaaagtatgtacaaggga

SEQ ID NO: 64343 - DNA, 588 bp, Chicken  19866894330133_2
ctgcccctggaaccatcaataactgccacagctgaagctgaacaatacttaatacataatttgttatggtggtggaagttgctttaattgtaccattttgcaaatgcttccttaatactttgtcagttgttgtcatgtagaatttgagaaactccactagaagtstgaaataattaagatttgtatgggaaaaaaagaatgatgatagaaaaaaatctatcaattgcttttgtcttagcaaggaagcctatttcatactaaggggatccttcaagtgctaattagatcgaaggaaatgtmttaagcttccttgcttccttattgacatttttggatttgattttacttatgcaaatgaatatggtgccatggattaatatatttgttgcaaaacaatacattaatgtcaaagttctattttcacagtggaaatcaaatggcttgaaacaaagtatgtacaagggaaggaagtcatacagtaatgacagaaaatatgagctgcctaattggtatgaaaacgtgacaccaggatcaaatgctcactgtagcaattctatgggtgtttatgctttcaagggtacttcctca

SEQ ID NO: 64344 - DNA, 599 bp, Chicken  19866894330134_1
  misc_feature (1)..(149): n is any nucleotide
nnnnnnnnnnnnnnnnnnnnnnnnnnnnnnnnnnnnnnnnnnnnnnnnnnnnnnnnnnnnnnnnnnnnnnnnnnnnnnnnnnnnnnnnnnnnnnnnnnnnnnnnnnnnnnnnnnnnnnnnnnnnnnnnnnnnnnnnnnnnnnnnnnnnnatttggcagggaggtgattagatgtctgaagtgcaagctgaaaccagttcaagagatgcccccccttcggggtcagaagtttgcagtgaggaagattatgagccttcgtgaggaagactacgagccttcatcatcacgacctaccacgcaygcgcaaggggggggagggactgcatgctaataggctctcgggaatgtagtgaatatgtatccgaaatcctgtcaactattgattatgtattagtttgacctatatctatagcacgatttcttcagacggtgtgaaagttaggtggaaygatcycccttgcaccagggtgtacgcgcgtcaccaataaacacatacctgctctatatccttactggctatagggtctgatttccgcacatcaatttggcaccccagatgggacccactctgttcggctgcaggaccggctgagagagrgg

SEQ ID NO: 64345 - DNA, 599 bp, Chicken  19866894330134_2
  misc_feature (1)..(1): n is any nucleotide
natttggcagggaggtgattagatgtctgaagtgcaagctgaaaccagttcaagagatgcccccccttcggggtcagaagtttgcagtgaggaagattatgagccttcgtgaggaagactacgagccttcatcatcacgacctaccacgcaygcgcaaggggggggagggactgcatgctaataggctctcgggaatgtagtgaatatgtatccgaaatcctgtcaactattgattatgtattagtttgacctatatctatagcacgatttcttcagacggtgtgaaagttaggtggaaygatcycccttgcaccagggtgtacgcgcgtcaccaataaacacatacctgctctatatccttactggctatagggtctgatttccgcacatcaatttggcaccccagatgggacccactctgttcggctgcaggaccggctgagagagrggacacctttggcgcgccccaagatttcttggaaggactcccttcctcacccgatcactgcggggacagacaaggaccatccataggtggaccaggtatgtttatggaaaagggggaacccgtaaggtgtgaggagatgtcctacgcagg

SEQ ID NO: 64346 - DNA, 600 bp, Chicken  19866894330134_3
ggcagggaggtgattagatgtctgaagtgcaagctgaaaccagttcaagagatgcccccccttcggggtcagaagtttgcagtgaggaagattatgagccttcgtgaggaagactacgagccttcatcatcacgacctaccacgcaygcgcaaggggggggagggactgcatgctaataggctctcgggaatgtagtgaatatgtatccgaaatcctgtcaactattgattatgtattagtttgacctatatctatagcacgatttcttcagacggtgtgaaagttaggtggaaygatcycccttgcaccagggtgtacgcgcgtcaccaataaacacatacctgctctatatccttactggctatagggtctgatttccgcacatcaatttggcaccccagatgggacccactctgttcggctgcaggaccggctgagagagrggacacctttggcgcgccccaagatttcttggaaggactcccttcctcacccgatcactgcggggacagacaaggaccatccataggtggaccaggtatgtttatggaaaagggggaacccgtaaggtgtgaggagatgtcctacgcagggtatga

SEQ ID NO: 64347 - DNA, 600 bp, Chicken  19866894330134_4
caygcgcaaggggggggagggactgcatgctaataggctctcgggaatgtagtgaatatgtatccgaaatcctgtcaactattgattatgtattagtttgacctatatctatagcacgatttcttcagacggtgtgaaagttaggtggaaygatcycccttgcaccagggtgtacgcgcgtcaccaataaacacatacctgctctatatccttactggctatagggtctgatttccgcacatcaatttggcaccccagatgggacccactctgttcggctgcaggaccggctgagagagrggacacctttggcgcgccccaagatttcttggaaggactcccttcctcacccgatcactgcggggacagacaaggaccatccataggtggaccaggtatgtttatggaaaagggggaacccgtaaggtgtgaggagatgtcctacgcagggtatgaaggagcatgcctgctcccccccccccgaggtatgtgagctcacaggttaggttgccggctggggtaggaagaatccttgggtagttcctacaaaggggacctgtaagtcgtatgcaacagctctcccttaggtgattggtaaca

SEQ ID NO: 64348 - DNA, 600 bp, Chicken  19866894330134_5
tacgcgcgtcaccaataaacacatacctgctctatatccttactggctatagggtctgatttccgcacatcaatttggcaccccagatgggacccactctgttcggctgcaggaccggctgagagagrggacacctttggcgcgccccaagatttcttggaaggactcccttcctcacccgatcactgcggggacagacaaggaccatccataggtggaccaggtatgtttatggaaaagggggaacccgtaaggtgtgaggagatgtcctacgcagggtatgaaggagcatgcctgctrccccccccccgaggtatgtgagctcacaggttaggttgccggctggggtaggaagaatccttgggtagttcctacaaaggggacctgtaagtcgtatgcaacagctctcccttaggtgattggtaacagcagggattttgtcaaatgataacgtggattctcctggagatagtagtgggagttataggttgtactattgttatcaccatttgctgaatgttcggtaccgtgtatctaatcatttcaggtcaaactgactttcagaaaaatcttaaagcttgcagctgattgaccaatgta

SEQ ID NO: 64349 - DNA, 599 bp, Chicken  19866894330147_1
  misc_feature (1)..(16): n is any nucleotide
nnnnnnnnnnnnnnnncattgggtatatacttcagataaatattctgtaaatttcagctctcagagtagaagaccctgcaagactattttctttcaactttgcacaaaatgctaattaaactataaagtagtttttgtaatgactatctataataaacatgctctcccttgtaaggaaaagttgttagaacgttgctttcataggaaaaactgaacttagacaagtctctaacttaagaccatacttaattggatttccaaagtagcaaaatccaggcctaaactactttccagagcttraaaggarggaaccttataagagactacaatctttattttgatttaaatataaacaaataaaaaacagattattccccaccaaaccaatttacatgctgaacattgaggtttaaatgttctaataactattatgtaygtataaatttgttagtattttaaaaataaaacctattaaatcatttggaaagaagactagactaaccccatgagttttgggtccacrcaacaagattctcaaagatttccatctgaatgaaaagctatactaacactactccaaatgtcactcacaagagact

SEQ ID NO: 64350 - DNA, 599 bp, Chicken  19866894330147_2
  misc_feature (1)..(9): n is any nucleotide
nnnnnnnnncattgggtatatacttcagataaatattctgtaaatttcagctctcagagtagaagaccctgcaagactattttctttcaactttgcacaaaatgctaattaaactataaagtagtttttgtaatgactatctataataaacatgctctcccttgtaaggaaaagttgttagaacgttgctttcataggaaaaactgaacttagacaagtctctaacttaagaccatacttaattggatttccaaagtagcaaaatccaggcctaaactactttccagagcttraaaggarggaaccttataagagactacaatctttattttgatttaaatataaacaaataaaaaacagattattccccaccaaaccaatttacatgctgaacattgaggtttaaatgttctaataactattatgtaygtataaatttgttagtattttaaaaataaaacctattaaatcatttggaaagaagactagactaaccccatgagttttgggtccacrcaacaagattctcaaagatttccatctgaatgaaaagctatactaacactactccaaatgtcactcacaagagactgctttca

SEQ ID NO: 64351 - DNA, 600 bp, Chicken  19866894330147_3
gtaatgactatctataataaacatgctctcccttgtaaggaaaagttgttagaacgttgctttcataggaaaaactgaacttagacaagtctctaacttaagaccatacttaattggatttccaaagtagcaaaatccaggcctaaactactttccagagcttraaaggarggaaccttataagagactacaatctttattttgatttaaatataaacaaataaaaaacagattattccccaccaaaccaatttacatgctgaacattgaggtttaaatgttctaataactattatgtaygtataaatttgttagtattttaaaaataaaacctattaaatcatttggaaagaagactagactaaccccatgagttttgggtccacrcaacaagattctcaaagatttccatctgaatgaaaagctatactaacactactccaaatgtcactcacaagagactgctttcatatttactgtctaaatatattcaagatgttctaagcttgctctcactgatgcctaaataaacttctggtatgaatgatgacaagttatttttttgccatggactaaagcaatagctttactgatagacat

SEQ ID NO: 64352 - DNA, 600 bp, Chicken  19866894330147_4
agtctctaacttaagaccatacttaattggatttccaaagtagcaaaatccaggcctaaactactttccagagcttraaaggarggaaccttataagagactacaatctttattttgatttaaatataaacaaataaaaaacagattattccccaccaaaccaatttacatgctgaacattgaggtttaaatgttctaataactattatgtaygtataaatttgttagtattttaaaaataaaacctattaaatcatttggaaagaagactagactaaccccatgagttttgggtccacrcaacaagattctcaaagatttccatctgaatgaaaagctatactaacactactccaaatgtcactcacaagagactgctttcatatttactgtctaaatatattcaagatgttctaagcttgctctcactgatgcctaaataaacttctggtatgaatgatgacaagttatttttttgccatggactaaagcaatagctttactgatagacatttcctgcagggcaatgttttaccttctcattgaaggatgaaagatataccacaggaacaatattttttgtatttctctcccttaaaa

SEQ ID NO: 64353 - DNA, 600 bp, Chicken  19866894330147_5
gattctcaaagatttccatctgaatgaaaagctatactaacactactccaaatgtcactcacaagagactgctttcatatttactgtctaaatatattcaagatgttctaagcttgctctcactgatgcctaaataaacttctggtatgaatgatgacaagttatttttttgccatggactaaagcaatagctttactgatagacatttcctgcagggcaatgttttaccttctcattgaaggatgaaagatataccacaggaacaatattttttgtatttctctcccttaaaaagaaargaaacataatatgtgcaatgatttactagcatatgtctttctcttgatgaaatagatagaattttcataatagtcacaaaaattgactagcagatgacaaggtaaacatccatttaatttaatatccagtccctcagacatcagaaatggaacttccctagaatatactccaaatcctcagtataggtcaatcctatagctcagtgactttaatgcagcagcgatgattttggctttctattccctttcatggaatttccctcccacccctcccattttttcctaaacccaagtaaactt

SEQ ID NO: 64354 - DNA, 599 bp, Chicken  19866894330148_1
  misc_feature (1)..(100): n is any nucleotide
nnnnnnnnnnnnnnnnnnnnnnnnnnnnnnnnnnnnnnnnnnnnnnnnnnnnnnnnnnnnnnnnnnnnnnnnnnnnnnnnnnnnnnnnnnnnnnnnnnnngacagatctgaaaacatactgagacttactgacttttaagactcaccgcaaactggcacgatagcttcctcttctgaatgactggactttctcaagatttggctcaaccactttattttctgctgctttagaatacagtacatacagttcttcagtttttgtgctaaatttacataaaacctaactcctatttaacgagygcaatctccaaatcgtaactgaaatactttgtagaaagtgaggaatataatacaatgttgatgctcaacctacatacaccgtaagttttatatttgcaatataccttataaagataattgaatattgggctatctcacttgaggtgtgactcctgaaggctgtttccctgttttggtactgcagttgatctcttcttttaagacagtcatcaccaagttatgatgtttgcaaaattaaaacaagtcattytcttagaccttcatttccagaagctttgattcaaatttgcttccagtga

SEQ ID NO: 64355 - DNA, 600 bp, Chicken  19866894330148_2
ttcagtttttgtgctaaatttacataaaacctaactcctatttaacgagygcaatctccaaatcgtaactgaaatactttgtagaaagtgaggaatataatacaatgttgatgctcaacctacatacaccgtaagttttatatttgcaatataccttataaagataattgaatattgggctatctcacttgaggtgtgactcctgaaggctgtttccctgttttggtactgcagttgatctcttcttttaagacagtcatcaccaagttatgatgtttgcaaaattaaaacaagtcattytcttagaccttcatttccagaagctttgattcaaatttgcttccagtgaaataaatagagtgatttcagcatagtctgtgattttcttgcatttcaaatgtagcatgtctggactatcagcacaaaatcaagatagaaaatggcagggtattgcaggtcaggattattgtttcagggcagatctatatcaggaaggtagttcagtgcatatgccttaaaaaactttggatagagctatcaatgtattactttgatgaatgctaaatttcagccataaaaaaatccagggagagtgggaaa

SEQ ID NO: 64356 - DNA, 600 bp, Chicken  19866894330155_1
gacacaacaaaagcaagccttgcataatggcattttggcagaactctttttctatcccagaaagccctttaaattaagatatttttgatttaatataaatcaaatgtcttgacgaatgcaggacctcataaaagctgaaaggcaaattcacaccaaatgagtttattcaataattactatgacaaagagcagaagaaaataactaaaagcaaaagaaacagataggagaggagcatttttatgcatgtattctagcaagcatttgtgttaggatgaccccttatattcttcatcccctcyacatgtacacargatggggaccaggctacaccatgtgtgccacctgaatcacagagtctggcttcttttaggtgagggatctaaaacttaggcccagtcccctagcagccaaggtcagaccaacttgatttgccttcttcaggaggacaggcgacccatagtaagctgcctcctgcctgcgtgttggcayggagatctctccccaaacagaggcctcttaaaaggttcrgtctgtgtttttatgtcttagacaaaatcaatagcacattttcattgtactggagtgagctgatgcttgct

SEQ ID NO: 64357 - DNA, 600 bp, Chicken  19866894330155_2
gcaagccttgcataatggcattttggcagaactctttttctatcccagaaagccctttaaattaagatatttttgatttaatataaatcaaatgtcttgacgaatgcaggacctcataaaagctgaaaggcaaattcacaccaaatgagtttattcaataattactatgacaaagagcagaagaaaataactaaaagcaaaagaaacagataggagaggagcatttttatgcatgtattctagcaagcatttgtgttaggatgaccccttatattcttcatcccctcyacatgtacacargatggggaccaggctacaccatgtgtgccacctgaatcacagagtctggcttcttttaggtgagggatctaaaacttaggcccagtcccctagcagccaaggtcagaccaacttgatttgccttcttcaggaggacaggcgacccatagtaagctgcctcctgcctgcgtgttggcayggagatctctccccaaacagaggcctcttaaaaggttcrgtctgtgtttttatgtcttagacaaaatcaatagcacattttcattgtactggagtgagctgatgcttgctgagaacaaaaca

SEQ ID NO: 64358 - DNA, 600 bp, Chicken  19866894330155_3
agaagaaaataactaaaagcaaaagaaacagataggagaggagcatttttatgcatgtattctagcaagcatttgtgttaggatgaccccttatattcttcatcccctcyacatgtacacargatggggaccaggctacaccatgtgtgccacctgaatcacagagtctggcttcttttaggtgagggatctaaaacttaggcccagtcccctagcagccaaggtcagaccaacttgatttgccttcttcaggaggacaggcgacccatagtaagctgcctcctgcctgcgtgttggcayggagatctctccccaaacagaggcctcttaaaaggttcrgtctgtgtttttatgtcttagacaaaatcaatagcacattttcattgtactggagtgagctgatgcttgctgagaacaaaacactacaataccttttcgaataagacattatattcctttcggagtttagcagcaactttcttctcccttattaaagcgtccttaatgtctaacagcttttcccggagctggatggtgttttggaagagtgccttatcacagtctgagaaggaaaggatcagaagatagcttagttttgtt

SEQ ID NO: 64359 - DNA, 600 bp, Chicken  19866894330155_4
ggagcatttttatgcatgtattctagcaagcatttgtgttaggatgaccccttatattcttcatcccctcyacatgtacacargatggggaccaggctacaccatgtgtgccacctgaatcacagagtctggcttcttttaggtgagggatctaaaacttaggcccagtcccctagcagccaaggtcagaccaacttgatttgccttcttcaggaggacaggcgacccatagtaagctgcctcctgcctgcgtgttggcayggagatctctccccaaacagaggcctcttaaaaggttcrgtctgtgtttttatgtcttagacaaaatcaatagcacattttcattgtactggagtgagctgatgcttgctgagaacaaaacactacaataccttttcgaataagacattatattcctttcggagtttagcagcaactttcttctcccttattaaagcgtccttaatgtctaacagcttttcccggagctggatggtgttttggaagagtgccttatcacagtctgagaaggaaaggatcagaagatagcttagttttgttataactgtaccattcaagcttgagttagtagcttccctt

SEQ ID NO: 64360 - DNA, 600 bp, Chicken  19866894330160_1
tttgaatggaggtcttggaagacgaggtgctcaggtttggtctctcttcccaagagcagccaggctgtgctgtggttggtttcaaatgaatggccctgggtgcttggggtggagaaatgcttggagtgagtcttggtttgaaacttctactgtgatccacctcgagttttaatagaattgtggtagtgttaccctcgccactttaattactttctgtctcatttatatatgttgatggctccaattctcatagctcaaaggaaactttctgtaggaaccagcagctagtgctgttaaaawtgagccctcaccagatgtccaaagcctcctttaaagaagaggcctggcataggccgcatttattaggagtaattaattgtcctattaaaaaacctaaatgttttggcatttcattaataatacataagcaaccaacaggctgtttgtagtgtgttactttgttaaggctgctgtaaaaattgtcattattgatatatttcatgtttataattactcatctgtgacgcactcagtctgttatgaataatccattgtatattgttttctcaatagrctgcttgctcagcgtgctgggggtgc

SEQ ID NO: 64361 - DNA, 403 bp, Chicken  19866894330160_2
gaaccagcagctagtgctgttaaaawtgagccctcaccagatgtccaaagcctcctttaaagaagaggcctggcataggccgcatttattaggagtaattaattgtcctattaaaaaacctaaatgttttggcatttcattaataatacataagcaaccaacaggctgtttgtagtgtgttactttgttaaggctgctgtaaaaattgtcattattgatatatttcatgtttataattactcatctgtgacgcactcagtctgttatgaataatccattgtatattgttttctcaatagrctgcttgctcagcgtgctgggggtgccagcaattgcttctaataatgtcttcatgtctgatttatgcgtgtgaaatgagtgcaactggacgtgagtaagggaa

SEQ ID NO: 64362 - DNA, 600 bp, Chicken  19866894330161_1
gagccaaagtgatccagcattaacgcttccttcagctgatgaaggtgatggacccgctgaacttactctctcagtagcagagacatcagtgatttccatgttacaggaattatcacacagaagtaggtcaacagctgtgctcagatgtgaagaggtgtgtgcaagaatagacatagcgaaaataaaaaggtctaaaaaaatgacaaaaatgatgaggtatatgggaggaagaatggtgactgtggactttacacactgtaaggttaaaaagatgaagtctgtgaagtttgaaaaggagargaaaagaagagatattataaaagtctacaaaataatgagtgagcctgagaatcctacacagatctatttatttcccacttacccctaccttttgctcgctgttctactcctcctctttccagttcttccaaaatgtgttctgctctccttcccatttctattttccctcttatttctgattctcttcacctcatttccacctttcttctctatatactctttctcataatataaataccaaataaataataaataacaaaaagattgaatatcaatactaaatgtattgcattaaaaaaa

SEQ ID NO: 64363 - DNA, 600 bp, Chicken  19866894330161_2
agccaaagtgatccagcattaacgcttccttcagctgatgaaggtgatggacccgctgaacttactctctcagtagcagagacatcagtgatttccatgttacaggaattatcacacagaagtaggtcaacagctgtgctcagatgtgaagaggtgtgtgcaagaatagacatagcgaaaataaaaaggtctaaaaaaatgacaaaaatgatgaggtatatgggaggaagaatggtgactgtggactttacacactgtaaggttaaaaagatgaagtctgtgaagtttgaaaaggagaaraaaagaagagatattataaaagtctacaaaataatgagtgagcctgagaatcctacacagatctatttatttcccacttacccctaccttttgctcgctgttctactcctcctctttccagttcttccaaaatgtgttctgctctccttcccatttctattttccctcttatttctgattctcttcacctcatttccacctttcttctctatatactctttctcataatataaataccaaataaataataaataacaaaaagattgaatatcaatactaaatgtattgcattaaaaaaat

SEQ ID NO: 64364 - DNA, 600 bp, Chicken  19866894330161_3
gccaaagtgatccagcattaacgcttccttcagctgatgaaggtgatggacccgctgaacttactctctcagtagcagagacatcagtgatttccatgttacaggaattatcacacagaagtaggtcaacagctgtgctcagatgtgaagaggtgtgtgcaagaatagacatagcgaaaataaaaaggtctaaaaaaatgacaaaaatgatgaggtatatgggaggaagaatggtgactgtggactttacacactgtaaggttaaaaagatgaagtctgtgaagtttgaaaaggagaagraaagaagagatattataaaagtctacaaaataatgagtgagcctgagaatcctacacagatctatttatttcccacttacccctaccttttgctcgctgttctactcctcctctttccagttcttccaaaatgtgttctgctctccttcccatttctattttccctcttatttctgattctcttcacctcatttccacctttcttctctatatactctttctcataatataaataccaaataaataataaataacaaaaagattgaatatcaatactaaatgtattgcattaaaaaaata

SEQ ID NO: 64365 - DNA, 600 bp, Chicken  19866894330161_4
ccaaagtgatccagcattaacgcttccttcagctgatgaaggtgatggacccgctgaacttactctctcagtagcagagacatcagtgatttccatgttacaggaattatcacacagaagtaggtcaacagctgtgctcagatgtgaagaggtgtgtgcaagaatagacatagcgaaaataaaaaggtctaaaaaaatgacaaaaatgatgaggtatatgggaggaagaatggtgactgtggactttacacactgtaaggttaaaaagatgaagtctgtgaagtttgaaaaggagaagaraagaagagatattataaaagtctacaaaataatgagtgagcctgagaatcctacacagatctatttatttcccacttacccctaccttttgctcgctgttctactcctcctctttccagttcttccaaaatgtgttctgctctccttcccatttctattttccctcttatttctgattctcttcacctcatttccacctttcttctctatatactctttctcataatataaataccaaataaataataaataacaaaaagattgaatatcaatactaaatgtattgcattaaaaaaataa

SEQ ID NO: 64366 - DNA, 600 bp, Chicken  19866894330162_1
gatgaggagtatggcactaaagaaggaagaaaatttgatggaaaaaaaagaagagttggcagtacggagaaccaagtccaagtactagcctgcgggttgcacaaattatccatacaattagggtaatatgttccagggcagttactgtggaagaagtcccataggacttgaagaagatttattaaaaaaatccaaccgcataaaataaaaacaaaatgatgaacagatgaaagatcccattttctactcttcaacaaaccatgcctgaaatgtgtgatgatttcttatgtcttcagtatytttctggcccctttttatcaagagtattctctcagttgtttttcctttttggttgtgtgtgtataaatcatcacggctggcaccttcttgttgaccttatctgcactaagaagtctcatgcaaagtagttcatgatatggtggcaacatctaaactgtattttacatcaatgctcataaatcattatttgtagcactgtgagtgcactattgctggagacacatacaaattaccatgctggaaggacaactggtgagatttatgttgtatcgttgcctgttcttccaataggaagttctc

SEQ ID NO: 64367 - DNA, 600 bp, Chicken  19866894330171_1
tggaacgggctgccaagggctgtgggcacggcccccagtgccagagttatgggtgcatctggacagtgctcacatacaaagggtttgatctgtcgtggtcctgtgtggagcctggagctggactcagtgatcttgtgtgtcccttccaactcaggatatcctttgattctatgattctgtggttcttgtggcttggatgagagtcaggctttggaaccattagctataggcctaccactgacatgcggtgtgctgctgcagcacagacctcagcagagaggaaagcagaggtcctgcacrctgtccaggccttgccagcaccgacctgcatggacacctacatgtgccaaaactgatcccagacgagtccgctttgtacaatcatcagcttgcactgtacaacaaaagaagaaaccctcatttccacgcaagcagaaggcaatccttccagatttaatgcggcagccacgtgcaatgacacacacagtccatcacaggagcaggtagcagggcactctgctctcattcatatgaatataatgcccacagcagcacaacgcatcagcatttttagagcaaacagttttagtttcattgccc

SEQ ID NO: 64368 - DNA, 600 bp, Chicken  19866894330172_1
ttaagaggggtaaaccatgagttggcttgatttggaactaatgaaggatgttaatagcaggctattattattgcttaccaccagctgttgatgtaccatcacaggaccatgtgagtccatgagtcacccttctttaccacagttttattgctgagcatgaccccatatggtatggaacatcactttggtcagtttgggttagctgtcatggctgtacgccctcttagatccttgtaaacccccagtttccttgctgacaggacagcataagaatcagaaaagtcctgtctctgtgtaagyatttatcagtaacaactgaaaatatttttgtgttattacaactgttttcatcaaaaatccaaaacacagcatcataagaccctctacaaagaaaatgaacaatccctgtcaaaaacaattttgcacttcagaagaaattgcagaaagcagtacttatgagaaaagggcagagatttggaggtctgggccaaaagatgccttataattttaaccaaaggcaaatgcaaagccctgcacattggatgtatcagtgcagattgtagtgggtggctatatagcagctctgctgaaaatgactta

SEQ ID NO: 64369 - DNA, 600 bp, Chicken  19866894330173_1
aatgggttaagggtgtctatgacacaggtgaaaagaaaccccccccagagaagcttggtgtggcagcagaaaagggatcggtgatcaaacccaaacatgaaagcaatggttgtactggttttgtactggcttcacaccccccaaataaggtgaaattgctcctcgccagacccaaagaggtaatattcaaatggttacatttcatggaataggtaagctttcaagaagtgatttggagaaggaaatggagggcattgacacacattaatcagaaggcagcatggaaagaggcccccagayggaagtggggaaagtagacaaaaggagcagtcacagcagatcaccaagggcaggaaagaacggagcagaaataaaagtgctattttaggtaaggtatgaaacgtgaagggcttgtagagttcaaatacttctgggggcaaaagaagagatgaatacaacacagccgggaaggcaggaaataaactgtatgaggtggtgggcttgcctgagggatttgaagcagactgagggactgggagaaaaatgggcccagttcaaagactgggatatgataactgaagcaagaaacgaccagagaaa

SEQ ID NO: 64370 - DNA, 600 bp, Chicken  19866894330173_2
attttaggtaaggtatgaaacgtgaagggcttgtagagttcaaatacttctgggggcaaaagaagagatgaatacaacacagccgggaaggcaggaaataaactgtatgaggtggtgggcttgcctgagggatttgaagcagactgagggactgggagaaaaatgggcccagttcaaagactgggatatgataactgaagcaagaaacgaccagagaaaggcttcaggttttggcagaggagacagtaaggagactatacctgttgaagtaccaggaagggaatttagatcagctcaggrggaaatggaaagacaaaagttccactgaataacatctcctagccatttaaaaatgttcctgtttcctttaaagggaaagcataatgaggaaacaggaatgctatagtaaaaagagagacaaggaaatttttcaggactagaagagttttttatgataagggcagtgaggtgctagaacacgttgcccagagaggtggtggatgccccgtccctggaggcatccaatgtcaagctgaacagggctctgagcaacctgatgtagctgtaggggtcccggttcattacaggggagttggacta

SEQ ID NO: 64371 - DNA, 600 bp, Chicken  19866894330175_1
gctccagaccacccgccccccccccgctccaggcacccacacactcacgtagcccacccattggttcaggctgtgaccttggaattccactacacgggactatcaaaggagaactttattcctgaatattaaatttttctttgaaacaattcagatgtggttagagttagaaagctgacattttgcacatacagataatgttttccttctcaataattctttttctgcattgcttcaggataaagacacttgttttctttccacaaatatgtttctacattttagtaccaagtcaagaayttaaatttaatgctagtttatccctaatcaaaacggaggaacagttcatttgaagggacaaattctgcctttgcagatattagaaaacactttgtcagttggcagcttcaaatcagaggaattgttattgtaatagtaaagatttaataagcaagcaaggatagatatgtagcataactttctattttacataaaaaaatataccagagacatatcaagaaataagacactattttgtctcatgatcattcagtttgtcaattataacctagtttcattaaaaaaaaaaaaaaagtatgc

SEQ ID NO: 64372 - DNA, 599 bp, Chicken  19866894330178_1
  misc_feature (1)..(109): n is any nucleotide
nnnnnnnnnnnnnnnnnnnnnnnnnnnnnnnnnnnnnnnnnnnnnnnnnnnnnnnnnnnnnnnnnnnnnnnnnnnnnnnnnnnnnnnnnnnnnnnnnnnnnnnnnnnnnggtgtgactggtggcagaatatggcttattaactctgcattaaagaaacgaataatctgaatacctttaattactgtggctgctgaaatctgctcctgtggtgtatataaattattttttcttgttttaactctctcaacagcaaaaataaagtaggaaagccaattttcttcctgagtaaagcaatatcwttagttctcatttccagagagactgatgtttcaggcccaagcaaatacatgaatacatttttacttagggatattgccaaagccttaaccctaaaattatggtgctgtcagggagcaactaaccccctctacagctataataatgctttttctttcttgtttttggtagtactccaaccctcagagatgctgtagattccaaagtaaagcataaagagtatctataaatagaaaataaaccatgatatagctgcaatgaaagggtttctttctctcaattttaatgcaggctaaaatct

SEQ ID NO: 64373 - DNA, 599 bp, Chicken  19866894330181_1
  misc_feature (1)..(64): n is any nucleotide
nnnnnnnnnnnnnnnnnnnnnnnnnnnnnnnnnnnnnnnnnnnnnnnnnnnnnnnnnnnnnnnnctgaaggtgatggttggggtatctgtgacacgtatgatatctcagcttgttttcttggctaacagcagtgggtcaggtgcgaggtaaggaaaataaggttgcagtgcctctctgttcttgcatgctgcgtactaaaggagctatggaggactgcattggaactgctcatgatcatcctgggtcgccttgggcacctctaaatacagtaattcttccccataaggttttactttaartgtgtttggtagggtttgaggcctcgtagtgcctgcttttgccttatttcctgtgactcctatgggattgttggtgctccatcccattgccacgcactgccccagctctgctgctgacccatcctggggacacatcccaagctctccgcatctccagcttaatgcactgcaaccttctctaccagagagctgtcagcaaggatctgtgcctggaggaaacagcccaggcagagtaatgagagcagaatcagtgctaaatggggaacagccgaagtgctgcagcatagaggtcaattgta

SEQ ID NO: 64374 - DNA, 599 bp, Chicken  19866894330183_1
  misc_feature (1)..(150): n is any nucleotide
nnnnnnnnnnnnnnnnnnnnnnnnnnnnnnnnnnnnnnnnnnnnnnnnnnnnnnnnnnnnnnnnnnnnnnnnnnnnnnnnnnnnnnnnnnnnnnnnnnnnnnnnnnnnnnnnnnnnnnnnnnnnnnnnnnnnnnnnnnnnnnnnnnnnnnccgccgggatccctctttgacagctcgccgctccgtcgggccccgccgccctgcccggctcccgccgcctccccataggcgccgcacccccacgtgagccctcccgcagccctccggggcggggcgggacccataagaggccaccggggyggccccggcctcacagaaccgttttccccgttttcgccccgctggacaaatacctctgaccccgctcggtgagccccgtgatggagctccggcgtgcggggtggccccaaaacccaccgcgtgccccccccttttgcacacggrctgctcatcccttccagggcagagaaacrttcgggggtggcaaacgacttctggggggcttggcttcggggtgaggtcggggcttctcggacggggatgtggagcggggagtgggaactgcggggggaccccacgcagcagaggagcgccagaag

SEQ ID NO: 64375 - DNA, 490 bp, Chicken  19866894330183_2
  misc_feature (1)..(6): n is any nucleotide
nnnnnnccgccgggatccctctttgacagctcgccgctccgtcgggccccgccgccctgcccggctcccgccgcctccccataggcgccgcacccccacgtgagccctcccgcagccctccggggcggggcgggacccataagaggccaccggggyggccccggcctcacagaaccgttttccccgttttcgccccgctggacaaatacctctgaccccgctcggtgagccccgtgatggagctccggcgtgcggggtggccccaaaacccaccgcgtgccccccccttttgcacacggrctgctcatcccttccagggcagagaaacrttcgggggtggcaaacgacttctggggggcttggcttcggggtgaggtcggggcttctcggacggggatgtggagcggggagtgggaactgcggggggaccccacgcagcagaggagcgccagaagctctccgcgccccctgcccgggggatgcggccgtg

SEQ ID NO: 64376 - DNA, 461 bp, Chicken  19866894330183_3
ccgccgggatccctctttgacagctcgccgctccgtcgggccccgccgccctgcccggctcccgccgcctccccataggcgccgcacccccacgtgagccctcccgcagccctccggggcggggcgggacccataagaggccaccggggyggccccggcctcacagaaccgttttccccgttttcgccccgctggacaaatacctctgaccccgctcggtgagccccgtgatggagctccggcgtgcggggtggccccaaaacccaccgcgtgccccccccttttgcacacggrctgctrttcgggggtggcaaacgacttctggggggcttggcttcggggtgaggtcggggcttctcggacggggatgtggagcggggagtgggaactgcggggggaccccacgcagcagaggagcgccagaagctctccgcgccccctgcccgggggatgcggccgtg

SEQ ID NO: 64377 - DNA, 600 bp, Chicken  19866894330184_1
ttcaagtttgatttgcaaacaaagatttcatagattatgtagagtggagaatatattcttctggggtatggaagttacctaataaagtgtccagaaacaatatgtggcactggatttgagacaaaaggatctctacttaaggactccaaatctaaagcccaattatgacatcaagagacagcatgaaagtattttactgttgatcattttaataagggataacaagcttcttctgatgaagcccactttaggaagggaatgaagagtgctgcagcgaaggaaatgcaggagtgacgggaraggagaggagacaagtaggcaagagggagacaaagagaatagggaaaacgactgaagatcaaacaccaacagagcatattacccataatgatgaaatagttgtgcttttgtatctataatgatcagagaatacaaaagaggcaaaatttgcagatgatataattactaatgatttatatcagttgctttaatgaaatgtattgcttttgtctacaaacatggctggcttctaacagccatcagaggtggctgaaagttctctgtaagaaagtttggctggtttgggattttgtctgtttt

SEQ ID NO: 64378 - DNA, 576 bp, Chicken  19866894330186_1
aatgacattaatatctattaattaaaccatcagcaaaaggcttaacaacttttcatgctaaattgtgctatttctggaatgaggatagcagccagctggtacatcaagactattaaagaacaaaaagttagcaccttcaaattcaatttaaaaaggtatactgtaactaaagaaacaaataaaataaaagctctattaaatctgtgagaatgttttctgaggcaaatgtgacttaacagagtttttatgaaattataaataaccactgtaacggtgtatcaatataattgctattatctrttgcatttattacaggtagtttggaagagaaaatggaaaaatatggaagagtgtaattccaccagagcaatgacttcttctcttctgagtttctatttgcataagaaaactataaaaaggaaagggcagcacagatttgtttgtttgtttgaacaagtcatttgattttggagaactgtcttggtttttcaaaagtcttttattttggaattaaactctgcatcttggacaaggcagacaggcagttaattagccaaaaaaaaagggggggggggg

SEQ ID NO: 64379 - DNA, 600 bp, Chicken  19866894330190_1
tcaaatagcactagctatgcttccccagtatgcgtttgcccttggagtgataattctaataatagattcatagaatcataaaacatcccaaattggaagggatccagcaagtccacctccttcatcaagcccaacttgtaagggcttttacattcccattggagtccttcactgaacgtcccaatacctttctgaaggaactgcccacatcccactggagaagacagttcaagaggtgtgttacagataaagtttcactcactactctcacgcatccccttttttggctttctggatggytctgaacatgcccagacctgcttattttttatatccattgaattccattacttcagtgaagttactttggtgtctcagaaatcagggtacagttgggtctatcacaggcattccctatgtcatgattractcagacataacatggtagaaaactctaggcagtgttcagcaaagaggctgcctatgcaamccaagcacagaatrgactttcagatttctgtaggrgtttctcagcacctttgtatatcggagtcttcttccagaacttctggcactttagttaatgaatgaaacaaatgg

SEQ ID NO: 64380 - DNA, 600 bp, Chicken  19866894330190_2
gcccaacttgtaagggcttttacattcccattggagtccttcactgaacgtcccaatacctttctgaaggaactgcccacatcccactggagaagacagttcaagaggtgtgttacagataaagtttcactcactactctcacgcatccccttttttggctttctggatggytctgaacatgcccagacctgcttattttttatatccattgaattccattacttcagtgaagttactttggtgtctcagaaatcagggtacagttgggtctatcacaggcattccctatgtcatgattractcagacataacatggtagaaaactctaggcagtgttcagcaaagaggctgcctatgcaamccaagcacagaatrgactttcagatttctgtaggrgtttctcagcacctttgtatatcggagtcttcttccagaacttctggcactttagttaatgaatgaaacaaatggatttttttttgcctagtttgacccgcttcaatcctgaccttgaagatcaactgtgaactagtggctgatgtaaaatgaaacttgaggaatcccatactaagtttcttgtaatcctatttggattctgt

SEQ ID NO: 64381 - DNA, 600 bp, Chicken  19866894330190_3
tctgaaggaactgcccacatcccactggagaagacagttcaagaggtgtgttacagataaagtttcactcactactctcacgcatccccttttttggctttctggatggytctgaacatgcccagacctgcttattttttatatccattgaattccattacttcagtgaagttactttggtgtctcagaaatcagggtacagttgggtctatcacaggcattccctatgtcatgattractcagacataacatggtagaaaactctaggcagtgttcagcaaagaggctgcctatgcaamccaagcacagaatrgactttcagatttctgtaggrgtttctcagcacctttgtatatcggagtcttcttccagaacttctggcactttagttaatgaatgaaacaaatggatttttttttgcctagtttgacccgcttcaatcctgaccttgaagatcaactgtgaactagtggctgatgtaaaatgaaacttgaggaatcccatactaagtttcttgtaatcctatttggattctgttttcatttccttctgcttaatcccaacataccaactgaaacaaccgtgcaaactgctcggca

SEQ ID NO: 64382 - DNA, 600 bp, Chicken  19866894330190_4
ccacatcccactggagaagacagttcaagaggtgtgttacagataaagtttcactcactactctcacgcatccccttttttggctttctggatggytctgaacatgcccagacctgcttattttttatatccattgaattccattacttcagtgaagttactttggtgtctcagaaatcagggtacagttgggtctatcacaggcattccctatgtcatgattractcagacataacatggtagaaaactctaggcagtgttcagcaaagaggctgcctatgcaamccaagcacagaatrgactttcagatttctgtaggrgtttctcagcacctttgtatatcggagtcttcttccagaacttctggcactttagttaatgaatgaaacaaatggatttttttttgcctagtttgacccgcttcaatcctgaccttgaagatcaactgtgaactagtggctgatgtaaaatgaaacttgaggaatcccatactaagtttcttgtaatcctatttggattctgttttcatttccttctgcttaatcccaacataccaactgaaacaaccgtgcaaactgctcggcaccagggaaaaatta

SEQ ID NO: 64383 - DNA, 600 bp, Chicken  19866894330190_5
agttcaagaggtgtgttacagataaagtttcactcactactctcacgcatccccttttttggctttctggatggytctgaacatgcccagacctgcttattttttatatccattgaattccattacttcagtgaagttactttggtgtctcagaaatcagggtacagttgggtctatcacaggcattccctatgtcatgattractcagacataacatggtagaaaactctaggcagtgttcagcaaagaggctgcctatgcaamccaagcacagaatrgactttcagatttctgtaggrgtttctcagcacctttgtatatcggagtcttcttccagaacttctggcactttagttaatgaatgaaacaaatggatttttttttgcctagtttgacccgcttcaatcctgaccttgaagatcaactgtgaactagtggctgatgtaaaatgaaacttgaggaatcccatactaagtttcttgtaatcctatttggattctgttttcatttccttctgcttaatcccaacataccaactgaaacaaccgtgcaaactgctcggcaccagggaaaaattaaatgtcctgcccagtcattaa

SEQ ID NO: 64384 - DNA, 512 bp, Chicken  19866894330199_1
aaagcgtccatgactagtagttaatgacagtctggagaaagaacagtccttaacctgggctcattgcctacagagcaatcatgtagaaaacagagaaggaattactgtgctttcacagtagaaacaatctgacacatgttgttttgttagtactaaagtcaagtatgctttttgaccaaataaaactaaaattacagttacacattgggtctctctggcttgtctggaatacaacaaatgacagaaaaagcagagattgctcctgcaattagcaggtgtggctaaccttaacctatctawcaaaggtgtgctcctgtaagtaataactgtaaattagatcttcttcaaaatattgactgcttgttaacactgtatttgcatctctccactgctacagtatcagctgtcacagagttgtcaaacatcaattttcataagtattttagaaaaacataatctgccttcaaggacactcaatgccaaaacatagttgctatctagtctgcaaacat

SEQ ID NO: 64385 - DNA, 600 bp, Chicken  19866894330202_1
ggggtgaaagagcagagttcaaattaaagccttatctctattctgttggtggagtgtgaatttatactgcttgctagaaccaaacataagctgagtgccagcaggcacatcatccaaccacctgcagagctctgggaaagcaagagctgctgctcagctcttgggcaatgtgcaaaccctgcagacgttcagccaggagtcacctcagagtggcactaagtgactgccagataagcaggatacatttgctttcaacctccacaagaacatcaggaagcagagcaagacacgggtccccaygatactccagttctgcaggctgggaagatgtttctcctcaagaagacctgcccccacgggctcattctggcaccagcactctgtatttttctgacaagtaccacaaacaacacctcgagaccagaggaactgtgtttacctgctcaggcttcagccccgtgaagcaaaacatgccgatctggtcagtgatgtgctgccagttgtgggaagatccctctttcttgaggttggacaccagctgagtcctcatgctgatgatccggtcggccatgcccttcacctccaccagcctgacaagtc

SEQ ID NO: 64386 - DNA, 600 bp, Chicken  19866894330205_1
cagggaacttgcatggcagcagatgttaaatgcttcggcaacctcactttgtttgtgcaacaactccttacatagaaaatcctgaagattgaaattcaacatcagagccaatccaaaaatgagccccagtgctttgaacaaccagttcatgggcatttgggctgagcatccacagggtcttttcagaacaggatgacttggtgggtggttccagttctttgaaactattacaatgtatggctgaaaatttgggatatttccaccccaataggcttttatgtatgtcatttccagttgaarcagctgcaagttactgtaaagacaataatcggttttgattgaccagaaagtcgtgttcatatgctagcagtggtgcatggtgcattactgttggcagcccaccaccattctgtatgtgcarggatgcagaaatgcttctcagctgtttgatccaaacaaaccttttacctttttatgtccagagacacataaacatgtatgctttcactcctccagtgctcttcacttgtttmtccagagcaaaaatccagaagggagaagtggatgagggaaaaccacagctaaggggaagttgcatgg

SEQ ID NO: 64387 - DNA, 600 bp, Chicken  19866894330205_2
agccccagtgctttgaacaaccagttcatgggcatttgggctgagcatccacagggtcttttcagaacaggatgacttggtgggtggttccagttctttgaaactattacaatgtatggctgaaaatttgggatatttccaccccaataggcttttatgtatgtcatttccagttgaarcagctgcaagttactgtaaagacaataatcggttttgattgaccagaaagtcgtgttcatatgctagcagtggtgcatggtgcattactgttggcagcccaccaccattctgtatgtgcarggatgcagaaatgcttctcagctgtttgatccaaacaaaccttttacctttttatgtccagagacacataaacatgtatgctttcactcctccagtgctcttcacttgtttmtccagagcaaaaatccagaagggagaagtggatgagggaaaaccacagctaaggggaagttgcatggtgatctcctgtctcacagcataggtgtggggtcaagtaaatttgtctttttttatttcccttccagctggctgcttttacagctgaaaaatctgttgttagctgccaaagggaaattcttc

SEQ ID NO: 64388 - DNA, 537 bp, Chicken  19866894330205_3
tgtatggctgaaaatttgggatatttccaccccaataggcttttatgtatgtcatttccagttgaarcagctgcaagttactgtaaagacaataatcggttttgattgaccagaaagtcgtgttcatatgctagcagtggtgcatggtgcattactgttggcagcccaccaccattctgtatgtgcarggatgcagaaatgcttctcagctgtttgatccaaacaaaccttttacctttttatgtccagagacacataaacatgtatgctttcactcctccagtgctcttcacttgtttmtccagagcaaaaatccagaagggagaagtggatgagggaaaaccacagctaaggggaagttgcatggtgatctcctgtctcacagcataggtgtggggtcaagtaaatttgtctttttttatttcccttccagctggctgcttttacagctgaaaaatctgttgttagctgccaaagggaaattcttcttttgtgctactaaatactgctcttctacttttattctagtcctcaagg

SEQ ID NO: 64389 - DNA, 599 bp, Chicken  19866894330207_1
  misc_feature (1)..(42): n is any nucleotide
nnnnnnnnnnnnnnnnnnnnnnnnnnnnnnnnnnnnnnnnnnaaataatgggattgctatcagctggcattgtcccaaggggaaaaggcaattggttctatctcgcaaggacttttatttatagcaagcaagcagagccttgttgctgctttgtactgctctggtgtgggactgggaggtgtccctccaggggcacgaggtggccccagtgggaagcatcctccatcctctcttctcctgccctcctcttgctgctcctgagcagggctgcacacacacggggcattcccagcactggcrggcactgcattcctgttactcacactatttcctaatcacaccatttaacagctgtggtaaccacataccagaacccctcttgctgcttttcagcattaattccaccctacaagaggtttgctgcccgactggcacgtgggttcattggtgcgagcagaccctgtgactgccagcactgctctgcatgggctgagctgcctctgcccctgggactgaactaatccacatactgggaaaggaaactcatatattccaaagcaatttatggttcagctcttctaacgacgaaatgctgaact

SEQ ID NO: 64390 - DNA, 598 bp, Chicken  19866894330207_2
cgtgggttcattggtgcgagcagaccctgtgactgccagcactgctctgcatgggctgagctgcctctgcccctgggactgaactaatccacatactgggaaaggaaactcatatattccaaagcaatttatggttcagctcttctaacgacgaaatgctgaactggaagaacccagctgcagcccaatggctccatgcatctatgggaaaatcctcctgcagccccattccgctgcctctttgtggctgctccttgctaccccactttccctttgcatactttttggctttaccatacrctggccatgatggagggggcgtgctcctgttatcctgtaggttttcgttctctgaaggctccttgcatccctgccatgcaaagggctcttttttactggtgagggatggaggaaccctgcttctgacagccccagctcccatcccatcaggcgcctctaatgcatttcatggcactgacactctctgatggccttttccatcagcagagctccaggagctaatgcattttgaatgtgcccgaggcaattccctataacaaactaatgcgggcctttaattttaacaagcatttcaaat

SEQ ID NO: 64391 - DNA, 600 bp, Chicken  19866894330218_1
aaagtggaaatggaaattatagttttcatatatctggaatagaacatactaataggttatttattttaaagttttctaataacttttaattaaagttgatttaaggatttcatatgattgaacatgtaccacgggtcattcagaatttaaagatgttcttgtgcctttggagcttacagatatttataggaatgatttgataagcaatgctgatgtgattcagaggtgaattagaaaagaacagcccttgcaacacaatgtattatgcattttattgttctgatattttagaatttgtcrcagtagttaaaacatttcattctaactttgtgtcttctaaacattacaatactgagactgatcaacaaatgtaattgggatatatcaaagctgcctttctagccagtgctcagtagagaaaagagggtcttttgtgtcttaggagatgttatgtcatattttcaccacctaggttcacttttggaagaggctgggattaggaacaaccaagaaaaaaagtaatgactataaaatgaagcataaaaaaggacttgtgcttatttatttctaaggtacagaagtgattaaaaacagtttatt

SEQ ID NO: 64392 - DNA, 600 bp, Chicken  19866894330222_1
aataggtgttcttcctctctaaaccatctacctctggtagaaagacagattttcggagatagaagaaggtttatatgggcaactctgactcagttgttatatctccacaaatgtaaacaggaatactaaacaagtattttctcaaatttcaccagactttgttaaaattaataattgttgatatcattgggttctttgattgttgttgaaaaaaaaacaaacaaacccaaaatctaggactttctcgcattacttacatttaatacatcccaaatttcttcttaagaagtcaaaccacawaacgaacattyctttttcttattcctcaggtttcttttagtatctctgctgtgattaaactacagaatgtccatgtttgcatrcacctccttccttttagcaagtacaagtggctctgcagttaaatgtatgcataactaccaacattaccactcagagtaaatcacaagcataataagaaattatttgtcawtgtttacctgattcttcaccatcatgttgtgagatgtcatctctttatattttcattttgttgaggcgccttgagttcagatgtgctggttttatgggtgaagcatt

SEQ ID NO: 64393 - DNA, 600 bp, Chicken  19866894330222_2
ttcctctctaaaccatctacctctggtagaaagacagattttcggagatagaagaaggtttatatgggcaactctgactcagttgttatatctccacaaatgtaaacaggaatactaaacaagtattttctcaaatttcaccagactttgttaaaattaataattgttgatatcattgggttctttgattgttgttgaaaaaaaaacaaacaaacccaaaatctaggactttctcgcattacttacatttaatacatcccaaatttcttcttaagaagtcaaaccacawaacgaacattyctttttcttattcctcaggtttcttttagtatctctgctgtgattaaactacagaatgtccatgtttgcatrcacctccttccttttagcaagtacaagtggctctgcagttaaatgtatgcataactaccaacattaccactcagagtaaatcacaagcataataagaaattatttgtcawtgtttacctgattcttcaccatcatgttgtgagatgtcatctctttatattttcattttgttgaggcgccttgagttcagatgtgctggttttatgggtgaagcattacttcttgatt

SEQ ID NO: 64394 - DNA, 600 bp, Chicken  19866894330222_3
tctgactcagttgttatatctccacaaatgtaaacaggaatactaaacaagtattttctcaaatttcaccagactttgttaaaattaataattgttgatatcattgggttctttgattgttgttgaaaaaaaaacaaacaaacccaaaatctaggactttctcgcattacttacatttaatacatcccaaatttcttcttaagaagtcaaaccacawaacgaacattyctttttcttattcctcaggtttcttttagtatctctgctgtgattaaactacagaatgtccatgtttgcatrcacctccttccttttagcaagtacaagtggctctgcagttaaatgtatgcataactaccaacattaccactcagagtaaatcacaagcataataagaaattatttgtcawtgtttacctgattcttcaccatcatgttgtgagatgtcatctctttatattttcattttgttgaggcgccttgagttcagatgtgctggttttatgggtgaagcattacttcttgattcttacatctgttttcactggcacccaagatgtgaacttttgtcttctatgaatactatttgtgcattccagt

SEQ ID NO: 64395 - DNA, 600 bp, Chicken  19866894330222_4
ctttgattgttgttgaaaaaaaaacaaacaaacccaaaatctaggactttctcgcattacttacatttaatacatcccaaatttcttcttaagaagtcaaaccacawaacgaacattyctttttcttattcctcaggtttcttttagtatctctgctgtgattaaactacagaatgtccatgtttgcatrcacctccttccttttagcaagtacaagtggctctgcagttaaatgtatgcataactaccaacattaccactcagagtaaatcacaagcataataagaaattatttgtcawtgtttacctgattcttcaccatcatgttgtgagatgtcatctctttatattttcattttgttgaggcgccttgagttcagatgtgctggttttatgggtgaagcattacttcttgattcttacatctgttttcactggcacccaagatgtgaacttttgtcttctatgaatactatttgtgcattccagtgcccactagtggcagtgtgtagtagctaaatactcctctgcagataagtcttcatttggctgaagccttgcatttgaaaccaaaatttctgttctttggtacaaaggagt

SEQ ID NO: 64396 - DNA, 561 bp, Chicken  19866894330224_1
atctaaaaatcctttcccagaagagatttataggcacctttctgaagaaaatttcctttttaagacagcctgagatttgctttccccactcagattgcagtgaagcaaacagctgttaattccacattcacttacagaagctgtgaaatgatgtatcccagtcaagtggctggcactccctggactcccaggtttgcttcaactcataagggtgatttcttcctatagataaagccatttttgtttaaactattctgaacattacttgcctgaaaactacaagcaatgtaagacctacaygtaagaccaatggcagatctaagtctccaaggcagcacatagcttctagtttaaatctgattgtgggatttttaaacaaataagcacagaagcaaagttttggacaggaataactttactaactcaagataaacttcataccactgcactgatcctatttcttcatgttggcaaggctttatcattgccctaattacatccttttgccaaaacaagctgcaacaggaagaaaggaggcagcaatctgaaaaatgacacaat

SEQ ID NO: 64397 - DNA, 599 bp, Chicken  19866894330238_1
  misc_feature (1)..(222): n is any nucleotide
nnnnnnnnnnnnnnnnnnnnnnnnnnnnnnnnnnnnnnnnnnnnnnnnnnnnnnnnnnnnnnnnnnnnnnnnnnnnnnnnnnnnnnnnnnnnnnnnnnnnnnnnnnnnnnnnnnnnnnnnnnnnnnnnnnnnnnnnnnnnnnnnnnnnnnnnnnnnnnnnnnnnnnnnnnnnnnnnnnnnnnnnnnnnnnnnnnnnnnnnnnnnnnnnnnnnnnnnnnnnnntctttcccaccccatccccatgctcaggagaaaggtcagtgcttatggcaaaccctcctctccaagcagcttgccggmttttgtggcctccagctacactgattgcaggctgtggtcctgctggagcccaccagcaaagcagggctctgcccacacagatcagcactgtgccagcagcttgacatctgacaacagcatctgggaaaaagaaggtgatcttacataagaaatgtggccctacagtcccgacttctgaccaaagatcctgctgcccattctgagagacagtttgtctcctggccaaactccagtttgtgtaactgcatctattggataatcgtgctttctyaaattgttccaacagtttcaatttaaca

SEQ ID NO: 64398 - DNA, 600 bp, Chicken  19866894330238_2
aaaccctcctctccaagcagcttgccggmttttgtggcctccagctacactgattgcaggctgtggtcctgctggagcccaccagcaaagcagggctctgcccacacagatcagcactgtgccagcagcttgacatctgacaacagcatctgggaaaaagaaggtgatcttacataagaaatgtggccctacagtcccgacttctgaccaaagatcctgctgcccattctgagagacagtttgtctcctggccaaactccagtttgtgtaactgcatctattggataatcgtgctttctyaaattgttccaacagtttcaatttaacacggtgctattcacttcctttcatgatgccgtggggtgttacactgtgctgacaagcagctgttatgtttcaccaaagaagtgcctgcatggtgggcaaaagcagtgcctgtgcatgtatcacatgcttgcacatggtatcaagactgcaaatgctgtgaggttcctgggggtgaatggtgctgcataagttacaaaagttagctatgaaatagtaaaataacttgctgtatctaagctatgggtaggctgtgatagagctaggccactggtg

SEQ ID NO: 64399 - DNA, 600 bp, Chicken  19866894330247_1
gcagatgcctggcctgggagcgctcgtgtattgcacccaaattacacattcttgttcataaagagtagagcaaagtataaatgtgaaacgtcgttgctcatgtctcaggcaactactcacatcttaattgaaaacgatccaataacagcatcctctcagacaaagcaattccgcctatctctgcactcactgaaggctgtcgtgccgcatgggcagcagatggccttggccatcaccaccccagagcacacagaaggatacccagtgccgctttgggtttcctttcccctcaggcccctygagatggtcccagtggtgatggcagagacatgctcctgatgtcagggtcacacttgccactttccctatcctgctttcactgcatcccatacacctctgcttttgttctgcttgggagctgcaggtcagtgacacagtgttggttggtcattcctcatccctcagctgccccttcaaaatgcagttcaggctgcccagagagctgtgcccatctctgaaggcattcaaggccaggttgaatggggcccttggcagcctgtgctggtggatggsagccaacccatggcagaggtttggaat

SEQ ID NO: 64400 - DNA, 600 bp, Chicken  19866894330247_2
tgggtttcctttcccctcaggcccctygagatggtcccagtggtgatggcagagacatgctcctgatgtcagggtcacacttgccactttccctatcctgctttcactgcatcccatacacctctgcttttgttctgcttgggagctgcaggtcagtgacacagtgttggttggtcattcctcatccctcagctgccccttcaaaatgcagttcaggctgcccagagagctgtgcccatctctgaaggcattcaaggccaggttgaatggggcccttggcagcctgtgctggtggatggsagccaacccatggcagaggtttggaatggggtgattgctgaggtcccattcaacccaacccattctatgagtctgtgactgagccacctcacatctgggaccaaagcttcagaggcatgatactcaatggccacagagatgcaaagtgtttgcagagcagcaaataaagtctttcctgagccaactgttccacctggaccccactacaaattattgttttcaattaccacctgtgtactccttcccatgcaacttattgatgtaaaattacaacaacactggtataaataagttatgctg

SEQ ID NO: 64401 - DNA, 600 bp, Chicken  19866894330248_1
aaaaaagagtttacaagcaactcacatacaaacccagggttctctggtgtgacttgaatgccagagacatcttgagaaagcgtgaaggagaaaaggagctctgacacagtaccaggaggttttacaatgttcagcaagcatgctgtgccatcatgctacgtccctatgcctacagtgggaaacagctacagttttgatatctgttgcttttgctcttctccaacactcttgtagagtacaagaggaagaaagaaggggatccgtggatcctctgcgcaaggttcatacctcactgggaasttggagcgctgaggcccacaggggctctttcagacaagtgccattgatcaggagccccagcatgccaacacaacccagcctgctggccagacagccagcacgtactctggcacgctgcctgcccacgtgctgctctgtatcccttccagtgcgctcacagagaatggctacagttgagctctgtgttttcagcgaaagatgctagtgacttgtagtcaaaacaaagccaaactaaggaaaaaaggcattcagaactcaacccagtacacatataatgtgaataaacaacccaagaaaaag

SEQ ID NO: 64402 - DNA, 600 bp, Chicken  19866894330253_1
tcctaccacaacacaccccgctaaagagcctgaccctttctttcttacagccctccctttagatactgagtggccgctctcaggtctcccttgagccttctcttctcttggccaacacagtctcagctctctcagtctgtcctcacagggaaggtgttccatctcttagatcatttctgtggccctctggatgcactctaaaaggtccatgtctttcctttactgacgcagtactgcaggtgaggtctcaccagcacagagacagaatttcatccaagaaacttttttttttttcttttycctttaggcaaaatgtatcactctcacagatgatgtaatgctatagaaaagggtctcctcccagmcctgaacattgagttcagaaagttacttgaggacaacaaccatcttaggggaaaaaaaaagactgcaagtgctatacagtctagaaaagaagttgcakcagtgggaaagacactggaycccctcatacaaggttctagctcaattccaaaggacagacaagaaaaaaaaagttcttctagcaaacagaggcagtatgcactaaatatcctggtatcaaggtaagaaaaaaaacat

SEQ ID NO: 64403 - DNA, 600 bp, Chicken  19866894330253_2
ctgagtggccgctctcaggtctcccttgagccttctcttctcttggccaacacagtctcagctctctcagtctgtcctcacagggaaggtgttccatctcttagatcatttctgtggccctctggatgcactctaaaaggtccatgtctttcctttactgacgcagtactgcaggtgaggtctcaccagcacagagacagaatttcatccaagaaacttttttttttttcttttycctttaggcaaaatgtatcactctcacagatgatgtaatgctatagaaaagggtctcctcccagmcctgaacattgagttcagaaagttacttgaggacaacaaccatcttaggggaaaaaaaaagactgcaagtgctatacagtctagaaaagaagttgcakcagtgggaaagacactggaycccctcatacaaggttctagctcaattccaaaggacagacaagaaaaaaaaagttcttctagcaaacagaggcagtatgcactaaatatcctggtatcaaggtaagaaaaaaaacattacttgggtaaataaaacagatctgaactatcatttagcttctctaaagaattccaaagacaaaa

SEQ ID NO: 64404 - DNA, 600 bp, Chicken  19866894330253_3
tcttagatcatttctgtggccctctggatgcactctaaaaggtccatgtctttcctttactgacgcagtactgcaggtgaggtctcaccagcacagagacagaatttcatccaagaaacttttttttttttcttttycctttaggcaaaatgtatcactctcacagatgatgtaatgctatagaaaagggtctcctcccagmcctgaacattgagttcagaaagttacttgaggacaacaaccatcttaggggaaaaaaaaagactgcaagtgctatacagtctagaaaagaagttgcakcagtgggaaagacactggaycccctcatacaaggttctagctcaattccaaaggacagacaagaaaaaaaaagttcttctagcaaacagaggcagtatgcactaaatatcctggtatcaaggtaagaaaaaaaacattacttgggtaaataaaacagatctgaactatcatttagcttctctaaagaattccaaagacaaaatcatggagaaaagatggcattctacactcagtgtccaaaaaccattaacagttacttactagtacgcaggaaaaaaaataattaaaattgaaattgac

SEQ ID NO: 64405 - DNA, 600 bp, Chicken  19866894330253_4
cctctggatgcactctaaaaggtccatgtctttcctttactgacgcagtactgcaggtgaggtctcaccagcacagagacagaatttcatccaagaaacttttttttttttcttttycctttaggcaaaatgtatcactctcacagatgatgtaatgctatagaaaagggtctcctcccagmcctgaacattgagttcagaaagttacttgaggacaacaaccatcttaggggaaaaaaaaagactgcaagtgctatacagtctagaaaagaagttgcakcagtgggaaagacactggaycccctcatacaaggttctagctcaattccaaaggacagacaagaaaaaaaaagttcttctagcaaacagaggcagtatgcactaaatatcctggtatcaaggtaagaaaaaaaacattacttgggtaaataaaacagatctgaactatcatttagcttctctaaagaattccaaagacaaaatcatggagaaaagatggcattctacactcagtgtccaaaaaccattaacagttacttactagtacgcaggaaaaaaaataattaaaattgaaattgacaaacatctacctaggctaaa

SEQ ID NO: 64406 - DNA, 600 bp, Chicken  19866894330253_5
ccttatatttgcatagtcactgtagcacaaagactcaacgggaccaaatttttcctcagccaacaccatatactcagaacattttgtatgtggaaaaaagttaaagaatatatagtaagttcagaaatctgcacaacgaaataaaaaaaacattctttaccttaaaaagaaccatctcttaaaaacataatttggtgcaaaaacatacctccctgggcagataacagagactcttattcaagccactgacaacctatttcagccaaacggtgtatataagccaatgcataccaatattaytctcatatgtggttttattacataggtcacaagtcattttcaggaaatgaagcttaaaatcacatttaagagtaaaatcttgaaagcatgacagttatccatcaaacactcatacgttcatatgtataaatatgaaatacaatgtttgattagtagatgtcttatgaaaggagatgtttagtgtgataaaaatgatgtttaggtctgacaataatgaaaacctgtgcaatggacagaatgttctctttataaacgtgagcataataaaagacattttaagtgatttaaactctgaataga

SEQ ID NO: 64407 - DNA, 600 bp, Chicken  19866894330259_1
aaagctgccatcgattttcaaacagactttgggtcaattccaggagctcccacagagaggatcctgatccaaagtagaatcgggaggaagatatttatccctcgcgttgtcctgtctttgcaatgctgcagaagtagaatgcacttactttttaagaagaaaaaaccttcaatgctgccgtggtctgtcacatgctgtagtgcttgaattgttgcttcttggttattttcattcttaattgactgacttttccgcccctgagtgattttttttgtgtgtgtgtgccagaatcttcctatrtatcatagaaatttaaatggaaaaggtaggcattttgcaagcagaagcaagcccagcagtgaaatgtgaatttgcatttgtgagtgcagcagtacttgtgcaatgtttgcctggaaaaagcattgctaacactaatatttggtgtcgaaacctgagccagtttccatacttcaccagaaatagcttgaaagtgcaaccttaattctagtatacatattttttagagaggaaaaaatgatgactgcatagcgtgctgtctttgcaaaccgcttaaagggagcagaaaagcccttgttagaa

SEQ ID NO: 64408 - DNA, 600 bp, Chicken  19866894330259_2
gccagtttccatacttcaccagaaatagcttgaaagtgcaaccttaattctagtatacatattttttagagaggaaaaaatgatgactgcatagcgtgctgtctttgcaaaccgcttaaagggagcagaaaagcccttgttagaaatagaatgctttttgagcttctgccaccattgaagtcaatgtgtttttaatcaggatgtcacccccccataccatccccatgggcatgtccagcttgctcctactgcagataggtgtgctgcatccaggggactggctcacatctgcaccagggwgcggggttgtagctacgtgagatggatgcagagtgcatttaggctccagcatgtagctgccaccaagtctgactagatcaaatataacagagatccttggttcaggtgggctaggagggtaaggttcttctaaaagcaggataaaagcctatctgtgagttaaatcttagtcatgccatctttcatggttattacctgttggtaataaggagcattattttatctctgctggctgcttctgcccagtcaggttgagtagccccgtggaagatgagcagatctggatctccttctttgaga

SEQ ID NO: 64409 - DNA, 600 bp, Chicken  19866894330262_1
cgtactttatattccacagcattcattactgtgataattattttcagattcctgcttaatttggtgatggctatgatccaagattcttaaaacagtgcatagtctgtcactgatttctgccacttctggagaggtgagtacactgtggatgtcacagggaggcataaaggtcaaacacaacccagtacaacagaagatacatgactataactccatatgaaattctcagaatttaaaaaataagaattaaaattgaaaaaaaaaaaatcaaatcaccatatgaggagtgaaaaccacaarccatcattgctactctgctgtttcagacagcacacaactggaacccagaaaaagagggagagcatcttgtagggtacaactgggagagaaggacatgaacaacagcaggaattgggcaagaacccactaagctgttccagatcttggctatttcagcttctgtggtctatcacagaagtggaagatccgttaaaaatagaaaaactgttctaaaatagcaaaaattagcagcccaatacagaactactccagataatacttacctttgttactgtaaacatagatatccttatggccaaa

SEQ ID NO: 64410 - DNA, 600 bp, Chicken  19866894330263_1
atcatcaaaagaaccagaaatatccaacatattcaagatatctatttttgatgaaagcctcaagaaagtaataagagaacagagctttacagtaggtcagttattaatttttgttggaacaccaaacaagagcttggcaagaagctacatgtctgcaatatataattttttactggttatttaataagaagttccagatacctattaactttctttgctcaaattaagtatttattgtttcacctgttctgaacgaggaactacgacctcattaataacaggttagaaatagtgtatagytgtgttgccgttccccaaagtatctccatgttagcgctgaaaaatgagtgtgtgatccctaatggctatacttgccatgatccacaactcaaacccctctcatgtcaacagctttataactacctttacaaatacaagagtgaggaagagcaaagggcttcttgcttttatgcactgttcccagagtgtcacacgtgctacctgtgtacctttcagctgtggagacgcacctggctgtgcccacagaagcaggtagcactggcttcttcctggtcagtctctccaagagaatggctggca

SEQ ID NO: 64411 - DNA, 600 bp, Chicken  19866894330265_1
ttcccacctccccgcctttcctggttgcctccaatgcatggagctctggcacccacatcctcctaattccgctgtgattaattgctgccggataggacaaaagtagaaactgccttaagggtggggtattttaaggtgctttctttttttcccccttcaccatgtttccttatttgtttcctttcttgctactggtgtgataactggagagttatttggaaaattcctattgtttattctaaaagtctagggaaaaacacaaagtgcagctagccacaataaccgtgcacctctttaggwtattttcaatttgtgactttttaaaaggcaattacctcactttctgaactggataaaataagtctggacacaaacagcacattcttgataaaatccttttggctttcacatgcgtcttccaactgagcagtctgggtggaacagtacaatatttttaagggctttaacaattcaaacatcttaaaagaagctgtgccaagcttcagattgagttctctttgaaaaggactatagtagatggtagggacggcttggttttccaataagccatacacgcagtgaacacgtacaaatcaattt

SEQ ID NO: 64412 - DNA, 600 bp, Chicken  19866894330269_1
ggtttgagccatgtctgagatgtttcatgtggatcaagtctgagatcatggaggtgcctttcacacacctgtatatttaatctggctagattctctgcccaagaaaatccacctggggaaagctttatttgcgttttctaattatgaatagcgtgagtatgacagatgtggctgtactgtgtgtgcatgaccaggagctgcagtaaggcatatgagatctgagttggtcctgtgttcacgatgaatatgtttggattgtctccttttcttccagtaataacttcacagccttggaaactyagcattctcartttatttggacaatgtatgaaggctttaatactttaaaaattatttatatcttcctgtggttttaattaagaacatgaaaatagtccagatggttcagacataatgtaaatggtgtctacggtaggattctctccttcatgratgttaatatgaaattgaatattaacaagaaagttttaacttctagttttgttgattcttacycaataagcactggttgtaaaggaaaataaagtactgtttgctgtgttttggtaaatgtttgtgacattaacaatgttaatgtgc

SEQ ID NO: 64413 - DNA, 600 bp, Chicken  19866894330269_2
tgtctgagatgtttcatgtggatcaagtctgagatcatggaggtgcctttcacacacctgtatatttaatctggctagattctctgcccaagaaaatccacctggggaaagctttatttgcgttttctaattatgaatagcgtgagtatgacagatgtggctgtactgtgtgtgcatgaccaggagctgcagtaaggcatatgagatctgagttggtcctgtgttcacgatgaatatgtttggattgtctccttttcttccagtaataacttcacagccttggaaactyagcattctcartttatttggacaatgtatgaaggctttaatactttaaaaattatttatatcttcctgtggttttaattaagaacatgaaaatagtccagatggttcagacataatgtaaatggtgtctacggtaggattctctccttcatgratgttaatatgaaattgaatattaacaagaaagttttaacttctagttttgttgattcttacycaataagcactggttgtaaaggaaaataaagtactgtttgctgtgttttggtaaatgtttgtgacattaacaatgttaatgtgctgatagttcct

SEQ ID NO: 64414 - DNA, 600 bp, Chicken  19866894330269_3
tgagtatgacagatgtggctgtactgtgtgtgcatgaccaggagctgcagtaaggcatatgagatctgagttggtcctgtgttcacgatgaatatgtttggattgtctccttttcttccagtaataacttcacagccttggaaactyagcattctcartttatttggacaatgtatgaaggctttaatactttaaaaattatttatatcttcctgtggttttaattaagaacatgaaaatagtccagatggttcagacataatgtaaatggtgtctacggtaggattctctccttcatgratgttaatatgaaattgaatattaacaagaaagttttaacttctagttttgttgattcttacycaataagcactggttgtaaaggaaaataaagtactgtttgctgtgttttggtaaatgtttgtgacattaacaatgttaatgtgctgatagttccttttttctttaagtcacgctgcttgtattatcacaagcaaagctcctttccttttctattgctgtttcagtaccttgttgagaaatctgaagtgcactgaacctgtaaatatatttaatgtcctgcatactttaatgtttact

SEQ ID NO: 64415 - DNA, 600 bp, Chicken  19866894330269_4
atctgagttggtcctgtgttcacgatgaatatgtttggattgtctccttttcttccagtaataacttcacagccttggaaactyagcattctcartttatttggacaatgtatgaaggctttaatactttaaaaattatttatatcttcctgtggttttaattaagaacatgaaaatagtccagatggttcagacataatgtaaatggtgtctacggtaggattctctccttcatgratgttaatatgaaattgaatattaacaagaaagttttaacttctagttttgttgattcttacycaataagcactggttgtaaaggaaaataaagtactgtttgctgtgttttggtaaatgtttgtgacattaacaatgttaatgtgctgatagttccttttttctttaagtcacgctgcttgtattatcacaagcaaagctcctttccttttctattgctgtttcagtaccttgttgagaaatctgaagtgcactgaacctgtaaatatatttaatgtcctgcatactttaatgtttacttgtcacttcaagaaagtttatataggtgaaaacggattgacagtgggataatctccagcaaat

SEQ ID NO: 64416 - DNA, 600 bp, Chicken  19866894330277_1
gttattatcccacaggcttcaaaggtactgtatatcaaatgttgaaacttccgagcctgatgaaatcccttgataagacaggtatttaaaagcattggctgtgcctgatccatttggacaagagtcacgtcctgctgaagcagctcctctgctggcagaccccctgacaggcagggacttgatgattccccagaacctcctggtcatgatcccaaaatatgagactcctctgctccaagaggagagctgggcctggtgggagaacctgatctgagcctctcctggagaagaaacactttrcatctgcatgcagtcagtgatgyggagcgtggggctgcaacagacccagtgtgctgagctgtttggcagcacggtttaagatgccagaagtgcactgagatgcactgaggtgcactgagataagagggtgtgcaccacatccagttacgtgaaatagcagctatctgtccaccaagcagctgtacccatctctccccctcaatgtatattagccagactctcaacaaacacaggtatgactggtgacagtgagcaaaagcaaagcctaaacccaaaaaaggaagataaagctcaggagct

SEQ ID NO: 64417 - DNA, 600 bp, Chicken  19866894330277_2
ggtactgtatatcaaatgttgaaacttccgagcctgatgaaatcccttgataagacaggtatttaaaagcattggctgtgcctgatccatttggacaagagtcacgtcctgctgaagcagctcctctgctggcagaccccctgacaggcagggacttgatgattccccagaacctcctggtcatgatcccaaaatatgagactcctctgctccaagaggagagctgggcctggtgggagaacctgatctgagcctctcctggagaagaaacactttrcatctgcatgcagtcagtgatgyggagcgtggggctgcaacagacccagtgtgctgagctgtttggcagcacggtttaagatgccagaagtgcactgagatgcactgaggtgcactgagataagagggtgtgcaccacatccagttacgtgaaatagcagctatctgtccaccaagcagctgtacccatctctccccctcaatgtatattagccagactctcaacaaacacaggtatgactggtgacagtgagcaaaagcaaagcctaaacccaaaaaaggaagataaagctcaggagctgacattttatagcactgtccaat

SEQ ID NO: 64418 - DNA, 529 bp, Chicken  19866894330287_1
gcccagtcagggtgaagcagtgccctttgaggatatgtgactacagaaagagaaaagaaacaacagataacttttggagtttggattactcaagtaatagaattgttgcatgcacacactctgtggtggcaaatccatacactttgttaagcgagttaaggaatgagtaggcggagtttaccttctggatttgaaggatgccttttctgcctggtgtggccaaaagaagcctaaggttatttgcctttgaataggaaacccctgatatggggagaaaaagactcagttaacctgggcagygttacccaggtgagagcttgtgagagcagcccaacgatttttgagcaactcgtgagcctgagatttgggttcctccttcccacagtggagcttcactgcagtacgtggatgccacgaaaagaagaggactgcgtgcaatggactgtgagtgtgctgaatttttgtgtttaaatgatcgtcaagtttctcatcagaaggcacaaataactgaacggcaagtgatgtattt

SEQ ID NO: 64419 - DNA, 600 bp, Chicken  19866894330302_1
cactgaccatgcctgggatatgcagatctaaatgcagttgtgcaaatcctctttctctgttaatttgcagctcatgctgttcatgctacagagggtattcagaggcatgtttgagaacatggaataatgatagaaacatggaacagaatggtttggattagaagcatcctttaaagatcatctagtccaacccccctgtcacaggcagagatatttttgcttactcaggttgctcagaattccatccaaaaagaatttgaacacttacaatgatggggcagtcattgcctctgggcaacmagttccagtgctatcccaccctcactgtaaaacaacatcttcctcatatccaatctggactgacactcttagtttagaatcattacccattgtcctgccatggcaggccctggtaacaagactttcttcctgcttcataggttgaaaggctgcagtaaggtctctctgaagccttctttcctcctgattgagcaagcacatatctctcaacctgtcttcacaagtgaggtgttcagcattctggtcattttcatggtcctcctctggaccttcttggtcctctgtgaaggtaaaatacca

SEQ ID NO: 64420 - DNA, 600 bp, Chicken  19866894330303_1
cttttttctttcttttttaaaatggggatatctttagagaaagagagagagagactgagaaagccatcattagatagatcttctgatctttatctgcagtagcacagtcagaagagctaatgctgtgatgatagctttgaaatctcttaggaattggataaagagaagcgatagtgatgaactcccagctaataaacagagagtgcttatttctgcagaatgatcaatttccagatgtcctgaggcttgtctgatacagttgatttactcattctccctcacttcactaataaagctcargtccaacatcagattagagaagagccagatttcttaaaggggcaagaggagggctggcatcatggaacgtaaatgctgggagacatactaatctcttctgcctcctcccatagccaccaagctgtcttaaacagctgccttctgctgaaatcatacactttatccgctttgggttagtacagtaatacagacaaattaatttgttatcttgttagtggaaatttaatgcaatgatctaaaagaactcttacatattgtgataaacttttgtgcctccagggtgcttctcttccataggac

SEQ ID NO: 64421 - DNA, 599 bp, Chicken  19866894330304_1
  misc_feature (1)..(14): n is any nucleotide
nnnnnnnnnnnnnnggggggggttggaatccttggggtcccttccaacccaagccattctatgattctatgacggagttagacaaggttgatccttgcccagtgctactttcagtttggagctggtggcactgtgatgaacagcatatttatgctgtgttacaagcccaatctttgtgattctgtcctgttttcattgatattccatatcatgacatcatgcggcaagctgtttgtattggaacacagtagtggggaactgcacttttggattcctatctcctgtcactctcagctactygcatktggattccagctctctgagaagatatgttgagaaaagacatactacaattcccagaagtctccaggactccccacctgatcttatattctagctgatgagagagaactgtcttccttttctgggcagcacaacgagctgcacagttgcaaatactttctcccccatttgtttgttttattacccataactctcttttatatcatattaccttatattcttttaccatttgtagtaaattaatcatctcttgctatcgcaattggattgtttctatttttttcccctgaaaaggg

SEQ ID NO: 64422 - DNA, 599 bp, Chicken  19866894330304_2
  misc_feature (1)..(9): n is any nucleotide
nnnnnnnnnggggggggttggaatccttggggtcccttccaacccaagccattctatgattctatgacggagttagacaaggttgatccttgcccagtgctactttcagtttggagctggtggcactgtgatgaacagcatatttatgctgtgttacaagcccaatctttgtgattctgtcctgttttcattgatattccatatcatgacatcatgcggcaagctgtttgtattggaacacagtagtggggaactgcacttttggattcctatctcctgtcactctcagctactygcatktggattccagctctctgagaagatatgttgagaaaagacatactacaattcccagaagtctccaggactccccacctgatcttatattctagctgatgagagagaactgtcttccttttctgggcagcacaacgagctgcacagttgcaaatactttctcccccatttgtttgttttattacccataactctcttttatatcatattaccttatattcttttaccatttgtagtaaattaatcatctcttgctatcgcaattggattgtttctatttttttcccctgaaaaggggggag

SEQ ID NO: 64423 - DNA, 600 bp, Chicken  19866894330310_1
aataaataaataggagcaagccttccttaatattcccctaatttttgtgtgtttaaatatcacctgcaatttactagatggaatattttcagtggcatggtgacaaaggagggagaccagatgtttttggaaatttcattttttaaactgtttggttgggggtggtgacttttttttttttccctttgcacacttgtagaacaagctgtaaaaacaacgctcaaagaatgagctgcttcttaaaaaagtagggattcaaagaatctgaaataggaaagatgttattttggatatcctttygctagaggagattattatttattggtttcattatatatcttgcctggtaatcagcagtaacgtatgtcttggaagagcagaaaaatgaatgtcaatagtatcttgcattttagaaaaaaataaataaattatgaaacacttaagaaaaatgaaataaaaccagtgatgaatctgcagctggagaaaatcagataaacaaaatggttccagttacttattgccacactcaatagcaatacatgaaattgtattacaggctgcgaaatgaaataatcccaccctgtgacaagctggaaggat

SEQ ID NO: 64424 - DNA, 582 bp, Chicken  19866894330317_1
aaagaagaaagtaaacattttcaatctgttgatattttgttatctcatttatggaaattttgcctagtaccatattgctctgtttgtgccatatgtcagtcataatgcagtaaaacaaattcaagcaggaatcactgctgacataataacaattatgaaatacagcttctaagtatcttagaaagctgtgcacattacacagcccagcttctccataaaaacaagcggacagtattgacatagaagagtgtaagatttgttcaaatgatcttagccatggagtcccccacaattgcaatyaactgcagaaggtgaacaaagatgatgatcattgtcagttacagaactgacagtgtgggaggtttgatcttgcagtttcattatgtttggatttcctgtacacccagagggaatacctgactggccctcagaactgcattttaagaacaatcagctcattgctagggatctgggacttagccgtaacttcctatttagtacttcaatttcaatacaacctctaaaaccaattacgtctaggaaatatttaatatcttgtatcctcatcttcacattatctca

SEQ ID NO: 64425 - DNA, 600 bp, Chicken  19866894330318_1
ctcatagttcacataaagcggaaaaacgcatatgaacaaggagaaatccttttactgccatctgaaatgccagcgctaaccaagcacaagcatccagctgtcaaagaaccttgcctgtgcctaccctgaacataagacttgcagtagaatcactgaagtaaagaatcaaaattacatcagtaagagctacaaaatgcttaagcattcaggaaagggattaaaagcctttccccttatttcccatctctattacaacaaattcctctatgactttttatcaccaatcaacacaagttctcytcaactgactgtgagcgttctttgcatcatgagagtagttttccattagcgtaaaaagaagcatgaggtcatttctaacaaataatcattaccactgaggttgccttattggtgacaaaaacttatctgacatgtgagacactcttaattaatttgcttttgcaatttgtagtaggatatcctgttaccatgtgtgggtttttttccccacaatcaaatgaaggtaacttccaaaataagttttatgtgtacagcaagaagttggattataatttgggatggtattttaatgtcagcaat

SEQ ID NO: 64426 - DNA, 591 bp, Chicken  19866894330320_1
gcagtagaatcactgaagtaaagaatcaaaattacatcagtaagagctacaaaatgcttaagcattcaggaaagggattaaaagcctttccccttatttcccatctctattacaacaaattcctctatgactttttatcaccaatcaacacaagttctcctcaactgactgtgagcgttctttgcatcagagagtagttttccattagcgtaaaaagaatcatgaggtcatttctaacaaataatcattaccactgaggtgtgccttatcggtgacaaaaacttatctgacatgtgagayactcttaactaaatcgcttttgcaatttgtagtagaatatcctgttaccatgtgtgggttttttcccacaatcaaataaagctaacttccaaagtaagttttatgtgtgcaacaagaagttggattataatttgggatggtattttaatgtcagcaatctcatagcatcagttgaaaattacaccttcattgtaatgctcaatattcaaaactatttggaaggagaattagtaaaatcttgctgaaaagattagtataatatgggcagttcaaaagattacattaaaaacg

SEQ ID NO: 64427 - DNA, 600 bp, Chicken  19866894330328_1
ttggtgattggtaaataatcctttgagccagtaaaatggtcacatgccaatgacctttccatggatataatgcagaatcattaaattcttagatttttttggtctgaatatttccttgcattctttcacatattttgaccccttgtgggatgagatctagtgttatatgcctctgaatggagggactgctgcaaggcagcggatcacaactgagaagtacctgtctgtgtccagaagatgacagaactgctgtagtcccaacccctagctttcagctgccttgaaataaagtgaattggragggctttttgcattgatttcagaaggtgatttcaattaaacagccttaaattccttttgttttcccagctggatggtactttctctctgaagtttgccatcagattacatgaatagttattcttcatataaagaagttatgtttgtttgtaactctactgtaataatctcagccatagtctcagttagtatggcagtcaagtgttgctatttgtgaactatgtcattcagcctttttcagtttgttagaatttgtccggtcaggctcaatatggcaggggatctttgccctatgctaca

SEQ ID NO: 64428 - DNA, 599 bp, Chicken  19866894330337_1
  misc_feature (1)..(37): n is any nucleotide
nnnnnnnnnnnnnnnnnnnnnnnnnnnnnnnnnnnnnacatgggttggaaaactattttctcattacctttcccaagaattccctcctagataatcctcatgtcactgcagctctttgccctgctaaactatcaaagacttttgcctgtgcttacaaacaaaagttatgtgttcaaaggcactatggatccaaaacccagaatctggccacattaagtcaccttgtttgctgcttttagaactcagagagaatctaagacttgtaaagctattacaagcatctccaaaagtcctaactcytgcagatgcagtgactcaattgcttatgattgtctgccacaactatgtgtctgcctgttttawcctagtctagctaatgacctggagtttttcattctggactacaaataaccttaagaggatcaactgaaatgtgctgataggaatgaatcaacagagctctgtacctgcgggcacacaccggattcctgatacctcagctggcaccaaactgctcctgctcctctcyactgctgggtaagaacactgttctttgaaagctcctcctgtatctagcaggcttttgtatccttatgtaa

SEQ ID NO: 64429 - DNA, 600 bp, Chicken  19866894330337_2
ttacctttcccaagaattccctcctagataatcctcatgtcactgcagctctttgccctgctaaactatcaaagacttttgcctgtgcttacaaacaaaagttatgtgttcaaaggcactatggatccaaaacccagaatctggccacattaagtcaccttgtttgctgcttttagaactcagagagaatctaagacttgtaaagctattacaagcatctccaaaagtcctaactcytgcagatgcagtgactcaattgcttatgattgtctgccacaactatgtgtctgcctgttttawcctagtctagctaatgacctggagtttttcattctggactacaaataaccttaagaggatcaactgaaatgtgctgataggaatgaatcaacagagctctgtacctgcgggcacacaccggattcctgatacctcagctggcaccaaactgctcctgctcctctcyactgctgggtaagaacactgttctttgaaagctcctcctgtatctagcaggcttttgtatccttatgtaacatctttcttcagtttatcgctcggtcyccttcactacrgcattatttaatgctactgcattat

SEQ ID NO: 64430 - DNA, 600 bp, Chicken  19866894330337_3
ctgcttttagaactcagagagaatctaagacttgtaaagctattacaagcatctccaaaagtcctaactcytgcagatgcagtgactcaattgcttatgattgtctgccacaactatgtgtctgcctgttttawcctagtctagctaatgacctggagtttttcattctggactacaaataaccttaagaggatcaactgaaatgtgctgataggaatgaatcaacagagctctgtacctgcgggcacacaccggattcctgatacctcagctggcaccaaactgctcctgctcctctcyactgctgggtaagaacactgttctttgaaagctcctcctgtatctagcaggcttttgtatccttatgtaacatctttcttcagtttatcgctcggtcyccttcactacrgcattatttaatgctactgcattatctacagcaactgcaatatttggaatatcatttgtatgaaggacaatttgcaaggagttgttattgcactatgtactatttctgctcactgaagaagcagatatttaattcccagaacagtaaatcctttaatctgagcaaacctagatattgagctggaatctaaa

SEQ ID NO: 64431 - DNA, 543 bp, Chicken  19866894330337_4
gattgtctgccacaactatgtgtctgcctgttttawcctagtctagctaatgacctggagtttttcattctggactacaaataaccttaagaggatcaactgaaatgtgctgataggaatgaatcaacagagctctgtacctgcgggcacacaccggattcctgatacctcagctggcaccaaactgctcctgctcctctcyactgctgggtaagaacactgttctttgaaagctcctcctgtatctagcaggcttttgtatccttatgtaacatctttcttcagtttatcgctcggtcyccttcactacrgcattatttaatgctactgcattatctacagcaactgcaatatttggaatatcatttgtatgaaggacaatttgcaaggagttgttattgcactatgtactatttctgctcactgaagaagcagatatttaattcccagaacagtaaatcctttaatctgagcaaacctagatattgagctggaatctaaaatgcaataagtagaagataacagttttttcacctttctaga

SEQ ID NO: 64432 - DNA, 532 bp, Chicken  19866894330337_5
acaactatgtgtctgcctgttttawcctagtctagctaatgacctggagtttttcattctggactacaaataaccttaagaggatcaactgaaatgtgctgataggaatgaatcaacagagctctgtacctgcgggcacacaccggattcctgatacctcagctggcaccaaactgctcctgctcctctcyactgctgggtaagaacactgttctttgaaagctcctcctgtatctagcaggcttttgtatccttatgtaacatctttcttcagtttatcgctcggtcyccttcactacrgcattatttaatgctactgcattatctacagcaactgcaatatttggaatatcatttgtatgaaggacaatttgcaaggagttgttattgcactatgtactatttctgctcactgaagaagcagatatttaattcccagaacagtaaatcctttaatctgagcaaacctagatattgagctggaatctaaaatgcaataagtagaagataacagttttttcacctttctaga

SEQ ID NO: 64433 - DNA, 600 bp, Chicken  19866894330339_1
cagagaatacaggatcttttgagttggtaaggatccaaaaaggccacctggtccaacccccctgcaatgaacacggacacccacagctccatgctcagagcccatccagcctgaccttggctgtctccaggaatggggcacccaccaccttctttcttacagccccccattagatactgaagggcaagggctgctctcagatctccccagagccttctctccaccaggctgaacagcctcagctctcagctgggggcaacagtggtggtagggtagatggttagacttgatcttaaaagyctcttccaaccttaatgattcactgattctgtgatgcctcccagcgcatcctgtgacaccttggccagcagtgagcagtgggcatgctgtgccacactgctttgtacaaagctgaagtttcttcctcccccasttctgtgtaaaaaatgagcatacatttgtacgcagtgcacaatgctgtagccactacagatgcgtgggcatcctgcaggcatacaggcttctgctcatctcagtctctctctgcagctttggaaatgcacttctccagactgttcagctgccattaacatgcatgca

SEQ ID NO: 64434 - DNA, 600 bp, Chicken  19866894330339_2
tggggcacccaccaccttctttcttacagccccccattagatactgaagggcaagggctgctctcagatctccccagagccttctctccaccaggctgaacagcctcagctctcagctgggggcaacagtggtggtagggtagatggttagacttgatcttaaaagyctcttccaaccttaatgattcactgattctgtgatgcctcccagcgcatcctgtgacaccttggccagcagtgagcagtgggcatgctgtgccacactgctttgtacaaagctgaagtttcttcctcccccasttctgtgtaaaaaatgagcatacatttgtacgcagtgcacaatgctgtagccactacagatgcgtgggcatcctgcaggcatacaggcttctgctcatctcagtctctctctgcagctttggaaatgcacttctccagactgttcagctgccattaacatgcatgcagaaaggcacacagacaatttaacagagcagtgaaatgccttaaaaatctagtacaggaagcaaaaaaataccacttgcaagtattaaataaaagaagtatttgctacgttagcagcaatactcagagaacgta

SEQ ID NO: 64435 - DNA, 600 bp, Chicken  19866894330341_1
gtggccttcctctggacgcgctccaacagctcagtgattacacagtgctggctcgtgtccagcagccatccaccagcacccccaggacctttttggcagggctgctctcaatcctttcatccctcagtttgtgttggtaatgagggtagccttgaccgaggtgcagaccttgcacttggctttgctgaaccccatgaggttttcctgggcccactgctcagcctgtctgggtcctccaggtggcatcccatcccttgggcatgccaccacaccacacagcttggcatcactcttgcactyccacccttgaaagtgcctgctattaagcatcagagctcagaaatgtgttctcctgcttggtggaggatgaaaggcaaactgaatgcttgctacgagaaaaagaacactgcccatagatgcaaaactatatgatgcaagtgtgtgctggacgcatttcagagattcaaaagaagaatagtggagaggctttcaggcatgtatcagataacttcaaaatggaataaagcaaatgaagagcagattaattcaaatcctacactcagatgcatcgccaacctaacaatcaattacggggctacc

SEQ ID NO: 64436 - DNA, 600 bp, Chicken  19866894330341_2
taaaaaaaaaaaaaactaaactaaactaaactaaatatttcaaagcaacaggcaagtaacaatagctaaatgttacaaaataatggcatttgtggtcctccattttttgggatctggaaacttcccaaaagggtctaacattgtaagaatcagaatttcccaaatactgaaatcattaaaagtgctccagctaagcacccaaagagcaagggactaaacaacaatttctgctggaaaattcaacagtattttaaagaagggactgaagcctcagaaacctacaaatccccatcacctacrtgctaaaagtcaaatcctggtttgtaacctgtcacaatggaactgcagctatgaaatacagcagaaatatctgtatgcctgacccatcctgaaacactgcaatgagcttaggacagcgattactgattctgcttttctgttgttcagctgcatgatataggttagtcttctcttactatgagagtggtgagatgctggaacaggctgcccaggcaggctgtggatgccccatccctggaggtgttcaaggccaggttggatgaggccctgggcagtattagatatggaggttggcggccc

SEQ ID NO: 64437 - DNA, 600 bp, Chicken  19866894330342_1
ctgctttgtctaatgcctgtggatggtacacggctgccttgccagctgggaagggagagcctggcaggcagctcacagcactgctcacagcctggttggaaagaagagcaaaaggaaggtgccaccaccagcaagcaccaggggtacagcacaaatatccatgcaatgctgtgacttcagcaagcaagctggatgtacactgtgtgaggagctagaacactgcctgctccctgcctgggatacaccagcacagccacatctcaatgtcagcatccctgctcacctgcagcatgctggaasgattgggttctcttykagagaatttagggaattataagccacagaactagaaagaactggrttacaggttgtactaactccttgcatgccttgctggtagcaacagcagcctcagactccatctaatgaaaaactcaggagaagtgaagtggtgcaacaagcagaactggactgtgatccttaagctccccctgcctgcatctggaagtgtgcagcagtgcttgtttagctggaggaaaccagaaaattgctttgtgtaaaaaccaaactgaaagaagagaattgtttcctacttgattc

SEQ ID NO: 64438 - DNA, 600 bp, Chicken  19866894330342_2
cctgtggatggtacacggctgccttgccagctgggaagggagagcctggcaggcagctcacagcactgctcacagcctggttggaaagaagagcaaaaggaaggtgccaccaccagcaagcaccaggggtacagcacaaatatccatgcaatgctgtgacttcagcaagcaagctggatgtacactgtgtgaggagctagaacactgcctgctccctgcctgggatacaccagcacagccacatctcaatgtcagcatccctgctcacctgcagcatgctggaasgattgggttctcttykagagaatttagggaattataagccacagaactagaaagaactggrttacaggttgtactaactccttgcatgccttgctggtagcaacagcagcctcagactccatctaatgaaaaactcaggagaagtgaagtggtgcaacaagcagaactggactgtgatccttaagctccccctgcctgcatctggaagtgtgcagcagtgcttgtttagctggaggaaaccagaaaattgctttgtgtaaaaaccaaactgaaagaagagaattgtttcctacttgattcagatttcccttgtat

SEQ ID NO: 64439 - DNA, 600 bp, Chicken  19866894330342_3
ctgtggatggtacacggctgccttgccagctgggaagggagagcctggcaggcagctcacagcactgctcacagcctggttggaaagaagagcaaaaggaaggtgccaccaccagcaagcaccaggggtacagcacaaatatccatgcaatgctgtgacttcagcaagcaagctggatgtacactgtgtgaggagctagaacactgcctgctccctgcctgggatacaccagcacagccacatctcaatgtcagcatccctgctcacctgcagcatgctggaasgattgggttctcttykagagaatttagggaattataagccacagaactagaaagaactggrttacaggttgtactaactccttgcatgccttgctggtagcaacagcagcctcagactccatctaatgaaaaactcaggagaagtgaagtggtgcaacaagcagaactggactgtgatccttaagctccccctgcctgcatctggaagtgtgcagcagtgcttgtttagctggaggaaaccagaaaattgctttgtgtaaaaaccaaactgaaagaagagaattgtttcctacttgattcagatttcccttgtatg

SEQ ID NO: 64440 - DNA, 600 bp, Chicken  19866894330342_4
tggcaggcagctcacagcactgctcacagcctggttggaaagaagagcaaaaggaaggtgccaccaccagcaagcaccaggggtacagcacaaatatccatgcaatgctgtgacttcagcaagcaagctggatgtacactgtgtgaggagctagaacactgcctgctccctgcctgggatacaccagcacagccacatctcaatgtcagcatccctgctcacctgcagcatgctggaasgattgggttctcttykagagaatttagggaattataagccacagaactagaaagaactggrttacaggttgtactaactccttgcatgccttgctggtagcaacagcagcctcagactccatctaatgaaaaactcaggagaagtgaagtggtgcaacaagcagaactggactgtgatccttaagctccccctgcctgcatctggaagtgtgcagcagtgcttgtttagctggaggaaaccagaaaattgctttgtgtaaaaaccaaactgaaagaagagaattgtttcctacttgattcagatttcccttgtatgtctgagttgagattactttccctttgcaccagaaaactattattc

SEQ ID NO: 64441 - DNA, 600 bp, Chicken  19866894330342_5
catctaatgaaaaactcaggagaagtgaagtggtgcaacaagcagaactggactgtgatccttaagctccccctgcctgcatctggaagtgtgcagcagtgcttgtttagctggaggaaaccagaaaattgctttgtgtaaaaaccaaactgaaagaagagaattgtttcctacttgattcagatttcccttgtatgtctgagttgagattactttccctttgcaccagaaaactattattcaactagagaaggcacagggcttgccagatgaaatgcagatgcagctatcatttcagcrgatgcatgcagtttttactgtacccctaaggccaaccaaatctacaacacagaacaactgactacaatataaaatccaagcactaaacaggagagaaataatcctggcagcagccaatgtggagttgagtgaccaacaaaaatgtggaagcgtacatacctttaatggataattgaaggcttgttttcacatttataagctggttacctttttttgctaagcagtatgtaattacacaacttttcaaattctggttatgaattttacagcccacgtaagataagttctcaaaaacagcag

SEQ ID NO: 64442 - DNA, 600 bp, Chicken  19866894330342_6
aatataaaatccaagcactaaacaggagagaaataatcctggcagcagccaatgtggagttgagtgaccaacaaaaatgtggaagcgtacatacctttaatggataattgaaggcttgttttcacatttataagctggttacctttttttgctaagcagtatgtaattacacaacttttcaaattctggttatgaattttacagcccacgtaagataagttctcaaaaacagcagttcaagttacagcatttaattctgggttgtcagcaatgcagcctttaggaaatgcaaagctctcrtggaaaaaaaaactatcactgccttagggtcagagctycatttttgcatacaaaaatcaaataatttacagctcttgtttcaaattactataacttatcagaaagtgaagagcattaaagcagacagatttttccataaatacaagtattaaaaaaaaaagttgaatctcactgcatttttcaacaagaaaaaatcttcatcctgttttaaacaattattattattattattatagccttactacagcttccccttaagtcacttattgtccaaaaaataatctattaacatttcagaca

SEQ ID NO: 64443 - DNA, 600 bp, Chicken  19866894330342_7
ctggcagcagccaatgtggagttgagtgaccaacaaaaatgtggaagcgtacatacctttaatggataattgaaggcttgttttcacatttataagctggttacctttttttgctaagcagtatgtaattacacaacttttcaaattctggttatgaattttacagcccacgtaagataagttctcaaaaacagcagttcaagttacagcatttaattctgggttgtcagcaatgcagcctttaggaaatgcaaagctctcrtggaaaaaaaaactatcactgccttagggtcagagctycatttttgcatacaaaaatcaaataatttacagctcttgtttcaaattactataacttatcagaaagtgaagagcattaaagcagacagatttttccataaatacaagtattaaaaaaaaaagttgaatctcactgcatttttcaacaagaaaaaatcttcatcctgttttaaacaattattattattattattatagccttactacagcttccccttaagtcacttattgtccaaaaaataatctattaacatttcagacatctgggacctggcttgcattactcgtgctttattccaa

SEQ ID NO: 64444 - DNA, 599 bp, Chicken  19866894330344_1
  misc_feature (1)..(29): n is any nucleotide
nnnnnnnnnnnnnnnnnnnnnnnnnnnnntcctgcaggcacgaaggaggagagtggtggtttagtgtcccagtttgttcttttttctttgggtacatgccagccttaccacggccctcctgcactgctatttaattggaatgtgagccacaatggaggctacactgtccatctcaggaacttcttctcagtaagttcacagtgggtgatcatccacaactgcacttagtgcaatcagtagttgatcttcaggagccatttattttagttacacttctaaatttcagaatcacctgccccracagctaccaccttaactcacagcaacaaggggtagaagaatatatttcctaagcatatgcagtaggatgattttgtatacagttttacaaagctctattattgcactggttttgtttttgttttatttgtttgttttacatcagaattactttatttctaagtgtgaaaattcctggaagggttagagggtggcttggagcagctctgcattacagttttctaagcctcagaataaaactcaaaattctcctagaaaacatagtccacataattgtattgtacttgagaaactctaga

SEQ ID NO: 64445 - DNA, 600 bp, Chicken  19866894330349_1
gttactcagggaaaagcagaggcaaggcacaagtgggctgtgggtagctccatgtctccaaagccctgccttcattactatgcagtgcaagtggctgctggcacaaggacaaattccactgtaagttatgcgtgatttacatgagaagctcattaattctccaacaccgggatttagatggtttcatttgtaaagggtgtcattttaaacactgcttaaacatatttccctctatctgctgactcagagtgtgtgctgaaagatgataaacagtaaagtgtgtatgtgtttataaatacwtgcacacacacacgcaygcgtaaaggatggtattaattaggaggtacattacttgcttagtaatggtgctgctggtatacaaacggtctgcctggttaacaacttggactgtctcaccatttgcacaatctggagcttgcaggttttttattgtgcttgttgatgctgaggtattatcttctttgtgcttcgatttwagtattgaacctgaatcctaatgtttgttatctgctctcctagtccttttttaagggcttttccttctttctgggtatcaactggcatcaacagtgctggcag

SEQ ID NO: 64446 - DNA, 600 bp, Chicken  19866894330349_2
agaggcaaggcacaagtgggctgtgggtagctccatgtctccaaagccctgccttcattactatgcagtgcaagtggctgctggcacaaggacaaattccactgtaagttatgcgtgatttacatgagaagctcattaattctccaacaccgggatttagatggtttcatttgtaaagggtgtcattttaaacactgcttaaacatatttccctctatctgctgactcagagtgtgtgctgaaagatgataaacagtaaagtgtgtatgtgtttataaatacwtgcacacacacacgcaygcgtaaaggatggtattaattaggaggtacattacttgcttagtaatggtgctgctggtatacaaacggtctgcctggttaacaacttggactgtctcaccatttgcacaatctggagcttgcaggttttttattgtgcttgttgatgctgaggtattatcttctttgtgcttcgatttwagtattgaacctgaatcctaatgtttgttatctgctctcctagtccttttttaagggcttttccttctttctgggtatcaactggcatcaacagtgctggcagtgataggcaaagttttt

SEQ ID NO: 64447 - DNA, 564 bp, Chicken  19866894330349_3
tgtcattttaaacactgcttaaacatatttccctctatctgctgactcagagtgtgtgctgaaagatgataaacagtaaagtgtgtatgtgtttataaatacwtgcacacacacacgcaygcgtaaaggatggtattaattaggaggtacattacttgcttagtaatggtgctgctggtatacaaacggtctgcctggttaacaacttggactgtctcaccatttgcacaatctggagcttgcaggttttttattgtgcttgttgatgctgaggtattatcttctttgtgcttcgatttwagtattgaacctgaatcctaatgtttgttatctgctctcctagtccttttttaagggcttttccttctttctgggtatcaactggcatcaacagtgctggcagtgataggcaaagttttttttgtttgtttgtttgttttccatggagaagtggcagtttgcttgcacttggagttagcctgctacgttggaatagttgtgtgtttcttgtatgtgagatatatgcttaggattgaagagctctgcaaaaatgcttgctgttgc

SEQ ID NO: 64448 - DNA, 600 bp, Chicken  19866894330360_1
acatgcattgttgagttgatattataggtgccatcaatgtgaaatagcgcggcagttaaaagcatagccttggtctgactgagagcgtagggctattaataaagcagagagctgctaaaggcttggatccatagtaccgcatttgttaaatcccattatctgcgagtttaaattgaacgcagctgtaggcaacctacacccttctgtaaagaacccgcacatgctgttacgttgatagtaaatttgccatattttttcaaattaaaccccctaggaatttaaatgctgagcataacaatrttctctaatttttattttatattaaaaagatattttaaaaatcattttacaatcatggtttctccatcagcctgttactcgtccatattagcccatagaatcattcgttagcagttgtagaccagatgtgctgaatgcaaatcactccatttgggtgtctaaataataccatgtgtgcgaagcagcttcccgcagactgtcccaagacataaagcaattgtttttaggtcataaaccttaaatcttgttatgcaacagagactctgagctagcagtggtttgtattcattgccatgtcac

SEQ ID NO: 64449 - DNA, 600 bp, Chicken  19866894330360_2
actgtttaatgcacgaggcgtatgatgtagtgaggagtgtatctgaaagttagcagagcgacaaattgcatggggcttaggaatccttgtcttacacttaaggaaggtgctctaaaaatgtaatctcgccattaggcgcccatagtgttggcaaattgcagccataaagagcgagagcacggctgggctgtgcagggggagtgacaccggcacggagctgagcagggatgcgctgcagagatgtggcaatgagggatttatgcggcctgcggagagggctccctgcggcacggccgctcrgatggaaccgctcccctccttttattttgctatataaaagtacataaaatttaatccaagctatgtaatctcaaaagccagaacctgacaagtggaccacttgggagcagcaagcaggctgaaatttctcactcccctggaacagcccataattatgtgacagaggctggcaaccggagctctgcacggctggagcttcaaaaaattaatggctgcatcagatgttatcttctgcttatcttcctagcaggggcgggcggtgcaggcggtcagcagggaggggtgggatggagaacctca

SEQ ID NO: 64450 - DNA, 599 bp, Chicken  19866894330367_1
  misc_feature (1)..(43): n is any nucleotide
nnnnnnnnnnnnnnnnnnnnnnnnnnnnnnnnnnnnnnnnnnnaattctttttgtatttagtagcacagccctcaaacccatatctctccaatttagagataaggacatggtgcaacaccatgtcagaggccttacccaggtccagggagacaacatcagttatccttcccttgtccactagtgccatcttaagaatacttttgtaaggacatggatttactcacagaaaatgcaacatgtatattgtcttgtggggttagtttaaagcacttcgtttcagtcgatatttcttttgtagrtttttaaattgtcacttatgtcaggactaataaaagttatctgagctctaagagaagctttgtacagcacccttctcattacttctgattcctctgtggataacaacttttaaaaaactattaaatacaggacattaaagaaaactaaaatgttaaaaaaggagaaatacagtgctgtagtgaaatcataataacaaatcgtagatttctaagagagcgtctccaggaaaacagagtctgaaacaaggtacatttcttttgctcattccaacatttgcaatggtttgaaaacactgtgt

SEQ ID NO: 64451 - DNA, 600 bp, Chicken  19866894330369_1
tacagctagagagccttctagtcaggagcatctgctgaagattttgtccttgatgtaagagagatataaaataatttctacttcttagaaatctgtcaatgtggatacagctttttttttcccccttaatctttttcagtgtaagttgtagaaagtattttatcacagagctaaacatgttgtgttgtaatcaaaattattgaagagatgaaatacagtactgagctacatgaagtacaaaaacagtattacatcctaatctcgtcaaagaagcgaaagaattatctagcatcgaatttmctaattgcctattctcattaaaaataactaggtatgttaacttggtttaaagattagaaatagttgaaaattattgccttggataatctgatgttgtcattcacaactgaaatttaagtaatcttaaaataaataagatttagtgtgctatactatatgtaatcctagacacctgacgttaaagaaagattaactgaaataagcacaaggcagataaaaagatattgacatgatcggagtccatcagctaatttctgagagaaatgagctgagtttgtttagccttgcaaacctatggct

SEQ ID NO: 64452 - DNA, 600 bp, Chicken  19866894330377_1
tccatgtctttaatagccagcctaatagtaacgcattcatgcttctccactaagaggcacttttagcaatggctttcagtcattctctgtggaaatacagagttgcattaaatcccagtaattaagcaatttcagctgtctttgagctttcggttctgcagttgccttgtgagttaggatccctctgtcctgctgctgcaaactctgcctgttcgtgtgtgcctggactccaaggagaaacacatgtaccatttcaccattatctgcaaaaacaccgcaaaggaaaaagaacaggctcaygatyaatgagtccattttaagtcagctcttgtggtttctgcttgctgctgcagcattttttgtgagcacccaaagcagcaagggctgcaccgccatcctgagctgatccgtggccactcgatatcagtgggatttttttctagtgaattcactgggctttggatcaggcccaggaggcacctgaaaatcagctaatgaaagggcagctccaaagctccatgatttcggcagccactcacccagcacaaacagtgaattacaaacaacaggcactggcagaaataggcataagcagtcttt

SEQ ID NO: 64453 - DNA, 600 bp, Chicken  19866894330377_2
tgtctttaatagccagcctaatagtaacgcattcatgcttctccactaagaggcacttttagcaatggctttcagtcattctctgtggaaatacagagttgcattaaatcccagtaattaagcaatttcagctgtctttgagctttcggttctgcagttgccttgtgagttaggatccctctgtcctgctgctgcaaactctgcctgttcgtgtgtgcctggactccaaggagaaacacatgtaccatttcaccattatctgcaaaaacaccgcaaaggaaaaagaacaggctcaygatyaatgagtccattttaagtcagctcttgtggtttctgcttgctgctgcagcattttttgtgagcacccaaagcagcaagggctgcaccgccatcctgagctgatccgtggccactcgatatcagtgggatttttttctagtgaattcactgggctttggatcaggcccaggaggcacctgaaaatcagctaatgaaagggcagctccaaagctccatgatttcggcagccactcacccagcacaaacagtgaattacaaacaacaggcactggcagaaataggcataagcagtctttagtc

SEQ ID NO: 64454 - DNA, 600 bp, Chicken  19866894330379_1
ttatctctttcaataagacgaacgtttggaacaacgagaaaaagccaccgactcctctcctacagtgatttttcttcccttgaaatataaacctactctgccccctgttgtcagcactcggcaccgggtaccctgcggcaacaggcagacagtggggcctcatggactgaaatagcagtatttaaaacagaaaggagcgtttcacaaaggtattccagaaatatgttgctgcacagtgaaaaacgttcctgaattattgctgttcccagcaactgtgtggcattcctgagcagcacgtcyctacctgccaaaagagaggtggctgataatgcaaactcagaaacacagcttcaacgttagagtacacctaacaataatacttgcactcacgtgtccctttttgaataaacaagcagaaggaatagcttagcgatctaagctagtgtaaaatactccttgaagccgcaggtttaagtgccagcagggtcagttcacatttctggaggcactgaatgccaggctggatggggctgtgagcaacctgggctagagggaggcattcctgcctataggagggggttggaattagatcatcttaaa

SEQ ID NO: 64455 - DNA, 559 bp, Chicken  19866894330379_2
ttgaagccgcaggtttaagtgccagcagggtcagttcacatttctggaggcactgaatgccaggctggatggggctgtgagcaacctgggctagagggaggcattcctgcctataggagggggttggaattagatcatcttaaaggtcccttccaacccaaaccttttcttgcttctatcatgcccatacccaggccagagcagatgaccttgctgtagactcatgcatgtgatccagagtaggactaacatctctgtacttcacaccatcatcctcactgggacccctttggtcagcgycttttgctcagttgagctttggttgtgagacagtgccttgccactaaagaaacaccacaatcctggaaagcagaacactaagcagtcgcactgagaagttaccagggtctgctttcaacccatctgtgaagatttgcttttaagcaacttattctgctgtttgcgtgttttctcatgtgagaacagagggaatctaaacactcaagaaacatattttggccttgcctgttggtttaactcataaatatgaaaaatctgg

SEQ ID NO: 64456 - DNA, 600 bp, Chicken  19866894330391_1
cccttctaccatgcaaggtagcaggtttgcttctctttcaaaatctccagtttccttttgagcaagggaagagctgaggaggcaggtaattaaaagggcaactgcaaaacagcagaaatctttattatggcagaaatcctgacagttttaagctgttttgaactgttggcactaaattcaatgtagacacatcagtacacttggttttatactggtaagactcctcaaatgatctgtgtgggcaccttgtcatgtgattctgtggctggagaacctgatcttgtgaacactgatttcagygcacatatctgagtggagtattagrcagcagctcactgctaagggagttcaccttgtgatgtctctgggcaatacacgatagagacgctctttgcgttcctgcagcttatatcaaatgcccacaatgatgtggataaggataatttgttaaataaatrctcctgtgtcagtgctctggcaggagataccatgggaattatctgtatgcaaaagaatattttaagttgagaacatctacaggaatgatcaataccaaatctactgttaccattgatttaggcataattagtttgaatgaag

SEQ ID NO: 64457 - DNA, 600 bp, Chicken  19866894330391_2
tttgcttctctttcaaaatctccagtttccttttgagcaagggaagagctgaggaggcaggtaattaaaagggcaactgcaaaacagcagaaatctttattatggcagaaatcctgacagttttaagctgttttgaactgttggcactaaattcaatgtagacacatcagtacacttggttttatactggtaagactcctcaaatgatctgtgtgggcaccttgtcatgtgattctgtggctggagaacctgatcttgtgaacactgatttcagygcacatatctgagtggagtattagrcagcagctcactgctaagggagttcaccttgtgatgtctctgggcaatacacgatagagacgctctttgcgttcctgcagcttatatcaaatgcccacaatgatgtggataaggataatttgttaaataaatrctcctgtgtcagtgctctggcaggagataccatgggaattatctgtatgcaaaagaatattttaagttgagaacatctacaggaatgatcaataccaaatctactgttaccattgatttaggcataattagtttgaatgaagacaaaagactgtcatcaaaagtaat

SEQ ID NO: 64458 - DNA, 600 bp, Chicken  19866894330391_3
tgaactgttggcactaaattcaatgtagacacatcagtacacttggttttatactggtaagactcctcaaatgatctgtgtgggcaccttgtcatgtgattctgtggctggagaacctgatcttgtgaacactgatttcagygcacatatctgagtggagtattagrcagcagctcactgctaagggagttcaccttgtgatgtctctgggcaatacacgatagagacgctctttgcgttcctgcagcttatatcaaatgcccacaatgatgtggataaggataatttgttaaataaatrctcctgtgtcagtgctctggcaggagataccatgggaattatctgtatgcaaaagaatattttaagttgagaacatctacaggaatgatcaataccaaatctactgttaccattgatttaggcataattagtttgaatgaagacaaaagactgtcatcaaaagtaataacttgaagcatagcagctaatgcaataggtggaagccttcatccgaggtgtttagggaaggtgttttgatctcctgccctggtgacgtgactcagtgtgttgactctggctggatttgcccgggttggtttg

SEQ ID NO: 64459 - DNA, 600 bp, Chicken  19866894330393_1
ttgggaatagaacaataaaaaactttaaatgtttataaaagaaatgaggcactggctgtcatcctcaattttgactgcatccaggaaagtaagcagagcaatttcctgttttaattgtgcattctgcaataattattccacattagaagcataataattgtttttagaataaagtaactcttagagtactcaatgaagtacctattggtcatctgccttgcatagaaaatgttaacagcttaaaacatagtgaaaggtgggttattacatacttaatgtcactggttctgctaattttgmtgggtctgttgtttgcaaataggtccccaggtattgctacaaaacgaagacctagatctccagatttcttcataccttgtgcatgacttctgatggttcaagtccttagtcacagaatcatggtcatttatgatgcctacttttattattgtggtttgttctccctgaaattgatcagcctgaaaaagacagcaaagactcctatgtaggctcaaactaacagtaaaacgggctccaatttctattttgagttcattgttgttggctggttggtttgctttgcgtgtctagttgtgttgg

SEQ ID NO: 64460 - DNA, 600 bp, Chicken  19866894330395_1
taagaaatgatacacaaaacaatccaacacaacaaaatatcagagtgagcagccctacagtgaaatagtctgtgagcatagattcttcttgctatgttcaatactgcactgataatgttagcgtggccaagggtgttgcatttacttgcatactgctatgaattacgactgtctgctcttaccagactacttctaccattgctgatggaagagttttttcctcagtccgcagttgttcattagcctcactagaagaaggatcaaccttccacagtcttccataattctgagcaaattacrttttaaaaagtaatcattgattcctgagatttgacatacaataggaagcactttaaaagtggctttggatattcttaattagctcaagaattacaggctcatttcttttttatgctgctattagaagcatttatctcaactgatttcaacagagttgcttctgtcttctctggggtgagaaaaaaatcaagttgcataaattgataacagttctttcttactgcctctttattactagataaaactttgatgaaggacatacacagaagatcaatataagaaatcacataagacctgact

SEQ ID NO: 64461 - DNA, 600 bp, Chicken  19866894330397_1
tcacaggatttcagtggcacgacacagcagctgacacaacaagggagaaaagggttcctacctgttctccatctgaactcacccgaattattcaagaaatgctctcaattggcacaaactcctccctggcagtccatacccaaataactgttttcattctggacccagttgttttccattggacttcacagatgcataaggaattcattagctacacctccttcattcatgtttatgtaagcaaaatttaaaaaagaaaccactcagatagccattgtgttgtattccaagattcttccrcaaactcttttaggatgtggtcccattgtttgtygsagtaccagaaactctcctccattgcttccctgggttttaaaccacaaaataactcccaccaaactggaactgcagttcccmttaactctttcagaaaccacatctatgtctcaacagcatcagctacatggctatttttacaaggctggctccagtctcatctctagcaattacagcacagaacaacactagatatttttttctcatctgtcatggacagattcattctttcaacaagcaggtcgcactattccttcttctttc

SEQ ID NO: 64462 - DNA, 600 bp, Chicken  19866894330397_2
cacaacaagggagaaaagggttcctacctgttctccatctgaactcacccgaattattcaagaaatgctctcaattggcacaaactcctccctggcagtccatacccaaataactgttttcattctggacccagttgttttccattggacttcacagatgcataaggaattcattagctacacctccttcattcatgtttatgtaagcaaaatttaaaaaagaaaccactcagatagccattgtgttgtattccaagattcttccrcaaactcttttaggatgtggtcccattgtttgtygsagtaccagaaactctcctccattgcttccctgggttttaaaccacaaaataactcccaccaaactggaactgcagttcccmttaactctttcagaaaccacatctatgtctcaacagcatcagctacatggctatttttacaaggctggctccagtctcatctctagcaattacagcacagaacaacactagatatttttttctcatctgtcatggacagattcattctttcaacaagcaggtcgcactattccttcttctttcttgcagtattaattcctactgcagatcatcacat

SEQ ID NO: 64463 - DNA, 600 bp, Chicken  19866894330397_3
caacaagggagaaaagggttcctacctgttctccatctgaactcacccgaattattcaagaaatgctctcaattggcacaaactcctccctggcagtccatacccaaataactgttttcattctggacccagttgttttccattggacttcacagatgcataaggaattcattagctacacctccttcattcatgtttatgtaagcaaaatttaaaaaagaaaccactcagatagccattgtgttgtattccaagattcttccrcaaactcttttaggatgtggtcccattgtttgtygsagtaccagaaactctcctccattgcttccctgggttttaaaccacaaaataactcccaccaaactggaactgcagttcccmttaactctttcagaaaccacatctatgtctcaacagcatcagctacatggctatttttacaaggctggctccagtctcatctctagcaattacagcacagaacaacactagatatttttttctcatctgtcatggacagattcattctttcaacaagcaggtcgcactattccttcttctttcttgcagtattaattcctactgcagatcatcacatct

SEQ ID NO: 64464 - DNA, 600 bp, Chicken  19866894330397_4
actcctccctggcagtccatacccaaataactgttttcattctggacccagttgttttccattggacttcacagatgcataaggaattcattagctacacctccttcattcatgtttatgtaagcaaaatttaaaaaagaaaccactcagatagccattgtgttgtattccaagattcttccrcaaactcttttaggatgtggtcccattgtttgtygsagtaccagaaactctcctccattgcttccctgggttttaaaccacaaaataactcccaccaaactggaactgcagttcccmttaactctttcagaaaccacatctatgtctcaacagcatcagctacatggctatttttacaaggctggctccagtctcatctctagcaattacagcacagaacaacactagatatttttttctcatctgtcatggacagattcattctttcaacaagcaggtcgcactattccttcttctttcttgcagtattaattcctactgcagatcatcacatctaacattattagtagaaatgactccaatagtacgacttcagtactgccaaatcaactccagtaatacagctttaaacagcac

SEQ ID NO: 64465 - DNA, 600 bp, Chicken  19866894330402_1
ctgcatttagatgtccatcaaacaacaaaacaacaaaggcaaatctgcaatgtagagatccattatgctttatttacatgcgtcaccatctcttttacaaactagattacaatttaaaatggaatacacaaggcaatatctactaacaccaagtggagtaagcactgcgtctctacttcgtttggaaaggggcaggttttgctccaaaacaaacttccttccaatctctgtgtagtaaggtaatatattcatccagggcagcatcttatgttgttggtttttttttttttaatttttttwaaattattttataaaatcctcagtaagactgcaaacatgagagtgtctgctttcaaatgaaagtacaagatagcccaaatgaaaagtataaactgttcagctcttcggtatgtaaagacggccatgcgcgctaaggctgtggatttaatattcttccaatttacatggcttgaaacaaaaacagataaaacagttttacagatactgtatacatattttttccaatcatgcaactttttttaaaaaaagttaaacatgtgaagccaaatgtacaatccatttttccaacccataggaaca

SEQ ID NO: 64466 - DNA, 600 bp, Chicken  19866894330406_1
ttcccacatcttttcccaccctttctcagtgcccagctgctggcagtgacctgggtgtagaatcattaaggttggaaaagaccttttaagatgatcaggtccaaccatcaacctgggcacggcccaggtgccttcagtagctctggtgctctttctggagagaggtgatgttctggggcattcaataatttcttgtggctccatggtcatcacagctggtaggagctctgtcttggtgccattcatctctgatactttccatccaccttggtgagatgttttagacccaagccaccttargtgatctaaaacagactgtgatcagcacctctccctgtccctacagctccatttcattgtggcagcaatggccatcatggtgataaccccatcaagcccacttagcatggttcattttccaaaggatgcctgtggcagcagggctgggcartgcaaggaggtggcttaaccctggtgarcagtggagtcggtgagcaggagaagagccccgtggcccaacaggagctgggcaggggagagccattgattttatgacaaggggcacagcgttgtcagcacggtatggggacgtttcaatta

SEQ ID NO: 64467 - DNA, 600 bp, Chicken  19866894330406_2
tttctggagagaggtgatgttctggggcattcaataatttcttgtggctccatggtcatcacagctggtaggagctctgtcttggtgccattcatctctgatactttccatccaccttggtgagatgttttagacccaagccaccttargtgatctaaaacagactgtgatcagcacctctccctgtccctacagctccatttcattgtggcagcaatggccatcatggtgataaccccatcaagcccacttagcatggttcattttccaaaggatgcctgtggcagcagggctgggcartgcaaggaggtggcttaaccctggtgarcagtggagtcggtgagcaggagaagagccccgtggcccaacaggagctgggcaggggagagccattgattttatgacaaggggcacagcgttgtcagcacggtatggggacgtttcaattagtgctggtgggagggatcctggggacagcagggaaagcaacgaagcggctgctgtttatttcctaacagtgaaaaatgaggcccgaattagaatccctattaacaattagcataatcaaaggagacacgttataatttcagcagaaatgtg

SEQ ID NO: 64468 - DNA, 600 bp, Chicken  19866894330406_3
attcaataatttcttgtggctccatggtcatcacagctggtaggagctctgtcttggtgccattcatctctgatactttccatccaccttggtgagatgttttagacccaagccaccttargtgatctaaaacagactgtgatcagcacctctccctgtccctacagctccatttcattgtggcagcaatggccatcatggtgataaccccatcaagcccacttagcatggttcattttccaaaggatgcctgtggcagcagggctgggcartgcaaggaggtggcttaaccctggtgarcagtggagtcggtgagcaggagaagagccccgtggcccaacaggagctgggcaggggagagccattgattttatgacaaggggcacagcgttgtcagcacggtatggggacgtttcaattagtgctggtgggagggatcctggggacagcagggaaagcaacgaagcggctgctgtttatttcctaacagtgaaaaatgaggcccgaattagaatccctattaacaattagcataatcaaaggagacacgttataatttcagcagaaatgtgctctctgatgatacggtggcctgagata

SEQ ID NO: 64469 - DNA, 600 bp, Chicken  19866894330407_1
gtgaccatgccagctacagactacaatattttcttcttctttcagcatggtaatagaaagttttctatatcatcttcatcatttcattaatgttcctcataccgaggagggtagtgatttaaagttttgacttgactgtgctgttatgaaaaaaacctaaaatagttactaccagacagtatgctacactatgttacacatctttggctaatgccactgtgcttcagccagcattatgtgtctcatattagtaagcatcatttgtaaagtacacagatttctgatcagaagatctacttsttgtgaatccacttaatgagcagaacatatagtgacatttgtaaaagcctccttccaacactgtgtcttcttgtactaaaatacacattatttttttcctataaagtcattcaagastttaatatacamgcagacaaacaaagaatattcactgaggcagcacttccttcccgccattactcaagcgatctccaccaattacatgtttctcttctgttccatgggggatgagattgcatttcagcatcttgctttctgtcagatagcttcagctctggggcagcttcattattggaataa

SEQ ID NO: 64470 - DNA, 494 bp, Chicken  19866894330407_2
tttaaagttttgacttgactgtgctgttatgaaaaaaacctaaaatagttactaccagacagtatgctacactatgttacacatctttggctaatgccactgtgcttcagccagcattatgtgtctcatattagtaagcatcatttgtaaagtacacagatttctgatcagaagatctacttsttgtgaatccacttaatgagcagaacatatagtgacatttgtaaaagcctccttccaacactgtgtcttcttgtactaaaatacacattatttttttcctataaagtcattcaagastttaatatacamgcagacaaacaaagaatattcactgaggcagcacttccttcccgccattactcaagcgatctccaccaattacatgtttctcttctgttccatgggggatgagattgcatttcagcatcttgctttctgtcagatagcttcagctctggggcagcttcattattggaataaggacagaaaat

SEQ ID NO: 64471 - DNA, 482 bp, Chicken  19866894330407_3
acttgactgtgctgttatgaaaaaaacctaaaatagttactaccagacagtatgctacactatgttacacatctttggctaatgccactgtgcttcagccagcattatgtgtctcatattagtaagcatcatttgtaaagtacacagatttctgatcagaagatctacttsttgtgaatccacttaatgagcagaacatatagtgacatttgtaaaagcctccttccaacactgtgtcttcttgtactaaaatacacattatttttttcctataaagtcattcaagastttaatatacamgcagacaaacaaagaatattcactgaggcagcacttccttcccgccattactcaagcgatctccaccaattacatgtttctcttctgttccatgggggatgagattgcatttcagcatcttgctttctgtcagatagcttcagctctggggcagcttcattattggaataaggacagaaaat

SEQ ID NO: 64472 - DNA, 600 bp, Chicken  19866894330410_1
cttattaccagcgctctccatctgccccttgccccaacatggctcacctctattttagagtacgtctgaattcctgctaatggtttgtgactgcatcactttgtaaaggccagacctttaacaaaatgcatggtttccctgataggatgtgtttggctcacgttcgtgtgagcataattggctgttgaggaatgcctctggcaagaagaatgtgagcagggacagctttgatttacttcctgcctctgcatgaagggggacataatgtcactaacagcaaaatcacagcacaggttgaasaagatgatgggttggttcccaggttcatgcaggtcaccatctggtgctgtgacagcccggaaagccctttagcttgtcccagaggccctggatttctggtgccaaaggctcttgggcaatttgttacatctcagagttgactgttagaggtggaacaatataggaataaacatcatgctacctatcccggccagctgagaaatttcaaattcaaagcaataatcaaggggaaaaacacgaagaagagaagatatactgtgtgtcctcttattttgatcctgatttttgttcaggacatgc

SEQ ID NO: 64473 - DNA, 469 bp, Chicken  19866894330410_2
aaagccctttagcttgtcccagaggccctggatttctggtgccaaaggctcttgggcaatttgttacatctcagagttgactgttagaggtggaacaatataggaataaacatcatgctacctatcccggccagctgagaaatttcaaattcaaagcaataatcaaggggaaaaacacgaagaagagaagatatactgtgtgtcctcttattttgatcctgatttttgttcaggacatgctcatagtcaggattcagcacaaccctgactgagccaactgtctgatgtgctgtaaacagrtctcagccctgttcctctgatttgttaagagaaagttgttttagagctaagtctccccagcttagaccttgtgttcttcatttgcacaatctgaagatttgtatgtacagatcagtgtgccaacagttttggtagcaaaaagaaatgcaaggtagaagaagaggcccca

SEQ ID NO: 64474 - DNA, 599 bp, Chicken  19866894330417_1
  misc_feature (1)..(105): n is any nucleotide
nnnnnnnnnnnnnnnnnnnnnnnnnnnnnnnnnnnnnnnnnnnnnnnnnnnnnnnnnnnnnnnnnnnnnnnnnnnnnnnnnnnnnnnnnnnnnnnnnnnnnnnnncaacagattattctctctcctaaaaatacattctgaaatgatcactttaaatacgtacactaccagactgtgtacatgtacccagggcagaatacatctttatacttcagtgtaccctgctaatcacatgccatctggtaatatattatgtattcaaagatacacatgatacatcgagacacatactgtaggtayattatagtgtgaggaaggaaggaattcatcagatgtattcacacaagtgtaaataacttctcatcccagagagcagaacagtttttaaagtacaatgacattttgaaagatctgcattatagctagaattgagaattttttttaatgagtctgagcactcagtgatgcattaaagacttcatctgattcccataaaagtaattggaaagacctgctgacttcaaccatctctgaatcaggcccagtagcacattaattgagggtgagtttacatctgcagcaagcccaaattagttctc

SEQ ID NO: 64475 - DNA, 385 bp, Chicken  19866894330417_2
tgggttcagttttagttagaaagaagtggtttcactaacagataagcctttagaggggcatagccagagtgctctttgaggaagatgctgtattgctgtcttcattttcttcttatcctcctcctttccctctccatcttcattcttacctgcccaccatctgcagattcaattggtcacagatcaaattttgattcccatgcatgccagatttcagcatctcttaactacaagacactcccacactctgcaggttgctggctttctcagtaattactgctccaccatcatccccaaggkggaaaaaaatctgctgttgccccattaccagctgtcttctgatgttactgtaactcctatctccctcaaggtattcttgctatta

SEQ ID NO: 64476 - DNA, 517 bp, Chicken  19866894330421_1
catgcagggatttataaagggttaggacacttataagacagaataactgggatttatggtgtggatgggctcacactgaaatagctgcaagtagggttagttccctgtgcccttggaggaaggactgaggagggagagcatcattcagagctttgtttatctgcagggattgcaccttgagttcctgtatgtgaaccaaacagaaccagtttcctctgcagcaattacagtgccacagtgaatcaagtctccaaggacaccagcagcccatccctcggacacagcctggcagagcagggsagatggaggctgaatgctcagtgtagggcagcatagagagttatcagcagacggaactgggtgagggtctgattaccaggagagtgaaataggctgtgccaagccttggagatcctcaaagcatgaatgaaatgtccctgaaaaggaccctgtgttctgcagtgaggataggtgatgcccatcaagaaaaggtatttcagtcgtgggggtagcaaga

SEQ ID NO: 64477 - DNA, 600 bp, Chicken  19866894330426_1
catttattgagtacccagtgaggagaagaagaaaacacggcaatgcgtttctccgttcccttccatctctgacattagtgtattccctgttgcaagcaccttacctgtcctcttctgcataggccatcctcctcctgctcagcccaagaagggggaagctgctggaagtggagccgcagcttttttggccagcccaggagcagaacccaagagcaggtaggtgcccacagagctgccgccagccccagctgggctctgctgtccctaatccctggagagcaggggcacgtcgggacagcrgcttttctggtctcactccacagcaagccagctccagagctctgcggaaagccccacacrtgcttttatcatgcagatggagcctatggaaagttcacgtgtgacttttcagcaacctctcagagcagctgacagcaaagctgcatcaacrtgcacgcgcttgcgtcaacctgcagagtctgcaggtcaacccatgccacccagcactgcaacgagatgcttccacatctcatgttatcttcccattcattcatacttgtcctgctagctccctgcaattctccattcatttaattgcta

SEQ ID NO: 64478 - DNA, 600 bp, Chicken  19866894330426_2
ttccatctctgacattagtgtattccctgttgcaagcaccttacctgtcctcttctgcataggccatcctcctcctgctcagcccaagaagggggaagctgctggaagtggagccgcagcttttttggccagcccaggagcagaacccaagagcaggtaggtgcccacagagctgccgccagccccagctgggctctgctgtccctaatccctggagagcaggggcacgtcgggacagcrgcttttctggtctcactccacagcaagccagctccagagctctgcggaaagccccacacrtgcttttatcatgcagatggagcctatggaaagttcacgtgtgacttttcagcaacctctcagagcagctgacagcaaagctgcatcaacrtgcacgcgcttgcgtcaacctgcagagtctgcaggtcaacccatgccacccagcactgcaacgagatgcttccacatctcatgttatcttcccattcattcatacttgtcctgctagctccctgcaattctccattcatttaattgctacactcacctcaaaaggaaatatcacctcgagtcacagaatcacagaaatgtaggggttgg

SEQ ID NO: 64479 - DNA, 600 bp, Chicken  19866894330426_3
ggggaagctgctggaagtggagccgcagcttttttggccagcccaggagcagaacccaagagcaggtaggtgcccacagagctgccgccagccccagctgggctctgctgtccctaatccctggagagcaggggcacgtcgggacagcrgcttttctggtctcactccacagcaagccagctccagagctctgcggaaagccccacacrtgcttttatcatgcagatggagcctatggaaagttcacgtgtgacttttcagcaacctctcagagcagctgacagcaaagctgcatcaacrtgcacgcgcttgcgtcaacctgcagagtctgcaggtcaacccatgccacccagcactgcaacgagatgcttccacatctcatgttatcttcccattcattcatacttgtcctgctagctccctgcaattctccattcatttaattgctacactcacctcaaaaggaaatatcacctcgagtcacagaatcacagaaatgtaggggttggaagggatctctacagatcatccagtccagcccccattctaaacttgaatgattacattaagggacacatgggaaacaaaacagaggcccac

SEQ ID NO: 64480 - DNA, 599 bp, Chicken  19866894330432_1
  misc_feature (1)..(123): n is any nucleotide
nnnnnnnnnnnnnnnnnnnnnnnnnnnnnnnnnnnnnnnnnnnnnnnnnnnnnnnnnnnnnnnnnnnnnnnnnnnnnnnnnnnnnnnnnnnnnnnnnnnnnnnnnnnnnnnnnnnnnnnnnnncgccccagaggcctgggtgaccccaggctctaggcctcatgatacaaagagaaaggaagtaaaagaattttaaacaatttggagggttttttttaaaagtagttagcattatggagaatgtaaatcttggttttattgtttagattaaagaagaaaaagaggagggtggtattagtrattatggtggaaaggctcttgaagctgtcgtgttcatatagcatctataagtggccctgacacaatcctgggggttgtttctcacttacttttattgcagtgcctcccgtgccagccttccttgcagtggcacttgttgggctcagcacaggtcccatacagtccgcagccaggctcgcagacagctgcaacaaagtgagcacacacgttggacttggaggcatttctcttggaacatctgcaattgctacactggcgtgttgacactgacacagggagccaggatgcaggccagacta

SEQ ID NO: 64481 - DNA, 600 bp, Chicken  19866894330432_2
ttatggtggaaaggctcttgaagctgtcgtgttcatatagcatctataagtggccctgacacaatcctgggggttgtttctcacttacttttattgcagtgcctcccgtgccagccttccttgcagtggcacttgttgggctcagcacaggtcccatacagtccgcagccaggctcgcagacagctgcaacaaagtgagcacacacgttggacttggaggcatttctcttggaacatctgcaattgctacactggcgtgttgacactgacacagggagccaggatgcaggccagactagwgggaggcatttgtaaaaagatgtctggtcttataattccttgcagcctggtgtgtgttgcatgcccaggaagccaatcgacctgaagtactctgacaacaggcagctggtgctgttagcgtggtcccctgtgagcccaatgctcatccaaggactgactgagtgcacaggtacttacgctttgaacaaaggtctccttggtagcctttggagcacttgcatttattcttacccatacattttcctccatttcgacagggctgatggcatttacctagaaattaaaaggacagaaacaagg

SEQ ID NO: 64482 - DNA, 600 bp, Chicken  19866894330433_1
ccacctgtgggtgaagctgatgggggggggaggcacatggcaacccaacagggtcctagccccaagaggggtcccagcacgtccccatctctgcttgcttcctgcaacaccaccagcccccaggtcctcgcctgagagcccacagagaacgcggccctgccatggtgatgctaacttagcacaagccacaattgctgcctgacatactgaaatagaaaattataactctgtgagaaagcacatttcaaatatcgtactgaggaaattccaatcatttgtaacagccctttttggggcttwaaaaaaaaaaaaaawgaaacacataaggatgatagcagctacatgctaagctgctctcctgggattctcattatctgtttggccattttggtcctgcttatttccagaagactgctgattttcccatgcctgagctgtgcccagcccccagggcagcccaactattggcaggacccagcctagaagcacctctggcatccagcactcattctgtgcagcgcctacttgcacagcaatacacacagcccccagccaggagttcggtgagcacagcacccatctgaagggcaggccatataa

SEQ ID NO: 64483 - DNA, 600 bp, Chicken  19866894330433_2
gctgatgggggggggaggcacatggcaacccaacagggtcctagccccaagaggggtcccagcacgtccccatctctgcttgcttcctgcaacaccaccagcccccaggtcctcgcctgagagcccacagagaacgcggccctgccatggtgatgctaacttagcacaagccacaattgctgcctgacatactgaaatagaaaattataactctgtgagaaagcacatttcaaatatcgtactgaggaaattccaatcatttgtaacagccctttttggggcttwaaaaaaaaaaaaaawgaaacacataaggatgatagcagctacatgctaagctgctctcctgggattctcattatctgtttggccattttggtcctgcttatttccagaagactgctgattttcccatgcctgagctgtgcccagcccccagggcagcccaactattggcaggacccagcctagaagcacctctggcatccagcactcattctgtgcagcgcctacttgcacagcaatacacacagcccccagccaggagttcggtgagcacagcacccatctgaagggcaggccatataacagcatataaagcag

SEQ ID NO: 64484 - DNA, 600 bp, Chicken  19866894330449_1
acgcactgaggtaactattaagtactacattctctcatgattaaaaaataactcatagaatttccttctatggaaaagatgaatcctgcatatatgatcaaagtggtaataccttatttatgtcctgtcaagcttcctgcagctgcagggtgatcttttagtgaaagcaaaagcagggaagagagttgcagttctcagagaaactaagaactctgcaatgatgtctttctcaaacatctctctgatgcttccaacgctggtctgcttccacccattacatgtggagaagctggtgtcccrtaaagcagaagcaatatgcaattaggtttcatacctagcattctgacaaatggccagaaatatytgctagcaagggtatggagaatcataatgtacatgagctccctgtaaagctcaattgttgtcccttagtgaaatccatgccctattatttgcgaatcttgacagtaagactgtgtgtagtaaccartgtacaagctctcatcagaacacttgagctatcaagtataaatggatgatcctaatgttcagaaaaggatcactacrattattaaacactgcacgtrctttttgtttttc

SEQ ID NO: 64485 - DNA, 600 bp, Chicken  19866894330449_2
cttctatggaaaagatgaatcctgcatatatgatcaaagtggtaataccttatttatgtcctgtcaagcttcctgcagctgcagggtgatcttttagtgaaagcaaaagcagggaagagagttgcagttctcagagaaactaagaactctgcaatgatgtctttctcaaacatctctctgatgcttccaacgctggtctgcttccacccattacatgtggagaagctggtgtcccrtaaagcagaagcaatatgcaattaggtttcatacctagcattctgacaaatggccagaaatatytgctagcaagggtatggagaatcataatgtacatgagctccctgtaaagctcaattgttgtcccttagtgaaatccatgccctattatttgcgaatcttgacagtaagactgtgtgtagtaaccartgtacaagctctcatcagaacacttgagctatcaagtataaatggatgatcctaatgttcagaaaaggatcactacrattattaaacactgcacgtrctttttgtttttccatttctgtgtcagctttggccaaaaagagacaatgtgattcaatggactaatgatttgcttga

SEQ ID NO: 64486 - DNA, 600 bp, Chicken  19866894330449_3
gttctcagagaaactaagaactctgcaatgatgtctttctcaaacatctctctgatgcttccaacgctggtctgcttccacccattacatgtggagaagctggtgtcccrtaaagcagaagcaatatgcaattaggtttcatacctagcattctgacaaatggccagaaatatytgctagcaagggtatggagaatcataatgtacatgagctccctgtaaagctcaattgttgtcccttagtgaaatccatgccctattatttgcgaatcttgacagtaagactgtgtgtagtaaccartgtacaagctctcatcagaacacttgagctatcaagtataaatggatgatcctaatgttcagaaaaggatcactacrattattaaacactgcacgtrctttttgtttttccatttctgtgtcagctttggccaaaaagagacaatgtgattcaatggactaatgatttgcttgacaaaaccaagctctgtgttcctatgctctgcatgacaggtttaagatgtggcaaaaaggagtctcatagcaccctaaacaataagtaaatactgctgcaaaatgctgatgcaagtaccagaattca

SEQ ID NO: 64487 - DNA, 600 bp, Chicken  19866894330449_4
ccacccattacatgtggagaagctggtgtcccrtaaagcagaagcaatatgcaattaggtttcatacctagcattctgacaaatggccagaaatatytgctagcaagggtatggagaatcataatgtacatgagctccctgtaaagctcaattgttgtcccttagtgaaatccatgccctattatttgcgaatcttgacagtaagactgtgtgtagtaaccartgtacaagctctcatcagaacacttgagctatcaagtataaatggatgatcctaatgttcagaaaaggatcactacrattattaaacactgcacgtrctttttgtttttccatttctgtgtcagctttggccaaaaagagacaatgtgattcaatggactaatgatttgcttgacaaaaccaagctctgtgttcctatgctctgcatgacaggtttaagatgtggcaaaaaggagtctcatagcaccctaaacaataagtaaatactgctgcaaaatgctgatgcaagtaccagaattcaactgacattcaagtgttcaaaaaacactgaaaacgtcccaaagaggtatcctgtttctgttaaaacagtaacagacg

SEQ ID NO: 64488 - DNA, 600 bp, Chicken  19866894330449_5
agctggtgtcccrtaaagcagaagcaatatgcaattaggtttcatacctagcattctgacaaatggccagaaatatytgctagcaagggtatggagaatcataatgtacatgagctccctgtaaagctcaattgttgtcccttagtgaaatccatgccctattatttgcgaatcttgacagtaagactgtgtgtagtaaccartgtacaagctctcatcagaacacttgagctatcaagtataaatggatgatcctaatgttcagaaaaggatcactacrattattaaacactgcacgtrctttttgtttttccatttctgtgtcagctttggccaaaaagagacaatgtgattcaatggactaatgatttgcttgacaaaaccaagctctgtgttcctatgctctgcatgacaggtttaagatgtggcaaaaaggagtctcatagcaccctaaacaataagtaaatactgctgcaaaatgctgatgcaagtaccagaattcaactgacattcaagtgttcaaaaaacactgaaaacgtcccaaagaggtatcctgtttctgttaaaacagtaacagacgtggtaggtcctgcttagtgg

SEQ ID NO: 64489 - DNA, 600 bp, Chicken  19866894330459_1
agtgtggagatgtgacaataagggacataggtgggaaatactggtgataggtggatggttggactaggtgatctgagaggtcttttccaaccttaatgattctgtgattctatgaaattatacttgggacagaatgcattaacatgtgctatttaaacttcatagaaattctgttgccgtcagtggctcaaagtgactcttgggaaaacagtagttgcttctcggatatactgcttttctatcacaattttccactaatttgatacatagactgattatacttttaaaactgtcctgccrgtagctgcctgagggcttctttcagtcattttccacaagttaagaatactttcctggccatatctgatccactggaataaaacctgttcagtcatttttagaaaatgaaatgtactgttattaccaagcatacagctcggtaatcatgagctttatatttcatagaaaatgctttgtctggctctagtatgctaagaaaacccattaagggacataataataatcataggaaggagcacrggaccgagaagcaatccgatagatcacctagttctttctgctctgggataaaggccagct

SEQ ID NO: 64490 - DNA, 600 bp, Chicken  19866894330459_2
atcacaattttccactaatttgatacatagactgattatacttttaaaactgtcctgccrgtagctgcctgagggcttctttcagtcattttccacaagttaagaatactttcctggccatatctgatccactggaataaaacctgttcagtcatttttagaaaatgaaatgtactgttattaccaagcatacagctcggtaatcatgagctttatatttcatagaaaatgctttgtctggctctagtatgctaagaaaacccattaagggacataataataatcataggaaggagcacrggaccgagaagcaatccgatagatcacctagttctttctgctctgggataaaggccagctatcttcatagcaataccatgttctcctataatattatatcttcctaatatgttcttcagtacttccagcgatggaaatgccgcaccacagccttgccgtacagtscactacaacactcctctcctcctgccactcccatttgcttacgcatgcgttgtaagacctccatggattgtgcctctgcaaaatttccacttatctgtaggacgtgtctgtaaggaattaaattaaacccccact

SEQ ID NO: 64491 - DNA, 600 bp, Chicken  19866894330459_3
tgaaatgtactgttattaccaagcatacagctcggtaatcatgagctttatatttcatagaaaatgctttgtctggctctagtatgctaagaaaacccattaagggacataataataatcataggaaggagcacrggaccgagaagcaatccgatagatcacctagttctttctgctctgggataaaggccagctatcttcatagcaataccatgttctcctataatattatatcttcctaatatgttcttcagtacttccagcgatggaaatgccgcaccacagccttgccgtacagtscactacaacactcctctcctcctgccactcccatttgcttacgcatgcgttgtaagacctccatggattgtgcctctgcaaaatttccacttatctgtaggacgtgtctgtaaggaattaaattaaacccccacttaggcagaggaaggaaataggattaggaaaaaaaacttccagtctcagctgatacataaataggtagtgactgaattgctaactgtaacgtaggaacggcagcagatcactgatttttgtttgttccttatcgcactgactggttcctacttgcttggatgaacg

SEQ ID NO: 64492 - DNA, 600 bp, Chicken  19866894330465_1
gaataaatttggcttatacttcattttgttaaattttggtaccacttatcagtcaccaagctctgatcttgctgttgtgaaaagccttgtactaaatagtttaagaaagtgagctttcatatgagtctttttcagactttgttcagtctgtgtttttggtcagatttcatctttgtttcaggcctgaagcaatagctgactttcatgtccagatactagtaataccacatatttgttattcagtaggacaatgttctttggatatattcaagttcatatttaaaagtaaatgaaactctytgttgccattgctgaattcatacctttcagcctgacatttcctgtttacttttattgtgaaaattgaaagtatccagaggtagaagtggttaaactgaaatttaagagacattgttcaaatcagtgaatatctaagaaaattgtgacagaaaggtaatgtattggcttcagactgattcaaatggtatyttcataaacaggatggattaggaagtctttttgccttactacaattaaaaaacttgtaacaaaattagttaggcattcttgaatacctgaaatgaggcaagcagagtttcc

SEQ ID NO: 64493 - DNA, 494 bp, Chicken  19866894330465_2
caatagctgactttcatgtccagatactagtaataccacatatttgttattcagtaggacaatgttctttggatatattcaagttcatatttaaaagtaaatgaaactctytgttgccattgctgaattcatacctttcagcctgacatttcctgtttacttttattgtgaaaattgaaagtatccagaggtagaagtggttaaactgaaatttaagagacattgttcaaatcagtgaatatctaagaaaattgtgacagaaaggtaatgtattggcttcagactgattcaaatggtatyttcataaacaggatggattaggaagtctttttgccttactacaattaaaaaacttgtaacaaaattagttaggcattcttgaatacctgaaatgaggcaagcagagtttccagaacagagatgagaagcactatgatcaagtggaaaaaatcacattcatctaatgtggcctacagccaacttttcccaataat

SEQ ID NO: 64494 - DNA, 599 bp, Chicken  19866894330467_1
  misc_feature (1)..(141): n is any nucleotide
nnnnnnnnnnnnnnnnnnnnnnnnnnnnnnnnnnnnnnnnnnnnnnnnnnnnnnnnnnnnnnnnnnnnnnnnnnnnnnnnnnnnnnnnnnnnnnnnnnnnnnnnnnnnnnnnnnnnnnnnnnnnnnnnnnnnnnnnnnnnnggctgtactgagtgtgtatcatgatagttaggatatttcaaaaggacttgaagaggatttctggagttcagaggtggcgggaggtttatcttttaatatcattggaagcctctcttctctgccaggcttatacttgggacagggtaataatatgtagaygtttacatagttcattaataattactcctataaaagcccagaatgttgcctgtcttactgcaatgcattactgtgctatagttgtctttattttccttgcttctgaaattactgattcagttgggtgtgtcttcaaagttattttgaaacttgacttcaaagttgaatggcacattgttatggatatggatggagagtactggcaggtggtttgacaggctgcacaaaggaaggggcagagagctgaggaagtctggaaaaaaaagtaactaaggaataaactgcacgttagcactgta

SEQ ID NO: 64495 - DNA, 600 bp, Chicken  19866894330467_2
gatggagagtactggcaggtggtttgacaggctgcacaaaggaaggggcagagagctgaggaagtctggaaaaaaaagtaactaaggaataaactgcacgttagcactgtatattcccaatatccatagtgaagtaacgaaaacattttctatactggttatcaaatgtcactttcacagtactataatgtcactgtttctgagaaacacgagcaaatgcttccttttaaaacgtataactgggtcatagagagagttaaatgtgtgggaattaaattaaaagctccttttaaatcagascaagttaaaatggaaaccttatttaattggttttaaacacttctgaatcaagctgtttatttctttctctgaagcctttcatgctacatctacaaatctaatttctgtgattgattactgtgattaaatgataaagcatttttgtaaactcgtgacctctatctgcgccatagtttagaaagcctggcttctagatgctgtcttactgaagggaattaagaggcaaaaaacattgtattcatctgaaaatatactgatacatgatgatggaagaatatcattaaaataaattatttttgt

SEQ ID NO: 64496 - DNA, 600 bp, Chicken  19866894330468_1
cagacacagaagctgaaggaaataaacaagagatcgaaggctaaaaataacaaatggaaattgccccagtgtttgttttccttttttcccctgcctgcctgaaacccagagccctgcaatgcagcccactctcctccactcatccctgcaggcagcccggctttggcgcagaattgcacgctggaacctgtagtcccgccagggcggccgccgtccgctccatcttagggctgccgggggccatggggtggggaatccggacagagctctgcgcggaggtcgtgctgagggggtggaggygttgcgtggggtcagcgatggaaagggtcggatcattttcctagcatgcttcctcggagcccagcgctggtccaggacaccggctcacagcctggccttcgcctccctgctgctctcgaagagcttcaaaataaaagaggcggcgctggaaagcaatgctgtctggaaagaataaaagcaagcagagcccatgtgttggcaagagcgctcagttattcctcaccgtaaaacacattcaggaaaaaaaaaaaaaaaatcttggcagagatggtgtccctctgaaagagcagagctgctgta

SEQ ID NO: 64497 - DNA, 600 bp, Chicken  19866894330471_1
gtcaaaccagtgctggaggtcattgtgggtccagctgcaatgggaggtaggcaattatggacatcgctgaagccaccccacgctctggggatcttgggttttcaccttacactgcactttaatgggatttctcatcaatgtctgcatgttcttggccacctgtttaaaaatataataataataattaaatcttttgccccactgcgggatgggcagctggtggttcccagctcacaataaaccacacttgagactccctggagaattcgctttctttttgcagctggttccatgtggggmtgttcagcccctctgcagctcatagacttttcttcacagcctctgctccacctattgctgaaaagggggaaatttgagatggatcccattttgtgaacatctcccacctgtgggtaatgctcagacctctcagccctgtgggtttaatttctctttctgcagcttaatgggttggggaygttcattactgcaataattagtgatgggataggggaggcaggagaggatccaagcaggggaaaggggaggggaaggacatactgtgtgtgtctgacagccttcagattaggatatagaagc

SEQ ID NO: 64498 - DNA, 600 bp, Chicken  19866894330471_2
aataattaaatcttttgccccactgcgggatgggcagctggtggttcccagctcacaataaaccacacttgagactccctggagaattcgctttctttttgcagctggttccatgtggggmtgttcagcccctctgcagctcatagacttttcttcacagcctctgctccacctattgctgaaaagggggaaatttgagatggatcccattttgtgaacatctcccacctgtgggtaatgctcagacctctcagccctgtgggtttaatttctctttctgcagcttaatgggttggggaygttcattactgcaataattagtgatgggataggggaggcaggagaggatccaagcaggggaaaggggaggggaaggacatactgtgtgtgtctgacagccttcagattaggatatagaagctaaaggagcggctcagaataccattcctccctatgccaaagcagaamtgagggcaaaaatagtggttatttaaaaatatatatgttttaattgactatcaacagggcgaatggcacaaaggttgcatcacgctgtgtggtgggttttgatgcaactcaaaattgcaactaggagttcct

SEQ ID NO: 64499 - DNA, 600 bp, Chicken  19866894330471_3
ccacctattgctgaaaagggggaaatttgagatggatcccattttgtgaacatctcccacctgtgggtaatgctcagacctctcagccctgtgggtttaatttctctttctgcagcttaatgggttggggaygttcattactgcaataattagtgatgggataggggaggcaggagaggatccaagcaggggaaaggggaggggaaggacatactgtgtgtgtctgacagccttcagattaggatatagaagctaaaggagcggctcagaataccattcctccctatgccaaagcagaamtgagggcaaaaatagtggttatttaaaaatatatatgttttaattgactatcaacagggcgaatggcacaaaggttgcatcacgctgtgtggtgggttttgatgcaactcaaaattgcaactaggagttcctgtgctaagtgctaaggaaaaatgagatgaaaaatgagatgagaagccgcccagctgtttaattaaagcagtttggtgactgtcgtgctatggtgactgaagtaagcaagcactgtgctgcaaatgcccccatctctcctggaagtcgaggatattttcccctgtggcc

SEQ ID NO: 64500 - DNA, 600 bp, Chicken  19866894330474_1
ctttgtgctgctctcacagggctgcagctgagagaacaggtagagctgaactccgagcatctttccatgtcgataaggaggtggtttgctggaggctagagctaaatgacctattaataataaacgtttttcaattaatttaatcttttctcttgtgcatcagtttgtcaggaagagaccagtttttataaatgcattcttcatctaatgtcatctgataaacgcttcaagagaaaataaagtaactgcctttgtattgcttgaaaactgtcacttcaaggagatttgccagccattaasgtatcactgctgaaagtaagaatgagcagaggcttgtcaggactgctctgcagttgtcccctggagggagcagagcagcaggcaacatccaatttggaagtaagcttttgggttttggtcactacagacaagatggttctctctgcaactccaaaccagcaatgaatgatgtatccacagaactgtatttgcacctgtacagtggcatgtgataggattagggaaaagctaaagcaaggctgtgttttgcttctccttttctctgggttgatcacccttctcccttttcccaacaaagtg

SEQ ID NO: 64501 - DNA, 600 bp, Chicken  19866894330474_2
ccacagaactgtatttgcacctgtacagtggcatgtgataggattagggaaaagctaaagcaaggctgtgttttgcttctccttttctctgggttgatcacccttctcccttttcccaacaaagtgccaaaatgaagatgctaaagaaccatagagtcatagaatatcccaagttggaagggacccatgaggatcactgagttcaactcctggctccacacaggaccacccaaaaacagaccacacatctgagagcattgtccaggtgctcctccaactccaccagctcagggctgtgcycactgccctgtgcagcccgttccacgcccaccaccctctggtgcagaccctgtccctaacccccacccgcccctcccctgacrcagctccatgccgttccctcgggcsctgtcgctgtcacacagagcagagctcagcgctgcccctccgctccctgtgaggagcygcagccgccatcaggcctcccctcagctcctctgctctgggctgagcatacccagggacttcagccacccttcatatgtcagccctctaaggtgtaagctggggggataaaatgcactttatcctggcccaaca

SEQ ID NO: 64502 - DNA, 600 bp, Chicken  19866894330474_3
tttctctgggttgatcacccttctcccttttcccaacaaagtgccaaaatgaagatgctaaagaaccatagagtcatagaatatcccaagttggaagggacccatgaggatcactgagttcaactcctggctccacacaggaccacccaaaaacagaccacacatctgagagcattgtccaggtgctcctccaactccaccagctcagggctgtgcycactgccctgtgcagcccgttccacgcccaccaccctctggtgcagaccctgtccctaacccccacccgcccctcccctgacrcagctccatgccgttccctcgggcsctgtcgctgtcacacagagcagagctcagcgctgcccctccgctccctgtgaggagcygcagccgccatcaggcctcccctcagctcctctgctctgggctgagcatacccagggacttcagccacccttcatatgtcagccctctaaggtgtaagctggggggataaaatgcactttatcctggcccaacagcatgagcagatctgttgcggagaggcagatttcccccattatctcctcagtcctgcagacagaggttctgctgcttcctccc

SEQ ID NO: 64503 - DNA, 600 bp, Chicken  19866894330474_4
ccttttcccaacaaagtgccaaaatgaagatgctaaagaaccatagagtcatagaatatcccaagttggaagggacccatgaggatcactgagttcaactcctggctccacacaggaccacccaaaaacagaccacacatctgagagcattgtccaggtgctcctccaactccaccagctcagggctgtgcycactgccctgtgcagcccgttccacgcccaccaccctctggtgcagaccctgtccctaacccccacccgcccctcccctgacrcagctccatgccgttccctcgggcsctgtcgctgtcacacagagcagagctcagcgctgcccctccgctccctgtgaggagcygcagccgccatcaggcctcccctcagctcctctgctctgggctgagcatacccagggacttcagccacccttcatatgtcagccctctaaggtgtaagctggggggataaaatgcactttatcctggcccaacagcatgagcagatctgttgcggagaggcagatttcccccattatctcctcagtcctgcagacagaggttctgctgcttcctcccagcctccgctgctcagacaaaaggc

SEQ ID NO: 64504 - DNA, 600 bp, Chicken  19866894330474_5
tcccaagttggaagggacccatgaggatcactgagttcaactcctggctccacacaggaccacccaaaaacagaccacacatctgagagcattgtccaggtgctcctccaactccaccagctcagggctgtgcycactgccctgtgcagcccgttccacgcccaccaccctctggtgcagaccctgtccctaacccccacccgcccctcccctgacrcagctccatgccgttccctcgggcsctgtcgctgtcacacagagcagagctcagcgctgcccctccgctccctgtgaggagcygcagccgccatcaggcctcccctcagctcctctgctctgggctgagcatacccagggacttcagccacccttcatatgtcagccctctaaggtgtaagctggggggataaaatgcactttatcctggcccaacagcatgagcagatctgttgcggagaggcagatttcccccattatctcctcagtcctgcagacagaggttctgctgcttcctcccagcctccgctgctcagacaaaaggcctcaactcggtgacatatggctgctccactcacagagcatctctgggctcatttccaa

SEQ ID NO: 64505 - DNA, 599 bp, Chicken  19866894330478_1
  misc_feature (1)..(57): n is any nucleotide
nnnnnnnnnnnnnnnnnnnnnnnnnnnnnnnnnnnnnnnnnnnnnnnnnnnnnnnnncttacctttggttttcctctcaacgatagctttggcggtgtctgattgtttctcctgttctcttttcttgttcctcccactcagtgagccagcactctggagtcattacgaaccaccttgggaccagtgcctcttcccccaactcggagtcggacaaccatgcacttttagatgagaaagaggattcgtatttctctgaaatcagaaattttattgcaaatagtgagatgaaccaagcgtcarcgttagcagataaaaggtagaccggcaaatgaaatgaccggaatgcacgcgttgttagcgtggttcaaagaccagtcagcccctgtcctgcagtgtctgatttaagacmctcagaagagagaagtgtagtggtttggaatggaraacaccatcagcttcaagtgcyaagccctgtgttaagcctttgcagatgacctgggttaggagtaagtggcaaggcctgggacctgggagacatcttgagtttcaccttcgttttataagcttcattttgacacaagaggattaaatctgcccac

SEQ ID NO: 64506 - DNA, 600 bp, Chicken  19866894330478_2
tcctgttctcttttcttgttcctcccactcagtgagccagcactctggagtcattacgaaccaccttgggaccagtgcctcttcccccaactcggagtcggacaaccatgcacttttagatgagaaagaggattcgtatttctctgaaatcagaaattttattgcaaatagtgagatgaaccaagcgtcarcgttagcagataaaaggtagaccggcaaatgaaatgaccggaatgcacgcgttgttagcgtggttcaaagaccagtcagcccctgtcctgcagtgtctgatttaagacmctcagaagagagaagtgtagtggtttggaatggaraacaccatcagcttcaagtgcyaagccctgtgttaagcctttgcagatgacctgggttaggagtaagtggcaaggcctgggacctgggagacatcttgagtttcaccttcgttttataagcttcattttgacacaagaggattaaatctgcccacaaacccagctgtgaggaagcttcctcaaatggaggttgtatggagaggaggaggagagccctgtgccccatagatgttatattctgagaggtggaaaagcatcgtttaaa

SEQ ID NO: 64507 - DNA, 600 bp, Chicken  19866894330478_3
gccagcactctggagtcattacgaaccaccttgggaccagtgcctcttcccccaactcggagtcggacaaccatgcacttttagatgagaaagaggattcgtatttctctgaaatcagaaattttattgcaaatagtgagatgaaccaagcgtcarcgttagcagataaaaggtagaccggcaaatgaaatgaccggaatgcacgcgttgttagcgtggttcaaagaccagtcagcccctgtcctgcagtgtctgatttaagacmctcagaagagagaagtgtagtggtttggaatggaraacaccatcagcttcaagtgcyaagccctgtgttaagcctttgcagatgacctgggttaggagtaagtggcaaggcctgggacctgggagacatcttgagtttcaccttcgttttataagcttcattttgacacaagaggattaaatctgcccacaaacccagctgtgaggaagcttcctcaaatggaggttgtatggagaggaggaggagagccctgtgccccatagatgttatattctgagaggtggaaaagcatcgtttaaatccaggctagacaaaatgctagtttgaaaagcatt

SEQ ID NO: 64508 - DNA, 600 bp, Chicken  19866894330478_4
gaaccaccttgggaccagtgcctcttcccccaactcggagtcggacaaccatgcacttttagatgagaaagaggattcgtatttctctgaaatcagaaattttattgcaaatagtgagatgaaccaagcgtcarcgttagcagataaaaggtagaccggcaaatgaaatgaccggaatgcacgcgttgttagcgtggttcaaagaccagtcagcccctgtcctgcagtgtctgatttaagacmctcagaagagagaagtgtagtggtttggaatggaraacaccatcagcttcaagtgcyaagccctgtgttaagcctttgcagatgacctgggttaggagtaagtggcaaggcctgggacctgggagacatcttgagtttcaccttcgttttataagcttcattttgacacaagaggattaaatctgcccacaaacccagctgtgaggaagcttcctcaaatggaggttgtatggagaggaggaggagagccctgtgccccatagatgttatattctgagaggtggaaaagcatcgtttaaatccaggctagacaaaatgctagtttgaaaagcatttgagttggtgtatacctgacgg

SEQ ID NO: 64509 - DNA, 599 bp, Chicken  19866894330482_1
  misc_feature (1)..(179): n is any nucleotide
nnnnnnnnnnnnnnnnnnnnnnnnnnnnnnnnnnnnnnnnnnnnnnnnnnnnnnnnnnnnnnnnnnnnnnnnnnnnnnnnnnnnnnnnnnnnnnnnnnnnnnnnnnnnnnnnnnnnnnnnnnnnnnnnnnnnnnnnnnnnnnnnnnnnnnnnnnnnnnnnnnnnnnnnnnnnnnnnnnnactatgttaacaccactccgatggcatcgctgggaggaaaatgatgcccgcacagtccgcctttcatcagtccaagtaaatgaaagtcagaaggcaccaaatctggactatacagtgagtryagtaaaatggcacagccgagatcagcmaagtactccaaggtttacaaactggtatggagcctggagttaccatgktgcacaagaaaggttgtcttcttctctgatctgactcctgtaatttgagccttcagcttagtgacatggtgtcatgatcaaagttgatggtttgtctggttaccaggaaatccagaaggaccacrctatttactatatcaaaagagagtgcaaatcactttacccactgagagctgcatcttgagctttgtctttgatgaggaattcacatgttgtcactcca

SEQ ID NO: 64510 - DNA, 599 bp, Chicken  19866894330482_2
  misc_feature (1)..(178): n is any nucleotide
nnnnnnnnnnnnnnnnnnnnnnnnnnnnnnnnnnnnnnnnnnnnnnnnnnnnnnnnnnnnnnnnnnnnnnnnnnnnnnnnnnnnnnnnnnnnnnnnnnnnnnnnnnnnnnnnnnnnnnnnnnnnnnnnnnnnnnnnnnnnnnnnnnnnnnnnnnnnnnnnnnnnnnnnnnnnnnnnnnactatgttaacaccactccgatggcatcgctgggaggaaaatgatgcccgcacagtccgcctttcatcagtccaagtaaatgaaagtcagaaggcaccaaatctggactatacagtgagtryagtaaaatggcacagccgagatcagcmaagtactccaaggtttacaaactggtatggagcctggagttaccatgktgcacaagaaaggttgtcttcttctctgatctgactcctgtaatttgagccttcagcttagtgacatggtgtcatgatcaaagttgatggtttgtctggttaccaggaaatccagaaggaccacrctatttactatatcaaaagagagtgcaaatcactttacccactgagagctgcatcttgagctttgtctttgatgaggaattcacatgttgtcactccat

SEQ ID NO: 64511 - DNA, 599 bp, Chicken  19866894330482_3
  misc_feature (1)..(151): n is any nucleotide
nnnnnnnnnnnnnnnnnnnnnnnnnnnnnnnnnnnnnnnnnnnnnnnnnnnnnnnnnnnnnnnnnnnnnnnnnnnnnnnnnnnnnnnnnnnnnnnnnnnnnnnnnnnnnnnnnnnnnnnnnnnnnnnnnnnnnnnnnnnnnnnnnnnnnnnactatgttaacaccactccgatggcatcgctgggaggaaaatgatgcccgcacagtccgcctttcatcagtccaagtaaatgaaagtcagaaggcaccaaatctggactatacagtgagtryagtaaaatggcacagccgagatcagcmaagtactccaaggtttacaaactggtatggagcctggagttaccatgktgcacaagaaaggttgtcttcttctctgatctgactcctgtaatttgagccttcagcttagtgacatggtgtcatgatcaaagttgatggtttgtctggttaccaggaaatccagaaggaccacrctatttactatatcaaaagagagtgcaaatcactttacccactgagagctgcatcttgagctttgtctttgatgaggaattcacatgttgtcactccatggactgccattttgactttggctcata

SEQ ID NO: 64512 - DNA, 599 bp, Chicken  19866894330482_4
  misc_feature (1)..(103): n is any nucleotide
nnnnnnnnnnnnnnnnnnnnnnnnnnnnnnnnnnnnnnnnnnnnnnnnnnnnnnnnnnnnnnnnnnnnnnnnnnnnnnnnnnnnnnnnnnnnnnnnnnnnnnnactatgttaacaccactccgatggcatcgctgggaggaaaatgatgcccgcacagtccgcctttcatcagtccaagtaaatgaaagtcagaaggcaccaaatctggactatacagtgagtryagtaaaatggcacagccgagatcagcmaagtactccaaggtttacaaactggtatggagcctggagttaccatgktgcacaagaaaggttgtcttcttctctgatctgactcctgtaatttgagccttcagcttagtgacatggtgtcatgatcaaagttgatggtttgtctggttaccaggaaatccagaaggaccacrctatttactatatcaaaagagagtgcaaatcactttacccactgagagctgcatcttgagctttgtctttgatgaggaattcacatgttgtcactccatggactgccattttgactttggctcatagtgatgacacctcatcttgttaccattaatgatgtgatccaggaaact

SEQ ID NO: 64513 - DNA, 600 bp, Chicken  19866894330482_5
ggcatcgctgggaggaaaatgatgcccgcacagtccgcctttcatcagtccaagtaaatgaaagtcagaaggcaccaaatctggactatacagtgagtryagtaaaatggcacagccgagatcagcmaagtactccaaggtttacaaactggtatggagcctggagttaccatgktgcacaagaaaggttgtcttcttctctgatctgactcctgtaatttgagccttcagcttagtgacatggtgtcatgatcaaagttgatggtttgtctggttaccaggaaatccagaaggaccacrctatttactatatcaaaagagagtgcaaatcactttacccactgagagctgcatcttgagctttgtctttgatgaggaattcacatgttgtcactccatggactgccattttgactttggctcatagtgatgacacctcatcttgttaccattaatgatgtgatccaggaaactgtcacctttagccctgtattgtttccataggtcctggcaaatttgcatacagtggtctttctgctcctgtgtgagcattcgtgggacctggcgcaaacttttcaatattccaacactgccaccatc

SEQ ID NO: 64514 - DNA, 599 bp, Chicken  19866894330484_1
  misc_feature (1)..(71): n is any nucleotide
nnnnnnnnnnnnnnnnnnnnnnnnnnnnnnnnnnnnnnnnnnnnnnnnnnnnnnnnnnnnnnnnnnnnnnnctgtcgctccagatgctcattaaaaaattgcacagcaaaactgaccagggtctgctgtgcaggcttttgtttggtgaacatatgaattaaaagacaagccaaaagtaactgagttccaagtggactgaattacagtgtcgctaacaggctctccagcagatggcaaagtttagataattaacaagagtgaactcttcaattatatataggactcttaagcttgagtaayagtgaccactcaaatccttaaattatacctgcaaatctttacatcttcaacaggtttttcaatattgacctctttacccaaagcagatactgcagtcaaaatcttttgggccactttactgctaaacccaacccgcacatcatcaactcacggaacaatgctcagtgctcacctctacagaggtgcccaagtcataatttcaagaaagtagatattaataaatccatttgtagctctttatgcgttgtcaawagcctcctcttcagcagatatgaaaaaaacgtatgttcctaaactca

SEQ ID NO: 64515 - DNA, 600 bp, Chicken  19866894330484_2
caagagtgaactcttcaattatatataggactcttaagcttgagtaayagtgaccactcaaatccttaaattatacctgcaaatctttacatcttcaacaggtttttcaatattgacctctttacccaaagcagatactgcagtcaaaatcttttgggccactttactgctaaacccaacccgcacatcatcaactcacggaacaatgctcagtgctcacctctacagaggtgcccaagtcataatttcaagaaagtagatattaataaatccatttgtagctctttatgcgttgtcaawagcctcctcttcagcagatatgaaaaaaacgtatgttcctaaactcagcaatgcaatgatacctaaacacgtgaaatatcatttgaacacataaacgctcaatttctcatgacttgcttaaaaaaaagttcattcttatcatacacttgaaagcctggaacaaaaaagagtactcaattattctcagtacagctgttgtcactggaaattccacagactacactttcagctgcttttttatttaaagttgccaacatgattcaattcagttgatgttgcagatggaatttatcagtctca

SEQ ID NO: 64516 - DNA, 600 bp, Chicken  19866894330486_1
aatacattggaaggcagtgtctgcatgtcagtagaaaaacaaggaatgccagctagaaacaggcaaacatttccaatctgcattaaccagaaggggaaaatccatgcttgcacagttccctgagaacatcagttggctgctcagcagcaaaccaggattctgacagttagcaggataagcacaacatgcatcatgtccgagtcagcaagtcctccctgtgctacaaacttttactgcatctatccatgaagatcaggcattgatgcacgttcctacagttctcaacagctcacctgtgcrcctggcccaagctgcccagagtggaaggtgccacagcacagcacaaagcaaaacacgacagagcagactaatcagcttggcaggagaatgaaacakctaaacatatggcaattgcaatcatttgagatctcagacatgctttgattcatggctggacacagcaaaacccaatgctaagccagtgtccaaacaatgatttcaaacacatttcaatttcacctacactgcccacctcactatcagaggacgcaggggtatctctgcagccagcagctgtcctgcaaagcagagcagcagctg

SEQ ID NO: 64517 - DNA, 600 bp, Chicken  19866894330486_2
aaaatccatgcttgcacagttccctgagaacatcagttggctgctcagcagcaaaccaggattctgacagttagcaggataagcacaacatgcatcatgtccgagtcagcaagtcctccctgtgctacaaacttttactgcatctatccatgaagatcaggcattgatgcacgttcctacagttctcaacagctcacctgtgcrcctggcccaagctgcccagagtggaaggtgccacagcacagcacaaagcaaaacacgacagagcagactaatcagcttggcaggagaatgaaacakctaaacatatggcaattgcaatcatttgagatctcagacatgctttgattcatggctggacacagcaaaacccaatgctaagccagtgtccaaacaatgatttcaaacacatttcaatttcacctacactgcccacctcactatcagaggacgcaggggtatctctgcagccagcagctgtcctgcaaagcagagcagcagctggacaagcgagtgctctgtcaccaatagtgctggtcacagcagccctgacagcatgcagagaggcagcagtgccttcaacattttgggtctggcagg

SEQ ID NO: 64518 - DNA, 600 bp, Chicken  19866894330490_1
aaggaggatgaaatgtcttatgaaagatctacagctctggaaatcctgccccagacagaagaactgaatttcttgatctatttggttaaccaggaaacagttaaaaatgagacaagaaaatgttctgtaaaactgaagagaaaaatgattttggagggtagattagtttcattgtaatagcaaaatatgtgataatgctagtgctcccatcatggttttagtcctgttgggtctaaaaatgcagcgtattcagaaggaacacaaagaatagttaataaaggaataatttagctttatacrttgtgtttatattgttcttggagcattttaaaataaggctggctatttttccaaaaagaacagcctaacttgaagttagtctgtcaawtacagaaataacctctagaatgcctgtttggggaaatataattattctgttcacctctaaaatcaatgtaagacatgtttttaaccgctgcrctgttctcagacctgattcccactcataatgaagtcaaggaaaggtgcataaattctgtatggtggattgatcctaaagccttcgaccaggcacaagatgctgtgtttattatccctagt

SEQ ID NO: 64519 - DNA, 600 bp, Chicken  19866894330490_2
accaggaaacagttaaaaatgagacaagaaaatgttctgtaaaactgaagagaaaaatgattttggagggtagattagtttcattgtaatagcaaaatatgtgataatgctagtgctcccatcatggttttagtcctgttgggtctaaaaatgcagcgtattcagaaggaacacaaagaatagttaataaaggaataatttagctttatacrttgtgtttatattgttcttggagcattttaaaataaggctggctatttttccaaaaagaacagcctaacttgaagttagtctgtcaawtacagaaataacctctagaatgcctgtttggggaaatataattattctgttcacctctaaaatcaatgtaagacatgtttttaaccgctgcrctgttctcagacctgattcccactcataatgaagtcaaggaaaggtgcataaattctgtatggtggattgatcctaaagccttcgaccaggcacaagatgctgtgtttattatccctagttatgtggttcagttctgtaacaagtgttcaagaaggtctttcaagcagttggaaaaataaatacaactgacatttctcttaaattgty

SEQ ID NO: 64520 - DNA, 600 bp, Chicken  19866894330490_3
caaaatatgtgataatgctagtgctcccatcatggttttagtcctgttgggtctaaaaatgcagcgtattcagaaggaacacaaagaatagttaataaaggaataatttagctttatacrttgtgtttatattgttcttggagcattttaaaataaggctggctatttttccaaaaagaacagcctaacttgaagttagtctgtcaawtacagaaataacctctagaatgcctgtttggggaaatataattattctgttcacctctaaaatcaatgtaagacatgtttttaaccgctgcrctgttctcagacctgattcccactcataatgaagtcaaggaaaggtgcataaattctgtatggtggattgatcctaaagccttcgaccaggcacaagatgctgtgtttattatccctagttatgtggttcagttctgtaacaagtgttcaagaaggtctttcaagcagttggaaaaataaatacaactgacatttctcttaaattgtyatggaatgcactccagctgtattttttatacacattttccccatgtgctacgtgcttgcattctttcatgatgaacgatgttgctgtgtgtt

SEQ ID NO: 64521 - DNA, 600 bp, Chicken  19866894330490_4
tacagaaataacctctagaatgcctgtttggggaaatataattattctgttcacctctaaaatcaatgtaagacatgtttttaaccgctgcrctgttctcagacctgattcccactcataatgaagtcaaggaaaggtgcataaattctgtatggtggattgatcctaaagccttcgaccaggcacaagatgctgtgtttattatccctagttatgtggttcagttctgtaacaagtgttcaagaaggtctttcaagcagttggaaaaataaatacaactgacatttctcttaaattgtyatggaatgcactccagctgtattttttatacacattttccccatgtgctacgtgcttgcattctttcatgatgaacgatgttgctgtgtgttggagttgtcatgctatctttcttgtttggatcaggaatgcgtaggaggtcatctgaggacaaaataccgtggayctcctgtcatatttttcaacttcatgctcgtagcatggagctgaacagtggctgagtggcttggtttgggagagattttcagttgaagtaaaatatagcctgtcttgttgctgcttttgctgtgtctacgagag

SEQ ID NO: 64522 - DNA, 600 bp, Chicken  19866894330490_5
taaagccttcgaccaggcacaagatgctgtgtttattatccctagttatgtggttcagttctgtaacaagtgttcaagaaggtctttcaagcagttggaaaaataaatacaactgacatttctcttaaattgtyatggaatgcactccagctgtattttttatacacattttccccatgtgctacgtgcttgcattctttcatgatgaacgatgttgctgtgtgttggagttgtcatgctatctttcttgtttggatcaggaatgcgtaggaggtcatctgaggacaaaataccgtggayctcctgtcatatttttcaacttcatgctcgtagcatggagctgaacagtggctgagtggcttggtttgggagagattttcagttgaagtaaaatatagcctgtcttgttgctgcttttgctgtgtctacgagagtcaaggatcaggtctctatctaatgttgtttgattcctagtttcaggtcttcatgcacagatttgggtttctgacaggtaaggcaaagcagggccagggccatgccgaacgctctgacacaccacagcagcagtgaataatgcattgccatgaatcactgtggctt

SEQ ID NO: 64523 - DNA, 484 bp, Chicken  19866894330499_1
ttattttgcttagttcaaacagaaactcatgcctcataatttgattagtgtgtcaaaaggcagttgctgtttttgcacctgtctccgtactgctctgctgtttactcagattttctctcattaccatattctcaggaaattctgtggtggattcatcagttttagagattaaaatgttctgcctgacccctggataaggcaaatctagtctaaagcagcacaaatttcccctaggcatgcagaccatgacacctacctggtggtcacggcagcctttgcctttagcagaggaagttttarttacatcttccattctttgtgcctgctgaacctgcccgtggtgggcacgtagatctgtgcagtgagtggagaatggaaaaaaaagcaaagcgccgtaaggatgggtcctccaaaccctcacaatgtaactgggagatgcagcaatggaaaccttcagcactgtttgccccaatccttcccaagg

SEQ ID NO: 64524 - DNA, 599 bp, Chicken  19866894330500_1
  misc_feature (1)..(103): n is any nucleotide
nnnnnnnnnnnnnnnnnnnnnnnnnnnnnnnnnnnnnnnnnnnnnnnnnnnnnnnnnnnnnnnnnnnnnnnnnnnnnnnnnnnnnnnnnnnnnnnnnnnnnnnctcctaggctacgtgctttttccctcaaacagaaggtcctgtccccttgactgagcccatcgcaacagcagcagcttttctttcctctggcctgcattgtacctggtggggggacagacgtggtttccatttaaaagcaggcaggcatttatacctttcacttctcgttatatcatggcgtacgtgctctgcctacwgtcttgatttttaaaagagaatatgcccgagtgtgttcgtgcttttgtaaaaaatgcttcaatttccagctagagaaaatctattctacaacatgttatggtgtttccatcagttagttctgagctagaaaaaatattgtaaataatgtatacaatgtgcaaataaaattgcataaaaattggaaagaattacacaagagtgcagatgagggtgcagatgctgcttcccaagaaggaccagaagttttttgccgtgcagtactgcctgcttgacaacacttattagaaaatcccttcca

SEQ ID NO: 64525 - DNA, 600 bp, Chicken  19866894330503_1
gacagctgaaggttggccttcaaagtttcttccagaagattttcttccatatgttattaatctattataatctattagtaaatggcattacgtatgtaagctaaaaaaagaatcagaaatttgtattgcacattacttcagtatagatatgatacagcctgctgaaggaaatcgaacaatttcttaaccttccattttaatttagtaacttatgtctgtcagggttttatatgtctgggtttctggctgtcccttttcagaactgctcttgtctcagctcttgactgggtaaactcaaayacaatgctgccaaacatagagccgcggttaccactcatcctgtcagacttcattagtcctgttgtacgtttgtctgggaaaatatctacctatctgttttgatttactactgaaacatgaatagtttcattttaagtctataattattttatgacctctgttcagaaaagatgctaaccttttctttctttctttctttctttctttctttctttctttctttctttctttctttctttctttctttctttctttcttttctttcaagaactcctctctgacttcaatgcatatattagc

SEQ ID NO: 64526 - DNA, 600 bp, Chicken  19866894330505_1
ctgggcacagtactccgggtgaggtctcaccagcgcagagtagtacatatactgaatttgcttttagttcacaactgctgagatcagtatggaaatctggcactattgaaatgataaaacagacatgctaaagttgaaaattttcaagtcctctaaaataataatccaggcctccttaaggaacacagatagaagattactcagaacagttcattgaactcaactgggtgcacatacttgtcttaatttagtcttaattatgtagcctttgatgctggctagcagtgttgtttggggaaygtctggagctcaccaaaaccgtgcctcattaggatcttctgcagggacacaaattcactttttcccttctgactctgaaggggcagtaggtgagtttatgcaaagggacatgttacacttgctctgacataagaaggaaaatagtggctcagtatactgaaattcaactatttatggcaaaaatccaaaaatcctccaatgttttaagactaccacggacctgcataattcatttaaaagatttcatttttcctgacacgttggctgtaaggcttttcatatcaaattctttgttttctg

SEQ ID NO: 64527 - DNA, 600 bp, Chicken  19866894330513_1
catgctcttgttcatctctggtgaaaatgcacagctaatggtgttgacagtattgaagaataatgttttgtagctgacaattagctctatcagatagtgttattgtgctcattgtgtctgttgtagtttgcatgtaagtatgtaggaggcattactttcggagcaacctacatgcagtactgcacagaattttgagccctccatttcaaatgtcttatgaagtcaaaattagcaatttaaagcattttagcaatcttgcccatacatggcatgctctctacctgtaacttaagctaaagyacatgatagaattgcttctaagactgcagaaataggtttagataggttcagaacaaactttggctaagtgggattaactgaaataaagcacagcttgtcaaggattgttctctatctctgtaaatgraaagacttgacattcatttgcaacctgtttttctttatcatcatacagggctttcacagcgattcttaaaagacagattgatcaagttttgttgattttgacacagcttaatatatgctgacgtttatatatataatgcaatgtaatatgtgctggattctgacattcctgat

SEQ ID NO: 64528 - DNA, 529 bp, Chicken  19866894330513_2
ttgcatgtaagtatgtaggaggcattactttcggagcaacctacatgcagtactgcacagaattttgagccctccatttcaaatgtcttatgaagtcaaaattagcaatttaaagcattttagcaatcttgcccatacatggcatgctctctacctgtaacttaagctaaagyacatgatagaattgcttctaagactgcagaaataggtttagataggttcagaacaaactttggctaagtgggattaactgaaataaagcacagcttgtcaaggattgttctctatctctgtaaatgraaagacttgacattcatttgcaacctgtttttctttatcatcatacagggctttcacagcgattcttaaaagacagattgatcaagttttgttgattttgacacagcttaatatatgctgacgtttatatatataatgcaatgtaatatgtgctggattctgacattcctgatctcattacacagttgctaattgtacagttcttaatgaatcaaagttaaattcagag

SEQ ID NO: 64529 - DNA, 432 bp, Chicken  19866894330517_1
tccgttttgtcttcggtaacaaatataaaggagaaaaagtaaaatcagggtgaaaggtggagtgtaaaatgctgggaaatatagaaggaaaggcacagggcacagttcctgcagatgggctgagggagaggcagcagtggtctgcaacaggcactggtttgcaagcatgagggtttcacttaccctccatcctagcaccatacctgagtcttatgtctcagtctgctccaaaggtgtcctgggggcaaacagttgctttatatcgttatcaatgccattgattgagtgctgcacatttcrrctttgggttcctcgattctcagtgctwkcacaaagtatttcccaatggctcaagagggaatggcctcaagttgaaccgggggatgttcaggtttggatgtttggaagaatttaatctcatagaaagtgata

SEQ ID NO: 64530 - DNA, 431 bp, Chicken  19866894330517_2
ccgttttgtcttcggtaacaaatataaaggagaaaaagtaaaatcagggtgaaaggtggagtgtaaaatgctgggaaatatagaaggaaaggcacagggcacagttcctgcagatgggctgagggagaggcagcagtggtctgcaacaggcactggtttgcaagcatgagggtttcacttaccctccatcctagcaccatacctgagtcttatgtctcagtctgctccaaaggtgtcctgggggcaaacagttgctttatatcgttatcaatgccattgattgagtgctgcacatttcrrctttgggttcctcgattctcagtgctwkcacaaagtatttcccaatggctcaagagggaatggcctcaagttgaaccgggggatgttcaggtttggatgtttggaagaatttaatctcatagaaagtgata

SEQ ID NO: 64531 - DNA, 404 bp, Chicken  19866894330517_3
aggagaaaaagtaaaatcagggtgaaaggtggagtgtaaaatgctgggaaatatagaaggaaaggcacagggcacagttcctgcagatgggctgagggagaggcagcagtggtctgcaacaggcactggtttgcaagcatgagggtttcacttaccctccatcctagcaccatacctgagtcttatgtctcagtctgctccaaaggtgtcctgggggcaaacagttgctttatatcgttatcaatgccattgattgagtgctgcacatttcrrctttgggttcctcgattctcagtgctwkcacaaagtatttcccaatggctcaagagggaatggcctcaagttgaaccgggggatgttcaggtttggatgtttggaagaatttaatctcatagaaagtgata

SEQ ID NO: 64532 - DNA, 403 bp, Chicken  19866894330517_4
ggagaaaaagtaaaatcagggtgaaaggtggagtgtaaaatgctgggaaatatagaaggaaaggcacagggcacagttcctgcagatgggctgagggagaggcagcagtggtctgcaacaggcactggtttgcaagcatgagggtttcacttaccctccatcctagcaccatacctgagtcttatgtctcagtctgctccaaaggtgtcctgggggcaaacagttgctttatatcgttatcaatgccattgattgagtgctgcacatttcrrctttgggttcctcgattctcagtgctwkcacaaagtatttcccaatggctcaagagggaatggcctcaagttgaaccgggggatgttcaggtttggatgtttggaagaatttaatctcatagaaagtgata

SEQ ID NO: 64533 - DNA, 600 bp, Chicken  19866894330519_1
tgtgtgtagagatgacagagatgaaaaatgtgtggaatttcaattactttcttttccccttctgtaccttcttttatctcaaagatattatagaacaagagtggtgaataattcattactgggaaggtcaacaaaaatattttctcttagatatataaataatcattgttgctattttatttcttagctgttattattattatggcctattcctggttttcagttaaattcaactgggtctcttggtgagaccttaacagctgagactccagctcctaactgctgaagtctaaacacacytgcgttctgagtccagctgaactggagttcatttatttcgcagtagcccatatggtgctaaagttcacctttgtgaccaaatgtgtgtcgataacacaccagtgttttggctgctgctgagaagtactcctcagaatccagactttctatttttttgttctgcccacctccttcagcatataaactggggatgggcaagaagaaaagagaggccataacctgggcagctgacccagtttgacctaagggatgttctatgttatataacattatgctcaacaataaatacagagggagggt

SEQ ID NO: 64534 - DNA, 600 bp, Chicken  19866894330526_1
tcaactaaatgccacttctccatatgtttaactgcactcatttctacccaagggtacctgacacaagttgccaggaaaacaaaacaaatcacccaaaccaagtaaactttatagttcaaacctcaatgaaaaattaacacaagtgaatacatactcagctctgatttcctacatgtacgtggtacatctaacacttagcggagaggctctgtttattttcagacggatgcatcccaaaagatgaacaaatgagaacccactttttcattagatgaatggcaaactcaaacaaataatttyggttaagttttacctgcaaccagaatggcctcctcttgaagaccacctgtgtacaaaccactgatgaaacaaagacacctgcaggtgggccattctgcacagctgaggctgcttgagagctgcacccacaaaccaagatgttcttacacgaaggaacacatccactccttaacatcctaggctaagggctggtacactgattttgccttggtctccactgataaaaatcaataaaaatattatcaagtaatggttccctaagcaatctgtacagaaggtgaaaaacgctagaagagtcaa

SEQ ID NO: 64535 - DNA, 600 bp, Chicken  19866894330527_1
taaatacgttcgcaaaaagcttaaacttaaatgatgtccctacaaacggcagaacaatttaaattagctttcagtttactatactgcagccacttgttaaaaatatcatcttttcctgcttttgcttcagattgtccatcctttaatgaatctgaaagagcatattccttccctgcagtaagtctaccaagaataaaaaacagtcatcacaatcctagatggattgaattagcttagcacctattttcttttgtcattcagtttctcatgaaggcaggtaacaacccagaaatccttatsctattgtattaagcacctgaacaaagtaacttaacctagaaggaaacagtgattaataattaatggctgattgcccttctacagctattcacagcagaatatccaaaatgaaatgggcacaagcaataagatgacaccattcagagtaagtgaagtattaagataccagaattacagtattagcattcattgtatttttcaaactgctatctcccattacataaaaggtagctcggcaaactgagatcccttaagttcaccagcaggcatttttagacaaaccaagtgttcttttttgga

SEQ ID NO: 64536 - DNA, 506 bp, Chicken  19866894330532_1
gcagtttgttacattacacacagcattgcatcacaaatccactacaaataatttgcctccatttgttcctgtcccatggttcctgaaagagtaaaaagtaagagcatttagccaagcagaaaggcaaacagctttctatacctttaatttcagattagtgtaagcttgtgtaatttttacccttctttatcctgaagacccaattcagcacttcattgcagacactggctatcaacatagaagcagctaaaacagcaggtggatttaaaatgaaggggcagctgtatggatgagctgctrtataagcagatgataaaatatgcagtttggagaaatggaatttatctgccctcagtaagaagctctttggtggttgctcagtaagttcacccatcatctcctgaagaccaattttgatactgttgctatagctgtgactgatctcagcagaagtcataatcagcattatatctaaacaggcggccactggaggaatggttttgtta

SEQ ID NO: 64537 - DNA, 600 bp, Chicken  19866894330544_1
agaaagcctgcttgctggatgtaggccaactagtgggtgggaagcagcagcactttggaatttcgtagatggaaatctccaaagaattaactaaatgtgggttactttatggtgtttccagtggcataggcaatactaagcagtgtgggtgtggtgtgcccagagagttcttccgttttctgctactaatatattaaatacaaacattccagtctttctctgctggaagttgcaggctattgcttccttacagcaagtgtatgtaaatctaattacaaatttggtgacgtcttgttgtargtgtgcatgattttgaagcaattgaatggaaacttaatattggcaaaaaagagggaagaccttgaaagatttcactgctctttcatcttaccgctttcagcttgagtaaggaaaaatttggtattggtctgtacgtgaaatgtttgagcactacagcattgtattttcagttgagaattgttttagaaaaatttcattacttcctaacttatctctgaatttttataaaagtgtatgtaaatattttgcctcagagatggttagaaaatttcttttttccccttcttaggttcttcccca

SEQ ID NO: 64538 - DNA, 600 bp, Chicken  19866894330545_1
acttttgtgttaaatttaatccaggttcatcaagagccactttgtgaatttgcagactgcactaaaagagcactttgtcccccttccagaaaccagactccaatacttttagcaagccgccaggcagccagacatatcatgaaataataataagctgtgctggagagagcttcaggtgacagtgagggccctctgcttccttcagcaagattagctactcctactgcatatacctatttcatattgcctagcttcttcaaagctagcaactcctcagcttctctcagtgcttcaaatgcrctctgtataattcatgaggtctgtagagacatgggaatgatctaaaatgatcactggcagataggaagagtagcagggaaattgagatgcaggcacagycaaatgctcaccagtagtatgtgcaaagcttggaaattgcacgcctgttctcagaccctctccttcacctttccatatagacacagtcagaaaagccagctggaacagcgtgcagttttatgcagaagatcattttacaaaatagtgttctgtcagatctcttccagcaaggcagacctctgctgggttctcctgttccaa

SEQ ID NO: 64539 - DNA, 600 bp, Chicken  19866894330545_2
ccaatacttttagcaagccgccaggcagccagacatatcatgaaataataataagctgtgctggagagagcttcaggtgacagtgagggccctctgcttccttcagcaagattagctactcctactgcatatacctatttcatattgcctagcttcttcaaagctagcaactcctcagcttctctcagtgcttcaaatgcrctctgtataattcatgaggtctgtagagacatgggaatgatctaaaatgatcactggcagataggaagagtagcagggaaattgagatgcaggcacagycaaatgctcaccagtagtatgtgcaaagcttggaaattgcacgcctgttctcagaccctctccttcacctttccatatagacacagtcagaaaagccagctggaacagcgtgcagttttatgcagaagatcattttacaaaatagtgttctgtcagatctcttccagcaaggcagacctctgctgggttctcctgttccaagccatcattaaataacagacttcagagaaagctgaagtttgtaagaagccaataattgtacttattcctagtgataaaaaaataattaattgtaatcaa

SEQ ID NO: 64540 - DNA, 600 bp, Chicken  19866894330545_3
cctttccatatagacacagtcagaaaagccagctggaacagcgtgcagttttatgcagaagatcattttacaaaatagtgttctgtcagatctcttccagcaaggcagacctctgctgggttctcctgttccaagccatcattaaataacagacttcagagaaagctgaagtttgtaagaagccaataattgtacttattcctagtgataaaaaaataattaattgtaatcaaattccagtgggtgaagtgaaaataattctgaagtagaaggtaaaaagaaaaagtaaaaagaaaagtwaaaagttcataaataaagcaagagttacaacaacaacaacaacaaaaagaccaattaaggaaagttatcttctcttcaaaccaattaactgctttcttgtggccacagtagggagaggaagggacaagacatgatcagaaaaataaaaggaggaacaaaaatacaacataaacgaacaactactgctgctgaaactttcctcagtccagcctctcagtccaaacctgaatccagattggaaaataaatcagtgagtcaacaggacattaaaagagaaggaagataccttaaattcatgcc

SEQ ID NO: 64541 - DNA, 600 bp, Chicken  19866894330546_1
atggtggtgtgaaggttcatttctgacttgttgcatgggtctgaaggcttgtccttttgaaggcaaagcaggttcatagaaaatgggaagatgaagtgcatctcccagtcatgaccctttgttgctcacagactaactgacttggggcaggagacaacagcattaatggctcacagatatagcaggcttggagaagcactccctgacctccctatgtttagccttgttgggtttttggacccctctgaagttcccaaggtgacacaaaccctgtccttgtgttagggttgcttttgatarctgcttttaggactgtrctttcctaatgctgcagagctgggaaaggtggctcagtcccagctgggtaaagcagactgtcagtacacagaaggtaaagaaaagaaagaaatgcaagtgggaaaagraactgggaggacaaaggaatgagggaagcccacaggagagcccgtggtgggggggatgtttctagcctgattgctccacaatctgtgagcatctccatcagccccattgctgctmtcacacatatttaatgtatatttgtactcagctgaagaccagaggggaagaccctcatgt

SEQ ID NO: 64542 - DNA, 600 bp, Chicken  19866894330546_2
catttctgacttgttgcatgggtctgaaggcttgtccttttgaaggcaaagcaggttcatagaaaatgggaagatgaagtgcatctcccagtcatgaccctttgttgctcacagactaactgacttggggcaggagacaacagcattaatggctcacagatatagcaggcttggagaagcactccctgacctccctatgtttagccttgttgggtttttggacccctctgaagttcccaaggtgacacaaaccctgtccttgtgttagggttgcttttgatarctgcttttaggactgtrctttcctaatgctgcagagctgggaaaggtggctcagtcccagctgggtaaagcagactgtcagtacacagaaggtaaagaaaagaaagaaatgcaagtgggaaaagraactgggaggacaaaggaatgagggaagcccacaggagagcccgtggtgggggggatgtttctagcctgattgctccacaatctgtgagcatctccatcagccccattgctgctmtcacacatatttaatgtatatttgtactcagctgaagaccagaggggaagaccctcatgtccttggaactggattga

SEQ ID NO: 64543 - DNA, 600 bp, Chicken  19866894330546_3
tcacagactaactgacttggggcaggagacaacagcattaatggctcacagatatagcaggcttggagaagcactccctgacctccctatgtttagccttgttgggtttttggacccctctgaagttcccaaggtgacacaaaccctgtccttgtgttagggttgcttttgatarctgcttttaggactgtrctttcctaatgctgcagagctgggaaaggtggctcagtcccagctgggtaaagcagactgtcagtacacagaaggtaaagaaaagaaagaaatgcaagtgggaaaagraactgggaggacaaaggaatgagggaagcccacaggagagcccgtggtgggggggatgtttctagcctgattgctccacaatctgtgagcatctccatcagccccattgctgctmtcacacatatttaatgtatatttgtactcagctgaagaccagaggggaagaccctcatgtccttggaactggattgatgttgctggtgctggattgagttggattatcagttaaagtcattacctgaccacagcatgcagtaggattcaaaacaatttaaatagggctctttgtttaattaaatg

SEQ ID NO: 64544 - DNA, 600 bp, Chicken  19866894330546_4
ccctctgaagttcccaaggtgacacaaaccctgtccttgtgttagggttgcttttgatarctgcttttaggactgtrctttcctaatgctgcagagctgggaaaggtggctcagtcccagctgggtaaagcagactgtcagtacacagaaggtaaagaaaagaaagaaatgcaagtgggaaaagraactgggaggacaaaggaatgagggaagcccacaggagagcccgtggtgggggggatgtttctagcctgattgctccacaatctgtgagcatctccatcagccccattgctgctmtcacacatatttaatgtatatttgtactcagctgaagaccagaggggaagaccctcatgtccttggaactggattgatgttgctggtgctggattgagttggattatcagttaaagtcattacctgaccacagcatgcagtaggattcaaaacaatttaaatagggctctttgtttaattaaatggtgtgagcgaagctgctggacttgtagcaaacccatttggccatgttgtcacagatccaggtagaactggtgcttgtcatcgaagctcataaaacataatctttgcctttcaaca

SEQ ID NO: 64545 - DNA, 600 bp, Chicken  19866894330555_1
ttggtggggactttagttcgccttacctatggggaagatttgcagattgactgggatggccgtggtggactgctagtgaaggtactctttcattccatctcatttatttctgccttccctccacctctttcaacccacccaaatttatgcagaggctttcataatttatcccatgagaagttgcttttcattgcatgctagaaataccattctcctttatactccttgagtatatacaggtccttttgtattccagaaaacattttcatcccacagcagacttttttcctctctctctcmytttttttttttttttttttttggacaatgacagccattattaacaagaaatacttgttttgttcagtagatacccttcaaactgtatttttttttgtcttcattgaatttaactgtcctgccttatagcagtagattcttcccttattataaagtcatatgaatatgaatccagggacattattggcaacttctaggaaaggtcaattaactcatacaacatatgttgcatgctccttctactacgagaaatgtttaagggcagtcttgattaactacaaggatttgtctgtgctgcag

SEQ ID NO: 64546 - DNA, 600 bp, Chicken  19866894330555_2
tggtggggactttagttcgccttacctatggggaagatttgcagattgactgggatggccgtggtggactgctagtgaaggtactctttcattccatctcatttatttctgccttccctccacctctttcaacccacccaaatttatgcagaggctttcataatttatcccatgagaagttgcttttcattgcatgctagaaataccattctcctttatactccttgagtatatacaggtccttttgtattccagaaaacattttcatcccacagcagacttttttcctctctctctctytttttttttttttttttttttggacaatgacagccattattaacaagaaatacttgttttgttcagtagatacccttcaaactgtatttttttttgtcttcattgaatttaactgtcctgccttatagcagtagattcttcccttattataaagtcatatgaatatgaatccagggacattattggcaacttctaggaaaggtcaattaactcatacaacatatgttgcatgctccttctactacgagaaatgtttaagggcagtcttgattaactacaaggatttgtctgtgctgcaga

SEQ ID NO: 64547 - DNA, 599 bp, Chicken  19866894330558_1
  misc_feature (1)..(185): n is any nucleotide
nnnnnnnnnnnnnnnnnnnnnnnnnnnnnnnnnnnnnnnnnnnnnnnnnnnnnnnnnnnnnnnnnnnnnnnnnnnnnnnnnnnnnnnnnnnnnnnnnnnnnnnnnnnnnnnnnnnnnnnnnnnnnnnnnnnnnnnnnnnnnnnnnnnnnnnnnnnnnnnnnnnnnnnnnnnnnnnnnnnnnnnnnagaagtcaagtgacttattgatactgaggaaagacatcagatcatcagtgttaaaatgagagcatttagtaatccgtgcattaagtctacaaattttaacaaacaaatcagtgcyctagacataatgctatccatttctatatgtaagttatcaaagatattttctagaacaagctcaagctgcatgctagacaaaaatatgttctcacacaagttatagtacatatatttgtgattaaacattttgaaatccccttctatgaattttcttttatatttgcagaaaatatttttttgtttgtttcaacaaaaacttctagtactgtactcagctgccagaatatccataaaaatgaagtggagagcatgagaacacatcttaaacaaatttattttgacttggaatcattccct

SEQ ID NO: 64548 - DNA, 600 bp, Chicken  19866894330568_1
gttatggctttaataagtagttgtcaaacgagtcccttcttaacttcacttttaaagcaaatccatgcgcccgctcgcttctctctgtgagcatttccctcaccttatggttttaaagcagttctgcaatttagtcacattgtttttgcactagagctgtttggaaattttccaacccagtggggaaattcaacccgttgaaacccaaacttgctgtgaaaatacaactttgactcagtcgttctgccccgagacatttcagacctctcaggaagctctcctgcacactgcccccattcrgtctgtcttcccaagcagcctgggctcaggcttgagwgcaggaggactcagccccttcttcgggggcagagcgaggacttgcatttagtgctcccatgttcagctccaaaactggggtatggagctacagccatcctggggaatgtcccatttcacttctgctccttgtcccctcctcccctcctttccccttccagaaggccccacatttagcagagcctataactagagaactctacctagctcccaacaaaagccacttgtatctgttctactcccagaggagtaaagctggcaaag

SEQ ID NO: 64549 - DNA, 600 bp, Chicken  19866894330568_2
tcttaacttcacttttaaagcaaatccatgcgcccgctcgcttctctctgtgagcatttccctcaccttatggttttaaagcagttctgcaatttagtcacattgtttttgcactagagctgtttggaaattttccaacccagtggggaaattcaacccgttgaaacccaaacttgctgtgaaaatacaactttgactcagtcgttctgccccgagacatttcagacctctcaggaagctctcctgcacactgcccccattcrgtctgtcttcccaagcagcctgggctcaggcttgagwgcaggaggactcagccccttcttcgggggcagagcgaggacttgcatttagtgctcccatgttcagctccaaaactggggtatggagctacagccatcctggggaatgtcccatttcacttctgctccttgtcccctcctcccctcctttccccttccagaaggccccacatttagcagagcctataactagagaactctacctagctcccaacaaaagccacttgtatctgttctactcccagaggagtaaagctggcaaagcactgactgacgctagggctaggaggcctgacccaaa

SEQ ID NO: 64550 - DNA, 600 bp, Chicken  19866894330576_1
agttctttaatcactcttccttatttctatattctacaactgtcagaagagctaaagaaaatgtttctgaaactgaaagcattcagttagattcccaaatggtgtcaacctagagctgttttcttttcaggtagaaagtaattcaccagcaaatgcccatctacttctagacatatccctgtgctgggatctcagttgcaattaaaggtagaggttcaagaagctccaaatagacaacctaggacagaatgtagcttgcagctctgttattaacagttgttaaatattcattcgcctcargaaagattggacttgaactttaagcaccataggagcaagcaagagtggaaacaagraaacactggtcctggcacagcccttgtaggggactcagctccaatagccagaggcacttctgcagctgattctcagtcacagcttcaccagaaacaaactggcagcacagagaaagattaaaaccagggacatcccaccacaggcaaagaaattgcagtctgctcctcttaacttagaacagacatctatcaagagtcgttccatagaccataccacatggtcttacataaagaaaacagttcc

SEQ ID NO: 64551 - DNA, 600 bp, Chicken  19866894330576_2
gaaaatgtttctgaaactgaaagcattcagttagattcccaaatggtgtcaacctagagctgttttcttttcaggtagaaagtaattcaccagcaaatgcccatctacttctagacatatccctgtgctgggatctcagttgcaattaaaggtagaggttcaagaagctccaaatagacaacctaggacagaatgtagcttgcagctctgttattaacagttgttaaatattcattcgcctcargaaagattggacttgaactttaagcaccataggagcaagcaagagtggaaacaagraaacactggtcctggcacagcccttgtaggggactcagctccaatagccagaggcacttctgcagctgattctcagtcacagcttcaccagaaacaaactggcagcacagagaaagattaaaaccagggacatcccaccacaggcaaagaaattgcagtctgctcctcttaacttagaacagacatctatcaagagtcgttccatagaccataccacatggtcttacataaagaaaacagttcccccttgttcctacaggtgtgacctgctctggcactatttccagagcaaggtgaaac

SEQ ID NO: 64552 - DNA, 599 bp, Chicken  19866894330585_1
  misc_feature (1)..(205): n is any nucleotide
nnnnnnnnnnnnnnnnnnnnnnnnnnnnnnnnnnnnnnnnnnnnnnnnnnnnnnnnnnnnnnnnnnnnnnnnnnnnnnnnnnnnnnnnnnnnnnnnnnnnnnnnnnnnnnnnnnnnnnnnnnnnnnnnnnnnnnnnnnnnnnnnnnnnnnnnnnnnnnnnnnnnnnnnnnnnnnnnnnnnnnnnnnnnnnnnnnnnnnnnnnnnnacaggcttgacacttagaatcagattttagtgcaaagtttggtgttacaaaacagcgtaacttgttcaggacactgctcttggtagtacaaaggsctgtgtagaccgagcagcagtagtgtgtgccgttcatcattgcattcctttcttaatctttactctctgatatatatgctttgtgttaatttgcctgcattaatctatttttgggtgctttcgaaatacagattcagtcaactatttagcttcttcacacagagcttgggtaagctacctttatgcataacttatactcctttggaggatctgaagcaggtttctggtttcttttaagacctggcccctggaggaggtggtggttgcagacacagtcaccttatgatttggcagcttac

SEQ ID NO: 64553 - DNA, 600 bp, Chicken  19866894330585_2
ttccctcagctgcttacgctgcttttaggccccctcacatctaaaggttcttattcaatgtcccattttctctttattaaaaaaaaaaaatcctggaaagtagtagaacatcccattctgacaagcttttaaatgacaaaacgtagttacttgttttccataaacattgtggcctatttctgtacttttcccttgactgtgaatgggactttcttcacgctggcactctggtgtcagaccacagcctggtaacagtgcagctacatctgctcagcgtactccttgttaatgttcttccayctgttttggtgtcaatctgttctattatgtctctgaaggatcagcatttcagagctgaaaatcttcagcatatcttattttgttcagattttstatgtaactcataggaagtgggggcrtgctgaagaggaatacaaaacccagactaccacacctatgtaagagtgaagggtgaaatccatcttctccacatgactgagtacaccttgcacgagctggagttggatggtgctattcaaaggagtgatgctaaaacacaaggctctttagattaggtatgttttcattcatggattttgc

SEQ ID NO: 64554 - DNA, 600 bp, Chicken  19866894330585_3
tggaaagtagtagaacatcccattctgacaagcttttaaatgacaaaacgtagttacttgttttccataaacattgtggcctatttctgtacttttcccttgactgtgaatgggactttcttcacgctggcactctggtgtcagaccacagcctggtaacagtgcagctacatctgctcagcgtactccttgttaatgttcttccayctgttttggtgtcaatctgttctattatgtctctgaaggatcagcatttcagagctgaaaatcttcagcatatcttattttgttcagattttstatgtaactcataggaagtgggggcrtgctgaagaggaatacaaaacccagactaccacacctatgtaagagtgaagggtgaaatccatcttctccacatgactgagtacaccttgcacgagctggagttggatggtgctattcaaaggagtgatgctaaaacacaaggctctttagattaggtatgttttcattcatggattttgcctcatcctttctatcttctagctactggtgggtgcgacttagtccagcagctggagttgttaaggacttgcagatctcatctggtttatctat

SEQ ID NO: 64555 - DNA, 600 bp, Chicken  19866894330585_4
gacaagcttttaaatgacaaaacgtagttacttgttttccataaacattgtggcctatttctgtacttttcccttgactgtgaatgggactttcttcacgctggcactctggtgtcagaccacagcctggtaacagtgcagctacatctgctcagcgtactccttgttaatgttcttccayctgttttggtgtcaatctgttctattatgtctctgaaggatcagcatttcagagctgaaaatcttcagcatatcttattttgttcagattttstatgtaactcataggaagtgggggcrtgctgaagaggaatacaaaacccagactaccacacctatgtaagagtgaagggtgaaatccatcttctccacatgactgagtacaccttgcacgagctggagttggatggtgctattcaaaggagtgatgctaaaacacaaggctctttagattaggtatgttttcattcatggattttgcctcatcctttctatcttctagctactggtgggtgcgacttagtccagcagctggagttgttaaggacttgcagatctcatctggtttatctattgaaacttagtaagtgctgtaactta

SEQ ID NO: 64556 - DNA, 600 bp, Chicken  19866894330595_1
gggagattattactattatattatttattagaatgcatggtaaatgaatcaatatgtgagtacttaactaaggacattatatgtgataagcaaaacaatttcataaagaacagatcatgttaagacaatgacaaaattctgatgaaactactagtttggtgaagaaatctaataaagttaatgtaatttgtctggactttgctgaaggctttgtaatagagtccagtccagaatcataaaatcagaatgatgctgtcttgctgagtacaccaacagaggaagttaatctgattcataaartgacaagaatacaatccaattggaaagagtttagaaagaggctaagacagcatcttaacaccagtaagtaaaaagatatctaacacacttaattgattatcttattaagcaggcagaaatcaagatgtgttcaaataaaaacagtaaagtaacaccatcatgaaagaaggaaagagaaatcagatttagtttcccagtcttttatggtgcaagttggtgattagagcaactaacaaaggagttcgttaaggagcaataaacaagtcaataaggatgataatgactagaacactgagaaaa

SEQ ID NO: 64557 - DNA, 600 bp, Chicken  19866894330596_1
tctagcaagctctcatctaactgagacggcaaaatgactgacggcaaagtattttggcaggatttggggcacatcttgccctgccctgctctcagtcctgtcttttcttcacttgtttcaccaccctgctgtcactttatagctgcttcaaagctctggcagctttctactgagggcttcagctttcagcagttttctgtctcaactgcagcttcttgcttaaagtaagcttctaaattgggcgtacttgctatcagcagcattaagggtggtatctctactgtacacaaaaaatgtcasttattggtgctttaaaatggtcaaaagtgttgagtgcatggaagttactaagtgaaaagagttacattgctttttctttcttttacagtcgctcaaagtccagatcaccatctccaaagagaaggtaggaatgaaaagtagagtccaacatatgcttacaatggagtagtgtctgtagtgattgctataaaggttaacttctgcaaaaataaaatcatgaacttctttcctcgtgaactttaaaactggaatttgcatgggtgtttccttctgtgagtcacaagtttataacaaggctgt

SEQ ID NO: 64558 - DNA, 600 bp, Chicken  19866894330617_1
tggagaactcaagagcaatttatgtagccatctagataaagctacaggagtgaagagttatgttaagtgcataatgctgtgttagtcctgcttatctcatttcacttacttgacagacagttcttgtactagaccagtttgtgcttgtgtgaaataagcagtgagaataattcacaatcattcttccttaatgtttttaccacctggagccagaaataggctttcagcccaaggaacaaggaagctcctttcataacttcctaaaaagattccaagcactcactctatttgacatcatgmtgtacatagtacttctttcaacagatgtagcagagcttattgatgaatacccactctgcacctaaaactagggagtcatgtcatggtccaaatgtacaagttgaaatgagaactgtgttgggattttcacagttcccctttattgcctttactgaagatgggtttgattcagtacctacttgagtcctgttctctgttaatactgataacacattttaaatactgaaaaatagacaaacaaagcaaacaaactcaacaccacaaccctcaccaacaaaataaaggtccataatacaccgt

SEQ ID NO: 64559 - DNA, 600 bp, Chicken  19866894330617_2
gataaagaatctatgatagtgtcaacaaaaagtgttttccccattttgcctatataggtaaaagtctcaggaattttggtttttgcattttagggttctcatccagaagatactcaaaatgtcttgttcacaggtagtactggggaattaaatatcattctacttagactatattgcactaaatcttgaaagaaagataatctgctggtgagtatatggaaatttaatcattctttttatgtaagttatagctaaactatcaaattccccaaactactaaaaatcaaggattctaatggracccatgtcacagtactaactacaactgctaatcactgagttaatcattctgtaagatttaatgctctgccattctgttgcttcttgctctaacagggcagacttgctccaacagggtctctcatttcttattgaataatatgatttgaacaagtaaacgctcctcacgaaaggaaaaaaaaaatgcccccgtgttcacataacacaaaacattgctcaagaatgaaatcacatcctcatcctaaatgtactgaaaagcattggaaacctgacttcgtaccagcaggatttacaccagag

SEQ ID NO: 64560 - DNA, 600 bp, Chicken  19866894330624_1
tgctaagcaattctttcgatgctgcaatgtgaaataatgtgctcagcctggcagtagtattgatgcaaaaacaaaaaaggaaacaaactgagcaaacgaaataggccttgacatgcagtttcacctttcaccttgtccttttcctgctggtgctcctgtaggctgagttttcttgtacttaagtgggtcctatataacagaagggatgaggcagtgcttcagcttattgctttattcccaggagtacgcactggattggctctcaccagttcagtgagaactgggtgctccaccttgccmtttcccatctcagagtaacagctttctttgtactgcttatcagtggttcctaaagaaagatcctctgtggtacaacaatgaaatctaagacgacttatttatttacttcccttcctgtgtcctcagtgcacagaattgttatggaacccacagtgcacatttctcaaacaagaagcagtttttttttcaggaggagggtctggttggaagcctgctttagagggaagccaaagctgtctgtccagcccctagtacttccatttgaaaacaagtgccaaacttccaaagcaatgcagtaac

SEQ ID NO: 64561 - DNA, 600 bp, Chicken  19866894330625_1
tactctaaatgtaaatcagcacaagagttggtattacacagtaacattcttttttccttaagaaatacattgtatctcatcaacagcacatgtactctgtgttgttacagttgctatgccctttctccccttatgtttttctcttacagtaagaactcaggacatcataaactgaaccatttgacatctctgtagctcatttatttccattttcatcccaagaggtttagaaatttattatataaaaataggtgttttcgattaaataaataaataaacaaataaaatatttctttctayccaatatgtcaatgttattttacagctaataccctaaacattaacttacaatagaaataagcatttgaactgattcctctgttacttttgaaaaataaaaaaaatctttataaatgtcttcwtgaatatatcaagttgtgaagagctgaatatcaaacagtcagatgmttttttaaaaatacatttgaaacttcagttttcacctaagcaatgtttgcttttcyctttagaattttgtttttctaatctattttttttgtgtggttgcacatttccttaggtatgttagtgcaactgttc

SEQ ID NO: 64562 - DNA, 600 bp, Chicken  19866894330625_2
ttctccccttatgtttttctcttacagtaagaactcaggacatcataaactgaaccatttgacatctctgtagctcatttatttccattttcatcccaagaggtttagaaatttattatataaaaataggtgttttcgattaaataaataaataaacaaataaaatatttctttctayccaatatgtcaatgttattttacagctaataccctaaacattaacttacaatagaaataagcatttgaactgattcctctgttacttttgaaaaataaaaaaaatctttataaatgtcttcwtgaatatatcaagttgtgaagagctgaatatcaaacagtcagatgmttttttaaaaatacatttgaaacttcagttttcacctaagcaatgtttgcttttcyctttagaattttgtttttctaatctattttttttgtgtggttgcacatttccttaggtatgttagtgcaactgttcacctttttccaataacaacttctcaaactgagttgctgaaatctgagtataaaaatcattcaattataatactgccagaggcatggaacaaattatacaaataatataaaatcactttaatt

SEQ ID NO: 64563 - DNA, 600 bp, Chicken  19866894330625_3
aaactgaaccatttgacatctctgtagctcatttatttccattttcatcccaagaggtttagaaatttattatataaaaataggtgttttcgattaaataaataaataaacaaataaaatatttctttctayccaatatgtcaatgttattttacagctaataccctaaacattaacttacaatagaaataagcatttgaactgattcctctgttacttttgaaaaataaaaaaaatctttataaatgtcttcwtgaatatatcaagttgtgaagagctgaatatcaaacagtcagatgmttttttaaaaatacatttgaaacttcagttttcacctaagcaatgtttgcttttcyctttagaattttgtttttctaatctattttttttgtgtggttgcacatttccttaggtatgttagtgcaactgttcacctttttccaataacaacttctcaaactgagttgctgaaatctgagtataaaaatcattcaattataatactgccagaggcatggaacaaattatacaaataatataaaatcactttaatttcctaaatttgggcatcttggatagaccctgaaattgtagatgttc

SEQ ID NO: 64564 - DNA, 600 bp, Chicken  19866894330625_4
gtttagaaatttattatataaaaataggtgttttcgattaaataaataaataaacaaataaaatatttctttctayccaatatgtcaatgttattttacagctaataccctaaacattaacttacaatagaaataagcatttgaactgattcctctgttacttttgaaaaataaaaaaaatctttataaatgtcttcwtgaatatatcaagttgtgaagagctgaatatcaaacagtcagatgmttttttaaaaatacatttgaaacttcagttttcacctaagcaatgtttgcttttcyctttagaattttgtttttctaatctattttttttgtgtggttgcacatttccttaggtatgttagtgcaactgttcacctttttccaataacaacttctcaaactgagttgctgaaatctgagtataaaaatcattcaattataatactgccagaggcatggaacaaattatacaaataatataaaatcactttaatttcctaaatttgggcatcttggatagaccctgaaattgtagatgttcagcatatctaagagaaaagttgaaagaagtgattaacacaatcacagtagaaacaa

SEQ ID NO: 64565 - DNA, 600 bp, Chicken  19866894330626_1
cattcattacactgttattgttcttttcacgtaaacaaacttggttatgcattcaaataatgcctgtgagttttccttcacagcatctccttttttattttattgcagctcagtgcacaataaaagcaggtcacgcagcagtatgaatgggtaacaacagggcttattaattttcaaaagcccactatttcggaagcagaaaatgttttttccttttctttccttttctaaaaggatggaaaaaatcaagagagcatacacatcgtgtttaaacacctacttttgactcatacaatttayggtaccctgcccctgttctgcagacgtaaagacattgggtacctctccactgctcgtcaaccatatgcctgaagaatcaaggcaggactgatggagaagtgctgaaatatccaaaggataaagtgtgaggatcagaatgtcaatttattgcccagatcatttgaaaacagaaaggaccctgggaaacaattagctccataataccagagactatttcctgctttgacagctgactagaatgctttcattaagagctcaagatacattcatttacttgacttacgaggaatattttgtatt

SEQ ID NO: 64566 - DNA, 548 bp, Chicken  19866894330626_2
attgcccagatcatttgaaaacagaaaggaccctgggaaacaattagctccataataccagagactatttcctgctttgacagctgactagaatgctttcattaagagctcaagatacattcatttacttgacttacgaggaatattttgtatttgtccattgtttatttggttgctttttttggtcaaatcatgtcaggcattcaggttacatttactgaagtcttgttcagcaaacttggtgcatgacacggttactaatttttttcttacaaagacgagcacatagcactgatgacyaaaaaaaaaaatgccgtgtcttctcattgacttacattaaggattttttttacatcaatcaaaagacagcagcggcataagtaaggatagtgaactggtacagacaaagtaaaaattcattcccaaatctgcatgtcaaatttgaactttggagaaggcattggtaaattagaagtagtatatgcaacactctactctctgcactgtccaagcttttccattaccctctacactgcagtccaaaaacc

SEQ ID NO: 64567 - DNA, 600 bp, Chicken  19866894330633_1
atattaatagatagaaaaatccatagtagagtccattattgttgaactttatcatctttttagaaagtacaatagtaaaattatctattaattagattaatttcaaagaagtgtaaatcatcctgacccatgatacttgcttgcaaagctattgtgagagaataattgatagtctagaggtgatattctgagcagaagcaagccttgaacttccagtcactagacttaaattcttaccaagaatacatcatattacagaacctccagcatcgcagggcattgcaagaaggagaaggaaaytaagtggattgttattgttacatatattctgtgtaattgctcacygtgacctcaaattaaaagtggatataagtcaaartctctaaatttaaaaaacttcaaggtgagaaggaccatgccactcaaataacagctccccatataaaaaacatgtcttacragtcatttcatttgtaacctattctgacagaaaactgtatggccttgggcaagtatttaaccctacacagtatctggcagtaaatacacacakaaaagaasatagacgaaacatataagcattgrtttgtgatggaaagg

SEQ ID NO: 64568 - DNA, 600 bp, Chicken  19866894330633_2
actttatcatctttttagaaagtacaatagtaaaattatctattaattagattaatttcaaagaagtgtaaatcatcctgacccatgatacttgcttgcaaagctattgtgagagaataattgatagtctagaggtgatattctgagcagaagcaagccttgaacttccagtcactagacttaaattcttaccaagaatacatcatattacagaacctccagcatcgcagggcattgcaagaaggagaaggaaaytaagtggattgttattgttacatatattctgtgtaattgctcacygtgacctcaaattaaaagtggatataagtcaaartctctaaatttaaaaaacttcaaggtgagaaggaccatgccactcaaataacagctccccatataaaaaacatgtcttacragtcatttcatttgtaacctattctgacagaaaactgtatggccttgggcaagtatttaaccctacacagtatctggcagtaaatacacacakaaaagaasatagacgaaacatataagcattgrtttgtgatggaaaggtgagaaaaattacatgaaatcaatttgactcatcaatagattaga

SEQ ID NO: 64569 - DNA, 600 bp, Chicken  19866894330633_3
attatctattaattagattaatttcaaagaagtgtaaatcatcctgacccatgatacttgcttgcaaagctattgtgagagaataattgatagtctagaggtgatattctgagcagaagcaagccttgaacttccagtcactagacttaaattcttaccaagaatacatcatattacagaacctccagcatcgcagggcattgcaagaaggagaaggaaaytaagtggattgttattgttacatatattctgtgtaattgctcacygtgacctcaaattaaaagtggatataagtcaaartctctaaatttaaaaaacttcaaggtgagaaggaccatgccactcaaataacagctccccatataaaaaacatgtcttacragtcatttcatttgtaacctattctgacagaaaactgtatggccttgggcaagtatttaaccctacacagtatctggcagtaaatacacacakaaaagaasatagacgaaacatataagcattgrtttgtgatggaaaggtgagaaaaattacatgaaatcaatttgactcatcaatagattagatctgtcccaaacacttagctgatctcaggtccta

SEQ ID NO: 64570 - DNA, 600 bp, Chicken  19866894330633_4
aataattgatagtctagaggtgatattctgagcagaagcaagccttgaacttccagtcactagacttaaattcttaccaagaatacatcatattacagaacctccagcatcgcagggcattgcaagaaggagaaggaaaytaagtggattgttattgttacatatattctgtgtaattgctcacygtgacctcaaattaaaagtggatataagtcaaartctctaaatttaaaaaacttcaaggtgagaaggaccatgccactcaaataacagctccccatataaaaaacatgtcttacragtcatttcatttgtaacctattctgacagaaaactgtatggccttgggcaagtatttaaccctacacagtatctggcagtaaatacacacakaaaagaasatagacgaaacatataagcattgrtttgtgatggaaaggtgagaaaaattacatgaaatcaatttgactcatcaatagattagatctgtcccaaacacttagctgatctcaggtcctacatttaacaattttattgtragatctttatggcagcaatagcatctgctaaaaatgaatgggaagtaatcaagaccagaat

SEQ ID NO: 64571 - DNA, 600 bp, Chicken  19866894330633_5
tacagaacctccagcatcgcagggcattgcaagaaggagaaggaaaytaagtggattgttattgttacatatattctgtgtaattgctcacygtgacctcaaattaaaagtggatataagtcaaartctctaaatttaaaaaacttcaaggtgagaaggaccatgccactcaaataacagctccccatataaaaaacatgtcttacragtcatttcatttgtaacctattctgacagaaaactgtatggccttgggcaagtatttaaccctacacagtatctggcagtaaatacacacakaaaagaasatagacgaaacatataagcattgrtttgtgatggaaaggtgagaaaaattacatgaaatcaatttgactcatcaatagattagatctgtcccaaacacttagctgatctcaggtcctacatttaacaattttattgtragatctttatggcagcaatagcatctgctaaaaatgaatgggaagtaatcaagaccagaatcttgcattcacatgtaaatttttcaggggaaattagttcctgtgttttctgatgagctgtgtgtcacactgcactatctttctaataaatagc

SEQ ID NO: 64572 - DNA, 600 bp, Chicken  19866894330633_6
ctccagcatcgcagggcattgcaagaaggagaaggaaaytaagtggattgttattgttacatatattctgtgtaattgctcacygtgacctcaaattaaaagtggatataagtcaaartctctaaatttaaaaaacttcaaggtgagaaggaccatgccactcaaataacagctccccatataaaaaacatgtcttacragtcatttcatttgtaacctattctgacagaaaactgtatggccttgggcaagtatttaaccctacacagtatctggcagtaaatacacacakaaaagaasatagacgaaacatataagcattgrtttgtgatggaaaggtgagaaaaattacatgaaatcaatttgactcatcaatagattagatctgtcccaaacacttagctgatctcaggtcctacatttaacaattttattgtragatctttatggcagcaatagcatctgctaaaaatgaatgggaagtaatcaagaccagaatcttgcattcacatgtaaatttttcaggggaaattagttcctgtgttttctgatgagctgtgtgtcacactgcactatctttctaataaatagcaatatgtc

SEQ ID NO: 64573 - DNA, 600 bp, Chicken  19866894330633_7
gaaggagaaggaaaytaagtggattgttattgttacatatattctgtgtaattgctcacygtgacctcaaattaaaagtggatataagtcaaartctctaaatttaaaaaacttcaaggtgagaaggaccatgccactcaaataacagctccccatataaaaaacatgtcttacragtcatttcatttgtaacctattctgacagaaaactgtatggccttgggcaagtatttaaccctacacagtatctggcagtaaatacacacakaaaagaasatagacgaaacatataagcattgrtttgtgatggaaaggtgagaaaaattacatgaaatcaatttgactcatcaatagattagatctgtcccaaacacttagctgatctcaggtcctacatttaacaattttattgtragatctttatggcagcaatagcatctgctaaaaatgaatgggaagtaatcaagaccagaatcttgcattcacatgtaaatttttcaggggaaattagttcctgtgttttctgatgagctgtgtgtcacactgcactatctttctaataaatagcaatatgtcttcagttgtgatggatgatgtact

SEQ ID NO: 64574 - DNA, 600 bp, Chicken  19866894330633_8
caaggtgagaaggaccatgccactcaaataacagctccccatataaaaaacatgtcttacragtcatttcatttgtaacctattctgacagaaaactgtatggccttgggcaagtatttaaccctacacagtatctggcagtaaatacacacakaaaagaasatagacgaaacatataagcattgrtttgtgatggaaaggtgagaaaaattacatgaaatcaatttgactcatcaatagattagatctgtcccaaacacttagctgatctcaggtcctacatttaacaattttattgtragatctttatggcagcaatagcatctgctaaaaatgaatgggaagtaatcaagaccagaatcttgcattcacatgtaaatttttcaggggaaattagttcctgtgttttctgatgagctgtgtgtcacactgcactatctttctaataaatagcaatatgtcttcagttgtgatggatgatgtacttatctatgaaacctctttataatatactgagagactatcaaaatactgtacttagaagctgaagagaggacagaattggtttggcgcacacagactcccaggaatgtggaacac

SEQ ID NO: 64575 - DNA, 600 bp, Chicken  19866894330634_1
gcagatcagataaaccttcagcagggagtggttgaactgcttcacatgttggcttgatcatcatttcacacatgctaaataaatccacgagtgcactgatattcaaattagagcaagtatcatttgcattgcaaactgactctagtcaattatgtacttttaaaaaatctgagaaatttagccaaaatagataagcagtgaaaccagtggtaatttatgtagatgtaaggttgacaaatcttccagaagagtgtctcgatcatgtttgaacactttgaggcatacgggaacaaagccacrtatttttcaaggcaagcagaaaaagcatggagraaaaaaaaggaaaaaagatagtcaatatgtgctgcttggcttctgtctgtcatctcatctgactrmamagaagggcacagccagggcaggatgcttgcagtgtcccaggctgtcagtcagtgtgcagcctgaccacctctagcacaccccagctcatagggcagcagcaggcagctcctttgcaagttgggtgattacaaacacaagctgaaatgatcctatgaagtcatgaattaacctacaaaccgctcttgcagttggcagggt

SEQ ID NO: 64576 - DNA, 600 bp, Chicken  19866894330634_2
gaactgcttcacatgttggcttgatcatcatttcacacatgctaaataaatccacgagtgcactgatattcaaattagagcaagtatcatttgcattgcaaactgactctagtcaattatgtacttttaaaaaatctgagaaatttagccaaaatagataagcagtgaaaccagtggtaatttatgtagatgtaaggttgacaaatcttccagaagagtgtctcgatcatgtttgaacactttgaggcatacgggaacaaagccacrtatttttcaaggcaagcagaaaaagcatggagraaaaaaaaggaaaaaagatagtcaatatgtgctgcttggcttctgtctgtcatctcatctgactrmamagaagggcacagccagggcaggatgcttgcagtgtcccaggctgtcagtcagtgtgcagcctgaccacctctagcacaccccagctcatagggcagcagcaggcagctcctttgcaagttgggtgattacaaacacaagctgaaatgatcctatgaagtcatgaattaacctacaaaccgctcttgcagttggcagggtgctgggctttctctgggtgatgaaacgtgkctt

SEQ ID NO: 64577 - DNA, 600 bp, Chicken  19866894330634_3
atattcaaattagagcaagtatcatttgcattgcaaactgactctagtcaattatgtacttttaaaaaatctgagaaatttagccaaaatagataagcagtgaaaccagtggtaatttatgtagatgtaaggttgacaaatcttccagaagagtgtctcgatcatgtttgaacactttgaggcatacgggaacaaagccacrtatttttcaaggcaagcagaaaaagcatggagraaaaaaaaggaaaaaagatagtcaatatgtgctgcttggcttctgtctgtcatctcatctgactrmamagaagggcacagccagggcaggatgcttgcagtgtcccaggctgtcagtcagtgtgcagcctgaccacctctagcacaccccagctcatagggcagcagcaggcagctcctttgcaagttgggtgattacaaacacaagctgaaatgatcctatgaagtcatgaattaacctacaaaccgctcttgcagttggcagggtgctgggctttctctgggtgatgaaacgtgkctttgcagtgttgcctgcagcaccttcactgcctgctggggctggagaaagcacctgaatagttgctg

SEQ ID NO: 64578 - DNA, 600 bp, Chicken  19866894330634_4
tattcaaattagagcaagtatcatttgcattgcaaactgactctagtcaattatgtacttttaaaaaatctgagaaatttagccaaaatagataagcagtgaaaccagtggtaatttatgtagatgtaaggttgacaaatcttccagaagagtgtctcgatcatgtttgaacactttgaggcatacgggaacaaagccacrtatttttcaaggcaagcagaaaaagcatggagraaaaaaaaggaaaaaagatagtcaatatgtgctgcttggcttctgtctgtcatctcatctgactrmamagaagggcacagccagggcaggatgcttgcagtgtcccaggctgtcagtcagtgtgcagcctgaccacctctagcacaccccagctcatagggcagcagcaggcagctcctttgcaagttgggtgattacaaacacaagctgaaatgatcctatgaagtcatgaattaacctacaaaccgctcttgcagttggcagggtgctgggctttctctgggtgatgaaacgtgkctttgcagtgttgcctgcagcaccttcactgcctgctggggctggagaaagcacctgaatagttgctga

SEQ ID NO: 64579 - DNA, 600 bp, Chicken  19866894330634_5
ttcaaattagagcaagtatcatttgcattgcaaactgactctagtcaattatgtacttttaaaaaatctgagaaatttagccaaaatagataagcagtgaaaccagtggtaatttatgtagatgtaaggttgacaaatcttccagaagagtgtctcgatcatgtttgaacactttgaggcatacgggaacaaagccacrtatttttcaaggcaagcagaaaaagcatggagraaaaaaaaggaaaaaagatagtcaatatgtgctgcttggcttctgtctgtcatctcatctgactrmamagaagggcacagccagggcaggatgcttgcagtgtcccaggctgtcagtcagtgtgcagcctgaccacctctagcacaccccagctcatagggcagcagcaggcagctcctttgcaagttgggtgattacaaacacaagctgaaatgatcctatgaagtcatgaattaacctacaaaccgctcttgcagttggcagggtgctgggctttctctgggtgatgaaacgtgkctttgcagtgttgcctgcagcaccttcactgcctgctggggctggagaaagcacctgaatagttgctgagt

SEQ ID NO: 64580 - DNA, 454 bp, Chicken  19866894330634_6
agraaaaaaaaggaaaaaagatagtcaatatgtgctgcttggcttctgtctgtcatctcatctgactrmamagaagggcacagccagggcaggatgcttgcagtgtcccaggctgtcagtcagtgtgcagcctgaccacctctagcacaccccagctcatagggcagcagcaggcagctcctttgcaagttgggtgattacaaacacaagctgaaatgatcctatgaagtcatgaattaacctacaaaccgctcttgcagttggcagggtgctgggctttctctgggtgatgaaacgtgkctttgcagtgttgcctgcagcaccttcactgcctgctggggctggagaaagcacctgaatagttgctgagtgttcagaaacacatcacagagcttggaaatgagtgagaattatgtcaaatatcggtgaccacgtgagacagggtccctcaaca

SEQ ID NO: 64581 - DNA, 600 bp, Chicken  19866894330641_1
cacttggtctgattatggggctcgttacggatgcagagcactgagcaagttcactagagtttgaaatcccaagggcagttttgggtttctttctgcggactccggaaagtgatttaataattcatttgaaactgtgcaaaactttgttgatttgttttactccctgctcgagcggatctgctgttttgctcagagattttaacccagtgttgaggaagttgagatctgaagccccagactgaacccagggacttccacgcgcgttgggatgaacgtggcaatctgggttggctgaatttscaaagagaagaggacacatggagactttgttagacttgtttctggtctgcctcagtgccaactccactcctgctctgagcggggcaaaaccagattggagcggatgctttcgtattctgctcaagagtactggctgtaatatcagcacattaatatgtgccatcagtacaggaaaaatgagcagcttaaacttaagtgaagtgttagcagtggagtagacacagtgggaaggtggtaactctgacctcgtcgttaagtctaaatacagcgtaagagcaaagcaggggactgtgtaaacag

SEQ ID NO: 64582 - DNA, 600 bp, Chicken  19866894330653_1
ctactaatgtccaaaaaccagccagtcctcctcacaccatcatatggaacccatgggggtgcagcaggctgccctgccaatgtgcttctcccatcactgcgtcctctgccttttggaacagctccacgagcccagcagatattcccttcattaagaaaaacaccacaaggctacattattttttccctcctgcaaacaacaaagtgtacacgaggagcacagcggtttaatgtgagaaacaattataaaatgtagtccaacagcagcttgagaagaagcaagaattcatttaatccttcrtaggatttttggttttgctgtaaaagggtgcacagacacatgaagatgcgggatcagttttacaaggactgttactgacagcactgcagcttccttggagccactacgagacattcaaatgtgattttcaagaacagcacattctgaggactgagatgggcactggggatgccaggatgaggcttcttcacccttcacagggccccacacaaggacagcagccaacaatcagcccatggccaaccacaccaaaggcctgcttccaaaattcagctgcctaatttgtgactaattaagtac

SEQ ID NO: 64583 - DNA, 599 bp, Chicken  19866894330666_1
  misc_feature (1)..(114): n is any nucleotide
nnnnnnnnnnnnnnnnnnnnnnnnnnnnnnnnnnnnnnnnnnnnnnnnnnnnnnnnnnnnnnnnnnnnnnnnnnnnnnnnnnnnnnnnnnnnnnnnnnnnnnnnnnnnnnnnnnctaacacattccagttcttttgcttctgaacttacaaacggggggtgggggtagacagagtcgagggacaaggcaattttccttagccagtaaattttctagggtcaaggattcccgtctcagtttcccctgctcccctttttacccctcatcagcgctccccacccccgctcacctccctcgtayaattacgcgtgttcgtataaataaatacatctgcatatttggaaccagccttaagaagtctgctgtggattatttatcaatcgcgttaccctgccagcatcagtagaaayattaaagggcctcttaaactacttttagattcacctcttgcttagtcttattactattatttaaatgactcacctttgataccctttcccctcaaccagtggcagaccagtttgtaaagatccaggttgagaccaaaatcaaaactccccaccagctgtgggttactactctgccgctgcagttttgca

SEQ ID NO: 64584 - DNA, 599 bp, Chicken  19866894330666_2
  misc_feature (1)..(4): n is any nucleotide
nnnnctaacacattccagttcttttgcttctgaacttacaaacggggggtgggggtagacagagtcgagggacaaggcaattttccttagccagtaaattttctagggtcaaggattcccgtctcagtttcccctgctcccctttttacccctcatcagcgctccccacccccgctcacctccctcgtayaattacgcgtgttcgtataaataaatacatctgcatatttggaaccagccttaagaagtctgctgtggattatttatcaatcgcgttaccctgccagcatcagtagaaayattaaagggcctcttaaactacttttagattcacctcttgcttagtcttattactattatttaaatgactcacctttgataccctttcccctcaaccagtggcagaccagtttgtaaagatccaggttgagaccaaaatcaaaactccccaccagctgtgggttactactctgccgctgcagttttgcaaaggagagattaaacttgttagatccaaagcagcgctggagttagaattcccagcccatccagacaggctgcatcaaccaggcatttcctcagggggcttctgcagcgct

SEQ ID NO: 64585 - DNA, 600 bp, Chicken  19866894330672_1
tagtactgattttacattcctcaagttacaaatctgcagaacaacaaacttaagagaacacatcctttaaatacagagcaaaacaagtactagcacatttatttgtaatggttatacatgacaaagaaaagagaaaatggtttaacttgtgcactgagcgttcaagtgcagtgatttaaatgaattcatgaaatgattactttaaagcctcggaaattgacagtgtctagcaagattttattttgatgttgggagaagcagtgtttttttactcacttctgccaaaaacacagctcacgratgtgatcatcatttacttctagaaatacagctacaattcaacacaatgatgacttcaaagatgtatcttcaagacacttataaagacatatacttactctggcaatgaaacagtagaaaaaagttcttttcaaaacatcttttccaaggactatttttaaagtttattgccagaattaatgtaccatgaagacctctacaccagcaagaaattaatctgaattgtgattgccttagataccttgtcattttctttgcatacatgaccaatcttcacttatttcctcttctaacttggtt

SEQ ID NO: 64586 - DNA, 600 bp, Chicken  19866894330672_2
aaacatcttttccaaggactatttttaaagtttattgccagaattaatgtaccatgaagacctctacaccagcaagaaattaatctgaattgtgattgccttagataccttgtcattttctttgcatacatgaccaatcttcacttatttcctcttctaacttggttagagttcatcttgtaacttggctccccctaggtcatttctctgtttcaaaaagaaaagaagaaaaaagttgtaaaacatttctgttatctctatggcaaacagacatatgagtattagaccagagagattatygtgttacaaagttgaaatgaaataaagacctttcccatgtcctgggctcagggaaaggctccaagatgaaggatctctagatagagatccttcctccttgggagtcagcccttaaatggggtcttaaatgagcctggctccaccccttccggtcactcaggtgaagttgtgttcacctgtgcccctgcagctgactcagcgcttgcctcaggtggtcaatcagaggttcaggccgttattcaacagttcccatacagttatctttatgagggaagaaagtgagaaatggacgtacagaca

SEQ ID NO: 64587 - DNA, 600 bp, Chicken  19866894330674_1
tctgttccctttataatttgttgttctatttcacattgatttgaagttacagtggactaatttgatcatcctagttcaacagtgccatctttaaacattaaaaccccagtatttgtgttactaggatcttcttatggcagaacagagtcttctctctctgtgtggggtgccaccctcaccaaccagcaggtgcccaccacaacagccatgagctggaggcatcatgctgcctccccattaacctcccaggaagacagtgcccactgctgtgctcaagggcaaaccaaggcaatcctcctygccttgctgttttccgttctgccctttttgctkctttgtattgcagctaagagcagcttgtcgggtttgttcccattttgcccagtctgttggactctgtactctggctcttagacctaccctgcttcttaaaacattattttcctcttrataactaaggaaaaagatcatggaaaggaattggctgaaatctgagctttgtctttccccatcctccctgctggatagatatccctcctggacagagccaagctttgagtaatggggaccatagttcagacaatttgtaaatgccttgcg

SEQ ID NO: 64588 - DNA, 600 bp, Chicken  19866894330674_2
cattgatttgaagttacagtggactaatttgatcatcctagttcaacagtgccatctttaaacattaaaaccccagtatttgtgttactaggatcttcttatggcagaacagagtcttctctctctgtgtggggtgccaccctcaccaaccagcaggtgcccaccacaacagccatgagctggaggcatcatgctgcctccccattaacctcccaggaagacagtgcccactgctgtgctcaagggcaaaccaaggcaatcctcctygccttgctgttttccgttctgccctttttgctkctttgtattgcagctaagagcagcttgtcgggtttgttcccattttgcccagtctgttggactctgtactctggctcttagacctaccctgcttcttaaaacattattttcctcttrataactaaggaaaaagatcatggaaaggaattggctgaaatctgagctttgtctttccccatcctccctgctggatagatatccctcctggacagagccaagctttgagtaatggggaccatagttcagacaatttgtaaatgccttgcggtgacaagtttgacttatatctcaagtttcttt

SEQ ID NO: 64589 - DNA, 600 bp, Chicken  19866894330674_3
tctctctctgtgtggggtgccaccctcaccaaccagcaggtgcccaccacaacagccatgagctggaggcatcatgctgcctccccattaacctcccaggaagacagtgcccactgctgtgctcaagggcaaaccaaggcaatcctcctygccttgctgttttccgttctgccctttttgctkctttgtattgcagctaagagcagcttgtcgggtttgttcccattttgcccagtctgttggactctgtactctggctcttagacctaccctgcttcttaaaacattattttcctcttrataactaaggaaaaagatcatggaaaggaattggctgaaatctgagctttgtctttccccatcctccctgctggatagatatccctcctggacagagccaagctttgagtaatggggaccatagttcagacaatttgtaaatgccttgcggtgacaagtttgacttatatctcaagtttctttggttcttctaccctcctggctgcagtgtgcctgcagaacagccctgcttcccacaccttcttgcagccccagaggaaacccscatggactgggctgtgcagctgcccgcagcgctgg

SEQ ID NO: 64590 - DNA, 600 bp, Chicken  19866894330674_4
cctaccctgcttcttaaaacattattttcctcttrataactaaggaaaaagatcatggaaaggaattggctgaaatctgagctttgtctttccccatcctccctgctggatagatatccctcctggacagagccaagctttgagtaatggggaccatagttcagacaatttgtaaatgccttgcggtgacaagtttgacttatatctcaagtttctttggttcttctaccctcctggctgcagtgtgcctgcagaacagccctgcttcccacaccttcttgcagccccagaggaaacccscatggactgggctgtgcagctgcccgcagcgctggaatatcgtctgatgtttgcctgactcaggtcactgcacaaagacatgccagcctgccaggctcatttgttattttggaaatgacccgccacggttcctgcactgctaattggccatgatccatttcctgttttatgaattcatctcctggtcctgctgcctggtccaaggggtgccaagtacatcagtaagtgtacagcgctttgaactcagaattaatgtgtagtgtattagacagagattttgattagattagggattgagat

SEQ ID NO: 64591 - DNA, 600 bp, Chicken  19866894330674_5
ctggtcctgctgcctggtccaaggggtgccaagtacatcagtaagtgtacagcgctttgaactcagaattaatgtgtagtgtattagacagagattttgattagattagggattgagatctgtttgtgataatctctgcaatccttctcaccaaatgatcttactgcctacagaaactgcatctctggagtgaaaggaaggaagaaaataagactgaaggcaatagagttacactgaagatggctttggcccaagggtttatgcaaaacagatttgtgatgttgcaaatttgtatttttyctttctgtttcaaaatgggaaagagcagaaacagttgatactgtcaygaaatttcaagactgaaacacaaagtattggaaacttgagtgtccttaatagtgctaatccaagcctgctggacctgtggaccatttttgcaatcaaatgcttaagaaatgcagtgcagtggactgaatactataattctaacagaggaaatttgacactaaaatcagtgagaattttgtctatgtgaggcttacaagattggttagtacttgaagaacaacttttcttcttccataaagatcctcgctgatg

SEQ ID NO: 64592 - DNA, 600 bp, Chicken  19866894330674_6
tacagcgctttgaactcagaattaatgtgtagtgtattagacagagattttgattagattagggattgagatctgtttgtgataatctctgcaatccttctcaccaaatgatcttactgcctacagaaactgcatctctggagtgaaaggaaggaagaaaataagactgaaggcaatagagttacactgaagatggctttggcccaagggtttatgcaaaacagatttgtgatgttgcaaatttgtatttttyctttctgtttcaaaatgggaaagagcagaaacagttgatactgtcaygaaatttcaagactgaaacacaaagtattggaaacttgagtgtccttaatagtgctaatccaagcctgctggacctgtggaccatttttgcaatcaaatgcttaagaaatgcagtgcagtggactgaatactataattctaacagaggaaatttgacactaaaatcagtgagaattttgtctatgtgaggcttacaagattggttagtacttgaagaacaacttttcttcttccataaagatcctcgctgatggagtcctatacttcaccagcttctcttctttacctctgtcagattac

SEQ ID NO: 64593 - DNA, 600 bp, Chicken  19866894330679_1
acttttctccaggacagaactccttgagtaccctttgcaagttggttcttcataatggcatgtgattccaagctcggttttcttgctgcacgaacatacaacatgcctccaaattcactgtgaaaaataaccctttccatgcttctagtcattaatataaataaatcctttgtctcctgcttagcttcagtatctggttttctctgagacagaaaaggacaatgaatgggacatgtctggttcctagtgcaagatggaatcagcagacaggttggtgacacactctgaacaagcaactgkgaaatgcttccaagttcaatgacttggacatagggagatttgaaatgttttagtagctggaacttctaaaaggagggaatgcactagaaatctaactgcattgtattagggaagtgtaataacaattactagttcagtaacgctttcttttcagaaaagaaagtacatattatttagaacagctttactaaaacaaataaaaatcataaaattaatgttttcatattctgtgacaaagttttgtgtttgagaacagtgaaggataaaatggcgtaagagcggaggagttcagttctaaac

SEQ ID NO: 64594 - DNA, 600 bp, Chicken  19866894330682_1
gagtatgagcactgtgttgccatgaggctattaattcagttctatttaatacccaaaattctatgaccagctttttgtcatctttccttaacatctactgggcctggaggttaattatttgctgaattaagtagtggtgttttttttgtttggttggtttttttgtgggtaactgaactggagggattttgagatacaaatccctgtaagatagaacttggggcagaatcataaatgttcaggtttttgagcatctgctgtactgacaaggaatgaaaaaatatctgaaaacaaaaaacktgtcccttctagctcactgctgagcgttgaattgttattatttgtggaagaactcattttcagcgtaaatgttgttggcaccacttttgccttgatgaccaatatgctgtgctgtgcattcttccctctgcctgtcttggttatccagtaagaaacatgtcataaaaactgactgcttctgttgttaagcctagattataagctgcttgggacaggctctgtatttattctcttttcttgctcagtaaggtcctggctcactgaagttctttgatgacatggcaagacacacaatagtaa

SEQ ID NO: 64595 - DNA, 600 bp, Chicken  19866894330684_1
tgttcttgctgtggaatccttgtcatcacgtgttgtacagctgcaatgttatgtctgtccctataccatggctatgaaaagtcaaatgttccataaacctggcaggccaataaagcatggcagaatcgatggcaaaatgcaccccgttgtttctcctttattcccaggtatgtaccctgcaggctgcttcctctttcagtaggcggtgcagtagcagattgcctgggagtccctttgctccataggtggcttgaaggttgcaattctgctgaacatccagtgagctgtaacttgatttcsttgtttccatgggtctagagtgccttttgagggaaaccggtggtctcagcacaaaccctgaaagcttcttctttcatctctgctagagaaccattggttggctggtccataygtagcctgatactgatgttgaccaaacggtcactrtggacttgagattcctttgctttggaaggtttgtggtctgcagttgtgagcctcctacaacatctcagcgctgggcagcaccgtgtacatccagcaaggtcacttgcttgttgtctgtatgatgcttgaggtgtgtgggttttccagctggtt

SEQ ID NO: 64596 - DNA, 600 bp, Chicken  19866894330684_2
aagcatggcagaatcgatggcaaaatgcaccccgttgtttctcctttattcccaggtatgtaccctgcaggctgcttcctctttcagtaggcggtgcagtagcagattgcctgggagtccctttgctccataggtggcttgaaggttgcaattctgctgaacatccagtgagctgtaacttgatttcsttgtttccatgggtctagagtgccttttgagggaaaccggtggtctcagcacaaaccctgaaagcttcttctttcatctctgctagagaaccattggttggctggtccataygtagcctgatactgatgttgaccaaacggtcactrtggacttgagattcctttgctttggaaggtttgtggtctgcagttgtgagcctcctacaacatctcagcgctgggcagcaccgtgtacatccagcaaggtcacttgcttgttgtctgtatgatgcttgaggtgtgtgggttttccagctggttttaaactgattccttttcccatgttctagaaatgaaattgctgaacaaggactctgtgggctagatttcttccatggctgaagtgttacataaattaccagtttaatttgta

SEQ ID NO: 64597 - DNA, 600 bp, Chicken  19866894330684_3
tgtttctcctttattcccaggtatgtaccctgcaggctgcttcctctttcagtaggcggtgcagtagcagattgcctgggagtccctttgctccataggtggcttgaaggttgcaattctgctgaacatccagtgagctgtaacttgatttcsttgtttccatgggtctagagtgccttttgagggaaaccggtggtctcagcacaaaccctgaaagcttcttctttcatctctgctagagaaccattggttggctggtccataygtagcctgatactgatgttgaccaaacggtcactrtggacttgagattcctttgctttggaaggtttgtggtctgcagttgtgagcctcctacaacatctcagcgctgggcagcaccgtgtacatccagcaaggtcacttgcttgttgtctgtatgatgcttgaggtgtgtgggttttccagctggttttaaactgattccttttcccatgttctagaaatgaaattgctgaacaaggactctgtgggctagatttcttccatggctgaagtgttacataaattaccagtttaatttgtaatgttctttttcctttaagcacccagttgagtgag

SEQ ID NO: 64598 - DNA, 600 bp, Chicken  19866894330685_1
actgctaaccagcagtgccaactgctaaccagcagccccaactgctctccagcagctccaactgctaactagcagcacaaactgctatccagcagttccaactgttctccagcagtcccaactgctatccagcagctctgactgctatccagcattaccaactgctatccagcagctccaactgctatccagcagccctaactggtaaccagctgtcccagatgctatccagcagctccacctgctaaccagcacctccaactgctatccagccttgccagctgctaatcagcagctccractcctgaccagcagtgctgactgccaaccaactgcctgctgcccatcatggcatctgcgtgaatggccctggcccattggtggtggccctggccgttggtggcactgctctggctcggccctagccctgcccccactgctgcccttcttgtcagtggctccaccccactcagttgtgtggtgttagcacctcttcagctcaatccaggactctccctgcccctcagcctgtcttgggctttagcacagcttgcctcagcagtgctcctcaggcatgggctgaaggcagattgggctggc

SEQ ID NO: 64599 - DNA, 599 bp, Chicken  19866894330696_1
  misc_feature (1)..(117): n is any nucleotide
nnnnnnnnnnnnnnnnnnnnnnnnnnnnnnnnnnnnnnnnnnnnnnnnnnnnnnnnnnnnnnnnnnnnnnnnnnnnnnnnnnnnnnnnnnnnnnnnnnnnnnnnnnnnnnnnnnnnncagattgctgcaggctgtccttcagtggaagctgtttgagtgatgtggggatgcttcaatgatgctgggcagaaatacaggattaaggcaggaaaaaaaagcaggatgaggccttttcttatttcggtgctttctgaaatggagctgtacctcatacagctgctggtgtcctcctgttaaaarcctgtcttttatgcttattatgggatgagaggtttctctgaaggaatagttcctgctgctctttcaggcttaccctgcaacratgtgaattgcattttgcaggtgccacagacaaggccggctcccgagacacccaggttggttggcctccttcccagttaccagctttgttgactaacgttatctgctgtgtttactaacacataagtcccacccttcctgtgtgtgctgatctgtagctaccccaaaaggaccggctgagctgactcttctcattgctcagaagcaggctgtgttaa

SEQ ID NO: 64600 - DNA, 599 bp, Chicken  19866894330696_2
  misc_feature (1)..(35): n is any nucleotide
nnnnnnnnnnnnnnnnnnnnnnnnnnnnnnnnnnncagattgctgcaggctgtccttcagtggaagctgtttgagtgatgtggggatgcttcaatgatgctgggcagaaatacaggattaaggcaggaaaaaaaagcaggatgaggccttttcttatttcggtgctttctgaaatggagctgtacctcatacagctgctggtgtcctcctgttaaaarcctgtcttttatgcttattatgggatgagaggtttctctgaaggaatagttcctgctgctctttcaggcttaccctgcaacratgtgaattgcattttgcaggtgccacagacaaggccggctcccgagacacccaggttggttggcctccttcccagttaccagctttgttgactaacgttatctgctgtgtttactaacacataagtcccacccttcctgtgtgtgctgatctgtagctaccccaaaaggaccggctgagctgactcttctcattgctcagaagcaggctgtgttaatctgccttgggtttctcagtccctgcgcagtgctgatgctgttctyggccgctctgctcttctgtgtttgtggaaggcagtc

SEQ ID NO: 64601 - DNA, 600 bp, Chicken  19866894330696_3
atagttcctgctgctctttcaggcttaccctgcaacratgtgaattgcattttgcaggtgccacagacaaggccggctcccgagacacccaggttggttggcctccttcccagttaccagctttgttgactaacgttatctgctgtgtttactaacacataagtcccacccttcctgtgtgtgctgatctgtagctaccccaaaaggaccggctgagctgactcttctcattgctcagaagcaggctgtgttaatctgccttgggtttctcagtccctgcgcagtgctgatgctgttctyggccgctctgctcttctgtgtttgtggaaggcagtcatgatctcagggctgtggagctatgcccagttcctgtaaaatggcacggtgttcctgaccaactttaaatccctgtaatctcgtttgcagccagctgtggtccaccttcaaggccaaggctcagccatccaagtgaagaatggtaaggatctcatttggcacttaactgggcccatcctgcagccccgggcgtatatgtggagctaagacctccctgggatgtgggtcagtgctggctgaccatgacagacccattcccattgc

SEQ ID NO: 64602 - DNA, 600 bp, Chicken  19866894330700_1
ccaaccatttcggacatgcgtcgtgtgtggtaaagtggtcttgtccagtgttatgtggcttgcttagtgcgtggtcacctccagccagccttcgtctgtgaaatctggattcattgcattgagtttgtgtctgcagggagctcggaatgagctgctctctttgtctgttgacctttttatttgtttttataagtaatacatgtgggaaacggcaataatttccagatctcgtgaatgtgaaagaaagtctgcaacggtttttatggagtgtaaaacataataataattataataataatyaaaaaaacctgtgaggaaaagcaaactgtttgtcatccctgagtgagccggagctgcaggagtgctggtgctgagggaggccagctgagcacccccacarcagcagcgtggggtgggagaaggagggcagcactgctgggaagggccccaaggtgcaagtctatggggggagaaggtgagggagaggatttttttgaacagaatgacatgagtcacggtggcgtcacttcccagcggctgggcaggcgcttctcttttgattcatgcatcttttatataagatttgccgtctcgatgaag

SEQ ID NO: 64603 - DNA, 600 bp, Chicken  19866894330700_2
aaatctggattcattgcattgagtttgtgtctgcagggagctcggaatgagctgctctctttgtctgttgacctttttatttgtttttataagtaatacatgtgggaaacggcaataatttccagatctcgtgaatgtgaaagaaagtctgcaacggtttttatggagtgtaaaacataataataattataataataataaaaaaaacctgtgaggaaaagcaaactgtttgtcatccctgagtgagccggagctgcaggagtgctggtgctgagggaggccagctgagcacccccacarcagcagcgtggggtgggagaaggagggcagcactgctgggaagggccccaaggtgcaagtctatggggggagaaggtgagggagaggatttttttgaacagaatgacatgagtcacggtggcgtcacttcccagcggctgggcaggcgcttctcttttgattcatgcatcttttatataagatttgccgtctcgatgaagatgaaagcctgcagtcagcacggcccccgcttcctgccccagcacaggcagtggggatgctgtgccccaggctgggtgacgaggccgtgcaggtccacca

SEQ ID NO: 64604 - DNA, 599 bp, Chicken  19866894330705_1
  misc_feature (1)..(65): n is any nucleotide
nnnnnnnnnnnnnnnnnnnnnnnnnnnnnnnnnnnnnnnnnnnnnnnnnnnnnnnnnnnnnnnnnattaggctttgtggaagactttcagatgaagcaaaaggacgtaattgttgatgcacacccctttctttatttttaggcacttccattgcatgcttcatggataagcaggaatgtgtactgcagcctgatcttgtatgctgtgctaaggacataactacacagagagatgcaaaaccaaactaaagctcgggtattggaggcagtatgccaccttactgaattctctgcttgggtkagaagtatcttgcactgttctgtgctgtgccwtgcagacatacccagagttaatcagaaaggtacaatacaaaaataatattacagtccttgaaagcattcagaggcaccaaagctagcacaaggctagrggcatgtcccatgaggagaagctgagggaactgtggttgtgcagtctggagaagtggaggctgaaaggcaatttgactgctccctgcagctccctgaggaggggaactggagggaggtgcccggctctgctccttggaactgatggaaggaggggaatggtgcagaaca

SEQ ID NO: 64605 - DNA, 599 bp, Chicken  19866894330705_2
  misc_feature (1)..(33): n is any nucleotide
nnnnnnnnnnnnnnnnnnnnnnnnnnnnnnnnnattaggctttgtggaagactttcagatgaagcaaaaggacgtaattgttgatgcacacccctttctttatttttaggcacttccattgcatgcttcatggataagcaggaatgtgtactgcagcctgatcttgtatgctgtgctaaggacataactacacagagagatgcaaaaccaaactaaagctcgggtattggaggcagtatgccaccttactgaattctctgcttgggtkagaagtatcttgcactgttctgtgctgtgccwtgcagacatacccagagttaatcagaaaggtacaatacaaaaataatattacagtccttgaaagcattcagaggcaccaaagctagcacaaggctagrggcatgtcccatgaggagaagctgagggaactgtggttgtgcagtctggagaagtggaggctgaaaggcaatttgactgctccctgcagctccctgaggaggggaactggagggaggtgcccggctctgctccttggaactgatggaaggaggggaatggtgcagaacatggccagcaggagtagggaggttatggatycc

SEQ ID NO: 64606 - DNA, 600 bp, Chicken  19866894330705_3
tttatttttaggcacttccattgcatgcttcatggataagcaggaatgtgtactgcagcctgatcttgtatgctgtgctaaggacataactacacagagagatgcaaaaccaaactaaagctcgggtattggaggcagtatgccaccttactgaattctctgcttgggtkagaagtatcttgcactgttctgtgctgtgccwtgcagacatacccagagttaatcagaaaggtacaatacaaaaataatattacagtccttgaaagcattcagaggcaccaaagctagcacaaggctagrggcatgtcccatgaggagaagctgagggaactgtggttgtgcagtctggagaagtggaggctgaaaggcaatttgactgctccctgcagctccctgaggaggggaactggagggaggtgcccggctctgctccttggaactgatggaaggaggggaatggtgcagaacatggccagcaggagtagggaggttatggatyccttccagttgtcctcccctcccctcttccagctgtttctcctaatatcttctacagctgctgcctgggatagctaattccgtgtctacactatcaagcag

SEQ ID NO: 64607 - DNA, 600 bp, Chicken  19866894330705_4
ccwtgcagacatacccagagttaatcagaaaggtacaatacaaaaataatattacagtccttgaaagcattcagaggcaccaaagctagcacaaggctagrggcatgtcccatgaggagaagctgagggaactgtggttgtgcagtctggagaagtggaggctgaaaggcaatttgactgctccctgcagctccctgaggaggggaactggagggaggtgcccggctctgctccttggaactgatggaaggaggggaatggtgcagaacatggccagcaggagtagggaggttatggatyccttccagttgtcctcccctcccctcttccagctgtttctcctaatatcttctacagctgctgcctgggatagctaattccgtgtctacactatcaagcagttttcagggaaaattgttattacctccttctaagaacatacagaggctgctcttgagctcattaggccagagttgcacaggaggagttgtgccaggtcatttgctttagctagtctcttctcttactgtcctgttcagtagatgaacttctgctgagaaagagcttcttagcctgcttaaaattctcagtgactttttc

SEQ ID NO: 64608 - DNA, 599 bp, Chicken  19866894330710_1
  misc_feature (1)..(93): n is any nucleotide
nnnnnnnnnnnnnnnnnnnnnnnnnnnnnnnnnnnnnnnnnnnnnnnnnnnnnnnnnnnnnnnnnnnnnnnnnnnnnnnnnnnnnnnnnnnnntcagagctgtgagaagaagttaaacctatggtgcaatgaaagtgtgttttaaagacaaaggtcccaattcactcacttcatagaatcatagaatcacagaatggcttgggttggaagggacctcaaggattcttaagctccaaccccccctgctgcatgcagggccaccaacctcccacatttaatactaaaccaggctgcccagcrccccatccaacctggccttgaacacctcgagggatggggcatccacagcctctctctcaatggaaaagaacctgcaaatgttggacccctggtgaaggatggaggtaattctccccttccaaaagacaatrcgaactatccgaacyccaaatccttcgtttgggtggcatttgcctctccttgctaactagaataaaagatgaaatccaaatctcccccgtgttcacatcactgcagcacaggagaaataaggagagmagaaccaggaccgtctcatggtggtgctggatgggatgtag

SEQ ID NO: 64609 - DNA, 600 bp, Chicken  19866894330710_2
aaagtgtgttttaaagacaaaggtcccaattcactcacttcatagaatcatagaatcacagaatggcttgggttggaagggacctcaaggattcttaagctccaaccccccctgctgcatgcagggccaccaacctcccacatttaatactaaaccaggctgcccagcrccccatccaacctggccttgaacacctcgagggatggggcatccacagcctctctctcaatggaaaagaacctgcaaatgttggacccctggtgaaggatggaggtaattctccccttccaaaagacaatrcgaactatccgaacyccaaatccttcgtttgggtggcatttgcctctccttgctaactagaataaaagatgaaatccaaatctcccccgtgttcacatcactgcagcacaggagaaataaggagagmagaaccaggaccgtctcatggtggtgctggatgggatgtagcagctctgtttcacgtccgccagaatgcgctgtgcaaaataaagcatcccattaagcctacatttaatggctgcatttctgtacaacccacgcactgaaatacatcatgcaggaatgaggctgctgcctcgt

SEQ ID NO: 64610 - DNA, 600 bp, Chicken  19866894330710_3
gacaaaggtcccaattcactcacttcatagaatcatagaatcacagaatggcttgggttggaagggacctcaaggattcttaagctccaaccccccctgctgcatgcagggccaccaacctcccacatttaatactaaaccaggctgcccagcrccccatccaacctggccttgaacacctcgagggatggggcatccacagcctctctctcaatggaaaagaacctgcaaatgttggacccctggtgaaggatggaggtaattctccccttccaaaagacaatrcgaactatccgaacyccaaatccttcgtttgggtggcatttgcctctccttgctaactagaataaaagatgaaatccaaatctcccccgtgttcacatcactgcagcacaggagaaataaggagagmagaaccaggaccgtctcatggtggtgctggatgggatgtagcagctctgtttcacgtccgccagaatgcgctgtgcaaaataaagcatcccattaagcctacatttaatggctgcatttctgtacaacccacgcactgaaatacatcatgcaggaatgaggctgctgcctcgttcagggtctgctgaa

SEQ ID NO: 64611 - DNA, 594 bp, Chicken  19866894330710_4
caccaacctcccacatttaatactaaaccaggctgcccagcrccccatccaacctggccttgaacacctcgagggatggggcatccacagcctctctctcaatggaaaagaacctgcaaatgttggacccctggtgaaggatggaggtaattctccccttccaaaagacaatrcgaactatccgaacyccaaatccttcgtttgggtggcatttgcctctccttgctaactagaataaaagatgaaatccaaatctcccccgtgttcacatcactgcagcacaggagaaataaggagagmagaaccaggaccgtctcatggtggtgctggatgggatgtagcagctctgtttcacgtccgccagaatgcgctgtgcaaaataaagcatcccattaagcctacatttaatggctgcatttctgtacaacccacgcactgaaatacatcatgcaggaatgaggctgctgcctcgttcagggtctgctgaacctcggggctgaacgtgacagcctgaaacggagccagcaggcccaaggacatgatgcaaaaaggcacttctctgattgaatggagtgggaaacaaggaaagtgggt

SEQ ID NO: 64612 - DNA, 352 bp, Chicken  19866894330711_1
ttcagcaacttgccactgacaacagaaatgtcaccgaatgccattgtccttggagttcatagggctgcaaggatattacatcacctagcaacagaaacatctatttaggataaaaggatcaaatgaattctttcaatgtgttgtagatcccccaggatatatacaaataaactgccatagaaatccacatggtttgcaaggcaatctgcttgtttgtccttgatggtatcagtgcttttcaattggaagactgaccttttgctagcaaaattgataatagtctccttgttatttcatttktgtgtttatttattttcagcctgaaatctgagcttagagatttactttctgt

SEQ ID NO: 64613 - DNA, 600 bp, Chicken  19866894330716_1
tgagatataggagacgtcactgtgctctttagggtgttggatactccctggtcattttgacaagttctgtgtactccttttgagccctgctggtcacaggtcctcctgcttttgcctctggctatagctactctctaccagtagatgatcctgggcagccctggctccaaagatgaaggagaggatgtacttccccggaatttggagagtggtatgtttagaaaattttcacttgctcagtgaaggcacatttctggaaatgccaccctccttctctttcattcagatatgggtttccasacctccatcttgtcattcaagtaatgggagaacctcatcaccagtaggacagaagaggtttctgaagcacacaaatacctgctaagctgatgaacaatttttatccttcccacagctcacgcttttcctccatcttgtgaaaacaaggtggatcctcctagtcaattttgacaaagtagtaagaagaatgacagataatgtggacaaaatgaagagcctggagcaccacttctgctgaatttcctgaaggcaaaccagtgactagttagtagttagtttttcctgtggattctttgaaag

SEQ ID NO: 64614 - DNA, 600 bp, Chicken  19866894330717_1
agttttgtgttttgtttttatgatgatacctgacataggctgtgtttaaagatcatcctctgctcactacacctttccagaggaaacaggttttttattgatgttcatttgaaatgtttgcttgtatgtcctttccagtaagcccatcactgatgtacacacctctgtttcaatacacctggcccaatgcattgtctttttcctgctacaattctcatttttagtcatctctaaatatctctgtgtttttgcattgatttagttttacttcaatcagtttaaaaagtcaagatatcataygtgtcagtatccatgagaacctatacaattttgtttcctatgatgtacagtaatcaaaatcttttgaaattttatgttatacttaattacataactgctctttaggtacgtgctagagctgataatckgatagatctaaagctggaataaaccagagatttatgggaatagatttgctagagttctgctatagaaaaggctgaaaagttgccatttccctgttgctatatttcagtatagagttgggcactagaggcagaaaaacaaggaaggggtaaaagaatattccatgccaaaagc

SEQ ID NO: 64615 - DNA, 491 bp, Chicken  19866894330717_2
tcctttccagtaagcccatcactgatgtacacacctctgtttcaatacacctggcccaatgcattgtctttttcctgctacaattctcatttttagtcatctctaaatatctctgtgtttttgcattgatttagttttacttcaatcagtttaaaaagtcaagatatcataygtgtcagtatccatgagaacctatacaattttgtttcctatgatgtacagtaatcaaaatcttttgaaattttatgttatacttaattacataactgctctttaggtacgtgctagagctgataatckgatagatctaaagctggaataaaccagagatttatgggaatagatttgctagagttctgctatagaaaaggctgaaaagttgccatttccctgttgctatatttcagtatagagttgggcactagaggcagaaaaacaaggaaggggtaaaagaatattccatgccaaaagcatgcaatcttttcaacaga

SEQ ID NO: 64616 - DNA, 600 bp, Chicken  19866894330722_1
cctgggtagtcactctgaatacgtgattggcaatcagagcacttcctaccctacaagtacacatatacacagttaccaagacacttctcccttaaataagttctattaatttaagacatatattaaacatgtgacgtttgtgataaaagacagcactatagaagtcagcaccatttatttctgtggtcacaaggtacaactcaaaatgctgcctgagattactaataaatcacaaaactgcccagagatgtgtaggacatctgtcatttgtgctaaactctgtatgtcttcctctattcrcagttataactcccttagagctaatgctgaattttactaattactgktaggttataatgatttaataaataagcagcaattcctagagctgctgcttcgccgcatgatcccaggcttatgattgtgcagcattcatsccaccaaamatggtgaattacacactacctgtttttttctcccaataggtcctttaattagaactcggtatatcaacaattacctgacaatactgttcatccactatatrccataattttcaaagcagtgcatatgtttaacgttaagcaactaatttctagt

SEQ ID NO: 64617 - DNA, 600 bp, Chicken  19866894330722_2
accctacaagtacacatatacacagttaccaagacacttctcccttaaataagttctattaatttaagacatatattaaacatgtgacgtttgtgataaaagacagcactatagaagtcagcaccatttatttctgtggtcacaaggtacaactcaaaatgctgcctgagattactaataaatcacaaaactgcccagagatgtgtaggacatctgtcatttgtgctaaactctgtatgtcttcctctattcrcagttataactcccttagagctaatgctgaattttactaattactgktaggttataatgatttaataaataagcagcaattcctagagctgctgcttcgccgcatgatcccaggcttatgattgtgcagcattcatsccaccaaamatggtgaattacacactacctgtttttttctcccaataggtcctttaattagaactcggtatatcaacaattacctgacaatactgttcatccactatatrccataattttcaaagcagtgcatatgtttaacgttaagcaactaatttctagtacaactttatgggacaaaaatttaatctcctttttaaagacaggaga

SEQ ID NO: 64618 - DNA, 600 bp, Chicken  19866894330722_3
ttgtgataaaagacagcactatagaagtcagcaccatttatttctgtggtcacaaggtacaactcaaaatgctgcctgagattactaataaatcacaaaactgcccagagatgtgtaggacatctgtcatttgtgctaaactctgtatgtcttcctctattcrcagttataactcccttagagctaatgctgaattttactaattactgktaggttataatgatttaataaataagcagcaattcctagagctgctgcttcgccgcatgatcccaggcttatgattgtgcagcattcatsccaccaaamatggtgaattacacactacctgtttttttctcccaataggtcctttaattagaactcggtatatcaacaattacctgacaatactgttcatccactatatrccataattttcaaagcagtgcatatgtttaacgttaagcaactaatttctagtacaactttatgggacaaaaatttaatctcctttttaaagacaggagaaggtgtagcgggatggtgaatgatgctcccagcaccgttgttagaaataaggttacagctcagtcagccatgaatgtaagtacgtacctg

SEQ ID NO: 64619 - DNA, 600 bp, Chicken  19866894330722_4
aagacagcactatagaagtcagcaccatttatttctgtggtcacaaggtacaactcaaaatgctgcctgagattactaataaatcacaaaactgcccagagatgtgtaggacatctgtcatttgtgctaaactctgtatgtcttcctctattcrcagttataactcccttagagctaatgctgaattttactaattactgktaggttataatgatttaataaataagcagcaattcctagagctgctgcttcgccgcatgatcccaggcttatgattgtgcagcattcatsccaccaaamatggtgaattacacactacctgtttttttctcccaataggtcctttaattagaactcggtatatcaacaattacctgacaatactgttcatccactatatrccataattttcaaagcagtgcatatgtttaacgttaagcaactaatttctagtacaactttatgggacaaaaatttaatctcctttttaaagacaggagaaggtgtagcgggatggtgaatgatgctcccagcaccgttgttagaaataaggttacagctcagtcagccatgaatgtaagtacgtacctgctttcatct

SEQ ID NO: 64620 - DNA, 600 bp, Chicken  19866894330722_5
atgtgtaggacatctgtcatttgtgctaaactctgtatgtcttcctctattcrcagttataactcccttagagctaatgctgaattttactaattactgktaggttataatgatttaataaataagcagcaattcctagagctgctgcttcgccgcatgatcccaggcttatgattgtgcagcattcatsccaccaaamatggtgaattacacactacctgtttttttctcccaataggtcctttaattagaactcggtatatcaacaattacctgacaatactgttcatccactatatrccataattttcaaagcagtgcatatgtttaacgttaagcaactaatttctagtacaactttatgggacaaaaatttaatctcctttttaaagacaggagaaggtgtagcgggatggtgaatgatgctcccagcaccgttgttagaaataaggttacagctcagtcagccatgaatgtaagtacgtacctgctttcatcttccaccaatacaacccaaaaccttcaaggtaggatttaacacgtggctatatgctaaaagcggcgtggtttgaaagagaaataaaacagaaaatgagtaga

SEQ ID NO: 64621 - DNA, 600 bp, Chicken  19866894330726_1
aaaccagatgtgccaatgatgtgcatttccattctccttttctttctctctttgtctcattctaaccctgcccaaatcaacaaaaataatcttttctgagaatggtaatccttttgacttctttggggttattcacaccatttgtgaggacctttcactaaggctgttaattttatgcttcagtcaccgtgcttaattgaatttggatgcctttataataatttaagcataaatatgagctttttcaaaatcacttctgtcactatcagttttattctgaattcaaaaatccattttccwgtgtcctcgcagatgtcttactgtattatctggtctgatttgcaacaaacatctttccatctccttcccaccactctgcagtctaagaaaggttttgctgttccatagtcactagtactcccattcacacccaggtctcactaccaaatctgactagggcttctcttttttccacgtagttgggtatgttctaagtattgctgccatttcagctagatttgttttagaatctccccatgctattggtatgaccgtggaccatgacccagttattttagaccttggtaactgtgggtgttt

SEQ ID NO: 64622 - DNA, 600 bp, Chicken  19866894330729_1
tgttctaatagtgtaagaacacataagaaaacaacctaattggaaagcgtcattgaacttagactgactggcaggatagcccatctttgctttttgtgttcagatggtggcataaaggcataagttcctgtgtggggctcaaggttgtccaagaagcacaggcactcgtagggcatggccttcctgatggccctgtgctgcatttgcagctgcatgggctactgccatgcacaggggaagtccacccctccctgtccttctccatgtgccttttttgtgacagcaaacactctctggtargactaaccatatgtctggaattgctcactgtacgctggatatttggtggttaattcagcagatatcaaagcatagacatgatgctgttgtctttcaggagctgtcggccatggagacccagggacatctcaggggagatgagacgagaggatgaaaatgacatactctgctgctgatctgggctgggctcctgggatacagggaacacctacaagtgggcagygctgcagagagacagctgtgcccaggagcagctcttctgcacagaacagcagggctgggggaatgttctgcagatga

SEQ ID NO: 64623 - DNA, 467 bp, Chicken  19866894330729_2
gccatgcacaggggaagtccacccctccctgtccttctccatgtgccttttttgtgacagcaaacactctctggtargactaaccatatgtctggaattgctcactgtacgctggatatttggtggttaattcagcagatatcaaagcatagacatgatgctgttgtctttcaggagctgtcggccatggagacccagggacatctcaggggagatgagacgagaggatgaaaatgacatactctgctgctgatctgggctgggctcctgggatacagggaacacctacaagtgggcagygctgcagagagacagctgtgcccaggagcagctcttctgcacagaacagcagggctgggggaatgttctgcagatgacatgaagatagaagagaaaggacagagagattacaggatgtatggggtgtcaacagcctatagctcactgcaggaggactgctcacagct

SEQ ID NO: 64624 - DNA, 600 bp, Chicken  19866894330731_1
ttgcagcatcctctcgtctctaacatgttcagcaggttcacaaattctagctggtggagctctgctgagaggtacaacagaacaagaaacaaatatagaagttcctgttgccagaactaatcctgcctagtccctggttaaggtttctccttctgatgttgtgcgtaaccaaccatgtgttattggagctctgagcaggaaaggtacacctacagatttcagagtgggggtggaaaccagagcttcaacaagagtaggaggagtgcaggttgctgactgatgctccatgttaaggtctcyaattttgctactaaagtagaagaatagaagaggtgaacagagttgaaagaagtccaatatttaatgatcaatttgcagtcaaaataatttaaaaataaagaaaaggaaggraaaaaaaaaaaaggatgcagaattataggctgacttcagcatcaaggtcttttcttcttggccagcaatggtcttgatgctgagatagatcagatgagctataaacaactgattgtaatgttggggactgcctgattaccattctactcttcttatgttttggcacttgatcactgacacgtagttcca

SEQ ID NO: 64625 - DNA, 600 bp, Chicken  19866894330731_2
cagaactaatcctgcctagtccctggttaaggtttctccttctgatgttgtgcgtaaccaaccatgtgttattggagctctgagcaggaaaggtacacctacagatttcagagtgggggtggaaaccagagcttcaacaagagtaggaggagtgcaggttgctgactgatgctccatgttaaggtctcyaattttgctactaaagtagaagaatagaagaggtgaacagagttgaaagaagtccaatatttaatgatcaatttgcagtcaaaataatttaaaaataaagaaaaggaaggraaaaaaaaaaaaggatgcagaattataggctgacttcagcatcaaggtcttttcttcttggccagcaatggtcttgatgctgagatagatcagatgagctataaacaactgattgtaatgttggggactgcctgattaccattctactcttcttatgttttggcacttgatcactgacacgtagttccatatcctgttttttgtgtttattgtgatctgaaagaatgcagtggatggatgctgcacagctaaagcagtaggaacagtgttcattctgtaaatgtcccctaattcttactg

SEQ ID NO: 64626 - DNA, 600 bp, Chicken  19866894330731_3
ttttagtgtagagcatttcaaaataaataaataaataaataaataaatacttgcaggcatatgagattaagtgaagtttgaaacactcttttctgttgctattaaagttaatggaactctttttgtttttctctgcttctactaagagcgacagtactgcagtgaatagattatgaattattgtcatcctaaatgggacttcaacatcagtccctttagtaaaggccgttgacattagctcagagatacttctgttcctcatgtgtcactcatgattttcacactcagaattaagcatgsaaaagtgagaactaatcaatgatctctttaagaatattatcttgataaagctcagtaactgtaagtcatcctgtcaattcacaacaggatgcaatttaggcaactttaagactttgaagaaactttagtgaaaagaaagatctacttcagtcaaaactctctgataaatgttctgcttttgttctatttgaaatttttgttacagtaagttattggtgattcagcatgttttatatcacagtcacagaatggctcaggtgggaaaggatctctggggtctatctgttccaacccctgctc

SEQ ID NO: 64627 - DNA, 600 bp, Chicken  19866894330741_1
actgcaaaacagtcagacactatgctaggaatggacagccctactgttagtgaggtaaaattcactgtgtccttgggaacattcaaaatctgactgcagaaggccctgagcaacatggtccaaccctgctttcatctgggggtggtgggaggctcttggttgcacacctccagaggccccttcccacattctgagaatccaaggatataaataatgagataatctacacgccaaacccttctcatttaattccaaagtcacgtcagtcgccagcaatgccccttgaacaaaggcagcatmtttccygatgctccagaagtgccatcattactctggaggactccctcatggctcaccaattggcattcttaccagccagatgcacacacgcttccacgctcctttccacacaccagaacatcacagcacacccttcaacagctaccccggaggatgtgctcaataaccaactcttattcctttgaccacctacacatctcaagtagcttaaaacatccgagctggtatttgctgttctgcttttcatttcaaaacacgtaagaggaatagaatagggccctgttaaaaaggacaaaagca

SEQ ID NO: 64628 - DNA, 600 bp, Chicken  19866894330741_2
aaacagtcagacactatgctaggaatggacagccctactgttagtgaggtaaaattcactgtgtccttgggaacattcaaaatctgactgcagaaggccctgagcaacatggtccaaccctgctttcatctgggggtggtgggaggctcttggttgcacacctccagaggccccttcccacattctgagaatccaaggatataaataatgagataatctacacgccaaacccttctcatttaattccaaagtcacgtcagtcgccagcaatgccccttgaacaaaggcagcatmtttccygatgctccagaagtgccatcattactctggaggactccctcatggctcaccaattggcattcttaccagccagatgcacacacgcttccacgctcctttccacacaccagaacatcacagcacacccttcaacagctaccccggaggatgtgctcaataaccaactcttattcctttgaccacctacacatctcaagtagcttaaaacatccgagctggtatttgctgttctgcttttcatttcaaaacacgtaagaggaatagaatagggccctgttaaaaaggacaaaagcagggaag

SEQ ID NO: 64629 - DNA, 599 bp, Chicken  19866894330742_1
  misc_feature (1)..(134): n is any nucleotide
nnnnnnnnnnnnnnnnnnnnnnnnnnnnnnnnnnnnnnnnnnnnnnnnnnnnnnnnnnnnnnnnnnnnnnnnnnnnnnnnnnnnnnnnnnnnnnnnnnnnnnnnnnnnnnnnnnnnnnnnnnnnnnnnnnnnnntctttgtctctgccttttacctactgcatttttttcaagtgcattttgcagtgctgcaacttctgctggcatgcagctcctctcttttgttcaccactctgtggagactaaacactgccacaactaacccatggaattcacagcttctgattaatgaaatgctttraattgttaaatataatgaaatgttataatgggarcttttctgtgaaccaatgttagaaaagtgcttataattccacttgctgaagttggggttgtagggtagatgccctcatgcatcattaaataggggaagacccttaatcatttacttttttatttttcacatttgaaagagcaattatagattgacatagtataataaaccatcagggcttccaacataagaaacacatgaattcttcatccttaagtcttctccctctctttataattcctttataataaaaaataaactttaac

SEQ ID NO: 64630 - DNA, 599 bp, Chicken  19866894330742_2
  misc_feature (1)..(100): n is any nucleotide
nnnnnnnnnnnnnnnnnnnnnnnnnnnnnnnnnnnnnnnnnnnnnnnnnnnnnnnnnnnnnnnnnnnnnnnnnnnnnnnnnnnnnnnnnnnnnnnnnnnntctttgtctctgccttttacctactgcatttttttcaagtgcattttgcagtgctgcaacttctgctggcatgcagctcctctcttttgttcaccactctgtggagactaaacactgccacaactaacccatggaattcacagcttctgattaatgaaatgctttraattgttaaatataatgaaatgttataatgggarcttttctgtgaaccaatgttagaaaagtgcttataattccacttgctgaagttggggttgtagggtagatgccctcatgcatcattaaataggggaagacccttaatcatttacttttttatttttcacatttgaaagagcaattatagattgacatagtataataaaccatcagggcttccaacataagaaacacatgaattcttcatccttaagtcttctccctctctttataattcctttataataaaaaataaactttaacttgtagatgaagaatatgcacttaattatttccc

SEQ ID NO: 64631 - DNA, 600 bp, Chicken  19866894330745_1
ttctctggggttaccccacaaagaagagctgctcagacctcagctgcccacacgtgtgaaggagcagccagcccagcctgtgcagtttgtgctagtgagagattgagggacaacgcaatgcaaattcaagagcactaacaaaagaaaacaggaaaattcaccatcagtgcctggcaaagacggtgttcggaatggttttatgtatatataaattcactgctgcacacgttcagtttctcctccatctccaaccaggatatggggatgcccattaaactcgggattacacacagtgatctygctttcatgtcrgtgctgcatactggtttgcaggggaagatcctccctttgctgcaccatcctagctcarcaagacagcayaacaaacgaggcacacacagcatgtatttatgcagacygcagttcagtattatcaaaaccacttcttcctcactacctcccaaatctgtcctctagaacaycttaactttctgcctccacrtatcttaacattaaaacaaccccccccctccagaaaaaaaagcaacactatttttgttaaagaagtcctcctctcattttccagagcagacaaactgc

SEQ ID NO: 64632 - DNA, 600 bp, Chicken  19866894330745_2
accccacaaagaagagctgctcagacctcagctgcccacacgtgtgaaggagcagccagcccagcctgtgcagtttgtgctagtgagagattgagggacaacgcaatgcaaattcaagagcactaacaaaagaaaacaggaaaattcaccatcagtgcctggcaaagacggtgttcggaatggttttatgtatatataaattcactgctgcacacgttcagtttctcctccatctccaaccaggatatggggatgcccattaaactcgggattacacacagtgatctygctttcatgtcrgtgctgcatactggtttgcaggggaagatcctccctttgctgcaccatcctagctcarcaagacagcayaacaaacgaggcacacacagcatgtatttatgcagacygcagttcagtattatcaaaaccacttcttcctcactacctcccaaatctgtcctctagaacaycttaactttctgcctccacrtatcttaacattaaaacaaccccccccctccagaaaaaaaagcaacactatttttgttaaagaagtcctcctctcattttccagagcagacaaactgccctcgctcaggc

SEQ ID NO: 64633 - DNA, 600 bp, Chicken  19866894330745_3
gcccagcctgtgcagtttgtgctagtgagagattgagggacaacgcaatgcaaattcaagagcactaacaaaagaaaacaggaaaattcaccatcagtgcctggcaaagacggtgttcggaatggttttatgtatatataaattcactgctgcacacgttcagtttctcctccatctccaaccaggatatggggatgcccattaaactcgggattacacacagtgatctygctttcatgtcrgtgctgcatactggtttgcaggggaagatcctccctttgctgcaccatcctagctcarcaagacagcayaacaaacgaggcacacacagcatgtatttatgcagacygcagttcagtattatcaaaaccacttcttcctcactacctcccaaatctgtcctctagaacaycttaactttctgcctccacrtatcttaacattaaaacaaccccccccctccagaaaaaaaagcaacactatttttgttaaagaagtcctcctctcattttccagagcagacaaactgccctcgctcaggctttccaaaaccaaaatacaatttggcagcagtcaggctggaaaagtttcagtccgaag

SEQ ID NO: 64634 - DNA, 600 bp, Chicken  19866894330745_4
gcagtttgtgctagtgagagattgagggacaacgcaatgcaaattcaagagcactaacaaaagaaaacaggaaaattcaccatcagtgcctggcaaagacggtgttcggaatggttttatgtatatataaattcactgctgcacacgttcagtttctcctccatctccaaccaggatatggggatgcccattaaactcgggattacacacagtgatctygctttcatgtcrgtgctgcatactggtttgcaggggaagatcctccctttgctgcaccatcctagctcarcaagacagcayaacaaacgaggcacacacagcatgtatttatgcagacygcagttcagtattatcaaaaccacttcttcctcactacctcccaaatctgtcctctagaacaycttaactttctgcctccacrtatcttaacattaaaacaaccccccccctccagaaaaaaaagcaacactatttttgttaaagaagtcctcctctcattttccagagcagacaaactgccctcgctcaggctttccaaaaccaaaatacaatttggcagcagtcaggctggaaaagtttcagtccgaaggccaagagttg

SEQ ID NO: 64635 - DNA, 600 bp, Chicken  19866894330745_5
gcaaattcaagagcactaacaaaagaaaacaggaaaattcaccatcagtgcctggcaaagacggtgttcggaatggttttatgtatatataaattcactgctgcacacgttcagtttctcctccatctccaaccaggatatggggatgcccattaaactcgggattacacacagtgatctygctttcatgtcrgtgctgcatactggtttgcaggggaagatcctccctttgctgcaccatcctagctcarcaagacagcayaacaaacgaggcacacacagcatgtatttatgcagacygcagttcagtattatcaaaaccacttcttcctcactacctcccaaatctgtcctctagaacaycttaactttctgcctccacrtatcttaacattaaaacaaccccccccctccagaaaaaaaagcaacactatttttgttaaagaagtcctcctctcattttccagagcagacaaactgccctcgctcaggctttccaaaaccaaaatacaatttggcagcagtcaggctggaaaagtttcagtccgaaggccaagagttgggaaaaacggagagttataaaacagaggtacagaatgg

SEQ ID NO: 64636 - DNA, 600 bp, Chicken  19866894330745_6
gtgttcggaatggttttatgtatatataaattcactgctgcacacgttcagtttctcctccatctccaaccaggatatggggatgcccattaaactcgggattacacacagtgatctygctttcatgtcrgtgctgcatactggtttgcaggggaagatcctccctttgctgcaccatcctagctcarcaagacagcayaacaaacgaggcacacacagcatgtatttatgcagacygcagttcagtattatcaaaaccacttcttcctcactacctcccaaatctgtcctctagaacaycttaactttctgcctccacrtatcttaacattaaaacaaccccccccctccagaaaaaaaagcaacactatttttgttaaagaagtcctcctctcattttccagagcagacaaactgccctcgctcaggctttccaaaaccaaaatacaatttggcagcagtcaggctggaaaagtttcagtccgaaggccaagagttgggaaaaacggagagttataaaacagaggtacagaatggaaacttctgtgcaagccagagctgcaggaaccactggctgccagctgcagcaaacagcagctg

SEQ ID NO: 64637 - DNA, 600 bp, Chicken  19866894330745_7
tatatataaattcactgctgcacacgttcagtttctcctccatctccaaccaggatatggggatgcccattaaactcgggattacacacagtgatctygctttcatgtcrgtgctgcatactggtttgcaggggaagatcctccctttgctgcaccatcctagctcarcaagacagcayaacaaacgaggcacacacagcatgtatttatgcagacygcagttcagtattatcaaaaccacttcttcctcactacctcccaaatctgtcctctagaacaycttaactttctgcctccacrtatcttaacattaaaacaaccccccccctccagaaaaaaaagcaacactatttttgttaaagaagtcctcctctcattttccagagcagacaaactgccctcgctcaggctttccaaaaccaaaatacaatttggcagcagtcaggctggaaaagtttcagtccgaaggccaagagttgggaaaaacggagagttataaaacagaggtacagaatggaaacttctgtgcaagccagagctgcaggaaccactggctgccagctgcagcaaacagcagctgacatgggactgttccgagac

SEQ ID NO: 64638 - DNA, 600 bp, Chicken  19866894330748_1
gtactggccagctgtgactagaggaaggcagacaccaagttataacagcaaagaaatgttctggtactgacactttaatgtctaaaatacttggtagtgtgccacaatttttattataataactacagtaacacatatttctttttctttacaagacttgacaggagagtatttattcacaaaagatgtctacaggtacatgtatatacacatatatatatacacattcacaaaataacatcactgaagacaagccagtttagatggtgaaatgctgagagatggagtactgtatagtgragaccagactgtgaatcactcacggaaagaagcattcattcccccagagctgaaacttgctactccaacaaatagaatagcctggggatatctgtcctttgcagtattgtggaggtttttggtcctcttccttttttctgtgccagtcactagcagctgacaacttgtcttttgactgtgcagatccacacctgacaaagcaggcacttgtcagtcactgctttataaagcgtaacttcatacagcaggagactttaaagcagcatgtgtggataatttcatacattgagaagtgtgacg

SEQ ID NO: 64639 - DNA, 600 bp, Chicken  19866894330757_1
tgccaaatgttttagtgcttttccgtgaaagcaaatcttatttctaactgtatattaagccttaagtaaataatgcagtctgtcagaagcaaattctattgtaaaagcagtaactgttcccaggctttgcctgtgatgcccgcacgctgctctgcccgggaaggactgggctagcaatgaattactgctcatttcaatctgcctttcacagaaacgtctaacttttttgtttacactggacccagatcccataaatatggagtatctgttgcggccgctccacgtctgcccaggtaagtraggagatgtggaataaaaatatcagggaaagagcccggtttgaggctctgccttttgttaatggtgaggttgagggctttcctgatctttagcatcttttattaacacacatcaccaaataatattgacactcttcgtgttttattagtacacatttaccttgttcacggttttattattcaagaatgcagttgttgccaagtattaatcaatatattatgctgctcagttgggcaagctgtacaaaaacatagtgcccctagggttaatacagtcaagaactagaaaagtgtttcagac

SEQ ID NO: 64640 - DNA, 599 bp, Chicken  19866894330775_1
  misc_feature (1)..(50): n is any nucleotide
nnnnnnnnnnnnnnnnnnnnnnnnnnnnnnnnnnnnnnnnnnnnnnnnnnggtggtggtgacataggagctcaggagaatcattccagaggcagcatctgaaagccagtgtgaagtagaaaggtctgaaacagatggaaggcttctaggttcttgttcacatggtttttcgagtcccatggaaaatgtaggacttgtgcctttatattttttagacacttataacatctctgtgctcatacctgtagagcaaatcttgcctgcgtgtgtgtgcatcctgtatcatgacattgcgtgaggmaacttggcaatgcaaaaagaaaggtgaaaagaaaaatgtgatttaattttcacctcttgtaagaaggtttttcttgtaaaaatgttgtttttgactccttgtatccctcactggtgttgaaacatgyattgaaaaaagttcagctccttcattggaccttccttcactttcttttgctctggaagggcgctcatagtgattatctgcagccatcctyttccagacatctcacagtgggatccttcctgctgtacttcgtgcatggagctgtgttgtacttctccagtctgcgctgtggt

SEQ ID NO: 64641 - DNA, 600 bp, Chicken  19866894330775_2
aaacagatggaaggcttctaggttcttgttcacatggtttttcgagtcccatggaaaatgtaggacttgtgcctttatattttttagacacttataacatctctgtgctcatacctgtagagcaaatcttgcctgcgtgtgtgtgcatcctgtatcatgacattgcgtgaggmaacttggcaatgcaaaaagaaaggtgaaaagaaaaatgtgatttaattttcacctcttgtaagaaggtttttcttgtaaaaatgttgtttttgactccttgtatccctcactggtgttgaaacatgyattgaaaaaagttcagctccttcattggaccttccttcactttcttttgctctggaagggcgctcatagtgattatctgcagccatcctyttccagacatctcacagtgggatccttcctgctgtacttcgtgcatggagctgtgttgtacttctccagtctgcgctgtggtgaagcaacgaattgagagctgaattgcccacgatttaatggcttcaaggagatgagtactacttagagagtaagttacccctcactgtgagcttgagtggcagaatttagctcttttgtttctgaaaa

SEQ ID NO: 64642 - DNA, 600 bp, Chicken  19866894330775_3
cttataacatctctgtgctcatacctgtagagcaaatcttgcctgcgtgtgtgtgcatcctgtatcatgacattgcgtgaggmaacttggcaatgcaaaaagaaaggtgaaaagaaaaatgtgatttaattttcacctcttgtaagaaggtttttcttgtaaaaatgttgtttttgactccttgtatccctcactggtgttgaaacatgyattgaaaaaagttcagctccttcattggaccttccttcactttcttttgctctggaagggcgctcatagtgattatctgcagccatcctyttccagacatctcacagtgggatccttcctgctgtacttcgtgcatggagctgtgttgtacttctccagtctgcgctgtggtgaagcaacgaattgagagctgaattgcccacgatttaatggcttcaaggagatgagtactacttagagagtaagttacccctcactgtgagcttgagtggcagaatttagctcttttgtttctgaaaactgatgttttcaattctacgcacttcaattctgcaaactgtttttcatgggaaagagacagaaataaaaacttgcaaggatggtaaattt

SEQ ID NO: 64643 - DNA, 599 bp, Chicken  19866894330789_1
  misc_feature (1)..(35): n is any nucleotide
nnnnnnnnnnnnnnnnnnnnnnnnnnnnnnnnnnnactgaagaggagtgcaacctatccaaaaagatgctaatcccttggctggcaacccttaaatgagggtgaggagggatggattcagtgcttcaccccctccagtcactcaggtgcatcacttgtacctgagttccctgggttagcaacgccttctcacctggcattcaactgttggttcaggccgtgatctggcaattctgctgcaagatgaaacaacagaacgattaaaacatagtcgttcttttctttctttctttcttttttmtttttttctcttaagcaagttatgaggtgacagatgcaaatttcttatgtctggcaaataaatcttatatggcaaatatcctcaggaggctgaaggctcggccatctcatagctagctaccatttttctttaagaattgtgtgtattactagaaggaggatatggatttatttttattgttacttctgaataatatatcttttattgtgtagtggcaatcataagcagtgacacgtttttgtgtgtatgtttaatttcactgaaacatatagactaataaataatatgaagaatatcca

SEQ ID NO: 64644 - DNA, 600 bp, Chicken  19866894330789_2
agaatatccaccccttgtctcctcatttgacacagctcagccatggaagaacatgtggctggaaaatcaggcatagtaagctgctgcaatctgactgttgtctcacacatagttactgaaaagactaagtacgatgctggactgcagcacatacaggtaaaatggattcttaaagaaatcagaggcaagggaagtattgacacatggacctttccccacttattgccttactggctgctgtagatttttattaaagaacaacagcatgcctggtgcaagaagtctattttgagtgtgccyccagttttcttgagagactagagacacmatactgtttccttctgcagttatcaggaggaagcttcaggtgacactacctgtgattactttattttaaatgtttgaagacctttgtaagtctccgcaaagcagaatgcatttgttacacagtgtacgtcataaataaaactaacatgagactgggttgtaattaataattagttgttttatgccaaaaagtaatgcagtacttaatacaccatgttaaaaaaaaagcatttattttataagttttatgatgtattaaaaaatcagaactgt

SEQ ID NO: 64645 - DNA, 600 bp, Chicken  19866894330789_3
gacacagctcagccatggaagaacatgtggctggaaaatcaggcatagtaagctgctgcaatctgactgttgtctcacacatagttactgaaaagactaagtacgatgctggactgcagcacatacaggtaaaatggattcttaaagaaatcagaggcaagggaagtattgacacatggacctttccccacttattgccttactggctgctgtagatttttattaaagaacaacagcatgcctggtgcaagaagtctattttgagtgtgccyccagttttcttgagagactagagacacmatactgtttccttctgcagttatcaggaggaagcttcaggtgacactacctgtgattactttattttaaatgtttgaagacctttgtaagtctccgcaaagcagaatgcatttgttacacagtgtacgtcataaataaaactaacatgagactgggttgtaattaataattagttgttttatgccaaaaagtaatgcagtacttaatacaccatgttaaaaaaaaagcatttattttataagttttatgatgtattaaaaaatcagaactgttgagaaacaccactagaagctatggtac

SEQ ID NO: 64646 - DNA, 600 bp, Chicken  19866894330794_1
agagcatccccaacctctctgccaatgttcagatttattgtacttggggttacttacataaagtacagagctgggaaaacatgtggtgataaacctggcttgttccagagggaagatacttaaaagagatggcatataatgagattatagctcaagtgaacccaaccttcaagtgagcctataaaccacataccaatcccttgcatagctgaaagctagagaacgcataccgcatacctcagcaaggagaacaagggttcatgggtggccatagcagtgatccttctggagccccttatsttgcgtgggtctgggcatggctgccaggatgactcagatgtgccagcagtgacacccctgggcctctgtttgctagcatttgttattcagtagctccagcatattttgtcagagcagcatctcgctgctgtctcttaacctggctccagcacattagatccagtgtgaaaatctaggtatgtttgcctggtgttcatccacacctactccagagggatacattattacttttaacttattctcatgtaagaaaaaatgaaaaagccaaaagatgagaattttttatattgaagagcactt

SEQ ID NO: 64647 - DNA, 599 bp, Chicken  19866894330795_1
  misc_feature (1)..(27): n is any nucleotide
nnnnnnnnnnnnnnnnnnnnnnnnnnntttttttatgatgcttttctttatctccctcattccctaaatacacacacacacacacataattgaagaagacaggcaacatggctgaagcccacttaatatgaagaatttaaacaaacaaaaagacaattaagagtttgaagaaaaaggacttccaaggctttagcatctaacttgatagtgatgtttaactgtattgaacagttctgacttttaaatttgaacttactttgttgcatatgtgcttttattatccggacggcacctaaatcytgacaagattttggagtgttggattctgggcatgaggcctgtagcagaaagctgaagtcaaagccatgccttatgatccctttcttcagcaagaaaggtagagaggtgtgctgtcccatctgtaacgttaactgctttttactttgacaacatgccacttgtttatcctgccacagtctggttgtctgtgttttttggctacaaggcaaaaacaaaaaccaaaatacaacatgaaaataagtggaaggcacctactcagttcaaataagcattcaatttcagaataataggaacaagaa

SEQ ID NO: 64648 - DNA, 600 bp, Chicken  19866894330795_2
ctgggcatgaggcctgtagcagaaagctgaagtcaaagccatgccttatgatccctttcttcagcaagaaaggtagagaggtgtgctgtcccatctgtaacgttaactgctttttactttgacaacatgccacttgtttatcctgccacagtctggttgtctgtgttttttggctacaaggcaaaaacaaaaaccaaaatacaacatgaaaataagtggaaggcacctactcagttcaaataagcattcaatttcagaataataggaacaagaagcttgtaagatgcaagaatgccaaastgttttctctttcttgatccatctaggaagctctggctctccccagcagcatccaactgctatgacagagaatgatcacaaataacaacgaataacaaacaacacagacaaagacacagtatgaataggaaaacatattgccatcttccccttattgacaaaaactgattgcttccagcatgcgttttttatgaatcatcaggaaagtatgtcaaaagaattmtgaagaccaggtggtgtgcctttgtcatttataaactatgctatggcctgcctgcaagaatagaggctgtatggaca

SEQ ID NO: 64649 - DNA, 600 bp, Chicken  19866894330795_3
cacctactcagttcaaataagcattcaatttcagaataataggaacaagaagcttgtaagatgcaagaatgccaaastgttttctctttcttgatccatctaggaagctctggctctccccagcagcatccaactgctatgacagagaatgatcacaaataacaacgaataacaaacaacacagacaaagacacagtatgaataggaaaacatattgccatcttccccttattgacaaaaactgattgcttccagcatgcgttttttatgaatcatcaggaaagtatgtcaaaagaattmtgaagaccaggtggtgtgcctttgtcatttataaactatgctatggcctgcctgcaagaatagaggctgtatggacaagactcagatttctgccatctggtttctgaagaatggaaaatccaaagaggtcgaaaatacagtctatcttaaagctgcttgcaagacaattgtctgtttttaattaggtcaaacgctgatgtaacaccatacaccataagttatttctcatattgtaccaaaccactagttcacgtagtgcaatatcctgcctctgcaaggatcagtgattgacactgggga

SEQ ID NO: 64650 - DNA, 600 bp, Chicken  19866894330798_1
aaattataatgataggtaagttcccatcttcctgctggcatggcattcagtgatgcaattttgaaatatttgactattgcttcagaggcttagaatcagattctcaatttttctacacctaacttggctttaaactgtttctaattaatcttaaatgtaatttatacgttaaatcatatttgtattacccaaactgtgtaaagctgtctacgtgaaagttctttaatacatgttagtatgaaacaattcaattaactgagatcagttatgtattttaatgcctacatctctaagataatyctctttaagatctctatttcagtagaatgaatacaacacagagaaactttccccccgtttgtcaaaactaagcacgttctgtggtgggaatgttcaaataactagagcattagcagccataagtaattctgtgaccagcaggcagttggaaatagatcttaatttaagtcccctgagcaacatcttttcagctggacaaggtgaaaaatatttataactttttaaaatgatatttatatcatcaagagatttctaaataagtaaacacaaatacgtacttctaaatgcttcactgccagt

SEQ ID NO: 64651 - DNA, 600 bp, Chicken  19866894330804_1
atggcagccacagtatcagcaacctaggtaagacaagaaaaaaagccaagatgtacacaccaacagtacgtaatgccaccagaagaacacagtgaaacctggatatgacggaccatcctcaccaacctatctgatattgttagaagcacttcaggtcttaacagaactcacgcagtccagtagtaatatttcattctcctcaatgagatcaactccaccagccttacagatgtacccagtcccacaactgactgcagaagatggtgcctgtagttacaaactagggagcaaacctatcayctttgattcagaagaagagacttaaggacttacaaattaaggaataaaaattatttgcttgcccaagaaccatcagttattcagtgttcatcttcagtacattctccgtgttgccccttacttaaaaatacaaaatacctcaagttcatgctgctgctaaatggaggaacaactggggcagtgttatcgcagcgctctgttctactgatgtctgtactcatggaatttgagtatgttaagggtttttttggtaaagaagaggtacagaggctgctctgtgtatggctacacttattccaa

SEQ ID NO: 64652 - DNA, 600 bp, Chicken  19866894330804_2
acacttattccaagcaaggacaaaaccagacaaaaataaatccctaagagcacaccccataggaagaatgaataacatacatcctgtgtcaaacagttattacttattgaccaggaggcctctccgctgttacatgtgttacataaaggcaccaagaaaagcaccaaaggcaatttggatagtgctgcagcgatggcacattcccttgttagaaatacaaatcagctgaaggccaaccttttccagaacctgaccactctcaaacggaacaacagtgcctgcgtgatgcagagccacccrtaccacagtcacttcattcccgttttgtgaatggatgytctgctgcattgccaaacaataatttgcaatttgtcttggggtacttggtgaatgcccacacaccacatttatttggggatatgtcctcaaatttgcagagcctcctcaaagccaccaagctactcacagccagggaagcagcagtgccctcaggccgtgacatgggcctgctccaagtaagtttacagggctcaatgctcctggcttacaccacatcctcccacacagaggagggctttgcaaacaagcccttttcccttt

SEQ ID NO: 64653 - DNA, 600 bp, Chicken  19866894330804_3
aatccctaagagcacaccccataggaagaatgaataacatacatcctgtgtcaaacagttattacttattgaccaggaggcctctccgctgttacatgtgttacataaaggcaccaagaaaagcaccaaaggcaatttggatagtgctgcagcgatggcacattcccttgttagaaatacaaatcagctgaaggccaaccttttccagaacctgaccactctcaaacggaacaacagtgcctgcgtgatgcagagccacccrtaccacagtcacttcattcccgttttgtgaatggatgytctgctgcattgccaaacaataatttgcaatttgtcttggggtacttggtgaatgcccacacaccacatttatttggggatatgtcctcaaatttgcagagcctcctcaaagccaccaagctactcacagccagggaagcagcagtgccctcaggccgtgacatgggcctgctccaagtaagtttacagggctcaatgctcctggcttacaccacatcctcccacacagaggagggctttgcaaacaagcccttttccctttaagtttctgagaaaagtacattcatctttagtcttccr

SEQ ID NO: 64654 - DNA, 600 bp, Chicken  19866894330804_4
tctgctgcattgccaaacaataatttgcaatttgtcttggggtacttggtgaatgcccacacaccacatttatttggggatatgtcctcaaatttgcagagcctcctcaaagccaccaagctactcacagccagggaagcagcagtgccctcaggccgtgacatgggcctgctccaagtaagtttacagggctcaatgctcctggcttacaccacatcctcccacacagaggagggctttgcaaacaagcccttttccctttaagtttctgagaaaagtacattcatctttagtcttccraaatcttcctcatgagctctggccgtggcagaggcactgtgctgggggtggagcagggcccacccggcctactgagcagctcatgcccagctacggaggcgtggggagcgcacatggctgccaggggaggactgtgtgcaggcaccctggccaggccctcctcagctctcctgcagagcaagtgcagagcatgggcacycagggcgaatgcctgtgttctacaagtcyggtgcaatgcaaaatggacaccagctgcagacaaacggctgcaaaccggcgaacaagggggtggttctggtg

SEQ ID NO: 64655 - DNA, 600 bp, Chicken  19866894330804_5
tcctggcttacaccacatcctcccacacagaggagggctttgcaaacaagcccttttccctttaagtttctgagaaaagtacattcatctttagtcttccraaatcttcctcatgagctctggccgtggcagaggcactgtgctgggggtggagcagggcccacccggcctactgagcagctcatgcccagctacggaggcgtggggagcgcacatggctgccaggggaggactgtgtgcaggcaccctggccaggccctcctcagctctcctgcagagcaagtgcagagcatgggcacycagggcgaatgcctgtgttctacaagtcyggtgcaatgcaaaatggacaccagctgcagacaaacggctgcaaaccggcgaacaagggggtggttctggtgggtgacgttctggaacagtcttcccaggggcataaagtagtcttcttattttggaaggaaagcgtgatcttttaataaaaggataaagccacaggaggcagtggctgtgaggcggcaaggagcgagcatgctgaatcctgaggcttcttgtgaccatcagttcctaaaataaacagcaccttaatagaattggtaatgt

SEQ ID NO: 64656 - DNA, 597 bp, Chicken  19866894330804_6
gaggagggctttgcaaacaagcccttttccctttaagtttctgagaaaagtacattcatctttagtcttccraaatcttcctcatgagctctggccgtggcagaggcactgtgctgggggtggagcagggcccacccggcctactgagcagctcatgcccagctacggaggcgtggggagcgcacatggctgccaggggaggactgtgtgcaggcaccctggccaggccctcctcagctctcctgcagagcaagtgcagagcatgggcacycagggcgaatgcctgtgttctacaagtcyggtgcaatgcaaaatggacaccagctgcagacaaacggctgcaaaccggcgaacaagggggtggttctggtgggtgacgttctggaacagtcttcccaggggcataaagtagtcttcttattttggaaggaaagcgtgatcttttaataaaaggataaagccacaggaggcagtggctgtgaggcggcaaggagcgagcatgctgaatcctgaggcttcttgtgaccatcagttcctaaaataaacagcaccttaatagaattggtaatgtgtactgagatctgtatctggcatttg

SEQ ID NO: 64657 - DNA, 446 bp, Chicken  19866894330805_1
tccagttttgttctgaagtcctacacaacctacaaataactgcagaggaaaggcttcacttgtcccaagcactgtttgtagtctggtaccatggaaaatgcttttgaatatctcattctagcaaataccaaaacacaggttggtaaaagacaccttcttgtcccctgccttgaagtgggacaaccagttagagacataaactttcagttttggtattttgcctctttctgctcacctggttagcaggtttggtgttcctcttcattgtccattttttttagtgcttcctatacatctctraactatgcatacatacacacatatataaatgatttctctatgtgggcttattccaaagtctttattttctactctttacttcaggtggtgatttcagttcctttttcatcctatcctaaatgatcaactctcacccttaagaacag

SEQ ID NO: 64658 - DNA, 599 bp, Chicken  19866894330806_1
  misc_feature (1)..(121): n is any nucleotide
nnnnnnnnnnnnnnnnnnnnnnnnnnnnnnnnnnnnnnnnnnnnnnnnnnnnnnnnnnnnnnnnnnnnnnnnnnnnnnnnnnnnnnnnnnnnnnnnnnnnnnnnnnnnnnnnnnnnnnnnnaaattgcataacctcagcacttcttacaattgttcagtacatataccttaggtctgtgcttgctctttcagtacaaagtgctctctgttctcccgggatcagggatgggtattgctgtatcaacaccatctacacaaaaagtaagtagctggctctatctgtattatctgtttgacttyatgccctttttgacatcttcctctggcaagtggcagcaaaaaggtgkttttttttcctcttcttcctcttgctartgttttgcttttttctctaattcacttgtacataattcagcatgtttctttcagaattttaatgaattaaacattcaccctgtttkactgcatctgactgttttactgtaacacttcagacagattygcttcatcctttctgctcctttctttcattacctcaattgactgttctctcagtgtcctttgagagcatgagggctgatatgcagtgcatcagtctg

SEQ ID NO: 64659 - DNA, 599 bp, Chicken  19866894330806_2
  misc_feature (1)..(74): n is any nucleotide
nnnnnnnnnnnnnnnnnnnnnnnnnnnnnnnnnnnnnnnnnnnnnnnnnnnnnnnnnnnnnnnnnnnnnnnnnnaaattgcataacctcagcacttcttacaattgttcagtacatataccttaggtctgtgcttgctctttcagtacaaagtgctctctgttctcccgggatcagggatgggtattgctgtatcaacaccatctacacaaaaagtaagtagctggctctatctgtattatctgtttgacttyatgccctttttgacatcttcctctggcaagtggcagcaaaaaggtgkttttttttcctcttcttcctcttgctartgttttgcttttttctctaattcacttgtacataattcagcatgtttctttcagaattttaatgaattaaacattcaccctgtttkactgcatctgactgttttactgtaacacttcagacagattygcttcatcctttctgctcctttctttcattacctcaattgactgttctctcagtgtcctttgagagcatgagggctgatatgcagtgcatcagtctgagaatagaagttgatggcttgacagtatgtttgggtgaggaacggtc

SEQ ID NO: 64660 - DNA, 599 bp, Chicken  19866894330806_3
  misc_feature (1)..(46): n is any nucleotide
nnnnnnnnnnnnnnnnnnnnnnnnnnnnnnnnnnnnnnnnnnnnnnaaattgcataacctcagcacttcttacaattgttcagtacatataccttaggtctgtgcttgctctttcagtacaaagtgctctctgttctcccgggatcagggatgggtattgctgtatcaacaccatctacacaaaaagtaagtagctggctctatctgtattatctgtttgacttyatgccctttttgacatcttcctctggcaagtggcagcaaaaaggtgkttttttttcctcttcttcctcttgctartgttttgcttttttctctaattcacttgtacataattcagcatgtttctttcagaattttaatgaattaaacattcaccctgtttkactgcatctgactgttttactgtaacacttcagacagattygcttcatcctttctgctcctttctttcattacctcaattgactgttctctcagtgtcctttgagagcatgagggctgatatgcagtgcatcagtctgagaatagaagttgatggcttgacagtatgtttgggtgaggaacggtctgctgtatggcacgttttggggtggaag

SEQ ID NO: 64661 - DNA, 600 bp, Chicken  19866894330806_4
atataccttaggtctgtgcttgctctttcagtacaaagtgctctctgttctcccgggatcagggatgggtattgctgtatcaacaccatctacacaaaaagtaagtagctggctctatctgtattatctgtttgacttyatgccctttttgacatcttcctctggcaagtggcagcaaaaaggtgkttttttttcctcttcttcctcttgctartgttttgcttttttctctaattcacttgtacataattcagcatgtttctttcagaattttaatgaattaaacattcaccctgtttkactgcatctgactgttttactgtaacacttcagacagattygcttcatcctttctgctcctttctttcattacctcaattgactgttctctcagtgtcctttgagagcatgagggctgatatgcagtgcatcagtctgagaatagaagttgatggcttgacagtatgtttgggtgaggaacggtctgctgtatggcacgttttggggtggaaggacctgacmctcagattcagttttcctgtttaaaccttactgtactaaacatttaagtatcatcaggaaaacttcgtgcactttatg

SEQ ID NO: 64662 - DNA, 600 bp, Chicken  19866894330806_5
tctctgttctcccgggatcagggatgggtattgctgtatcaacaccatctacacaaaaagtaagtagctggctctatctgtattatctgtttgacttyatgccctttttgacatcttcctctggcaagtggcagcaaaaaggtgkttttttttcctcttcttcctcttgctartgttttgcttttttctctaattcacttgtacataattcagcatgtttctttcagaattttaatgaattaaacattcaccctgtttkactgcatctgactgttttactgtaacacttcagacagattygcttcatcctttctgctcctttctttcattacctcaattgactgttctctcagtgtcctttgagagcatgagggctgatatgcagtgcatcagtctgagaatagaagttgatggcttgacagtatgtttgggtgaggaacggtctgctgtatggcacgttttggggtggaaggacctgacmctcagattcagttttcctgtttaaaccttactgtactaaacatttaagtatcatcaggaaaacttcgtgcactttatgagtgagttaaagtgccctcggttgcctggtcactgtgcaga

SEQ ID NO: 64663 - DNA, 600 bp, Chicken  19866894330806_6
ttttttctctaattcacttgtacataattcagcatgtttctttcagaattttaatgaattaaacattcaccctgtttkactgcatctgactgttttactgtaacacttcagacagattygcttcatcctttctgctcctttctttcattacctcaattgactgttctctcagtgtcctttgagagcatgagggctgatatgcagtgcatcagtctgagaatagaagttgatggcttgacagtatgtttgggtgaggaacggtctgctgtatggcacgttttggggtggaaggacctgacmctcagattcagttttcctgtttaaaccttactgtactaaacatttaagtatcatcaggaaaacttcgtgcactttatgagtgagttaaagtgccctcggttgcctggtcactgtgcagatgtgctttatgttgtggttgatttatataaacaagatggagatggaaacacattaaaaacttgggcgtggatccaaggatttagtagagaaaaggattcttactctttattaatgtactttgagtacagtgctgctcctaacggtgtggccaaaaccatacctaaaggaacagttttcttc

SEQ ID NO: 64664 - DNA, 599 bp, Chicken  19866894330808_1
  misc_feature (1)..(131): n is any nucleotide
nnnnnnnnnnnnnnnnnnnnnnnnnnnnnnnnnnnnnnnnnnnnnnnnnnnnnnnnnnnnnnnnnnnnnnnnnnnnnnnnnnnnnnnnnnnnnnnnnnnnnnnnnnnnnnnnnnnnnnnnnnnnnnnnnnntgaaaataattattgaaaataaaaacaataaatagaatcttataaaaatatcttaagatagtagaaatgaaatggagcaaccttgtctttcacatatccattaagaggttcatatacagccgcagcaatactaggtggaaggtcttttatactcttctgaagaagtcaytcctttgacccttaatcaagcaggtatttttcctcagttataatgtgataagcagcacctaacagagtcagataattacagtcagataaagcatatatggattccaagttatgctgaaatatatatataaatatatagatacatagatgtataartatacatgtacatacatgcaaagtataccttatgaaaatattctgccattgatttagtgaagttatcagtaaacctgtaagcactattaatgctgtagtattcatatgaacaaawttaagtgatggcagcttgctggtcaactt

SEQ ID NO: 64665 - DNA, 600 bp, Chicken  19866894330808_2
acaataaatagaatcttataaaaatatcttaagatagtagaaatgaaatggagcaaccttgtctttcacatatccattaagaggttcatatacagccgcagcaatactaggtggaaggtcttttatactcttctgaagaagtcaytcctttgacccttaatcaagcaggtatttttcctcagttataatgtgataagcagcacctaacagagtcagataattacagtcagataaagcatatatggattccaagttatgctgaaatatatatataaatatatagatacatagatgtataartatacatgtacatacatgcaaagtataccttatgaaaatattctgccattgatttagtgaagttatcagtaaacctgtaagcactattaatgctgtagtattcatatgaacaaawttaagtgatggcagcttgctggtcaacttagtagctttgaaatgcaatatgtttctcttctgcttttagagctattactgaattatttggcttagatatgcagatatgcaagaagccttaaatycagggcagccacttgacataatatttaaccagaagcttaaacccattctgaactcactgct

SEQ ID NO: 64666 - DNA, 600 bp, Chicken  19866894330808_3
aggtcttttatactcttctgaagaagtcaytcctttgacccttaatcaagcaggtatttttcctcagttataatgtgataagcagcacctaacagagtcagataattacagtcagataaagcatatatggattccaagttatgctgaaatatatatataaatatatagatacatagatgtataartatacatgtacatacatgcaaagtataccttatgaaaatattctgccattgatttagtgaagttatcagtaaacctgtaagcactattaatgctgtagtattcatatgaacaaawttaagtgatggcagcttgctggtcaacttagtagctttgaaatgcaatatgtttctcttctgcttttagagctattactgaattatttggcttagatatgcagatatgcaagaagccttaaatycagggcagccacttgacataatatttaaccagaagcttaaacccattctgaactcactgctacaaacacatttmttatggtttgaatactataacgtacactagaatgcgaacatatacatcatttgctcagttttcttctgaaagcactctgtataaacagacaatttcctgagt

SEQ ID NO: 64667 - DNA, 521 bp, Chicken  19866894330808_4
atatggattccaagttatgctgaaatatatatataaatatatagatacatagatgtataartatacatgtacatacatgcaaagtataccttatgaaaatattctgccattgatttagtgaagttatcagtaaacctgtaagcactattaatgctgtagtattcatatgaacaaawttaagtgatggcagcttgctggtcaacttagtagctttgaaatgcaatatgtttctcttctgcttttagagctattactgaattatttggcttagatatgcagatatgcaagaagccttaaatycagggcagccacttgacataatatttaaccagaagcttaaacccattctgaactcactgctacaaacacatttmttatggtttgaatactataacgtacactagaatgcgaacatatacatcatttgctcagttttcttctgaaagcactctgtataaacagacaatttcctgagtgcctgacaaggggtggtttaggtacttcattttgtgtaaataagt

SEQ ID NO: 64668 - DNA, 447 bp, Chicken  19866894330808_5
acatgcaaagtataccttatgaaaatattctgccattgatttagtgaagttatcagtaaacctgtaagcactattaatgctgtagtattcatatgaacaaawttaagtgatggcagcttgctggtcaacttagtagctttgaaatgcaatatgtttctcttctgcttttagagctattactgaattatttggcttagatatgcagatatgcaagaagccttaaatycagggcagccacttgacataatatttaaccagaagcttaaacccattctgaactcactgctacaaacacatttmttatggtttgaatactataacgtacactagaatgcgaacatatacatcatttgctcagttttcttctgaaagcactctgtataaacagacaatttcctgagtgcctgacaaggggtggtttaggtacttcattttgtgtaaataagt

SEQ ID NO: 64669 - DNA, 599 bp, Chicken  19866894330811_1
  misc_feature (1)..(94): n is any nucleotide
nnnnnnnnnnnnnnnnnnnnnnnnnnnnnnnnnnnnnnnnnnnnnnnnnnnnnnnnnnnnnnnnnnnnnnnnnnnnnnnnnnnnnnnnnnnnnntaaaaatggggtggggaagttgaggagcacgtttgtccacacagtgtcagagcaaagctcattaggggacatcctggatcagtatcaactgccaagtgcagctttaacttcttgtttaatcccacccataaataaataaataaataaatagacttcttaaatgtccatcaatctcttcctctttaagctcttcttgatacctctcyatttttctgtacaagttctgaacacttgaagaagatgacaggaaggcacaaggcacaggagggctctttaggttgtaaggggtcccagggggcttttgcggctgagtccatcaacctccagtgcagagagaagatagcatgaagtgctcaagaagaccaagtcagaaggaacagagaagtttcttggagtattaatgggccccactgagggccactaacaagcaagcttccccagggacttgttagagcaaataattggaagccatgctgacaggcaggcaaaggcactgggatggtgg

SEQ ID NO: 64670 - DNA, 600 bp, Chicken  19866894330819_1
ctaagagagagaggcaaaagtcgaggtgtaaaatcacatatttttgccccattgctgcttcttttgccttccttgcttcagatgcctttgccttttccaagttctctccttaatcaagaagcaaaatatgtatatgagggatgcacatccaagaacttttcaaaaaatcttacaacaatgcttgttcctccctcacagtaccaggaatatgaattcagtaggtacatgagctctgttctctctggatggagtagtcacacttccgagcttgcatttcttccctgaagcagcagtcacttygttatttctccagccaacatccttttgttgatccatgaagttctggcactgcagatgtgataagaataaaaacatttaagcaatcggttaatctaacaaatatgttaaatataacgagacaatgagatcaaatgcccactgctttcatttaaaccagacataaatctcagagaaaattgcacagatgcaatcagagttgaacacgagaagtgtttggcacatgtgagctctgctaccctgaagataagacttgaaaaaaaggacagactgcctatcaataccttcacagagcacaccctt

SEQ ID NO: 64671 - DNA, 600 bp, Chicken  19866894330820_1
acttacatactgtatggaaaatgcagccatattgatgaacaaacatactgtaaatattgagaaggttcaggatggtgctttttgggtgtcacaacatactaagattacaagtctacatggatttgcactgtaaaagaacattttcatagaaagatgccaggctgtattttaacaaggcataaggtaacaagttagttatataaacttagtcatgttcatgaatttaggagcctttctgccaaaaacatccagatcattcctaaatggtgctaaaaaaaatgtgcaggtggctagctactsttctaaattctgagtatatggaaactttaggatatgcttatgttgatatttagttttcgataatgtatgcttacagttggtgtccagatcatctgtacttactgtgctttgaacagcatcatcaaggtaccttggaagtgatcaaactggttttattttgtataaaacaaaaccagaacacatgctagaatatagtttatggatttcagcagctaatatgtgctttacacacaaattcagattactgtcagtccaatgaacccttgtcttctcgaagtttgcttataatatcaacactag

SEQ ID NO: 64672 - DNA, 600 bp, Chicken  19866894330825_1
aaggtgtggtataaatgttttattgacctctcttttggatacacacttcaaagactgatatgcagcaaagccataaatgagttatgtaggtcatgcaagtgactgagtttgtaacagtacagtcatgcttttggcatgtgccaaaaatatgagaaaataaccttattaacaatggatttagggattttttcttgctattttcttatctaggcatttgcactgacaggtttccttagtaacatgaatctacttgttctagtctcaaaggatgaaaacaaatttaatttgctgaactcaagrgaccctttaaaatactctaagaaaacttttttattatttttattatatagtataacaattaataggatctgatatcttgggtctgtctgtgttggacattgatgttttgtggcccagtgagtgtccctgaagcccatactgctctctcraatgaataaaccagctcctgcttgacaagcgttgtactgcatattcatgctttgcccaggaaygttatttcatctgactgttttgcttgtcattttgaaaagtraggatgctttgtagcttttgtttcagatttatgaaaaacaataatga

SEQ ID NO: 64673 - DNA, 600 bp, Chicken  19866894330825_2
tgagaaaataaccttattaacaatggatttagggattttttcttgctattttcttatctaggcatttgcactgacaggtttccttagtaacatgaatctacttgttctagtctcaaaggatgaaaacaaatttaatttgctgaactcaagrgaccctttaaaatactctaagaaaacttttttattatttttattatatagtataacaattaataggatctgatatcttgggtctgtctgtgttggacattgatgttttgtggcccagtgagtgtccctgaagcccatactgctctctcraatgaataaaccagctcctgcttgacaagcgttgtactgcatattcatgctttgcccaggaaygttatttcatctgactgttttgcttgtcattttgaaaagtraggatgctttgtagcttttgtttcagatttatgaaaaacaataatgaaagataacgtggattagaaagtctgagctccagmagagacttgaccgtgggctgtgagagctaggctgtcactccaggttagcatttagcagaagtcctacctgcagttttacaaccatccctggaactgagcttgggatatgcccagc

SEQ ID NO: 64674 - DNA, 600 bp, Chicken  19866894330825_3
atttgcactgacaggtttccttagtaacatgaatctacttgttctagtctcaaaggatgaaaacaaatttaatttgctgaactcaagrgaccctttaaaatactctaagaaaacttttttattatttttattatatagtataacaattaataggatctgatatcttgggtctgtctgtgttggacattgatgttttgtggcccagtgagtgtccctgaagcccatactgctctctcraatgaataaaccagctcctgcttgacaagcgttgtactgcatattcatgctttgcccaggaaygttatttcatctgactgttttgcttgtcattttgaaaagtraggatgctttgtagcttttgtttcagatttatgaaaaacaataatgaaagataacgtggattagaaagtctgagctccagmagagacttgaccgtgggctgtgagagctaggctgtcactccaggttagcatttagcagaagtcctacctgcagttttacaaccatccctggaactgagcttgggatatgcccagcagcagctgactatttcagagagcagtctgattttcctgagattcttcatcttgaaacctttct

SEQ ID NO: 64675 - DNA, 600 bp, Chicken  19866894330825_4
ttctagtctcaaaggatgaaaacaaatttaatttgctgaactcaagrgaccctttaaaatactctaagaaaacttttttattatttttattatatagtataacaattaataggatctgatatcttgggtctgtctgtgttggacattgatgttttgtggcccagtgagtgtccctgaagcccatactgctctctcraatgaataaaccagctcctgcttgacaagcgttgtactgcatattcatgctttgcccaggaaygttatttcatctgactgttttgcttgtcattttgaaaagtraggatgctttgtagcttttgtttcagatttatgaaaaacaataatgaaagataacgtggattagaaagtctgagctccagmagagacttgaccgtgggctgtgagagctaggctgtcactccaggttagcatttagcagaagtcctacctgcagttttacaaccatccctggaactgagcttgggatatgcccagcagcagctgactatttcagagagcagtctgattttcctgagattcttcatcttgaaacctttctcatccttgttttttttagcaaagagctggttttcttacagt

SEQ ID NO: 64676 - DNA, 600 bp, Chicken  19866894330825_5
tatttttattatatagtataacaattaataggatctgatatcttgggtctgtctgtgttggacattgatgttttgtggcccagtgagtgtccctgaagcccatactgctctctcraatgaataaaccagctcctgcttgacaagcgttgtactgcatattcatgctttgcccaggaaygttatttcatctgactgttttgcttgtcattttgaaaagtraggatgctttgtagcttttgtttcagatttatgaaaaacaataatgaaagataacgtggattagaaagtctgagctccagmagagacttgaccgtgggctgtgagagctaggctgtcactccaggttagcatttagcagaagtcctacctgcagttttacaaccatccctggaactgagcttgggatatgcccagcagcagctgactatttcagagagcagtctgattttcctgagattcttcatcttgaaacctttctcatccttgttttttttagcaaagagctggttttcttacagttgaagatgtactgcctacagcaaaatgatcatatcacacacatgaagaagaataacccagtttatttttcagaatggaatt

SEQ ID NO: 64677 - DNA, 600 bp, Chicken  19866894330842_1
tggacaaaaggctctgattatgtgacaatgctggttagactgtcacatagcaaaaaaagatgggaaagttgtgaggaaaaataaaaagtatttagtagtctgttagggaggccagaaagaaagaaattgcattgtatactatgtaggcaagggatcatgtctatgtgtatttacttctgtatcacaaagcagaaattaggacaaaaaggacaaagtcagagaaagactccaggactccttaaagaattttgtcaagcctcaaaagcagtggggaaactgaagcaggaaaaccggtatacragtatccaaaggctggctttttatcagtgttttcactaagcagcagccytgatactcaaatgatgaaccgagctaaacatatggctctcaaaagtgttttgtttctttccaaagttgcctgaagaacagtacaaatacccgctcacctttataactggactacagcctagatcgtaaatacgagctttttcttgcttagttcttaagcaatacagcactgtgcttcttttagaaggataggggcatctgaccacctctcctattccttgtgggtgctgtgttacgcgtgagcatacagcc

SEQ ID NO: 64678 - DNA, 600 bp, Chicken  19866894330842_2
gcaaaaaaagatgggaaagttgtgaggaaaaataaaaagtatttagtagtctgttagggaggccagaaagaaagaaattgcattgtatactatgtaggcaagggatcatgtctatgtgtatttacttctgtatcacaaagcagaaattaggacaaaaaggacaaagtcagagaaagactccaggactccttaaagaattttgtcaagcctcaaaagcagtggggaaactgaagcaggaaaaccggtatacragtatccaaaggctggctttttatcagtgttttcactaagcagcagccytgatactcaaatgatgaaccgagctaaacatatggctctcaaaagtgttttgtttctttccaaagttgcctgaagaacagtacaaatacccgctcacctttataactggactacagcctagatcgtaaatacgagctttttcttgcttagttcttaagcaatacagcactgtgcttcttttagaaggataggggcatctgaccacctctcctattccttgtgggtgctgtgttacgcgtgagcatacagccttaggttatggcgtaccaaagactgcgtgggttttttttttctttcaat

SEQ ID NO: 64679 - DNA, 600 bp, Chicken  19866894330846_1
aatctgctttactgtgtcttacatactgaagcaccagttcttgatgaaatcaggcacctgatgccagtgagattcactgacattttcagtgacagtaaggatcacacagctaatcctgttagcaaagagcagagatgcatggagaaattttagctttctgcctcagtggtaccccatggctatcttacatgttctggagccacgtgcttcctccttccatgcacattgtggtaatttacagaaaactcaacagtgggaaaatctcttgaaatctgaagaagtaaccatttttgaaatgaytccctgaagctcagtagcttcacttcacaaacaaacaaacctcttacacatacctacaggaaaaacaaacaaaacccttaattgtaaaagatgcctctctgcattcaaaatctttgccttgttttcctgtcaggcctcatttccaccaagggatctctttcctaaggccagcaggacagctgtgatataggaggagataaatacatatgacaaaggatgtgaaggggcagagccctgccttgactttgacagagataattgagttattgaggagttagtggaaaagttgactatttcttg

SEQ ID NO: 64680 - DNA, 600 bp, Chicken  19866894330851_1
tttttctaacaacccatggaggtggatctgaaagattttaatgacttggctgattttgcagaaggaaaccagcgccctcgtttggttttgcaggaaataatcctagtaattcactcgctttaattttggcatcctaattggtataatgctttacacattttattttataaatagattgcaaataggtgtcatccttcccagtgccttggaatacgtttaaagaagacaattcctccagaaatcctgccctctctgcgcaaaaggcacattcagaaagactgatgtagtgaaatatcacarcgacagaacactcgttaatgacaacctgaccaatttattaaaaactaggcaaaaggcacgatgaatggcattcttcaagtatttgcatagatgcacagagagcattgctgtaaacctttggtatgtggacatagaagaaagtgagatgtatttttgtatatgttcttccaagtaacattgtctttaaaaaaataccatattttagcagcttttactcctcctgcagtttccattatcatgcacttatacacatgtgaaaatttagaaggacttaaacatacctttcggagatgttatgct

SEQ ID NO: 64681 - DNA, 600 bp, Chicken  19866894330854_1
aagctgcataccagtaaaggcctgcttacaaaaaaaaaaggactcaacatcaaaatagcagagatcagaacatgcagtactgacataatgaggttgagaaaactgcaccaggcccatctgtgcaatgagtctaccacttcgttggtactaatttaataaaccaagtattacataaactatatttgtgcaggtttttaatatcaacagtgaagaaagcattcacattcattttttccttttctaggccagtctgcatctccatattactttcaaacaaaagcaagctactccttaaatacragtactacaatttctgactgaggtcctgcagcagtgcatatgtaaagacacaaatattcctmtaaccaggaatgctacgcaaccttacaaactcttctgtaggaatgtagcttttacaacgctgagtgatatacagtttgtcttcckaccacaagaaaagttattttaactgttagcaaggaatttaactaagtaactgatttacaccgcaatggctgcatgagatacatttttgccctatgtgctaatacagtgactgtgtctccctgactttctaccattccaattaatatctgatta

SEQ ID NO: 64682 - DNA, 600 bp, Chicken  19866894330854_2
gatcagaacatgcagtactgacataatgaggttgagaaaactgcaccaggcccatctgtgcaatgagtctaccacttcgttggtactaatttaataaaccaagtattacataaactatatttgtgcaggtttttaatatcaacagtgaagaaagcattcacattcattttttccttttctaggccagtctgcatctccatattactttcaaacaaaagcaagctactccttaaatacragtactacaatttctgactgaggtcctgcagcagtgcatatgtaaagacacaaatattcctmtaaccaggaatgctacgcaaccttacaaactcttctgtaggaatgtagcttttacaacgctgagtgatatacagtttgtcttcckaccacaagaaaagttattttaactgttagcaaggaatttaactaagtaactgatttacaccgcaatggctgcatgagatacatttttgccctatgtgctaatacagtgactgtgtctccctgactttctaccattccaattaatatctgattatacatacctcaaataaggcctaaagttgttagctctgggctactacccaaccttcttatatg

SEQ ID NO: 64683 - DNA, 600 bp, Chicken  19866894330854_3
ctaatttaataaaccaagtattacataaactatatttgtgcaggtttttaatatcaacagtgaagaaagcattcacattcattttttccttttctaggccagtctgcatctccatattactttcaaacaaaagcaagctactccttaaatacragtactacaatttctgactgaggtcctgcagcagtgcatatgtaaagacacaaatattcctmtaaccaggaatgctacgcaaccttacaaactcttctgtaggaatgtagcttttacaacgctgagtgatatacagtttgtcttcckaccacaagaaaagttattttaactgttagcaaggaatttaactaagtaactgatttacaccgcaatggctgcatgagatacatttttgccctatgtgctaatacagtgactgtgtctccctgactttctaccattccaattaatatctgattatacatacctcaaataaggcctaaagttgttagctctgggctactacccaaccttcttatatgctggggacagcatgaagtcaccttctttctctctgcagtcctccctaaactcatctctgttaccaaatacgaataattcaaaaat

SEQ ID NO: 64684 - DNA, 600 bp, Chicken  19866894330856_1
cataatgccgccctgttgtactacaataacaagtcattagaaaatagaggtgggagagagagatgaaggctatcccgttgtgcctacagtcctgctaaggagggtgcacccagtggcgcagcagtatttttctaaccagtttgttttcccaaccggtttgctctcctaaccaattttgctctcatagtgagtagagcttcacctttcttgtgctgtaagaagagtgattaaaggcagctgagagaaggtgagtcaacagtgactaaagaccatgcataaattcctaacgaatggctagcmggggagataaacagcagaaacatgaagcagccttactatactttgagtaacactttatcttcatggaaacgtcaccactgtgttatatcatttcctctccagatatggcagtggaagtgcaagaccttcccataatggggcataaggtgattgggatgtttttcatggctgccttgggagtgccatcagccataacagagcaagaacttgrgtcaaggagaagagctaataaatgacctttgcaatagtgtaatcaagtcaagcccaccaaaaaatgataggtgaggcaagagtttgctc

SEQ ID NO: 64685 - DNA, 600 bp, Chicken  19866894330856_2
gctgtaagaagagtgattaaaggcagctgagagaaggtgagtcaacagtgactaaagaccatgcataaattcctaacgaatggctagcmggggagataaacagcagaaacatgaagcagccttactatactttgagtaacactttatcttcatggaaacgtcaccactgtgttatatcatttcctctccagatatggcagtggaagtgcaagaccttcccataatggggcataaggtgattgggatgtttttcatggctgccttgggagtgccatcagccataacagagcaagaacttgrgtcaaggagaagagctaataaatgacctttgcaatagtgtaatcaagtcaagcccaccaaaaaatgataggtgaggcaagagtttgctcaggagctgagtccttcccgcagggcataaccgggcagtcagctagataggagcaaacttgcaacactggatttttttggagggcttgtgttatcctcgataaaaatctctttggtatttggggcagaatggctctgctggatgctccatccagctctttccattacctttgcaagtattttcattgccactctgccaaaatcatggtgttt

SEQ ID NO: 64686 - DNA, 599 bp, Chicken  19866894330872_1
  misc_feature (1)..(17): n is any nucleotide
nnnnnnnnnnnnnnnnntgtggcagcacagccgcagctgaggccgtcccgaagggaggaggtagcacacagagcttttgaagagatgatgagagtggtgcaattagggcttttttctttttttttttctttttaatttttttccccagtttttctgatgaatttgcattttaaattatttcttgctataattgtttcatctttcttttcactccgacttctataacaattattattatttcccaaggatttttagaaatactaaaagactacaatagaaaaacaatgccaaaaaaaaaaraaaaaaaaaaaaaagctttatataagaatgcctttttccctaaaatattcctttgagattaactattaggaagggaaaaaagagaagtcagcaaggagagggtgacactgacagggattttgcccygtgaagacaggcctgtaggttctgactcatcaccccaaccactgcacaaggagcagagaagttttcatccccacaggggggaaaccccaattactcatctctttcccccagggctcacggctgggtcccagctctaaacccaattatcctcaggcccagcgagcaaagacacc

SEQ ID NO: 64687 - DNA, 600 bp, Chicken  19866894330872_2
tctttttaatttttttccccagtttttctgatgaatttgcattttaaattatttcttgctataattgtttcatctttcttttcactccgacttctataacaattattattatttcccaaggatttttagaaatactaaaagactacaatagaaaaacaatgccaaaaaaaaaaraaaaaaaaaaaaaagctttatataagaatgcctttttccctaaaatattcctttgagattaactattaggaagggaaaaaagagaagtcagcaaggagagggtgacactgacagggattttgcccygtgaagacaggcctgtaggttctgactcatcaccccaaccactgcacaaggagcagagaagttttcatccccacaggggggaaaccccaattactcatctctttcccccagggctcacggctgggtcccagctctaaacccaattatcctcaggcccagcgagcaaagacaccttgacagctctgctgtcaggagagattagctcactgctgaatggctccaggaccctgttgtccccctggttccagttgcatgaagtcaggcagcaccgtggtggccgctctgctgtgcccaacgtgg

SEQ ID NO: 64688 - DNA, 600 bp, Chicken  19866894330874_1
gatgaaattgaatgaatagtagaaggtgtcaatttaaaaataaaaataaaaagtggggccatatggagagtgacaacagcaataattatttgtataacagagcttatctatcttgctgtgcaggaatatgaggattcagaatcttttcttcaagggtggaaaaagtcacatgattgtaattttaatggtcatcattgtaaaattagacaaaataaatttgtctaaacattcatttcatttttcgtcaaatatttgttgttacttttaattacttttccttactcacaacaattgacaacwttttaatgaaaatatctactgaattcatagcattaaattctaaaatacttgctcctgctcatctgcaaaaacagagccactaataaacatcaggaaagataccagaacagtttgtaaccttcagattttcatttgttgcaagcctggtgtcacagtctattttttgtaacttttttttttttcwctcagcaatacaattaaacagctttattttgaagtttgggggttagattaatttttcttagctgtagtgggagaaacactttttcaatatgcagataatttcataagtgaamattt

SEQ ID NO: 64689 - DNA, 600 bp, Chicken  19866894330874_2
atggtcatcattgtaaaattagacaaaataaatttgtctaaacattcatttcatttttcgtcaaatatttgttgttacttttaattacttttccttactcacaacaattgacaacwttttaatgaaaatatctactgaattcatagcattaaattctaaaatacttgctcctgctcatctgcaaaaacagagccactaataaacatcaggaaagataccagaacagtttgtaaccttcagattttcatttgttgcaagcctggtgtcacagtctattttttgtaacttttttttttttcwctcagcaatacaattaaacagctttattttgaagtttgggggttagattaatttttcttagctgtagtgggagaaacactttttcaatatgcagataatttcataagtgaamatttcttcagttactacatctgcaatgatttagaagtaatttggaatttaaatacatcaaattacttgttttgggaaaaagaaataaattcctatccttgtaacatcagcagtggccaaaaagtataaaatgatggcaaggacatttcagtttaagaattcaaactttcacactagctcccttattct

SEQ ID NO: 64690 - DNA, 535 bp, Chicken  19866894330874_3
aacwttttaatgaaaatatctactgaattcatagcattaaattctaaaatacttgctcctgctcatctgcaaaaacagagccactaataaacatcaggaaagataccagaacagtttgtaaccttcagattttcatttgttgcaagcctggtgtcacagtctattttttgtaacttttttttttttcwctcagcaatacaattaaacagctttattttgaagtttgggggttagattaatttttcttagctgtagtgggagaaacactttttcaatatgcagataatttcataagtgaamatttcttcagttactacatctgcaatgatttagaagtaatttggaatttaaatacatcaaattacttgttttgggaaaaagaaataaattcctatccttgtaacatcagcagtggccaaaaagtataaaatgatggcaaggacatttcagtttaagaattcaaactttcacactagctcccttattcttggttcacagcagttttaataaacagttttcttccttatgctgtgct

SEQ ID NO: 64691 - DNA, 600 bp, Chicken  19866894330875_1
tcctccttttccctacacaagggagggcagagcaaaggtctgctgggtattcctgagtggggagataaaaagaaagcaggacaaggaagatacgaagcagaacaaagaagctgctttaaaaatccaccagctggctattcccctgtctatttgcagacctgcaggactttctcctcccagcacttggatgtccagacaccaaggtccttgcatgccttgaaggctggcagtagatgaaggcacagtgtatatcacaagattagctgtttgctggggtttaaatgtacaccatggccatgrgaatgagggcgagtgcctccgggctccaaacaagacttgaggccaagccacctctctacaaccacagaggccagctggcaagcagttgggcctacgcaccatgaggaaaacaaggctcaagatgttgcctcttaggggcctagcacggaygagaagaggcattctgatgacttctgcgtgttttcytaaggaaatctaccgcagaagatgcatttrcacatctgcaggtgcaaaagtcatcccagggatgaaagaactatgctgtcattgcaggtggctcattagatctcacgtgagagt

SEQ ID NO: 64692 - DNA, 600 bp, Chicken  19866894330875_2
ttgcagacctgcaggactttctcctcccagcacttggatgtccagacaccaaggtccttgcatgccttgaaggctggcagtagatgaaggcacagtgtatatcacaagattagctgtttgctggggtttaaatgtacaccatggccatgrgaatgagggcgagtgcctccgggctccaaacaagacttgaggccaagccacctctctacaaccacagaggccagctggcaagcagttgggcctacgcaccatgaggaaaacaaggctcaagatgttgcctcttaggggcctagcacggaygagaagaggcattctgatgacttctgcgtgttttcytaaggaaatctaccgcagaagatgcatttrcacatctgcaggtgcaaaagtcatcccagggatgaaagaactatgctgtcattgcaggtggctcattagatctcacgtgagagtaaacttcttcccagcaccaaacaaacaaacaaacaaaaaccttaaaaaagaaaacaaacaacaaaaaacaaaacagatccatggaagtaactttctaatgaagttaggagaactgcttgaaagataaatccataacagaaacggcaccca

SEQ ID NO: 64693 - DNA, 600 bp, Chicken  19866894330875_3
gatgtccagacaccaaggtccttgcatgccttgaaggctggcagtagatgaaggcacagtgtatatcacaagattagctgtttgctggggtttaaatgtacaccatggccatgrgaatgagggcgagtgcctccgggctccaaacaagacttgaggccaagccacctctctacaaccacagaggccagctggcaagcagttgggcctacgcaccatgaggaaaacaaggctcaagatgttgcctcttaggggcctagcacggaygagaagaggcattctgatgacttctgcgtgttttcytaaggaaatctaccgcagaagatgcatttrcacatctgcaggtgcaaaagtcatcccagggatgaaagaactatgctgtcattgcaggtggctcattagatctcacgtgagagtaaacttcttcccagcaccaaacaaacaaacaaacaaaaaccttaaaaaagaaaacaaacaacaaaaaacaaaacagatccatggaagtaactttctaatgaagttaggagaactgcttgaaagataaatccataacagaaacggcacccagcagcctttttcattttagaagcctcttcagcctgc

SEQ ID NO: 64694 - DNA, 600 bp, Chicken  19866894330875_4
ttgaaggctggcagtagatgaaggcacagtgtatatcacaagattagctgtttgctggggtttaaatgtacaccatggccatgrgaatgagggcgagtgcctccgggctccaaacaagacttgaggccaagccacctctctacaaccacagaggccagctggcaagcagttgggcctacgcaccatgaggaaaacaaggctcaagatgttgcctcttaggggcctagcacggaygagaagaggcattctgatgacttctgcgtgttttcytaaggaaatctaccgcagaagatgcatttrcacatctgcaggtgcaaaagtcatcccagggatgaaagaactatgctgtcattgcaggtggctcattagatctcacgtgagagtaaacttcttcccagcaccaaacaaacaaacaaacaaaaaccttaaaaaagaaaacaaacaacaaaaaacaaaacagatccatggaagtaactttctaatgaagttaggagaactgcttgaaagataaatccataacagaaacggcacccagcagcctttttcattttagaagcctcttcagcctgcaaacaacttctttgaattactctggattgt

SEQ ID NO: 64695 - DNA, 599 bp, Chicken  19866894330877_1
  misc_feature (1)..(90): n is any nucleotide
nnnnnnnnnnnnnnnnnnnnnnnnnnnnnnnnnnnnnnnnnnnnnnnnnnnnnnnnnnnnnnnnnnnnnnnnnnnnnnnnnnnnnnnnnntctgggagcacgctgctgtcgaaagacttttcaaatatagagggtaggggaaaacagtgctcagggatagctgggaaacaaaaaggaattagctgggaagccccggacagtgcgggtgcccgagctgcaggacacccatgacgtggcctttgggcagaggcacatcgactgcagacacccagcacagagatgttctccccgcagagcackgcgagggcagyccccgcaccccccgcaggacggctctgtgccgggcacccatcagccccactcagagctcacagcagcagctcagggatgggacactgtgcggagggcagcggtggcrcagccycttgtgcccgcccrgccctcatggggaggatggatgccacccataggaaggtaatgttgcttctgccgtttcagttaggcaggagaacatcaccacacaatgctagcattagtgtctgcctttaaactccctcacaactccttggtaagcatttaagtatgaatgttccgctctt

SEQ ID NO: 64696 - DNA, 599 bp, Chicken  19866894330877_2
  misc_feature (1)..(79): n is any nucleotide
nnnnnnnnnnnnnnnnnnnnnnnnnnnnnnnnnnnnnnnnnnnnnnnnnnnnnnnnnnnnnnnnnnnnnnnnnnnnnnntctgggagcacgctgctgtcgaaagacttttcaaatatagagggtaggggaaaacagtgctcagggatagctgggaaacaaaaaggaattagctgggaagccccggacagtgcgggtgcccgagctgcaggacacccatgacgtggcctttgggcagaggcacatcgactgcagacacccagcacagagatgttctccccgcagagcackgcgagggcagyccccgcaccccccgcaggacggctctgtgccgggcacccatcagccccactcagagctcacagcagcagctcagggatgggacactgtgcggagggcagcggtggcrcagccycttgtgcccgcccrgccctcatggggaggatggatgccacccataggaaggtaatgttgcttctgccgtttcagttaggcaggagaacatcaccacacaatgctagcattagtgtctgcctttaaactccctcacaactccttggtaagcatttaagtatgaatgttccgctcttcttgtcatttc

SEQ ID NO: 64697 - DNA, 599 bp, Chicken  19866894330877_3
  misc_feature (1)..(31): n is any nucleotide
nnnnnnnnnnnnnnnnnnnnnnnnnnnnnnntctgggagcacgctgctgtcgaaagacttttcaaatatagagggtaggggaaaacagtgctcagggatagctgggaaacaaaaaggaattagctgggaagccccggacagtgcgggtgcccgagctgcaggacacccatgacgtggcctttgggcagaggcacatcgactgcagacacccagcacagagatgttctccccgcagagcackgcgagggcagyccccgcaccccccgcaggacggctctgtgccgggcacccatcagcccyactcagagctcacagcagcagctcagggatgggacactgtgcggagggcagcggtggcrcagccycttgtgcccgcccrgccctcatggggaggatggatgccacccataggaaggtaatgttgcttctgccgtttcagttaggcaggagaacatcaccacacaatgctagcattagtgtctgcctttaaactccctcacaactccttggtaagcatttaagtatgaatgttccgctcttcttgtcatttctttgttatattctgtttctttaatgttgtgtccctggtaacaatgtgc

SEQ ID NO: 64698 - DNA, 599 bp, Chicken  19866894330877_4
  misc_feature (1)..(30): n is any nucleotide
nnnnnnnnnnnnnnnnnnnnnnnnnnnnnntctgggagcacgctgctgtcgaaagacttttcaaatatagagggtaggggaaaacagtgctcagggatagctgggaaacaaaaaggaattagctgggaagccccggacagtgcgggtgcccgagctgcaggacacccatgacgtggcctttgggcagaggcacatcgactgcagacacccagcacagagatgttctccccgcagagcackgcgagggcagyccccgcaccccccgcaggacggctctgtgccgggcacccatcagccccyctcagagctcacagcagcagctcagggatgggacactgtgcggagggcagcggtggcrcagccycttgtgcccgcccrgccctcatggggaggatggatgccacccataggaaggtaatgttgcttctgccgtttcagttaggcaggagaacatcaccacacaatgctagcattagtgtctgcctttaaactccctcacaactccttggtaagcatttaagtatgaatgttccgctcttcttgtcatttctttgttatattctgtttctttaatgttgtgtccctggtaacaatgtgca

SEQ ID NO: 64699 - DNA, 600 bp, Chicken  19866894330877_5
tttcaaatatagagggtaggggaaaacagtgctcagggatagctgggaaacaaaaaggaattagctgggaagccccggacagtgcgggtgcccgagctgcaggacacccatgacgtggcctttgggcagaggcacatcgactgcagacacccagcacagagatgttctccccgcagagcackgcgagggcagyccccgcaccccccgcaggacggctctgtgccgggcacccatcagccccactcagagctcacagcagcagctcagggatgggacactgtgcggagggcagcggtggcrcagccycttgtgcccgcccrgccctcatggggaggatggatgccacccataggaaggtaatgttgcttctgccgtttcagttaggcaggagaacatcaccacacaatgctagcattagtgtctgcctttaaactccctcacaactccttggtaagcatttaagtatgaatgttccgctcttcttgtcatttctttgttatattctgtttctttaatgttgtgtccctggtaacaatgtgcatgatgtagctgctcccaccgcagggatattgctttagtgtctagaagtgtttagattgt

SEQ ID NO: 64700 - DNA, 600 bp, Chicken  19866894330877_6
atatagagggtaggggaaaacagtgctcagggatagctgggaaacaaaaaggaattagctgggaagccccggacagtgcgggtgcccgagctgcaggacacccatgacgtggcctttgggcagaggcacatcgactgcagacacccagcacagagatgttctccccgcagagcackgcgagggcagyccccgcaccccccgcaggacggctctgtgccgggcacccatcagccccactcagagctcacagcagcagctcagggatgggacactgtgcggagggcagcggtggcrcagccycttgtgcccgcccrgccctcatggggaggatggatgccacccataggaaggtaatgttgcttctgccgtttcagttaggcaggagaacatcaccacacaatgctagcattagtgtctgcctttaaactccctcacaactccttggtaagcatttaagtatgaatgttccgctcttcttgtcatttctttgttatattctgtttctttaatgttgtgtccctggtaacaatgtgcatgatgtagctgctcccaccgcagggatattgctttagtgtctagaagtgtttagattgtgatact

SEQ ID NO: 64701 - DNA, 600 bp, Chicken  19866894330877_7
ggaaaacagtgctcagggatagctgggaaacaaaaaggaattagctgggaagccccggacagtgcgggtgcccgagctgcaggacacccatgacgtggcctttgggcagaggcacatcgactgcagacacccagcacagagatgttctccccgcagagcackgcgagggcagyccccgcaccccccgcaggacggctctgtgccgggcacccatcagccccactcagagctcacagcagcagctcagggatgggacactgtgcggagggcagcggtggcrcagccycttgtgcccgcccrgccctcatggggaggatggatgccacccataggaaggtaatgttgcttctgccgtttcagttaggcaggagaacatcaccacacaatgctagcattagtgtctgcctttaaactccctcacaactccttggtaagcatttaagtatgaatgttccgctcttcttgtcatttctttgttatattctgtttctttaatgttgtgtccctggtaacaatgtgcatgatgtagctgctcccaccgcagggatattgctttagtgtctagaagtgtttagattgtgatacttttatctctgaaga

SEQ ID NO: 64702 - DNA, 600 bp, Chicken  19866894330879_1
cgtttctctgactccatctctgtaagtctcctcttcttccattttcctttttttcatgtttgttctgacactttctgttcctctttcttcacacagtggcctcatgtaccctctctcagaatatgtcactttgactatctatgctctttgccaccagacaaatattagatgacaaatattacatctctgctcctggctgacactactgaaggtcctctacagctcattttctctgtacatagctgtacagttttctcactatcaaaatatccatgggctcttcaaagcccacacttgaamtatgacctaggtataataggaaaaattgagtaacacaactagaacgtaacgagttctgtaatattgctggtgtttttacctgaaagagacaaactctgtcagcgagcttcctccrtgagagcccagaaaagactcaaaaccacacaaataatcttgtgaaataaaggcaggacacatttgtctgctagttatggaagggaaattacataaaacttgtagatttgcacgtcaatgagaggaataagagaggcaaaaccgagacctgtaacaatgccatttgacctgagcaccgcacagatt

SEQ ID NO: 64703 - DNA, 600 bp, Chicken  19866894330879_2
tcagaatatgtcactttgactatctatgctctttgccaccagacaaatattagatgacaaatattacatctctgctcctggctgacactactgaaggtcctctacagctcattttctctgtacatagctgtacagttttctcactatcaaaatatccatgggctcttcaaagcccacacttgaamtatgacctaggtataataggaaaaattgagtaacacaactagaacgtaacgagttctgtaatattgctggtgtttttacctgaaagagacaaactctgtcagcgagcttcctccrtgagagcccagaaaagactcaaaaccacacaaataatcttgtgaaataaaggcaggacacatttgtctgctagttatggaagggaaattacataaaacttgtagatttgcacgtcaatgagaggaataagagaggcaaaaccgagacctgtaacaatgccatttgacctgagcaccgcacagattgctgatgcataaatattttcacgttaaagagagtgacagagctttgagaggaatctggatcacgaacawgtagcatgaactggggatttgttcactcacttggacctgcctgctc

SEQ ID NO: 64704 - DNA, 600 bp, Chicken  19866894330879_3
gtgtttttacctgaaagagacaaactctgtcagcgagcttcctccrtgagagcccagaaaagactcaaaaccacacaaataatcttgtgaaataaaggcaggacacatttgtctgctagttatggaagggaaattacataaaacttgtagatttgcacgtcaatgagaggaataagagaggcaaaaccgagacctgtaacaatgccatttgacctgagcaccgcacagattgctgatgcataaatattttcacgttaaagagagtgacagagctttgagaggaatctggatcacgaacawgtagcatgaactggggatttgttcactcacttggacctgcctgctccaaaggatgttgtgtccactccatgctacacggaccttccattctgtaacaagtttggaagatagttctgggttgctgtatatcctaatcatggccatttgacctgcttcatggtcccagggtaagtgtgcatcatttggcttttcaccactgcctgcagccattggtaagagggcaactccaccgtataagcacagcagaggccacaacaaaaatacaggtctcatgttctctgttgctgcaattgcacaaca

SEQ ID NO: 64705 - DNA, 600 bp, Chicken  19866894330882_1
cccacagtgtgtactttcttcgtggtgtaaaagacgccttaaagtgccactctacagtcatgctttactaaaaataacagagctagtgggttgtgcctgagcattatcagcttcctgtgatctactattttcctgtaagctttggagaccatttttagctgtctactcttggcctcagattttaaacttctttacttctaataattaggcaattagcttctctctcctcaacttaattgccagtgtagtccagctgactttccatagaagagacaaaggaaacttgggcaaggaaatgastgtagtcataatgagaaaaataggaaaaaagactaaacaagagcagtcatctttgtgcctctttcattatgcctgttcacttgtaacattgtgttctgtaagcagaaagcagctcccctatagttatcaaaattgtttcctcatctgaaatgctgtgctattgaataataagttgcagtgccactgtacagccatttgaacagtgccgtttgagcaatggcttgttttcttcctgtggtggtgagggcttctcttcagattttaccagggccatatgctagaggtgttcttcgtgtatta

SEQ ID NO: 64706 - DNA, 600 bp, Chicken  19866894330884_1
cacagctcttgtagttcaggaatctccaagggaagacccaagggagctctggaaaaggattttctgtctgcattcaggaaaccagaaccagcatacgctaagccagcagaagcacttccatctgccaagtcacggctgagcttggggggaggcaagctggacttcacaggaataggcagcctgctgcctcgtgggctctggatgggtttgtagtctaaccccttgatcaagctgagggccagctccagcctgttcccactcagcgatgagctgggggtcatgcggtcctctgcaaaatcrtcacatttcccgttccccttcactcccttatccacatcttcatccttctgctgcggagcgctggcctccactgttgtgtccagggactcaacagaggacgcaggcgtgccctcctccatgctctccccatccacaggccctctggckccagcaggctccgttgggtcacatacggatgactcctcgttgcccatgctcactgaccatcggctggacagcccgcaggagatgctcctggccacctttcgtggcactttgcaaattgcttcatagtcggcatcagccacacgcagtgcagca

SEQ ID NO: 64707 - DNA, 600 bp, Chicken  19866894330884_2
ggaggcaagctggacttcacaggaataggcagcctgctgcctcgtgggctctggatgggtttgtagtctaaccccttgatcaagctgagggccagctccagcctgttcccactcagcgatgagctgggggtcatgcggtcctctgcaaaatcrtcacatttcccgttccccttcactcccttatccacatcttcatccttctgctgcggagcgctggcctccactgttgtgtccagggactcaacagaggacgcaggcgtgccctcctccatgctctccccatccacaggccctctggckccagcaggctccgttgggtcacatacggatgactcctcgttgcccatgctcactgaccatcggctggacagcccgcaggagatgctcctggccacctttcgtggcactttgcaaattgcttcatagtcggcatcagccacacgcagtgcagcacagccccggcatcgccttgggcggctggcagctccctctgaagcatggcagctgtgaggctccaggctgtgctcatcttggtccgtccagtattcgtacccagaataagcgaagtcctcctgaaggagggcagcgtatcgcgcgtcg

SEQ ID NO: 64708 - DNA, 600 bp, Chicken  19866894330891_1
atcccctgaattaaaggaaaccttttagtacttcaaacttggaaagactgagcaaccaaagcatgacatatttcatgacatatcatgaaatgcctactacttaactgcctcaccttattaaacagtaaatattactgcccaaacttgccatcagattcttgggctaacagatccctacaggtcttctgaggaaagcactgacaagtatggctcaaagggagagatgggctgaacttgctggaacttacctgaaagagcgtattagcaccttgcaaccttgcaggactgagaggagcaacwgggctgagggtactccagaaatgaatgctggagagcaagggacttggggtcagcaagatgggagtctgcaaaacacacagagacagtcagtcgtgtgaaagctgcacttggagtaacgcactgcatatgtaaatctggccacaataatccaactcctccagctgcggagggctggatcccattttaggaactcccattctctccttctgcctcctcccacctcctcctcttcccttcaaaccccacagcagcagcagcagccatcagttctccctcccctttcttagcaactggccctct

SEQ ID NO: 64709 - DNA, 600 bp, Chicken  19866894330891_2
ttctctccttctgcctcctcccacctcctcctcttcccttcaaaccccacagcagcagcagcagccatcagttctccctcccctttcttagcaactggccctcttctcccagcagctgccaaaccctgctgtaacctacagcaaattgccttctcctgcaattcatacacagcacctgcaagtgacttaggagaactcagcttatgaatttaaaatgagcacagagcgggcacacacacggtctgagtgatgtgggggatgtaagctacaacaaaagaaatgcacactcagcttctgaaygctctggatgttccaggtttaccagccaaacactctgaaggattccaaaagtgcaactggacttgatttttttctcctgtcttcagccatttcaattttctatcagcagtttccctgcagtttcactccaatttattacaggaaggagattaaatgtatacagaacaacctagcagcatagttggattcagttctcttccaaattttccatgaggaacgaaagctttcctttcccacgcgctgagaacaaccaaattatgcagccattgttatcaccacattaagtcacattattctggt

SEQ ID NO: 64710 - DNA, 600 bp, Chicken  19866894330893_1
atcacatgtttttaaggtaaggtgtggtctgcaggtcagttaacacctttcagtcaaacatatgctccttttctttgaagcctatgttttagctcatctgtagaagccggtgcctcaacattttgaggaaggaaattggtaacagttcttaaaaccatagatgagtcaaaggtaaatacactgtagcatgatttaccgcaagctaagctggagatatccacaggagtactttcatagcagtcctaccgccagtacaggaagcaagtacaaagccagaactgctaggaaaacatcccttcrtgtagcacttgggtccgtggacttgtttggtgtttggctatgacttctggctttttagctggaggatgtggagaagtaggtgaaggagtggaatgcaggaatggacagataaaatctcatactgctacctttattattttttcataatcaaaaactgaaactaccttaattaagaagaaaaatagtgtctatcttaaaaaaataataatttaaaaaataacaggaaaataactaattaattctgaagtaccaacttaaggagcttctcaacagcagtgatacactcaggaatctgtatac

SEQ ID NO: 64711 - DNA, 600 bp, Chicken  19866894330894_1
gtgggtatttccactcccaaaaataaaattgacaaagtttgattgaggtttttcactcatgtagtgcaaagcacgtagaatccacatgagcaacctccatccccaaatgcagtgctctacaattgcagatagactcttcactgctggcactcatagctcactggaattgaaatatttggcctattaccccacagtctggcatgcatcctgtagtgcttgtgcttaatgtaaagcatacgctatgcatgcacaccgaaaatcaggactgaagcattgaattactccactagggcatggtgygtacatgttagtctgcttgatttctcacgtgtagaagtaatttaaaagcaaatcgatgcattcactgagctaaaataatttttgaaaagccctttcagaatgctttgatttttaagttttggtggatatctggaactgccagaagctatctgattttcttatttttatttgcctctaggagagtatttctttattttaatatggaatttgacctaagggaagaatcatccctaaccacagctaggaaagcagagggtggtgatggtgcacaagagtctgtgtaacttatggctgttagtt

SEQ ID NO: 64712 - DNA, 600 bp, Chicken  19866894330898_1
tagataaatgtagtttcatagaccttccttttaaatttaacattaaaagaaaaatatgaatggaagttgcaatggaatttgtcttgcatgacaaagaactacaggatttaactctaatagtctggtacactggcagtagtagacaatttgctcacatactaggtaggtggttggtccctgaagtgagccatcttgagcacttgttttaatcctcatcctatgtacattcgtcactaaatgtttagagtcctacgttgaagacgcaggcacagtagattaatcttttcctacacgtctccygtgaaagaaaggtgaaactctagtctaagtgaacatttgaagataacagatttctagtgtccaaataaaaaaaatacccccttttactatatcacctacataacatagatcacactgrgttgcataacttgctgtgaactcacttcatgtstttgttcagatatttctgccatcaagatctatcatcagtattacgaccagrcaaaaagctatatttctagagtgagctgaaaacagttacattttaaagtgatcttctcctttaaatctgtctgtgtttttatttaaatattttgagat

SEQ ID NO: 64713 - DNA, 600 bp, Chicken  19866894330898_2
agtctggtacactggcagtagtagacaatttgctcacatactaggtaggtggttggtccctgaagtgagccatcttgagcacttgttttaatcctcatcctatgtacattcgtcactaaatgtttagagtcctacgttgaagacgcaggcacagtagattaatcttttcctacacgtctccygtgaaagaaaggtgaaactctagtctaagtgaacatttgaagataacagatttctagtgtccaaataaaaaaaatacccccttttactatatcacctacataacatagatcacactgrgttgcataacttgctgtgaactcacttcatgtstttgttcagatatttctgccatcaagatctatcatcagtattacgaccagrcaaaaagctatatttctagagtgagctgaaaacagttacattttaaagtgatcttctcctttaaatctgtctgtgtttttatttaaatattttgagatgtgaagcttctcaatgggctctacttgttgctataaacattttgtccatattaagtgattaggcaggacttttgatattcttgtgaaaaatagaaatttwcaaaattcagaaatccct

SEQ ID NO: 64714 - DNA, 600 bp, Chicken  19866894330898_3
tcacatactaggtaggtggttggtccctgaagtgagccatcttgagcacttgttttaatcctcatcctatgtacattcgtcactaaatgtttagagtcctacgttgaagacgcaggcacagtagattaatcttttcctacacgtctccygtgaaagaaaggtgaaactctagtctaagtgaacatttgaagataacagatttctagtgtccaaataaaaaaaatacccccttttactatatcacctacataacatagatcacactgrgttgcataacttgctgtgaactcacttcatgtstttgttcagatatttctgccatcaagatctatcatcagtattacgaccagrcaaaaagctatatttctagagtgagctgaaaacagttacattttaaagtgatcttctcctttaaatctgtctgtgtttttatttaaatattttgagatgtgaagcttctcaatgggctctacttgttgctataaacattttgtccatattaagtgattaggcaggacttttgatattcttgtgaaaaatagaaatttwcaaaattcagaaatccctagaaagaaactcactgggatctagtgcaccctc

SEQ ID NO: 64715 - DNA, 600 bp, Chicken  19866894330898_4
gttttaatcctcatcctatgtacattcgtcactaaatgtttagagtcctacgttgaagacgcaggcacagtagattaatcttttcctacacgtctccygtgaaagaaaggtgaaactctagtctaagtgaacatttgaagataacagatttctagtgtccaaataaaaaaaatacccccttttactatatcacctacataacatagatcacactgrgttgcataacttgctgtgaactcacttcatgtstttgttcagatatttctgccatcaagatctatcatcagtattacgaccagrcaaaaagctatatttctagagtgagctgaaaacagttacattttaaagtgatcttctcctttaaatctgtctgtgtttttatttaaatattttgagatgtgaagcttctcaatgggctctacttgttgctataaacattttgtccatattaagtgattaggcaggacttttgatattcttgtgaaaaatagaaatttwcaaaattcagaaatccctagaaagaaactcactgggatctagtgcaccctcagcaaatttgccgataccacctagctgtgtggtgcagtcagcatgtctgag

SEQ ID NO: 64716 - DNA, 565 bp, Chicken  19866894330898_5
taacatagatcacactgrgttgcataacttgctgtgaactcacttcatgtstttgttcagatatttctgccatcaagatctatcatcagtattacgaccagrcaaaaagctatatttctagagtgagctgaaaacagttacattttaaagtgatcttctcctttaaatctgtctgtgtttttatttaaatattttgagatgtgaagcttctcaatgggctctacttgttgctataaacattttgtccatattaagtgattaggcaggacttttgatattcttgtgaaaaatagaaatttwcaaaattcagaaatccctagaaagaaactcactgggatctagtgcaccctcagcaaatttgccgataccacctagctgtgtggtgcagtcagcatgtctgagggacaatatgccattgaggaaagcctaggcatgctgagcagtgggcccaggagaacatcatgagattcaatacatccaagtgcaaagtctttcactggggtcatggcaactcccactattagtacaagcagaacgatgggatgggagcagagccctgcagaaa

SEQ ID NO: 64717 - DNA, 600 bp, Chicken  19866894330903_1
gaaggaatgggaaagaaataagacccagttgtgacgatcacactcttgtcagcaggatacagctaccctctttactgtatttgaggcttttcctaaagttagcataaaaggaagtccagatcaagttagtgcagtaggcacattccagcttgagaaatcttctgcttaatcctcttctggttagcttcgttttgccagctccaagcctaacttcaaggtcagctacttcagggaagaaggggatatttctcagtttttcagaaaacacacaggcctacaggatttaatataaaaaaggtrcttttcttggtgcctggttatcaagtgtctgccatgcaactttccacattctccttgccatcaacagaaacctgcacaaagctaccttgtgctaaaatctcgagtttcttctcatttccacaagagacactagctgcaagcattttcccagggttccagccaaaactttcattctgcttccttgtgccctcatttgggagcctatcctctctttctgcccactgtcatagtgcagctattgttctgagagatgatttcatgccaacacaccaaaagatactagtgtgatgtagaccctgt

SEQ ID NO: 64718 - DNA, 600 bp, Chicken  19866894330903_2
aagttcacgttacaatcacagcacaaaggaagattttaaaaaaacaaggttttgttgtagcagtaaatgtgccaccacataccttccacatagccaaaatgttttaaaacctgaagagtcaccaaggcaagactagaaggaaacttggacctgaatttgatgctactgctttcctgtctccagagtattccaagaattagctggagggaaaggtgacataaattttaaatgtatggttggtgtggggtgtggatgtatgtacacatagactcttggtgtacaacttgtctttaaatcccmcagtatcatgatggaacagaatcaccagctagtagaagaacatgatcttatcaacagtttgcatcaattatacaccatgaattttctaactgtaatgttttatgtatagacagtgctgtcctttcaactgcattgaacagtctgtattatgacaagactggtacatgcycaaagaatactatggagtcaaaaaataaagaagaaaacccaagaagaaaacccaagcttgctggttcagattgaatattctttaaagaatcttttkttttgtcaaattcctaataactgtgaattttagtg

SEQ ID NO: 64719 - DNA, 600 bp, Chicken  19866894330903_3
tttcctgtctccagagtattccaagaattagctggagggaaaggtgacataaattttaaatgtatggttggtgtggggtgtggatgtatgtacacatagactcttggtgtacaacttgtctttaaatcccmcagtatcatgatggaacagaatcaccagctagtagaagaacatgatcttatcaacagtttgcatcaattatacaccatgaattttctaactgtaatgttttatgtatagacagtgctgtcctttcaactgcattgaacagtctgtattatgacaagactggtacatgcycaaagaatactatggagtcaaaaaataaagaagaaaacccaagaagaaaacccaagcttgctggttcagattgaatattctttaaagaatcttttkttttgtcaaattcctaataactgtgaattttagtgagtcttaagttcaaaatactgtgtgtattttgaatcacaccagacatagcacttggactctagccacgtccagcctggccttgaatgcctccaaggatggggcatccacaacctccttgggcaacctgttccagtgtgtcaccaccttctgtgtgaaaaacttcctcct

SEQ ID NO: 64720 - DNA, 600 bp, Chicken  19866894330903_4
tagactcttggtgtacaacttgtctttaaatcccmcagtatcatgatggaacagaatcaccagctagtagaagaacatgatcttatcaacagtttgcatcaattatacaccatgaattttctaactgtaatgttttatgtatagacagtgctgtcctttcaactgcattgaacagtctgtattatgacaagactggtacatgcycaaagaatactatggagtcaaaaaataaagaagaaaacccaagaagaaaacccaagcttgctggttcagattgaatattctttaaagaatcttttkttttgtcaaattcctaataactgtgaattttagtgagtcttaagttcaaaatactgtgtgtattttgaatcacaccagacatagcacttggactctagccacgtccagcctggccttgaatgcctccaaggatggggcatccacaacctccttgggcaacctgttccagtgtgtcaccaccttctgtgtgaaaaacttcctcctaatagctaacctaaacctcccctgtctcagtttaaaaccattcccccttgagtcaaagccatttccctagtgtcaagagaagcaagtgatatttgt

SEQ ID NO: 64721 - DNA, 600 bp, Chicken  19866894330910_1
taaaacacaattttggaggaaaaaaaaaccatggaaaaaaacatggcccagtgtagtcagaattttgactctcagagatctctctgaaatccgtgtaaggaatagagggaaaaaaaaaatcaatcacatttcaagtattttttaatttgaatctgagattacaattcctttttttttttttttttggtgaggtggggagagggggattctgtaaaatgttgacataaacaacatgtttaattcctttaacaggataggccagtagattgggaaaaataatgaaatgtaacattaaaaacyacatttacaaagatgttaatgctcagaattgcagtaattgagattcacatctctgtggagtgttgggacaccaagagaagagtggctgacattttctgcctctgtcagcctgtgagcctgctaggccagctcctgagatgaagatgctagattcctgttgttcttcttgcttaatggagattagcaattactccctgggttgttttcttagacttccagtttaagcaaccaatcattaacttgatttctttggaagaagaaatccaaaatataaaagctgtccactttaaataatgactc

SEQ ID NO: 64722 - DNA, 599 bp, Chicken  19866894330912_1
  misc_feature (1)..(142): n is any nucleotide
nnnnnnnnnnnnnnnnnnnnnnnnnnnnnnnnnnnnnnnnnnnnnnnnnnnnnnnnnnnnnnnnnnnnnnnnnnnnnnnnnnnnnnnnnnnnnnnnnnnnnnnnnnnnnnnnnnnnnnnnnnnnnnnnnnnnnnnnnnnnnnctgttgagcaatagcagaaggctcttctatcctaatttgttgcaaatagcccttaacattttttttaaacacgggacttaattatgaaagagcaatggattggcatttggctttcaaattcaatagagggatgtgattgtctcccctctactctgcckttgtgaggccccgtctggagtactgcatccaggcctggagactccagtacaggagagatgtggagcaggtccagagaagtgccacaaagatgctcagagggctggagcatctctattataaacaaaggctgagggagctggacttgttcagcctggaggagagaaggctctggggacacctcattgcacagtcctgaattcaagaactaagtcaatgattggcagtacgaaaaattttatggaaaaagttgaaattagtggctgagttggtagtgaccctgaccaagttgaatgatgtg

SEQ ID NO: 64723 - DNA, 600 bp, Chicken  19866894330915_1
ggaccaagggaaaatttggtgtgggatatggattcttagaaatagattctgtggccacagagtatttgatgaagacaagcaagtttcacgggtaaccaggaagcctgactcttcgaaacattcattgtccttccaaatcatagctgtctttcagaaatacagcaagcttcatgaaatgcaaaggcacctaagtgctacaagaaattcagcatcaattgctgccatggtttcacaaagggatgtgggtatcagtaaccaggtattacgaccttgatgctgaaatgcccgggttgtaaatcktatcacatacatattacaggaggagtcacattcagatggcctcaaagatcagggagtctctgtttcttcctatcctgcatttaagtcctacaactccttctccaagctggctcagaaaccccaggataatattaactcctgtggttctatggcatttctaagtcaagtctaggcaggaacatgaaaatgggagcaggactacaatttgtgttcccattgaaggaaaaaggtgaaacttaaaaacagttgaacacaattttggtctatatttggagaagtggagaagacatttcatttaca

SEQ ID NO: 64724 - DNA, 599 bp, Chicken  19866894330918_1
  misc_feature (1)..(49): n is any nucleotide
nnnnnnnnnnnnnnnnnnnnnnnnnnnnnnnnnnnnnnnnnnnnnnnnntgtgctgactgggttttgattaaagcctgtggaggactggaagtggaaacattggtgtacacaaagaaaacctgttctcacagtatttcctgcctctcacacagcagcagctcagaaattctcttctgttttcgtaggttgttgagaaacattgaaggatcccgatagccctttagacaacgtccaaatgctccagcactcagccaaactgaccttgacctcctaatcctctatcagccctgaccataagwtcttaggtgaggaaagaattaatgtggtttgtgctgctaagttgaaatcttaagtgtccttgagcttccttttgttaagaaaaaaaaaaaagaggtagtggcaggagaggcaggtaggatggggaccatgtcagaaacaaatacaagcagcaaggtttacatgaaacattttattaactgcacagatataaktgcatccaaccraagacactttggttgtcgaatgagtgtttgacaaagcgatttctacttctmtcacgcccctccaagttttttgcctgaggagcacagcactggct

SEQ ID NO: 64725 - DNA, 600 bp, Chicken  19866894330918_2
gagaaacattgaaggatcccgatagccctttagacaacgtccaaatgctccagcactcagccaaactgaccttgacctcctaatcctctatcagccctgaccataagwtcttaggtgaggaaagaattaatgtggtttgtgctgctaagttgaaatcttaagtgtccttgagcttccttttgttaagaaaaaaaaaaaagaggtagtggcaggagaggcaggtaggatggggaccatgtcagaaacaaatacaagcagcaaggtttacatgaaacattttattaactgcacagatataaktgcatccaaccraagacactttggttgtcgaatgagtgtttgacaaagcgatttctacttctmtcacgcccctccaagttttttgcctgaggagcacagcactggcttttgcttgcaagttcttccacttttgaggctcagaatcagtatctggtgtattcaactgacatttgggtatctggaaatggtcagtgtttctggaaaccaggccacagctgtgagagcaaagggactcaatgactcatttctggatgccaagtgttaacaccatgtcacatacagttcaagcaggcgttgtca

SEQ ID NO: 64726 - DNA, 600 bp, Chicken  19866894330918_3
aggatcccgatagccctttagacaacgtccaaatgctccagcactcagccaaactgaccttgacctcctaatcctctatcagccctgaccataagwtcttaggtgaggaaagaattaatgtggtttgtgctgctaagttgaaatcttaagtgtccttgagcttccttttgttaagaaaaaaaaaaaagaggtagtggcaggagaggcaggtaggatggggaccatgtcagaaacaaatacaagcagcaaggtttacatgaaacattttattaactgcacagatataaktgcatccaaccraagacactttggttgtcgaatgagtgtttgacaaagcgatttctacttctmtcacgcccctccaagttttttgcctgaggagcacagcactggcttttgcttgcaagttcttccacttttgaggctcagaatcagtatctggtgtattcaactgacatttgggtatctggaaatggtcagtgtttctggaaaccaggccacagctgtgagagcaaagggactcaatgactcatttctggatgccaagtgttaacaccatgtcacatacagttcaagcaggcgttgtcactccttgggaag

SEQ ID NO: 64727 - DNA, 600 bp, Chicken  19866894330918_4
aactgaccttgacctcctaatcctctatcagccctgaccataagwtcttaggtgaggaaagaattaatgtggtttgtgctgctaagttgaaatcttaagtgtccttgagcttccttttgttaagaaaaaaaaaaaagaggtagtggcaggagaggcaggtaggatggggaccatgtcagaaacaaatacaagcagcaaggtttacatgaaacattttattaactgcacagatataaktgcatccaaccraagacactttggttgtcgaatgagtgtttgacaaagcgatttctacttctmtcacgcccctccaagttttttgcctgaggagcacagcactggcttttgcttgcaagttcttccacttttgaggctcagaatcagtatctggtgtattcaactgacatttgggtatctggaaatggtcagtgtttctggaaaccaggccacagctgtgagagcaaagggactcaatgactcatttctggatgccaagtgttaacaccatgtcacatacagttcaagcaggcgttgtcactccttgggaaggaggaggaggaggaagatgaaggaggtacttgggcaggaggtgacacagga

SEQ ID NO: 64728 - DNA, 600 bp, Chicken  19866894330920_1
cattcatttccatgcttgagctgacttgcacatcaagacatatggacataaaatgcgtgaataaattaacaaaaattgccaatgttcagccttctccaaaatcaggggggcagcctgcagacttcaggcagcgtggatgaaccacaaatgaacctgaagccacccggaggtcagccagtggggcaggctctctgagggctccccatccctgctgccctcagccaccccattagctgcttcctgcagaccaatggagagggtggcaagcagactggtaatggcttggtgtttacagagcakaagtgtttaagtgcagagtttgggcagcttgggtccatgctgttcctcttctgccttcgtttgtaaactggcacagtgtttgtctggggagctaatggaattctctggggagctaatggaattctctttgtagtgtttgtctgtcaactgccattattaattgatgcaattgtttctttgctaatatttacctaggattttagcatggaagtgactatacagataattctagtgcaaccttagaaggaagtcaatgccttaatcagggaaaggacttgctactcttgaattgttattcaa

SEQ ID NO: 64729 - DNA, 600 bp, Chicken  19866894330933_1
cctaagacaagcatgccttttgccaatgattattaggtgtataatattgagtacctcacattcattagggcagacttttacttctttatttgtttttcttacagcttgctgctgtagaaggaattttggagctcatactcatttccttcaaaattccatgcatttttccagataacaaattacaaaagtatactgctgacacaaggcttaagaccagtgtagagtatacctgatttgtaacttgtactgcgtgttacctggtctgttcccagtgtcaaacgattgattatagcaattggwgagttgtgctggtgactggggataatcattttgacagaaagtttactgcctaatcaaagaaggaaggttttatattatattctgctcacattctgtttttcattttgtttcactttattttaatttcttttgtgcaaggttgagttaaactgtttcagcccagctgacgttaagaaaagatgaatatttgtaaggaagtaaaggcaccgtgaaatgttacaaataaatagaaatatgctcaaaagtagattttaaaagtccaaatctcaagaactctgagaatttgttgactgcagtggt

SEQ ID NO: 64730 - DNA, 600 bp, Chicken  19866894330940_1
gagctaacaggtgccaaattggactggctggcaaacaggagccctgcatctgaagaggctcaaggtctgaggtggtgactatggcacacagtttggagcgattatctgataggtgtggagtctctgctgatatttgagacctctgtgaatgtaggtgcagtgagatggtggtgtatttttatcacaaatgagcttcaactctaatcagctgaagaggagcaagacttgattgtagagctgaattatgtagtgtcggtgatcctgtgagtgctggcagaaacactgctctttgtgtgtgamtgactttgtcagcatggtgtgctttaacgtgtccctctaaaataagcattcagtcctgaagctggctgaggagcacaagaacagctacaccccatggaccagggacaggagatacctctttacctcttttgtctgagaatgtgtcatagtggacttcagcacctgtaactgagtaatctggatcctagagtaccctgggttcattgatttgtttatttatttattttcttcaagatctttaactcatggcttgttattttttttttttttaattttattttaatgtttgaaatgtttata

SEQ ID NO: 64731 - DNA, 600 bp, Chicken  19866894330944_1
tctagctgcagcaaaacgtaagtaactttagtggttaactctgaagcccagtcagtgtgggtcagacaggcctccctctgttccttgccccctgagaaggtctttccaagctcttcctcgagagttacctgaagagctacaaaagctagaaagctttgcttgcaggtgttgctctaaagtaaatgatcctattctgtacccctgttctgcacgctgaaaatgtctggaattgttaatttagctttggagtcacaggaaaacagacttggcttatattgtactctgtctgtaggtagataygccatcaggctaattgtctaatccaaatgccttttactgtgtgggtggcatttgttgctgtggaatttggaaagacctatgttgccaaagtagggtgttactacacgtcctcttgtaagtgggtttggaactgcagtctgcttattgactcactgatgtagcaaatctgacttcagaccagcaaggagacctttgctcaccgatcacattgcttgtgctagatgcagctatccacgttcactgttgacgtagcaaagtaattgagtagttccacaattcagcctttagaggacgagcttt

SEQ ID NO: 64732 - DNA, 600 bp, Chicken  19866894330946_1
aatttcttcaatcttgactttttttaaattcaagatgatacaagaagaactgcatctaatacgacactggaaactggccctccagccatgccaaggttaccatcctgctgccctcagcattctccatgtggaggatcttcacagaatcatcatgcgttggggcatccacatacaagctgctttcagcagcatggccaccactttcaacaccaccaccatcaccaccacaaccctcacccagcagttcccttgtctccttcattcagtgactccaactgccctgttgaacggcctcctccrgtgcctgcaccttgtggagcaagcagcagttctggcaccagttaccatgatcaggcatgtttcatttttatgactctttctttgtgattccaagttatttatgtatgaaagactagaataggatgctgaattgtaggttattttcatgttctgtagcagatattttagaagggacctaaaggaaaaattgagttatactgtatgggcacaaaaggaaatttaacagtaagtcataacccaataagtaatcattggcaactgatgttctcctgatgactgtaagatgatattattttattt

SEQ ID NO: 64733 - DNA, 599 bp, Chicken  19866894330953_1
  misc_feature (1)..(92): n is any nucleotide
nnnnnnnnnnnnnnnnnnnnnnnnnnnnnnnnnnnnnnnnnnnnnnnnnnnnnnnnnnnnnnnnnnnnnnnnnnnnnnnnnnnnnnnnnnnnacaaacacaacttttctgttattctctcccaaaacaatgactcaaatacagggagaattaattcttgaggtttaattaataaaatggccgtatttttcacctgttgattcaatatgattaatagtacagccctaataaagggactcttgttggattcaaggggactgcagtccttgactcagtgacaaacacatacaggatactgaawttcgattagttgatcgtaaatccattttattcagatccttgtaataatggctatctgtctttctgaaaactggaagcccatttgtactgagccattattgttccaatgaaaaataaagatgctgattttacaccctaagttctggatttgcaaacgacgccgctgatagcatatcacaacaatgccatcccatatcacaaaagaagtgttaatcttcacttcagcaaagccttttgataatctatggagaagaggaaggtctctaatcaccagtcctatttggccccctgtaacgctta

SEQ ID NO: 64734 - DNA, 600 bp, Chicken  19866894330958_1
acaagtgattataaaacacttagtgaaaaataacatcgttgaggtttctgttccattcagttagccatcctctttggagaatcggtgtcatctacttgccatacttttaggcactgtcaagggttacttatttcatccccatgaatcagatgagttttaattgttaagtttgagtgctaactggcttccagcctatgtaagatgttggcatataattttatccccttgaaatggctttttgtagatgttcttcaagtttaactgtgtagcagtggtggttctagttccaatatcaaatarctaatctggcttccatttgattaacaagtggaatgctagcttttgataaacgattgatattaatgtatcatgtgaatacttcattctcagaacagatcacacttgagtctgtctttcagtccattgtttcacttccatttttaactaggcaattgaaatctatcttctgtcacagtgaagggaattggattgtaaaatgatacagtggaatgcaagggcttttgataaatggatggcagttagcttagaatatttaattgtctttaaaacttgtttaaaaaaccccccactactttcact

SEQ ID NO: 64735 - DNA, 600 bp, Chicken  19866894330959_1
tctatgaatgctacaaaatatttaataaggccttggcaaacaggcggaaacttgtgattaggcataatccaactgtatcttaatccccaacagactcaacttttctagcattgttttaattaaatattattagcagctttcaaaactgtttaattagaatgttggcatgatccttaggccgaaaaaaggattttgatcacatcagtaatgtttattttcttctagtttttaataaacatccttatatcatggcttcgtattgactgtttgagtgtcgttacattaaatataacttaagtrtaacttataatatgtatattaagtatattttaagaagaatagctgcatggatttttttttcctttagagagacctttgttatgaatacctatgtgcatatatacattggtatgtatgtgttttctgacagatcagttgaatcagaggccactttttacagttcttcattttaatgaaaatgtaaacatcatttatttgtgtataattctcagtatatttttaaaatgtgattcaagattggaattatatgtgataagattttactgatgcctcacaaagcagataatgctgcccagacta

SEQ ID NO: 64736 - DNA, 599 bp, Chicken  19866894330961_1
  misc_feature (1)..(43): n is any nucleotide
nnnnnnnnnnnnnnnnnnnnnnnnnnnnnnnnnnnnnnnnnnnacagaaagtggtaatttactctgaaattacaaattaagttcagctcattcgattcaagcaatttcaggtaaagctgtatcagaacaggaaacgatgaaagctatgtcaccccaagcagcaaataaagcgaggctttgagatgaacacctactattaagtcaaagagaataatctatgggcagtcatggctcagacatcctgattagcattaattaaaattctggtgatcaggtggctatggaacggacgatactttragagaatttaggcaagarcgaaaggctggagatagggtaataattaggaataatatctcttgttaaatttaattcctttagccttgaaattaccatgacagatttcaaatttagtggcagttttccagtcactaaaaagagcttaattatagagtttaagactttgggggaactgattcagataaagctacacgggrcccatatcaaatgtgtggtatgcttgaatgggctcagataaaaaaggaaaagacaccagcttctatgagaacctgaagactccacatacttgatacttttgt

SEQ ID NO: 64737 - DNA, 599 bp, Chicken  19866894330961_2
  misc_feature (1)..(25): n is any nucleotide
nnnnnnnnnnnnnnnnnnnnnnnnnacagaaagtggtaatttactctgaaattacaaattaagttcagctcattcgattcaagcaatttcaggtaaagctgtatcagaacaggaaacgatgaaagctatgtcaccccaagcagcaaataaagcgaggctttgagatgaacacctactattaagtcaaagagaataatctatgggcagtcatggctcagacatcctgattagcattaattaaaattctggtgatcaggtggctatggaacggacgatactttragagaatttaggcaagarcgaaaggctggagatagggtaataattaggaataatatctcttgttaaatttaattcctttagccttgaaattaccatgacagatttcaaatttagtggcagttttccagtcactaaaaagagcttaattatagagtttaagactttgggggaactgattcagataaagctacacgggrcccatatcaaatgtgtggtatgcttgaatgggctcagataaaaaaggaaaagacaccagcttctatgagaacctgaagactccacatacttgatacttttgttgttgttgttgttgttga

SEQ ID NO: 64738 - DNA, 600 bp, Chicken  19866894330961_3
taagtcaaagagaataatctatgggcagtcatggctcagacatcctgattagcattaattaaaattctggtgatcaggtggctatggaacggacgatactttragagaatttaggcaagarcgaaaggctggagatagggtaataattaggaataatatctcttgttaaatttaattcctttagccttgaaattaccatgacagatttcaaatttagtggcagttttccagtcactaaaaagagcttaattatagagtttaagactttgggggaactgattcagataaagctacacgggrcccatatcaaatgtgtggtatgcttgaatgggctcagataaaaaaggaaaagacaccagcttctatgagaacctgaagactccacatacttgatacttttgttgttgttgttgttgttgagacaccaaagaagtttgggtaacttcttaactttgtcttataattaataataatcactctcactcaatttgcctttctacctcttgatttcagctgggactagaagcaagacagagataaagcagcccgaactctgaacagtgctgatactaacagaactccttaatcatggaactggcc

SEQ ID NO: 64739 - DNA, 600 bp, Chicken  19866894330965_1
tcaaaaaatatgttaatataaatgaaaaagtttgaagtatcaagactaacagcaagaagtagtgtaaatttttgtattttgctctttccttcctgtgattactaggtgagatgttacccaacattggctgaatttggagagcagtacatttttagcaggatcattacataaatgcattatttgtgcatcaggattatctcttcttttgaaattatcttgtagaacagttagcgttgcagtagacttgtaacaacaaggttatcgttgtctgtttcagctttagagtggaaagggttaaarggagcttgaaatttctgtaaatcagttttttcatcatttgrgcttggactgttctcatgatatatgagtaacgtctgcctcccagcatataaatatgccctaaatatatgcatttttaatagtctgcctgattgaatcttcatctttatcagagaagagtatcaggaaaccaaaattcattttaattgtgcatccataataaygctttcagcagttaataaagaatacctgttatttctttaatgggagttgttgaaggacagacagaggagaagcatggagttagtttcccttttctga

SEQ ID NO: 64740 - DNA, 600 bp, Chicken  19866894330965_2
aagactaacagcaagaagtagtgtaaatttttgtattttgctctttccttcctgtgattactaggtgagatgttacccaacattggctgaatttggagagcagtacatttttagcaggatcattacataaatgcattatttgtgcatcaggattatctcttcttttgaaattatcttgtagaacagttagcgttgcagtagacttgtaacaacaaggttatcgttgtctgtttcagctttagagtggaaagggttaaarggagcttgaaatttctgtaaatcagttttttcatcatttgrgcttggactgttctcatgatatatgagtaacgtctgcctcccagcatataaatatgccctaaatatatgcatttttaatagtctgcctgattgaatcttcatctttatcagagaagagtatcaggaaaccaaaattcattttaattgtgcatccataataaygctttcagcagttaataaagaatacctgttatttctttaatgggagttgttgaaggacagacagaggagaagcatggagttagtttcccttttctgatgyaactttaaagtgttactgaaaacctataaagtaaatgt

SEQ ID NO: 64741 - DNA, 600 bp, Chicken  19866894330965_3
ttttgaaattatcttgtagaacagttagcgttgcagtagacttgtaacaacaaggttatcgttgtctgtttcagctttagagtggaaagggttaaarggagcttgaaatttctgtaaatcagttttttcatcatttgrgcttggactgttctcatgatatatgagtaacgtctgcctcccagcatataaatatgccctaaatatatgcatttttaatagtctgcctgattgaatcttcatctttatcagagaagagtatcaggaaaccaaaattcattttaattgtgcatccataataaygctttcagcagttaataaagaatacctgttatttctttaatgggagttgttgaaggacagacagaggagaagcatggagttagtttcccttttctgatgyaactttaaagtgttactgaaaacctataaagtaaatgttgcttttgcactggtatttaactgaaaaccagaaagggcctttcagaactactatcaattgctaccagttattgcaggttaccttgatcctcctagcttttaggcttttgttccttaaaggtaatcggtacatgacaaattacaaaaaaaaaccaaaagtaa

SEQ ID NO: 64742 - DNA, 600 bp, Chicken  19866894330965_4
gcttgaaatttctgtaaatcagttttttcatcatttgrgcttggactgttctcatgatatatgagtaacgtctgcctcccagcatataaatatgccctaaatatatgcatttttaatagtctgcctgattgaatcttcatctttatcagagaagagtatcaggaaaccaaaattcattttaattgtgcatccataataaygctttcagcagttaataaagaatacctgttatttctttaatgggagttgttgaaggacagacagaggagaagcatggagttagtttcccttttctgatgyaactttaaagtgttactgaaaacctataaagtaaatgttgcttttgcactggtatttaactgaaaaccagaaagggcctttcagaactactatcaattgctaccagttattgcaggttaccttgatcctcctagcttttaggcttttgttccttaaaggtaatcggtacatgacaaattacaaaaaaaaaccaaaagtaagcttggaggtcataaaggctgcactcctaatccatttgttgttccacagtactgctgaaagaaaatgttttcagagtacagttttttcaaccgtaagtag

SEQ ID NO: 64743 - DNA, 599 bp, Chicken  19866894330969_1
  misc_feature (1)..(196): n is any nucleotide
nnnnnnnnnnnnnnnnnnnnnnnnnnnnnnnnnnnnnnnnnnnnnnnnnnnnnnnnnnnnnnnnnnnnnnnnnnnnnnnnnnnnnnnnnnnnnnnnnnnnnnnnnnnnnnnnnnnnnnnnnnnnnnnnnnnnnnnnnnnnnnnnnnnnnnnnnnnnnnnnnnnnnnnnnnnnnnnnnnnnnnnnnnnnnnnnnnnnttctggtttttgagggagcccggcgcgagctcagcatcccccagggaacgaaaccttctgtttatttgcacaccagacagagaaaccagtcctgcctcccgcayctcgctgccagtgcctctacccggggctccccgagaggtgccaacccgttggggccgctgggccggatcgcagccaggagatggggctggatggggctgctgaccctgcagggtgtgtgcacaccgctcggcgatgcactccctgtgccattcctgcaggcatcggggtagggatggatgcaccgacatatgaaatcgacagataaggagaaaaggagcggatccccaacacctcctggggatgctcttgcaaataccccactgcaagggtagccctaacgcttggcttgcagcccagc

SEQ ID NO: 64744 - DNA, 600 bp, Chicken  19866894330972_1
gggcgcgaggtgtgagtctgtcccgcgctgcagattccgtcggcacccgagccgcgttctgacttaaagaagggcagtaactgttcattttgtctttggcttttttcctttgagcaggtttaccgccaggaaaacgatccggccgtacgaacgactgccgttcgttgcaccgccggctctcacgagggcacagagatgctccgcagcgctccgtgctgccctggggaagagggacggagaacgggaaacgttaattcggggcggtctcggcacgcagagcgagaggggtcgcacccggaycgctgtgcgctgctgtctgctttccggaacgtctccgcccgtgggctcgaagcgcggggcggccccggggtcctcagatcgaaaccggagaatccgagcggaggagcggccggggccggcgctcggactgwgccgattccccgcagaaccgcacgtgtccgtaacgggtctgattaaattagtttgtcaaatacgaagcgaagccggagcccggatttcttactgcatttggaacgggggcagagggcgctttgcccgtcgcagtgacactgacggaacgacgaggagttcacgtggctg

SEQ ID NO: 64745 - DNA, 600 bp, Chicken  19866894330972_2
aaacgatccggccgtacgaacgactgccgttcgttgcaccgccggctctcacgagggcacagagatgctccgcagcgctccgtgctgccctggggaagagggacggagaacgggaaacgttaattcggggcggtctcggcacgcagagcgagaggggtcgcacccggaycgctgtgcgctgctgtctgctttccggaacgtctccgcccgtgggctcgaagcgcggggcggccccggggtcctcagatcgaaaccggagaatccgagcggaggagcggccggggccggcgctcggactgwgccgattccccgcagaaccgcacgtgtccgtaacgggtctgattaaattagtttgtcaaatacgaagcgaagccggagcccggatttcttactgcatttggaacgggggcagagggcgctttgcccgtcgcagtgacactgacggaacgacgaggagttcacgtggctgaggggaatttcgttacgggagttcagttcacctgcgagtcacactaattgaagtccgttacctctccacaaaatccagctgctgttttctgcagcaacgtttgccgttcttggctaaataacgctttgtta

SEQ ID NO: 64746 - DNA, 527 bp, Chicken  19866894330972_3
tacgggagttcagttcacctgcgagtcacactaattgaagtccgttacctctccacaaaatccagctgctgttttctgcagcaacgtttgccgttcttggctaaataacgctttgttagaaaagcattgaggtctttacagaacgaggagcgcgtagcggcacgtttgtgctccgcaagcattaattacgcttctgcttcctacggagcgtgcggcacagctctctgctgaccgccctgatgggagcaaagcacggctgcggagcccggagcggagcggtgccgctgtcgcccctcggcraatgccaacacggggcgtcccgtccgcgcgagtcgtgcgcgcagccacagccacggcatgaatgattgacggcagcgcggcttggcgggcagaaccgcccggctgggagagcggcgctccgcggagctgccgtgcccgtccgccccatctgcccccgtacgcggcccttcgttcgctgggtgcgcggggctgacacgcgaaagtcaatacgggcgacggacgtccat

SEQ ID NO: 64747 - DNA, 600 bp, Chicken  19866894330973_1
tttatagtccttggctaagactgtttaattttgatgttgcagccatgcagttgtatttaaattactttctgatttcttttgagttctgtatctttttacatctttgacatttgtgttattgtaggagcattttaggactgggtttttcattcataaagccagcaaaagctcttctgcctgagagaacaagaagtcatcagttccagagaatgtcagatttgatttattcagtactttattttttaaatcttttattctgaataaagttacaatttccagtctttttggactagctactgwttttttttttaagcttaattctaatttcatttttaaccacttagatttatttttttaattttaattattattttttttagattcctgaaatgcttttgtatgatgatgaacaagagaagatggaaaaaacacacaaagaatttaagaaaaaacattcaggtaatattttggtggaccaactagttgttacaactttccattagacacttagtcctgtgttgggcatagatgatggcatgggtcatttgagtaggtttttgctagcctattcatgaacatgggaggcatttttcacttcgg

SEQ ID NO: 64748 - DNA, 590 bp, Chicken  19866894330992_1
  misc_feature (1)..(47): n is any nucleotide
nnnnnnnnnnnnnnnnnnnnnnnnnnnnnnnnnnnnnnnnnnnnnnncttctctggaatacagacatgtaaacatcttcaccagtgaacagtctataaagcaaacaaaaatgaagcaaattgaagcagtgaggttctgccatttgagatatgcagggatatttcatcacatgttattctttgcctagtgctcccttgaaattgtcatttagtgcaagagatttttggaagaaatgagaacactgatgccaaaatggattcataatgacagcacaacgttataacagaatgagaattaaamtgtacttttacctatttctaatcctttacataaatatttgctactggagctcaaatatacaaatagcttagtgttgcctaagcaacgttctctaagtaatgaactagctgaaattacataaatactttccctagatttccattttacacacagctatagaaaaaataataaattatcatgcttcagtcactgataagtagcccaaattcaagcctctggacratcctacatagcccaatgctttttttttttttttttttttttttttttttttttttcaaaaaaaaaaa

SEQ ID NO: 64749 - DNA, 368 bp, Chicken  19866894330992_2
cttctctggaatacagacatgtaaacatcttcaccagtgaacagtctataaagcaaacaaaaatgaagcaaattgaagcagtgaggttctgccatttgagatatgcagggatatttcatcacatgttattctttgcctagtgctcccttgaaattgtcatttagtgcaagagatttttggaagaaatgagaacactgatgccaaaatggattcataatgacagcacaacgttataacagaatgagaattaaamtgtacttttacctatttctaatcctttacataaatatttgctactgratcctacatagcccaatgctttttttttttttttttttttttttttttttttttttcaaaaaaaaaaa

SEQ ID NO: 64750 - DNA, 600 bp, Chicken  19866894330994_1
agtcctacttaccacttcaaggatccagactggagaacctcagtcaaggacaattaggaaaattaaccttcacgtctttacaaagtagatgatacctggtaacctggcgtattttggaaagctctcatgaaggtagtacaggcataagccttttctgccctttttgtgatccagctgcagcacagtgatggcatccagtcatctgaaagtgcatcatgatattttcctttaccttatgctcagaaataactgcagttgtgctagccaaagctttccaaaggaaaaaaaaaaaaaaaaagwaaagcatgggatggataatgacaaggaaaatttcagtccaagtaggaaataggagaagtatgaagtatttaaattacaactaccaatttaaagttagagggtagtaccaaacacctttccaatcaactttttgattggactagatgatctttcaaggttccttccaaaccctcacatttggtgattctgtggttctgtaactgccatggagaagagaaagcagctattaaaatgaaaacttaaggaaaacaaacacacaaacaaaaacaacaacaacaaaaaaaaaacccactcttttca

SEQ ID NO: 64751 - DNA, 599 bp, Chicken  19866894330994_2
aggaaaaaaaaaaaaaaaaagwaaagcatgggatggataatgacaaggaaaatttcagtccaagtaggaaataggagaagtatgaagtatttaaattacaactaccaatttaaagttagagggtagtaccaaacacctttccaatcaactttttgattggactagatgatctttcaaggttccttccaaaccctcacatttggtgattctgtggttctgtaactgccatggagaagagaaagcagctattaaaatgaaaacttaaggaaaacaaacacacaaacaaaaacaacaacaacwaaaaaaaaacccactcttttcatttctgagccaggattctggcatttaatttttcaagataaataatacagtattttttggctaatcctcttctcttctcttctcttctcttctcttctcttctcttctcttctcttctcttctcttctcttctcttctcttctcttctcttctcttctcttctcttctcttctcttctcttctcttctcttctcttctcttctcttctcttctcttctcttctcttctcttctcttctcttctcttctcttctcttctcttctcttctcttctcttct

SEQ ID NO: 64752 - DNA, 600 bp, Chicken  19866894330999_1
ggctttggtggtacatttggcaccacaacaggattctgtaggccgcaaatttctctgttctgaccctctaaaaattggcaggttcatgattcccagaatacttttttttttccctttacttcaaacagcttgcaattttaaactatattaaacagcaatactggaatcagtgcccttacattttttcagctgatcctgttccatcgttttgtgtcaggtctgcaataaatgtgcattgctgacagaagcagttatgctgtttcaataaattgaaaggaataggaagggagagatttatcytggagcccgggggcggagcagtaaaccagaaccattttactcatgcttacaaatggagaagactgtgttgcaaatagctgggcttctcatttagcaggaggtgatttctctccaactgtaacttctgctttaaatatctttttttttctttcctttttgaattatatggaatagaaatctaaacaaagatacagaagtttggacctcaaggtagttttggctgtgtaatggctatcactactgtgtagtgagcaaacagcaaaagcaaggagtgggagaagtatctgcactccattttcc

SEQ ID NO: 64753 - DNA, 600 bp, Chicken  19866894331000_1
tgggagctttttaaggtcagactgtttcctatgtgatccagtgcagtcgggcatcttgatgctgccacagttcaaacaagaagtgcactgatcagcctactagacaagggagggacacttctaggacaaccataattatcgttgtgtgtgttgggatacactcagacctttcagactcaaaactgtagcattatttcttctgtactggagctgaacttggagcattttattgaggtgactggtccacctttctttacacctgtgtccgtcctctcacctgtgttacagaaagacttttcraggamggatgcccaacctgaaacaataggtagttgagcaataaaaagtagtagttcaattgctgtattgtgaagctggacagccagggttgtgcagaataggccgaggtgatagccaagacagggctctgggagctgtgcaggcttctctgcacccacccatcttctcagccacctggaaacacgtttattttggcagtgctgggactggctgtagtctgagggagctgggatttggctgttggcagagctgcctgcagtaatgggaggtgaaggatctgactgtactgtgttagagcaa

SEQ ID NO: 64754 - DNA, 600 bp, Chicken  19866894331000_2
gctttttaaggtcagactgtttcctatgtgatccagtgcagtcgggcatcttgatgctgccacagttcaaacaagaagtgcactgatcagcctactagacaagggagggacacttctaggacaaccataattatcgttgtgtgtgttgggatacactcagacctttcagactcaaaactgtagcattatttcttctgtactggagctgaacttggagcattttattgaggtgactggtccacctttctttacacctgtgtccgtcctctcacctgtgttacagaaagacttttcraggamggatgcccaacctgaaacaataggtagttgagcaataaaaagtagtagttcaattgctgtattgtgaagctggacagccagggttgtgcagaataggccgaggtgatagccaagacagggctctgggagctgtgcaggcttctctgcacccacccatcttctcagccacctggaaacacgtttattttggcagtgctgggactggctgtagtctgagggagctgggatttggctgttggcagagctgcctgcagtaatgggaggtgaaggatctgactgtactgtgttagagcaaatctg

SEQ ID NO: 64755 - DNA, 600 bp, Chicken  19866894331006_1
cctgtcggtggcccacacctcccgcaggatctccgtctgtagtggcatctctgcagcccctataggatcagagctagttccatgggtgcaacctcagcggcggtgccagcagtgcaggaggagcgcgcagaggagacgattaactttttatttctcttgaaactcagtaataggatttcagggctggccagccctgcagggagagtgacagctgttgcggtaatcccagtaaaagggaacctgggggcttgtttgtggtttgcctcctttttctcacccagtgtcggagatagatacacrggatttgggttggtttgcacagaaaacccaaggatccctgctggacttattgcttacccaactcaacatcactgcagcatcaaaactattccttactcaacacaatcccactgcagcaccaacccattgaagccttgctccctgcagcacccagtgccactaggtggcatttggacactgcacaccccacgcagagaggagcaccctgagccatggtgcactcagcactgccaccctcctgccgcgtagccagggttgcaagtttctgtggagcaagccagagtcgtttcctaagagaaa

SEQ ID NO: 64756 - DNA, 599 bp, Chicken  19866894331007_1
  misc_feature (1)..(97): n is any nucleotide
nnnnnnnnnnnnnnnnnnnnnnnnnnnnnnnnnnnnnnnnnnnnnnnnnnnnnnnnnnnnnnnnnnnnnnnnnnnnnnnnnnnnnnnnnnnnnnnnncctccctcacgcaccgccagcagtagaagcgctgctggggaggtgcagccctcagcagccacgccgtgtaaatctcgaggataaactctgaagtgtttatgttttaccacttctctggtctgcagtgcttggcaggctgcgccgactcgctgccagtttctccctagtttactttttctgaacaagttaaaaggattggaaaygacgttccggagcaataatgtatggatacacgcgcatggacacccatatgtacatatatataaaacccttcaagacaaattacaagccataaacactgccttaargagttactccaccaggatcccaagcgagaccctatctgaggctaaccaggctggaggaactcagctcatataaccaacccacctgctttggacaggtgtcagcctgaaagtcacaggatcacagaataacctgagttgcaagggacccatgaaggtcatcgagtccaactcctgcatcaactgtagtctgaaat

SEQ ID NO: 64757 - DNA, 600 bp, Chicken  19866894331007_2
acgcaccgccagcagtagaagcgctgctggggaggtgcagccctcagcagccacgccgtgtaaatctcgaggataaactctgaagtgtttatgttttaccacttctctggtctgcagtgcttggcaggctgcgccgactcgctgccagtttctccctagtttactttttctgaacaagttaaaaggattggaaaygacgttccggagcaataatgtatggatacacgcgcatggacacccatatgtacatatatataaaacccttcaagacaaattacaagccataaacactgccttaargagttactccaccaggatcccaagcgagaccctatctgaggctaaccaggctggaggaactcagctcatataaccaacccacctgctttggacaggtgtcagcctgaaagtcacaggatcacagaataacctgagttgcaagggacccatgaaggtcatcgagtccaactcctgcatcaactgtagtctgaaattaagagaaaaccacaagtggacatttgtccagaaccttgacctgtgctgctctgtggcacggacgcagctctgtccagcagcagaggcatgggacactgtgggaca

SEQ ID NO: 64758 - DNA, 557 bp, Chicken  19866894331007_3
ctccaccaggatcccaagcgagaccctatctgaggctaaccaggctggaggaactcagctcatataaccaacccacctgctttggacaggtgtcagcctgaaagtcacaggatcacagaataacctgagttgcaagggacccatgaaggtcatcgagtccaactcctgcatcaactgtagtctgaaattaagagaaaaccacaagtggacatttgtccagaaccttgacctgtgctgctctgtggcacggacgcagctctgtccagcagcagaggcatgggacactgtgggacatcccaraagctgtactctcccacaattgatcctcaccgtgtgtagcctgggtttttgcaccgaccagagccattcaacgggcctgtgacagccaagttcatctggcatctgagcccgtaagtccagcctcagtttagatttgagctgtcacagcggcaggtctagttaagataaactagaaaccctacacaaaacatttatcaaaagcttagtcagaacttaaacacggcgaggggggagagagaggagcccgcgggaacaat

SEQ ID NO: 64759 - DNA, 600 bp, Chicken  19866894331022_1
agtgagctgcttgggacaagcttgtcttataggttgtttttttgtgtgtgtgtatgtgggtgtaagtcttctgcctttatttagatatcatctagcatagtgggttccattgccatgactagcattcctaagtgttacaaagacaagtatatgcataggagcagtagaagcagatggcttagatgagggctgttgggaagagaggaggcattggcaatgtgagagtgtggtgcgtaagaggagtgaaacagcttaaataatttcttactagtgtgtgtatttctttctttgctaaagagmtcagaagggttctgagttgatttgtgattacttaattattaattctttgggatgaatgtgcatagaaaacacatcatccaaaagcccactgatactttctttacaaccacagcagttctcaagaatgagctatctgtaagaaagaagtggctcagtggagtttagcctctgagacagggcatgctgtttcctagctttgcaaaaccacatggaaaggtatgagacttctcatgagctgttttgagttgcttctgtgttcctgtattcttgcaagctcttacctgtaaacacacttgacaa

SEQ ID NO: 64760 - DNA, 600 bp, Chicken  19866894331022_2
tgtgattacttaattattaattctttgggatgaatgtgcatagaaaacacatcatccaaaagcccactgatactttctttacaaccacagcagttctcaagaatgagctatctgtaagaaagaagtggctcagtggagtttagcctctgagacagggcatgctgtttcctagctttgcaaaaccacatggaaaggtatgagacttctcatgagctgttttgagttgcttctgtgttcctgtattcttgcaagctcttacctgtaaacacacttgacaaaagagaactgaagaagggagayggaatgtaagctctcttacaggcatggaaggcaattcattaattatgaattaaatgttgcctcgagtattttgtggtgactgatggcagtgttgcaccagtagtaaattgtgcgggctacccaactcttctgctctggttttctgtgattgctaaatactattggtccttttattttccaagaaccaaaaaggagtctatgggaccctgttctcccacaactcccttacctaggaaataaagaaaaaaaggagttagctgatatttggaagggtctcggttctttcttgcagcaggccag

SEQ ID NO: 64761 - DNA, 600 bp, Chicken  19866894331023_1
attagcagcaagtgaaggacaaacgcctaaaaaatttcatgagcaaactgaagtgacattgcaaacactgcaagagaataaatatcagaaagatttaaaatggaaaccagaaagccttggagaagtgtcagcagaaacactaacaaaacactctgcacactagagtcagctccaaggaacccatctgcagagaacaagaacagataattggcccctttcaaaaaaaataaaataaaaagggggtgaggggttgagctagaaccccacaagaaccttgacaatcattcctttttgagcttwacgttccagaaaagtcatccaccraactcaacttattttacataaaaacacattcactaacatyccttattttccctcctccactgaactgttccattttaacttggtgaaagaattgcagaagatcaggtttgggaaggtaagttaactaaatgcccgttgtgacatttgttaagaaaaacaaatcaaataagctaattgaggccatgtagaagagtagtaacaccaaggtttcaacagattgtgtaatcctatgtatcagtggaaaaaaaaaaattaaaggaaacaaaggaataagaa

SEQ ID NO: 64762 - DNA, 600 bp, Chicken  19866894331023_2
gcctaaaaaatttcatgagcaaactgaagtgacattgcaaacactgcaagagaataaatatcagaaagatttaaaatggaaaccagaaagccttggagaagtgtcagcagaaacactaacaaaacactctgcacactagagtcagctccaaggaacccatctgcagagaacaagaacagataattggcccctttcaaaaaaaataaaataaaaagggggtgaggggttgagctagaaccccacaagaaccttgacaatcattcctttttgagcttwacgttccagaaaagtcatccaccraactcaacttattttacataaaaacacattcactaacatyccttattttccctcctccactgaactgttccattttaacttggtgaaagaattgcagaagatcaggtttgggaaggtaagttaactaaatgcccgttgtgacatttgttaagaaaaacaaatcaaataagctaattgaggccatgtagaagagtagtaacaccaaggtttcaacagattgtgtaatcctatgtatcagtggaaaaaaaaaaattaaaggaaacaaaggaataagaatatttatagggagatatggcttct

SEQ ID NO: 64763 - DNA, 576 bp, Chicken  19866894331023_3
acactgcaagagaataaatatcagaaagatttaaaatggaaaccagaaagccttggagaagtgtcagcagaaacactaacaaaacactctgcacactagagtcagctccaaggaacccatctgcagagaacaagaacagataattggcccctttcaaaaaaaataaaataaaaagggggtgaggggttgagctagaaccccacaagaaccttgacaatcattcctttttgagcttwacgttccagaaaagtcatccaccraactcaacttattttacataaaaacacattcactaacatyccttattttccctcctccactgaactgttccattttaacttggtgaaagaattgcagaagatcaggtttgggaaggtaagttaactaaatgcccgttgtgacatttgttaagaaaaacaaatcaaataagctaattgaggccatgtagaagagtagtaacaccaaggtttcaacagattgtgtaatcctatgtatcagtggaaaaaaaaaaattaaaggaaacaaaggaataagaatatttatagggagatatggcttcttacaaattccagtgaa

SEQ ID NO: 64764 - DNA, 599 bp, Chicken  19866894331029_1
  misc_feature (1)..(17): n is any nucleotide
nnnnnnnnnnnnnnnnnaatggttctgaagaaaggatttcatgttgagtatttttagctgtgaagactatcaaaaagatgaagagtacagaaaaaatactctcatggctttttcataactgttactcttcaggtgaggagttagatctgaaactatagaagacaggagcctcattcagatgcagcctgtgaagagagagagagagagggacttaagtgcctgtttcagttcttttacacttacttttcagtaaggaatgaaaaataagaatactttgttaaatcattacactgtagatgygatacttctaatggtatctatcaaatgtatctatttgataacagaggattcctcaagagtggattcattttggtatttcagccttgaaaccaagcttgcgtgttcaagtctactaaaattgttggtgtcatgtgtctaataacccatctgcctgaatgatgataaagcctcctacttagtctgtctgcctcgagggaataatctaggagccatcatgacagtgctgctccgagccaacaaaatacttttttttttttccttccacaggagttccctttgaaacataaattaagacaggg

SEQ ID NO: 64765 - DNA, 599 bp, Chicken  19866894331033_1
  misc_feature (1)..(30): n is any nucleotide
nnnnnnnnnnnnnnnnnnnnnnnnnnnnnntgaaaaatcatattcccttggatcttgaaaaataattaatccaagctctcttaaaattgcctttgataaccaaagaggaaaaacaatgagagacttcaagttttcatgtattttatttacaagccacacgatacatttatatacaaatggcttaaaataacgaagggtaagcaagctgaagcataacagtttgattattttaaattatgttgtcttgaaataactcctgcaataaagtattcttcaccctgataagcaaaagttagttcractttaacccaaggtcatttcattttttaaatacagaatttgtatcacttttctgtgattcttcatcttcttaacacactcatgtatgaagaacatcccacaaccatcaagaagggaaacagccaaatttcctcctatacaaatcctgtaacaacagactggagaaatgctgcatgtaaaatgctcgtgtgtttcattaactaaagagaatgaaagaaatacatgagatttcctctcttggaaacagaattcactgtctgagatccaatttgcccacagacaagaggaatcgtgtattc

SEQ ID NO: 64766 - DNA, 599 bp, Chicken  19866894331046_1
  misc_feature (1)..(82): n is any nucleotide
nnnnnnnnnnnnnnnnnnnnnnnnnnnnnnnnnnnnnnnnnnnnnnnnnnnnnnnnnnnnnnnnnnnnnnnnnnnnnnnnnnactacttatgtcacataaaaagaccaattaactttgagtataaggatatcgaccttcattatctcttacatttggattgctgaggatttgtatttcataagataagaaacagagaacaaattcactggggacatacctgtcctctgttgttttctgtaacacaagaagaaacacatctgtataactatatttttaattccagctatactcataaaatkatcttgttggatttaaactgagaatgtaatgttttagattgcgtcatgcagtttctatgttgcgctggggtaattcttagttataatatccaagtggcaggtgtggaaatccaacagaacacagagcttttgtggtaaagggtttgcagcagcagaatttcagtggaagcagcagatgctctgatctgtgcaggccagctgtgctcttcaatagagaggagagaccacaacactctgtgtccctctgagtcaagagcaccacttaacatactggggcacatctgtgctcaaaggctctg

SEQ ID NO: 64767 - DNA, 600 bp, Chicken  19866894331046_2
aaactgagaatgtaatgttttagattgcgtcatgcagtttctatgttgcgctggggtaattcttagttataatatccaagtggcaggtgtggaaatccaacagaacacagagcttttgtggtaaagggtttgcagcagcagaatttcagtggaagcagcagatgctctgatctgtgcaggccagctgtgctcttcaatagagaggagagaccacaacactctgtgtccctctgagtcaagagcaccacttaacatactggggcacatctgtgctcaaaggctctgattgctcctgttctygcagcggtcagtaaggtcactggaatcttcaaatacattatagtttatctatatatggcaacattgccatattagtgtaccatatataccactcatctcatttagatcttgatcttatacatgaagttgaatttaccatgaaaggtctaatatcctgcaacaaggaaatgctattstgaacagtcaaccttaatttcttgtgacatgctaatatttctacaattactgttgctcaaagttgaaaaggctttgaaaaattaaactgcaataagaaatgcactcctttctggatggcagtgt

SEQ ID NO: 64768 - DNA, 600 bp, Chicken  19866894331046_3
caggccagctgtgctcttcaatagagaggagagaccacaacactctgtgtccctctgagtcaagagcaccacttaacatactggggcacatctgtgctcaaaggctctgattgctcctgttctygcagcggtcagtaaggtcactggaatcttcaaatacattatagtttatctatatatggcaacattgccatattagtgtaccatatataccactcatctcatttagatcttgatcttatacatgaagttgaatttaccatgaaaggtctaatatcctgcaacaaggaaatgctattstgaacagtcaaccttaatttcttgtgacatgctaatatttctacaattactgttgctcaaagttgaaaaggctttgaaaaattaaactgcaataagaaatgcactcctttctggatggcagtgtacatccatagtatattttctggaagtctaggtaaaaataatattttcattttaaattttggaggaattctatgcaaactataaattaatcaatatggaacatccttgccctcataacaaagtaccgtagcatatttttcttgtgatatgagaggctgaggacctcgaagagtaatg

SEQ ID NO: 64769 - DNA, 599 bp, Chicken  19866894331048_1
  misc_feature (1)..(23): n is any nucleotide
nnnnnnnnnnnnnnnnnnnnnnngaatgattgtgataaaacatgcagaaggagatattaactgccttgctctataatgcatcgctgtacatgctgctcaaattggacaagggatttgaattatgcaaaaattaggtcagaatgattaagaggataataaaatgagtgtatcagacacaatgctgtttgttccagttgcactaaagtattctacttttttttgttgaaaaaatataataatcaatttaggaaaacgtatggatgggaccatgagctagcgtttgcttcactgatgccatgyttgatcatatcatcatggatcattcctaattttattaataccatgatagctatatgcaagacaataaatggaaagacagcataaaaaaaagcggttaaaaagkggtcaaggctgacattcagaaacagtacagaaagctttcctttagatgaattgaaatctgaggcatttgttaaattgtattctattcactaaagcatttccgaagtattttttctgacattctcatgaggaacatttttaagtcagttattttgttgtgttttacattatatttgttatatttggagaatcacaga

SEQ ID NO: 64770 - DNA, 600 bp, Chicken  19866894331048_2
ggacaagggatttgaattatgcaaaaattaggtcagaatgattaagaggataataaaatgagtgtatcagacacaatgctgtttgttccagttgcactaaagtattctacttttttttgttgaaaaaatataataatcaatttaggaaaacgtatggatgggaccatgagctagcgtttgcttcactgatgccatgyttgatcatatcatcatggatcattcctaattttattaataccatgatagctatatgcaagacaataaatggaaagacagcataaaaaaaagcggttaaaaagkggtcaaggctgacattcagaaacagtacagaaagctttcctttagatgaattgaaatctgaggcatttgttaaattgtattctattcactaaagcatttccgaagtattttttctgacattctcatgaggaacatttttaagtcagttattttgttgtgttttacattatatttgttatatttggagaatcacagacttattaagattgaaaaagacctctaagatcaccyagtccaaccatcaatycatcaccaccatacccctcttgctcagtgccacatcaccatgtttcttgagca

SEQ ID NO: 64771 - DNA, 554 bp, Chicken  19866894331048_3
ttaataccatgatagctatatgcaagacaataaatggaaagacagcataaaaaaaagcggttaaaaagkggtcaaggctgacattcagaaacagtacagaaagctttcctttagatgaattgaaatctgaggcatttgttaaattgtattctattcactaaagcatttccgaagtattttttctgacattctcatgaggaacatttttaagtcagttattttgttgtgttttacattatatttgttatatttggagaatcacagacttattaagattgaaaaagacctctaagatcaccyagtccaaccatcaatycatcaccaccatacccctcttgctcagtgccacatcaccatgtttcttgagcatctccagggacagtgactccactatctccatgggcagcctgttccaaagcctaaccactgtttcttagaataatttttttcttatatccaactggaaccttccctggtgcaccttaaggccattccctcttttctatcactgttacctggggagaagaggccaaacccaacatctccacatcctc

SEQ ID NO: 64772 - DNA, 538 bp, Chicken  19866894331048_4
tatatgcaagacaataaatggaaagacagcataaaaaaaagcggttaaaaagkggtcaaggctgacattcagaaacagtacagaaagctttcctttagatgaattgaaatctgaggcatttgttaaattgtattctattcactaaagcatttccgaagtattttttctgacattctcatgaggaacatttttaagtcagttattttgttgtgttttacattatatttgttatatttggagaatcacagacttattaagattgaaaaagacctctaagatcaccyagtccaaccatcaatycatcaccaccatacccctcttgctcagtgccacatcaccatgtttcttgagcatctccagggacagtgactccactatctccatgggcagcctgttccaaagcctaaccactgtttcttagaataatttttttcttatatccaactggaaccttccctggtgcaccttaaggccattccctcttttctatcactgttacctggggagaagaggccaaacccaacatctccacatcctc

SEQ ID NO: 64773 - DNA, 516 bp, Chicken  19866894331057_1
cttcttgtggggtaggaccgctccagtgactgccacacgtgggacatggacactttgacatccaggcagaccctgccagcactgggctgagcagctgcgcccagcctcaccccgtcttgcccgcagagcatggattagtgcacaggtgctcgtaattagggccatgtgcactgagaacataaacaagccgtttcatcagcacccagcccgagccctgccatggtcagatgccctggaagatgtttgctaagacatgtgtcctccttctgccatgttttgcagatcacgggcaggaaccaygttgcttgtttgagggtttagattgctcccagtgtttgccaggcactatagaaagctgaagggcaggggagctttaaggctgcccttctgtggggggctaggagcacatctggggcacgcagctagttgtgttcgtggagttctgcagctgccagcacccagtgaggggaggtttttaaggataacaccaaattgtttccattcagcacaagtaag

SEQ ID NO: 64774 - DNA, 600 bp, Chicken  19866894331066_1
gatgaggaaacacccactcctgttaggccctgcagtactcctatgggcacagctgcatcctggaccttcacatgcttttcagtccacattcctcaggcatgtctgaacttgctctcacagccctccttcctggggagcctcctgcacaggacaaaaataggccttcagctcctattgttccctctccctcctaccctcagccaaagcacaggcttcctcagcagcagagcactgatacccgctcagtacagtgttctgcttcctcaacactgaagccatgatactgctaccccaacgacraggccagcagggcctcatcctatttgcacatctagacatcattaaagggctgctttctggcttacgcagcaaggacgcagccctctcaccacacttagttcatggaggaggaggaagaagcacactgccaaggccttcagctcaggacagaacgggcaacagcaacaatagaaggcagaaatccccccttggttacacaaggggtcttctacaaggcacaaaggcaagaagcccaacagaagccttgcctcattggccagtaaattcacaacacaaacaaacaaagcaacaccttgagcc

SEQ ID NO: 64775 - DNA, 600 bp, Chicken  19866894331077_1
acacgtatgtgacaagtgaacagaaagcagggtgaaaattactctgctgctgtccatagggtcccacaaacccaaatgaaatgaaggaaaaagttctctggtggcattagataaaagagattttaagggatggaatctgtgaccaaattctggcagagaaaaataagtagtaaattatttccatatctaagaagatattatttttggaagaatgtctttagagaaatacaaaagatgaagacaaaagactccacaacaaccccaatgctataggcacttcattactactgttatttaaaygttaagaaagacatctcctgagatggtgacaacgagtgtgatacactgtcagtaacataaaagccctatttaaaacatacaaaacattttaaaaacaagattacaaccattaaacaaaaccccactgaactctgcatggaagcstgatgagaaaaatcaaagactgccattggaactactttacacaatggagataattctctttaaatatacttaaaacagaactaaatagaaatacatctgctgagaaatgaattaatytctaatgttattaattaatctcaacttaagtaaaaaaga

SEQ ID NO: 64776 - DNA, 600 bp, Chicken  19866894331077_2
aaattctggcagagaaaaataagtagtaaattatttccatatctaagaagatattatttttggaagaatgtctttagagaaatacaaaagatgaagacaaaagactccacaacaaccccaatgctataggcacttcattactactgttatttaaaygttaagaaagacatctcctgagatggtgacaacgagtgtgatacactgtcagtaacataaaagccctatttaaaacatacaaaacattttaaaaacaagattacaaccattaaacaaaaccccactgaactctgcatggaagcstgatgagaaaaatcaaagactgccattggaactactttacacaatggagataattctctttaaatatacttaaaacagaactaaatagaaatacatctgctgagaaatgaattaatytctaatgttattaattaatctcaacttaagtaaaaaagaatatgtatataacatwgcttcaattccacccaactttattaaccattttattaagtctgactttgttagacttaagaacaataattcaatctccccgttacatacatatatttaaaaaaaacaacaaaacatacattcagatta

SEQ ID NO: 64777 - DNA, 600 bp, Chicken  19866894331077_3
ccaatgctataggcacttcattactactgttatttaaaygttaagaaagacatctcctgagatggtgacaacgagtgtgatacactgtcagtaacataaaagccctatttaaaacatacaaaacattttaaaaacaagattacaaccattaaacaaaaccccactgaactctgcatggaagcstgatgagaaaaatcaaagactgccattggaactactttacacaatggagataattctctttaaatatacttaaaacagaactaaatagaaatacatctgctgagaaatgaattaatytctaatgttattaattaatctcaacttaagtaaaaaagaatatgtatataacatwgcttcaattccacccaactttattaaccattttattaagtctgactttgttagacttaagaacaataattcaatctccccgttacatacatatatttaaaaaaaacaacaaaacatacattcagattaatagtaaatacttcagatatttggggtaaagcacttcaatatgagcaggaaaaatcacaggtctgatccaatgaaaaagatgacatattgaggatttccacagcagtgaaacaatgc

SEQ ID NO: 64778 - DNA, 600 bp, Chicken  19866894331077_4
cctgagatggtgacaacgagtgtgatacactgtcagtaacataaaagccctatttaaaacatacaaaacattttaaaaacaagattacaaccattaaacaaaaccccactgaactctgcatggaagcstgatgagaaaaatcaaagactgccattggaactactttacacaatggagataattctctttaaatatacttaaaacagaactaaatagaaatacatctgctgagaaatgaattaatytctaatgttattaattaatctcaacttaagtaaaaaagaatatgtatataacatwgcttcaattccacccaactttattaaccattttattaagtctgactttgttagacttaagaacaataattcaatctccccgttacatacatatatttaaaaaaaacaacaaaacatacattcagattaatagtaaatacttcagatatttggggtaaagcacttcaatatgagcaggaaaaatcacaggtctgatccaatgaaaaagatgacatattgaggatttccacagcagtgaaacaatgctttctcttacatcccaaaccaaacacgtaatccaataaaataacaaagaaatttc

SEQ ID NO: 64779 - DNA, 599 bp, Chicken  19866894331083_1
  misc_feature (1)..(60): n is any nucleotide
nnnnnnnnnnnnnnnnnnnnnnnnnnnnnnnnnnnnnnnnnnnnnnnnnnnnnnnnnnnntttaatgtagctaagctcaatatttgcagataactggaaaaaggaaaagggggcagaaattcaacagtgatacaatgaatacattcaagctgtacagttttttcccctgaatacgtttatgttccctttgctgcacatgagcttctaaagttaaaagagagttctgtgctggaaggattaattctcaaagcaacttctacaaatccaccagcctttgacatttacaagaattattttagwagagtcagagattggaggttccctggaatatgaagtattgttttattgtattttcagcaaaattttagcatgtgtacaatatgccacagaagaktaaggtcatcwttatattggaggtttgtcagttctggtatttaattatgtattaagaatgtgstgttacagtgttttttgaatcaagggaaattcatgcaactagagaaagattaaaaagttctgcaatgcaaagaaacaaaagcattaaggatgttaagcctgttaaaaacagagcaatgacaacagaaatgaattttagcagg

SEQ ID NO: 64780 - DNA, 600 bp, Chicken  19866894331083_2
tggaaaaaggaaaagggggcagaaattcaacagtgatacaatgaatacattcaagctgtacagttttttcccctgaatacgtttatgttccctttgctgcacatgagcttctaaagttaaaagagagttctgtgctggaaggattaattctcaaagcaacttctacaaatccaccagcctttgacatttacaagaattattttagwagagtcagagattggaggttccctggaatatgaagtattgttttattgtattttcagcaaaattttagcatgtgtacaatatgccacagaagaktaaggtcatcwttatattggaggtttgtcagttctggtatttaattatgtattaagaatgtgstgttacagtgttttttgaatcaagggaaattcatgcaactagagaaagattaaaaagttctgcaatgcaaagaaacaaaagcattaaggatgttaagcctgttaaaaacagagcaatgacaacagaaatgaattttagcaggcaccctggcatgcaaaataattgcagcatgcctgggctcctcttccatctgtgcacttttcctgccagttgagctgccttatgaaggccctttgg

SEQ ID NO: 64781 - DNA, 600 bp, Chicken  19866894331083_3
aaagggggcagaaattcaacagtgatacaatgaatacattcaagctgtacagttttttcccctgaatacgtttatgttccctttgctgcacatgagcttctaaagttaaaagagagttctgtgctggaaggattaattctcaaagcaacttctacaaatccaccagcctttgacatttacaagaattattttagwagagtcagagattggaggttccctggaatatgaagtattgttttattgtattttcagcaaaattttagcatgtgtacaatatgccacagaagaktaaggtcatcwttatattggaggtttgtcagttctggtatttaattatgtattaagaatgtgstgttacagtgttttttgaatcaagggaaattcatgcaactagagaaagattaaaaagttctgcaatgcaaagaaacaaaagcattaaggatgttaagcctgttaaaaacagagcaatgacaacagaaatgaattttagcaggcaccctggcatgcaaaataattgcagcatgcctgggctcctcttccatctgtgcacttttcctgccagttgagctgccttatgaaggccctttggctgtgttaaag

SEQ ID NO: 64782 - DNA, 600 bp, Chicken  19866894331083_4
ttttttcccctgaatacgtttatgttccctttgctgcacatgagcttctaaagttaaaagagagttctgtgctggaaggattaattctcaaagcaacttctacaaatccaccagcctttgacatttacaagaattattttagwagagtcagagattggaggttccctggaatatgaagtattgttttattgtattttcagcaaaattttagcatgtgtacaatatgccacagaagaktaaggtcatcwttatattggaggtttgtcagttctggtatttaattatgtattaagaatgtgstgttacagtgttttttgaatcaagggaaattcatgcaactagagaaagattaaaaagttctgcaatgcaaagaaacaaaagcattaaggatgttaagcctgttaaaaacagagcaatgacaacagaaatgaattttagcaggcaccctggcatgcaaaataattgcagcatgcctgggctcctcttccatctgtgcacttttcctgccagttgagctgccttatgaaggccctttggctgtgttaaagagctcttctggtgcttcttatgtaaaagaaatagcaaagtattttgatgctc

SEQ ID NO: 64783 - DNA, 600 bp, Chicken  19866894331095_1
gcttgacctgattcataaggtatttattagggagcagtgttaaaaaaagaatgtgaaatttgatcagttaatttctgttatggctagttaaggctttaactaattattttagtgttagtgcaaatattcgtgagtttactcttacaatcaagtgttagcaccgctaagtgtgcaatgatccattataataggtacataaaaatcccttattagaggagctagctgctcatatacaatacatatatcctgttcgttgttcagtgttaatctcatctcagtttccagtcttgaaaagagtartgttgatagtaagttcactgagaaaaatgggtttgttctccattgcaatgtcaaaattgatgaatcttcccactgtggactgtagcagctttttagcatactgtccaaaatgtgattaatatatgccatgargaacccaatgattataccagagttactgagtcttcaatcaaattatttccaaaacaaattcacctgcacttatctgtaatccaactgtcaatatcctttgatctatgcataagtgtccgtattatcttttcctgaactttgatttcccatgcttaaaagtaaattgtc

SEQ ID NO: 64784 - DNA, 600 bp, Chicken  19866894331095_2
agtttactcttacaatcaagtgttagcaccgctaagtgtgcaatgatccattataataggtacataaaaatcccttattagaggagctagctgctcatatacaatacatatatcctgttcgttgttcagtgttaatctcatctcagtttccagtcttgaaaagagtartgttgatagtaagttcactgagaaaaatgggtttgttctccattgcaatgtcaaaattgatgaatcttcccactgtggactgtagcagctttttagcatactgtccaaaatgtgattaatatatgccatgargaacccaatgattataccagagttactgagtcttcaatcaaattatttccaaaacaaattcacctgcacttatctgtaatccaactgtcaatatcctttgatctatgcataagtgtccgtattatcttttcctgaactttgatttcccatgcttaaaagtaaattgtctattttgttcagatataataaaaggaagtatcaggagatcatgagtgaaaaagcagcttatgcagcagggaagaagaatcggaagaagaagaaatttcacaattaagacttgaagaaaaataacaagctgga

SEQ ID NO: 64785 - DNA, 600 bp, Chicken  19866894331096_1
ccaaggacaaaacatgctggtctgcccagtggaaagccactagcagtgttacagtggtggagtagcttagttcagtgcatgtgagaactctttttgtcaacctccacagttccaagaagcagttatcagctgagactgagcttacacatcagtaacccaaagctcagggtctctgtttttttcttcaaagagactccagttaaaatgctgatatgtagaaaaagaactggcatcctcctgggcaacaaatggatgtgaggcagtagcacgtccttccaccagagaaggcagatggcttgytctctctgccaggttgatagaactgcagccagcaggctgaggaagctggtccttcccttctatgcagcatttgtgagactgtgtctgaaggattgctgcctgctctgggtgccctgggtgaagaagggcatggaagtagcaggcgtcagcccagggcagagcagtgggggtgtgtggggctgcagcacaaattggtgaagaccctcatgctgtctagccacctgagcaggaggttacagaggagtcaaagtctgctctaggacacatggtgataggatgagaaacaacaaatagaagttg

SEQ ID NO: 64786 - DNA, 600 bp, Chicken  19866894331105_1
aaaaacaacccaattggtttcttttcaagaagttcagacagaaatgtaggataccaccacctttttatttttattatttttatttttaatgatttctttttcagctgtcttcaaagcatatatccaagaaagagaatattgttactgaccgctggaacagtctgcctcctaaggatttagtatcactacctgcaaaagaacaccgacagtcacaaggcagacataacacacttattttatgtaacttttataaaaacattttgcagagccctaattcagttattggcacaggctgtacayggaggtggtggagtcactgtccctggaggtgttccagagccgtgtggatgtggcactgagggacgtggtcagtgggcatggtggggatgggctggtggttggaccaggtgatcctactggtcttttccaatgattttatagatcttttaatgattctctgattccattgttagtgtgctattacaataatgataagatgtttgaatataactgtatttgaaaatattgtaaatgtgcatcaaagcctttcgtgaagcagatggtggctataaaaacaaaatctgtacaagtatgtaatat

SEQ ID NO: 64787 - DNA, 599 bp, Chicken  19866894331106_1
  misc_feature (1)..(162): n is any nucleotide
nnnnnnnnnnnnnnnnnnnnnnnnnnnnnnnnnnnnnnnnnnnnnnnnnnnnnnnnnnnnnnnnnnnnnnnnnnnnnnnnnnnnnnnnnnnnnnnnnnnnnnnnnnnnnnnnnnnnnnnnnnnnnnnnnnnnnnnnnnnnnnnnnnnnnnnnnnnnnnnnnngtacagaaacggagaccttttgtgttctctcactcagtacactcagccctattggaaatgaggatgtctgtcatttaattccctttaattcaattcaaaatgccactggcccccgctgtacttagctactgagtatcrtaagagggaacagagggagccttcaaactcactgccacactattcttatatttttgctctttgccttttcttgctgcttacatagcaatttaaaatagtagtttttgatctaatcttagctgctgtgtcagctggcccctgccgaggcttaaatccttctgctgactatgaaaygtagactcaggtctcaaaaaggagcaggcacttgccttcaagagagcagtgtgtggaggtggaaatgaatggaaagtgtttcttgttggaaagtgaacaacagtgaaggatgagaatatggcctg

SEQ ID NO: 64788 - DNA, 600 bp, Chicken  19866894331106_2
agaccttttgtgttctctcactcagtacactcagccctattggaaatgaggatgtctgtcatttaattccctttaattcaattcaaaatgccactggcccccgctgtacttagctactgagtatcrtaagagggaacagagggagccttcaaactcactgccacactattcttatatttttgctctttgccttttcttgctgcttacatagcaatttaaaatagtagtttttgatctaatcttagctgctgtgtcagctggcccctgccgaggcttaaatccttctgctgactatgaaaygtagactcaggtctcaaaaaggagcaggcacttgccttcaagagagcagtgtgtggaggtggaaatgaatggaaagtgtttcttgttggaaagtgaacaacagtgaaggatgagaatatggcctgatgtatatttcccatggttccttgccttccctcagttttctcctccttctccccatgctgcctcccctgtagtgccaacacragcccctgcatggctgcctgrtgagccagatgcagatgtactcatccagctaaaaactaatwtttttttttctacgtgtgaccatagcctggg

SEQ ID NO: 64789 - DNA, 493 bp, Chicken  19866894331106_3
atagcaatttaaaatagtagtttttgatctaatcttagctgctgtgtcagctggcccctgccgaggcttaaatccttctgctgactatgaaaygtagactcaggtctcaaaaaggagcaggcacttgccttcaagagagcagtgtgtggaggtggaaatgaatggaaagtgtttcttgttggaaagtgaacaacagtgaaggatgagaatatggcctgatgtatatttcccatggttccttgccttccctcagttttctcctccttctccccatgctgcctcccctgtagtgccaacacragcccctgcatggctgcctgrtgagccagatgcagatgtactcatccagctaaaaactaatwtttttttttctacgtgtgaccatagcctgggtttcagagctggggaatagcactggaattgtcacacgagcaactcagcagctccatcaaaccaggttcctgctgtgccaaacacataatgggacttcagg

SEQ ID NO: 64790 - DNA, 472 bp, Chicken  19866894331106_4
ttttgatctaatcttagctgctgtgtcagctggcccctgccgaggcttaaatccttctgctgactatgaaaygtagactcaggtctcaaaaaggagcaggcacttgccttcaagagagcagtgtgtggaggtggaaatgaatggaaagtgtttcttgttggaaagtgaacaacagtgaaggatgagaatatggcctgatgtatatttcccatggttccttgccttccctcagttttctcctccttctccccatgctgcctcccctgtagtgccaacacragcccctgcatggctgcctgrtgagccagatgcagatgtactcatccagctaaaaactaatwtttttttttctacgtgtgaccatagcctgggtttcagagctggggaatagcactggaattgtcacacgagcaactcagcagctccatcaaaccaggttcctgctgtgccaaacacataatgggacttcagg

SEQ ID NO: 64791 - DNA, 431 bp, Chicken  19866894331106_5
gaggcttaaatccttctgctgactatgaaaygtagactcaggtctcaaaaaggagcaggcacttgccttcaagagagcagtgtgtggaggtggaaatgaatggaaagtgtttcttgttggaaagtgaacaacagtgaaggatgagaatatggcctgatgtatatttcccatggttccttgccttccctcagttttctcctccttctccccatgctgcctcccctgtagtgccaacacragcccctgcatggctgcctgrtgagccagatgcagatgtactcatccagctaaaaactaatwtttttttttctacgtgtgaccatagcctgggtttcagagctggggaatagcactggaattgtcacacgagcaactcagcagctccatcaaaccaggttcctgctgtgccaaacacataatgggacttcagg

SEQ ID NO: 64792 - DNA, 600 bp, Chicken  19866894331109_1
acaaagctcttaaaagtgtctcacggaaaggaaattccatacgtttttctgctctggaaggaaagaaaaaaaagaactggttttagctgatgattccaaaatgagagagagcagctgtctgcacagactcccagagcagggggcttaaactcccctccaagcttcatctcaggcttggactcatggagctcccagctttctgcttctgccagcatcctgggatgggcatccgggctcccagctgtaaaaggcagcccgtgaggtggggctgcctgggaacggcagaagctgaaggcttcractgtctgcccagacagctggcaagaaattagggcagagttctgacccaccccacccgtggttagctcgaactggtgcacagccacagacgtttccagtttggacaacctgacatgtctcactggaagcctctcgtgacaggaggctcctgaccgccgtggtggcacattggtgcgtatgtgatgtcatattattatttattgctaatcaggttttgtaaagccaatgagatttggagccttgctgaagcagagcaaccaaaaccttgtgaacgtgggcttctctgaaggtcaccgtttg

SEQ ID NO: 64793 - DNA, 600 bp, Chicken  19866894331111_1
ctccactcagggaaggacctgcatgcaaaccgagctgctgggtacgccacaaagagcgaggtgtgagcagatcccgagggaaggtacggccgggcgtagggggcactgtgcacaaagatgtgcgaatctgctctgagttcgagctccgactcagccttaattaccaattggtgatcaatgcggccgtactgcgtgtgggttggtaaataattaacgagggagtgcagcgcgaggatgggaaattcattgtagggctgcgagttgaggcgatgctgctgcctttacaaaggggaaggaaasgatgagctgtaacacggctggaagctgaagggaagcagtgatttcagtggttgttgaatgcaaggggactgctcggtctgtcatcgttagagctgatgcacgggcagggagggactgtaattgcgtggggaacgcaccggtgtcaataagagcttgactgaatgtcacatccactcgatggtgctacaaagggaagggaaatcactcagcctttgtgccccagagaaaggtcagagcatccgtttgtctctgcctgaaaccaatgggaaggacagcactggtttatccagcattaaggat

SEQ ID NO: 64794 - DNA, 599 bp, Chicken  19866894331112_1
  misc_feature (1)..(3): n is any nucleotide
nnntcctcttccttctcctgctcccccagcccacatcagcacacttccattctgccctcggtgcctggatatcttggcaggtttcctgagatacgcagttaactattttctgggaaggaggatggtaattggggagatattcctcttttgatgtgcagggcaattaaatcctcagtgaatgggggagaaaatgaagcattcggtgtcacttgaaagaggagatgtgtagtgccatttctgcgcaccagtgtgaaatacagaggggcacaagggcagaacagagctctttatgttgcagcyggagctgcctgcagatggaacagcacaacagcccattcagaagggaaactatacaataggtcatgagaaaaacctgttgctcctgattaagtttgcaaacactgtatctgtagggattcggagacgtggctgtaccagatgaatggtcccaactggaattgggctgagcagcaatggtacatcgctcccagttggaccaaacaagtattcacccggtcattctcacttattcctttgaacaaattatctgggtaccaattcttccatttgtttgctttactttaaagtagttataagag

SEQ ID NO: 64795 - DNA, 588 bp, Chicken  19866894331123_1
ctgctgtgctgacatatcacgctctggccattatttatcatattatctgaaactcctccttaggaaatcttcagctggagacacatcttcctgctattcatggtgggaaaggcctactgatctgcattactgacctatacaaggattctggatgtgtactgacagtttaccctgtcagacataaggctctaaaggaataactgtaaagaattacttggcacaggttccataaggcaggctggaccaagcctgaagttaccaattaatgcaccaaagccagaaagaaatcacaaagaaaascagcgcagaatgaaaatgcaggacatagcttctgcctgggcgtggatgaaaactgaaacagaattctcttcagataaccctggaacaacaaaaatgttccaaaattcagcacaggcattgaaagcacatcaccagtgtctcctttgagctctgggatgcaggctattgacactggtattttgtcttcaccatggactttgccccactagtgactgagaaggggctcaggtcctcatgtgggtcatttctggttcagtggaaggagccagtgctgatgccactgagcag

SEQ ID NO: 64796 - DNA, 600 bp, Chicken  19866894331124_1
tcgggatgccaagttagagacatggagttattaaaatgcatggagttattaaatgcatggaggagtaaaatcttttggcagaagagggcaggatagaaactgtaacaaaatttgaagtgagtctttagggtaaataggattggcagaagaattattaggctggaaaatgggattcagtcctaagctttggttaaggagagttttccaggcactcattgttaatagaaataatgatgtgggaaaataataaaaactaaactggaaatgccgaaaccttcaatagtcatttcagtgctggcrcagacactaacaaacaagagatttacttaagttyggttttctgaaagcacaacagctacttgagtctcttaaatgcttaccttttaatgagcactcaggtgtctaaaatgttacaggagaactttgacttcatcacgctactgaatatgaaccaggaagtatgaggatgtcaacaggcttgcctccatttttacaagcatttaaaaagcagtcatcactttccctgcctgcaaatggcaaaagaacatttttatctaagatcctactgctgttttcataaatctgtccctaagtatcagg

SEQ ID NO: 64797 - DNA, 600 bp, Chicken  19866894331124_2
aatgcatggagttattaaatgcatggaggagtaaaatcttttggcagaagagggcaggatagaaactgtaacaaaatttgaagtgagtctttagggtaaataggattggcagaagaattattaggctggaaaatgggattcagtcctaagctttggttaaggagagttttccaggcactcattgttaatagaaataatgatgtgggaaaataataaaaactaaactggaaatgccgaaaccttcaatagtcatttcagtgctggcrcagacactaacaaacaagagatttacttaagttyggttttctgaaagcacaacagctacttgagtctcttaaatgcttaccttttaatgagcactcaggtgtctaaaatgttacaggagaactttgacttcatcacgctactgaatatgaaccaggaagtatgaggatgtcaacaggcttgcctccatttttacaagcatttaaaaagcagtcatcactttccctgcctgcaaatggcaaaagaacatttttatctaagatcctactgctgttttcataaatctgtccctaagtatcaggtttgattgctgcctttcacttaaaggaactcaag

SEQ ID NO: 64798 - DNA, 482 bp, Chicken  19866894331132_1
gcaacactagataaacaggctacactgcattgtagaaatcaactagacagtgccctcagtggcctgtgaattagatagcaaatagttttttagatctataacgagtttgatttggatctatgtagacaaaaaactagtccaggtaaaagattttgatggtatcgattctcatcagataggatttcctgccaccaggagatagtcacagttcaaaatgatttatccttcttcatgatggattaagcatagagatcaaaggttccaccatgtgaaagtgtcagaaattccatttaccatcasctatgggttcccccaaacaaaggaaagcatagaaaaagtagaaattttggtagtaactctttgccctggtcctagttttggaaatsaactttcaattccagggttcagaacatcaaatgcaacaacgaagtttagcaaatgtgttctatatgaatgcaaatcttctaggggggggggggggg

SEQ ID NO: 64799 - DNA, 396 bp, Chicken  19866894331132_2
tttttagatctataacgagtttgatttggatctatgtagacaaaaaactagtccaggtaaaagattttgatggtatcgattctcatcagataggatttcctgccaccaggagatagtcacagttcaaaatgatttatccttcttcatgatggattaagcatagagatcaaaggttccaccatgtgaaagtgtcagaaattccatttaccatcasctatgggttcccccaaacaaaggaaagcatagaaaaagtagaaattttggtagtaactctttgccctggtcctagttttggaaatsaactttcaattccagggttcagaacatcaaatgcaacaacgaagtttagcaaatgtgttctatatgaatgcaaatcttctaggggggggggggggg

SEQ ID NO: 64800 - DNA, 600 bp, Chicken  19866894331138_1
aacaggatttgtggaggaggcactggactgaaatgcttgtgccatcagcaggcctccctacaacacatccatgctggtccacgagaaaagaattcatcctcaagcaagcacttctgtacaaccttatagcatcatcattctgtgtctatggctgtcgagcatacaaaattgttcgatggctgtgtatgctttttcatatgaagctgtcaatcacttgttaaatcattgatttttatgaagtagcatttcccagggttactattccaagtattcctgctccatacctctccagtgtacctrggcacaaatgctcagctctgctgtaagggtgctgagctttgcaaaggtgctgaggtgttgtagcagcctggcctgctagcttgaacattttgctgggaaaaggtagtcaagccttggttcaagtagcttgctcagcatgccaaagccagggcataggatgcactcaaattctttgtcaatctggtaatctttctgccttcctacagtctctataccccatccagcttttgcaaaaacagtttgatgatttcaacagactagtcttcctccttgaccaaacctagactcatcctcatggca

SEQ ID NO: 64801 - DNA, 600 bp, Chicken  19866894331139_1
tggattgtctgttgtttttcttctctgttgagggaacaatgctctttgtccatgcattttaaagcgcactaatgttgatgaacaatttaagggagaaatatttgattctgcaggggcgttggtaatgacttaatcaaaggcaaaatgcccctttgctccaatttaatgttcttacagtttagttcttattagcattgatttttcccaagcctttagcatcctatttatgaaaggcaacataatgaaatttagcaataaacaagaatgttggaacaacagaatagacctttattctgctgkctggtgtgtaggtgtggaacatctgcatctccagaagggctgtatttcagtgggcttatacaggcacatggaaacacattgtgcccccatcaccatccatatgtagggcaggagaagggacatgctgaatgtctagtctgatgatgtttgcatgtaagccagttgggaatctctgacattctcaattagagcttgtttgcacactctctttgcaattaccaagcagtttgcagccagtgcacctgaaggctgctctgggacaagctaaaatctcactgtcaaagctaggaaatatgtggc

SEQ ID NO: 64802 - DNA, 600 bp, Chicken  19866894331139_2
agtttgcagccagtgcacctgaaggctgctctgggacaagctaaaatctcactgtcaaagctaggaaatatgtggcatttgcagtgctaacagagaaagatctaaaataaatgcctaaactttcctcagacctttcaatggtcaccagtccttccacagtttctcacttagactggttagaaataatcttcacattttcattggttggagtgcctgcatcagtactacaaaaaattttagaggagaaaataatgtttaaaggggtttcttaagtaggacctcccaaatatttaagtgttycaaasagataaggcattgaatctatataaaaatgtggaaagtcattaccaccccccctgcagcatcaaatatttgtcttagattgttcacgaacaatagcatgcttcaaaatgaatgggcaaaacccatccatggctgagagtgcttgctcacctcagaacacctggtggactgatgggtgcagcttttggctgcactgctgtaatgtaagctgagaagtgatttcgtgtttgtggatagtgagattccaaggcataattcacggggcaaagaaaaagagcagtatctgagaaacaagct

SEQ ID NO: 64803 - DNA, 600 bp, Chicken  19866894331139_3
gcagccagtgcacctgaaggctgctctgggacaagctaaaatctcactgtcaaagctaggaaatatgtggcatttgcagtgctaacagagaaagatctaaaataaatgcctaaactttcctcagacctttcaatggtcaccagtccttccacagtttctcacttagactggttagaaataatcttcacattttcattggttggagtgcctgcatcagtactacaaaaaattttagaggagaaaataatgtttaaaggggtttcttaagtaggacctcccaaatatttaagtgttycaaasagataaggcattgaatctatataaaaatgtggaaagtcattaccaccccccctgcagcatcaaatatttgtcttagattgttcacgaacaatagcatgcttcaaaatgaatgggcaaaacccatccatggctgagagtgcttgctcacctcagaacacctggtggactgatgggtgcagcttttggctgcactgctgtaatgtaagctgagaagtgatttcgtgtttgtggatagtgagattccaaggcataattcacggggcaaagaaaaagagcagtatctgagaaacaagctgttca

SEQ ID NO: 64804 - DNA, 600 bp, Chicken  19866894331144_1
tgtgtgctgtggaacaatacactttgtaaaataatgccataaacaatgaaataaatagaaacagcattgcttatagttgattgtaatataaagttataacagaatgaataaaaacttatcaatttctactatttatagaaaagtatactccaacagtgaaaaatatccagttatgaacaaactgcctttctttgcattgttgactgtaaaggtaagtgcaatttctaacaatataaacagattatcaaggttaattcctagaagtccagtcataaatgagacttttgttctgaggtacayacaggctccttgaaaatactccattctgactcttgatctagagtcaagatcaatctctctgctagcaaattctttgcagttgttttttttataactggtcactactgtttgcaaaatacttttggcaaacaagcaggtatcagttcagtatggtctgtgttctgagtcagctgggtgtccatgctttgattggaaaagctctctgaagcagagaaaaaaaaacatccccaactgccaagaaaaggaaaggctgcctcactcattcttcagtgctagcctgcaagacaagtcctaaccccg

SEQ ID NO: 64805 - DNA, 600 bp, Chicken  19866894331144_2
taatataaagttataacagaatgaataaaaacttatcaatttctactatttatagaaaagtatactccaacagtgaaaaatatccagttatgaacaaactgcctttctttgcattgttgactgtaaaggtaagtgcaatttctaacaatataaacagattatcaaggttaattcctagaagtccagtcataaatgagacttttgttctgaggtacayacaggctccttgaaaatactccattctgactcttgatctagagtcaagatcaatctctctgctagcaaattctttgcagttgytttttttataactggtcactactgtttgcaaaatacttttggcaaacaagcaggtatcagttcagtatggtctgtgttctgagtcagctgggtgtccatgctttgattggaaaagctctctgaagcagagaaaaaaaaacatccccaactgccaagaaaaggaaaggctgcctcactcattcttcagtgctagcctgcaagacaagtcctaaccccgattcctcctgcactttctctcagtgtcagtgatagatgctgtgttggttctcgcacatttactagctgatctgtatgctctgt

SEQ ID NO: 64806 - DNA, 600 bp, Chicken  19866894331144_3; identical to SEQ ID NO: 64805

SEQ ID NO: 64807 - DNA, 600 bp, Chicken  19866894331148_1
gaatattaatacctgtgagggaaaggtatccctacaaagaaattctgcagcctgcaatgaaaacgtgggatacaattgagaaaggtgtccagtacttgagggaaatagccctggtggaaatgttatatgactctaattttgctcctaattatccacgccaaaaccttgatccggacggagtgaggacaacacctgacatatgacaaaaacttacaagagcagcactagacagatacgcccccacactagtagcaacgttccacagatatgaggaccaacagagaagaccccttgttttcraaatgattcttagackccaaaactatgaacagcacctacccccaactcacgtttccatttcagccgtctcagagttagcaaacagactgggtgaagtacatgagcaggtgtctccactgattaatcgtgatgaacccataatagtatcagaaacgtttgacgaagatcaggataagcaaaggggcctaatgaaagaacatatcaaactaacgaaaatccaattaattaaagaagatggatcctcctcctcacctgtatcatcaaaaatttcagctattgaaagcaaacgctttcgtgctc

SEQ ID NO: 64808 - DNA, 600 bp, Chicken  19866894331148_2
gagggaaaggtatccctacaaagaaattctgcagcctgcaatgaaaacgtgggatacaattgagaaaggtgtccagtacttgagggaaatagccctggtggaaatgttatatgactctaattttgctcctaattatccacgccaaaaccttgatccggacggagtgaggacaacacctgacatatgacaaaaacttacaagagcagcactagacagatacgcccccacactagtagcaacgttccacagatatgaggaccaacagagaagaccccttgttttcraaatgattcttagackccaaaactatgaacagcacctacccccaactcacgtttccatttcagccgtctcagagttagcaaacagactgggtgaagtacatgagcaggtgtctccactgattaatcgtgatgaacccataatagtatcagaaacgtttgacgaagatcaggataagcaaaggggcctaatgaaagaacatatcaaactaacgaaaatccaattaattaaagaagatggatcctcctcctcacctgtatcatcaaaaatttcagctattgaaagcaaacgctttcgtgctcaagtgagaaacaacaa

SEQ ID NO: 64809 - DNA, 549 bp, Chicken  19866894331155_1
ggatgtgcactgttgaggagaccagtggctcctaggactctacaccagatgcaagtttttccacatggtgtcaataactcactgggaacagactgagctctttgagaaacgatgctgtgctctgccagaagaggttgatttggataattatagcaggtcatcagagaacaatggaactggaaagtacagattaaaccaatgctattcccactgtatatactttgtgcaaggaaggaataacaatgtcatagaggcacaggtagaaaagacttttcagactgtaggcaacagaaacttcasacaaaatcggtcacaggccgacactgctccaaaccaacaaaaggttattttgaagcaggtgaggtgggtagagacctcttgcttgtctcccaggagtgacagactttacccctgtttattcctttaggtgaacttgagtagtacaaaactttacagatacagtgtcatgtttttttcagccacacatccagtgccagtcctctggattagtgtgagatatctgtacaaactggttgtcactgcactctg

SEQ ID NO: 64810 - DNA, 600 bp, Chicken  19866894331159_1
gtagtctttgaacaaaggcagctggattgttttattcaagggtacttccctaatgtgaaagcaggtaggaagaacgtgttttttgcaaccaaaaaaagttaaagaggagaaattaataaggagaattatttacagccagttcagttctgaaactagcataaacagcactcagtgaagcagcacttctaatgatttcactcctatatcctttagagaggatttatcctgtgttcttctatgtagataaaagctcagggtgctgtgtaactactatttaaaaatccgaacttctgaaacacragagagttgagttgacgtgataatgatctcccttaatgatctatgcccatagcactgtgatcaatattcacaatatatgtttgttttctctttcacagcatcactgtagacagtgtggaaatatcttttgtgctgagtgctcagcaaagaatgccttaactccttcttctaagaagcctgtccgggtctgtgatacttgctttaatgacttgcaaggataactggtgtgagtgacaaagaaatgttacactaaaatttattatttctgttgatgcacttcattcagcactcagactacta

SEQ ID NO: 64811 - DNA, 600 bp, Chicken  19866894331160_1
tggtccctgcctgagttcattgctcatctgtattaacaatatattatggaaaatacagctgtaggtgtaggaacaggagttctacctgctctcacccatgagggaagtgccttagtcactgggctgctcaaagaaccatcaccaacaccagcactatcatatggacagactttctatttttcacctgtgcagactgtgctccttttctgaaagaggaatttgaatatttccatttggagacttaacaaggctcctaaatctcgaggacagctaaaattgtatgctttttcttagagcacytcttactgtctactgtcagctgttgctaatctcaggtgttccttgttgaatgagtagactttctgattctgattcaaaggaatgttaccaacagcctccacagggtgccagttgccagattccattctatagtattgtatattggcactgctggcattgcatcttgcttttaaaatcacagaatcacagaatgtcaggaattgaaagggacctcaataaaataaaaagaaaatactgaaaacctattgctggatccagtattaaggcactagataacatagctatcttttccaaaagtga

SEQ ID NO: 64812 - DNA, 600 bp, Chicken  19866894331161_1
ggggccacactctcagcagtgtcagagaggcactgagggccttctcacaggcttacaaaaactgtgtgtgtgtgtatgtcaacagattttttttgccagtgaaccactaatttggaaagcaagtccttgttcatcatacctcattcatgcatgcttcttttttttaatagcttgctcacagatgtggtgctgttggtgtttttgttacggctaggaaaggtggagtccctgcaggagtgcttctggaaaaggaaaatgcacataaagagcacgtggatttggaaagcagtgtcttttagmgtggcctgtgttttaagctgactggttgtgagagtactgactgagttctctgttttccttgtaagtgaagacgtgcttatgaatgttgctgcatattgcatgttctcatgtgatacttctcttcggtaagcagaattgaaagcagaatgccatcagtgagtgagtgatgcctgtgtagattgaaaagataaaaaatgaggctcacacgagatggagggcctgtatttttctgcacggtccatatgctgaagagcggagtgagtaagttctaggaacaaagaatggaaaagcatcagttta

SEQ ID NO: 64813 - DNA, 600 bp, Chicken  19866894331162_1
tgaaaaaaaaaaaaaaagtctgctggacaatgggatgtttgcttccattgcatcattctgtgcatgtccttaaatggtaaaacttatcccatgtcacatggcctgtgaatttaaaaaggaaggaactactttggtagagctcagtgtgctgactttcactgtggaaagcacgtacctctgtgggggagctgcaccatatatgggaccaaacacatcatatgggaaagttgtgtgcaaataaagggagatgactttttctattgcaaacagccacaacctgtgtgtttcaggtgttaaatkcaaaaatgccactgcaagagaacttcaaagactttgatatcaagtttattggaaactctttccactaactgttctgtttcttctctgctctcttttttgaacaaaggcargggctggtgacagacaagatgccattgcacgtgctggtggagcgtcacctccctctggagtacaggaagctgctgattcccattgctgtgagtgggaataaagtgattccctgcaagtgaacatgcccctctggcagtgggcatgtcctaggggtggaaacatagctaacttctgcaagcagaccattgg

SEQ ID NO: 64814 - DNA, 600 bp, Chicken  19866894331162_2
ttaaaaaggaaggaactactttggtagagctcagtgtgctgactttcactgtggaaagcacgtacctctgtgggggagctgcaccatatatgggaccaaacacatcatatgggaaagttgtgtgcaaataaagggagatgactttttctattgcaaacagccacaacctgtgtgtttcaggtgttaaatkcaaaaatgccactgcaagagaacttcaaagactttgatatcaagtttattggaaactctttccactaactgttctgtttcttctctgctctcttttttgaacaaaggcargggctggtgacagacaagatgccattgcacgtgctggtggagcgtcacctccctctggagtacaggaagctgctgattcccattgctgtgagtgggaataaagtgattccctgcaagtgaacatgcccctctggcagtgggcatgtcctaggggtggaaacatagctaacttctgcaagcagaccattggttgttccatgtgatggttttccacatgtaactactggggcaatacgcagtcagcacaggcttgaattgattcaggttgtgctgtggctattgtgccagcctgctggatct

SEQ ID NO: 64815 - DNA, 472 bp, Chicken  19866894331162_3
ctgcaatgcacctcagtgctaacataagaaatggtaaaaagtgctacacagcagatgtgtgagggagtaatgaggaaaatgtgagggagacaatcctgcagaccccaaggccagcgtggaaggagggcagaagatgctccaggagcagagtagaagttccctacagcccaggagaggttcatggtagagcaggctgttcccctgcagcctgagggcactgcatggagcacaataccactgggcagcgcggggaggaaggagcagcagagatgaaatgctaggggctgatggcagcctgtkttccccaccttcctgtgctgtatggagtgggaagggcgtagaagagtttgggaatgaaggagccacttagggctttggaagaagaggagaatcggggaaaggtgtattttagttttgtctctttctcactttgcttctcaagtaattgtcaataatttaatcttccccaagt

SEQ ID NO: 64816 - DNA, 600 bp, Chicken  19866894331176_1
tcacaaaggggcccagtaccctgagcagcacccatgctgctgtctgaccaaggaataacattgaagtgaactctgaaagcagctccttgcctcccaccttctctgcatgaaacgcattggttgtttccaaccacaaacactggtgtgttttcacaagttgagatcactttcaggcagcaaattgttgcaggttcaaagaatagattttgaaaaggtgctgatatttgggtaaaatcagtgttcctgcttgtggttgcctaaagactgcatcaaagtctgattgcatccagactgcagaaytgttagcatcagatagtttacgcgttatgcatgtcacaaagatttacttgaagctcaggacttaacaaccataacacagaaggagttctgtacaaagcttgaagagttagtccttggcctttggccaggaataaagaatgcttgcccttgtgccatttcgtcctgtgctgctccactgctggcagcagttctgcttcagtgtaattgttggcaccgaagccaaaccgagccctgaatggcctcttccagcaagaaagcaggggtgcagaggtctgagactgcatcaaaactccatattga

SEQ ID NO: 64817 - DNA, 600 bp, Chicken  19866894331186_1
cgtatctgctgctaaatgtgaaagaaataaaggaacgatatgaaggcttagcttatgaagattgatatatcctcattgcacagtgcagcaatgctcagagtcttcagcttcttgtttgctttattttccccactctaatcattggcaacacctgtaagataacacttgagcccaatctgaatgcaaaggtgattgtgtggtttcataatcaaagttagtaaagagctaaaatgcaagaaattctgtgaaactgcttttaaatatgattgaatggaaaaaaaaatagttattcatatagcrgaatctttcaagtaattaagttgtgttcataaagaaaaatgtcctgtggcagtacagaaatcattcatatgtttacaattaacatatatagtttttttaatagaaactacagcaagcaaatgttagaggcaactttatattttaacagtatgtaaatacacacagaggcatatttagaatagataggcagctatactttgggaggtggaattggattgcagaatgagatgaaaatggcattcatctgtttttttatggcaggacctaatgttctgcaggtaatgaacaagtgaaacacac

SEQ ID NO: 64818 - DNA, 600 bp, Chicken  19866894331186_2
aactgcttttaaatatgattgaatggaaaaaaaaatagttattcatatagcrgaatctttcaagtaattaagttgtgttcataaagaaaaatgtcctgtggcagtacagaaatcattcatatgtttacaattaacatatatagtttttttaatagaaactacagcaagcaaatgttagaggcaactttatattttaacagtatgtaaatacacacagaggcatatttagaatagataggcagctatactttgggaggtggaattggattgcagaatgagatgaaaatggcattcatctgrttttttatggcaggacctaatgttctgcaggtaatgaacaagtgaaacacacctttcagcaccaaatcagtatgccagcatagcattcctaggcgtgctagggtaaatatagcctcatttttatgaaatgtaaaacgaaaaccatgcttttgagctgtgattgggaagccccagtgcccgttattttggtgttattctgaatgtttcttctttggcttccagctatttcttgcaacctcctaaactgttgtgtagcattttacctcaggtgaatcgttgatgtcaaggtttyacaggtca

SEQ ID NO: 64819 - DNA, 600 bp, Chicken  19866894331186_3
tcatctgtttttttatggcaggacctaatgttctgcaggtaatgaacaagtgaaacacacctttcagcaccaaatcagtatgccagcatagcattcctaggcgtgctagggtaaatatagcctcatttttatgaaatgtaaaacgaaaaccatgcttttgagctgtgattgggaagccccagtgcccgttattttggtgttattctgaatgtttcttctttggcttccagctatttcttgcaacctcctaaactgttgtgtagcattttacctcaggtgaatcgttgatgtcaaggtttyacaggtcaagcatcaataaatttaaaaattgaaaatcttgcagaatgatgagatttttttttttgtgaaaaactgtttagatcacaagtaaaactcgatacctcattaatttaggaagtgttagtctattgaatgctaagaattacatgtttatacattagtctgaattataaaatgacaaatcttttcaatagatttcatagacatcttacagcatctgcagatcatgtgaaaagggtgacttgtacctaataaacatcaacacaggaattgtaacactgaacactctgcaaatcttac

SEQ ID NO: 64820 - DNA, 440 bp, Chicken  19866894331194_1
tttggaaactgatggggtggagaccccattcctggaggcgccagaggccacggatggggccctgggcagcctgagctgctggggggcagtcagcccaaggcagggcttggagctcagtggtcctcagggtcccttccaacccaaccattccgtgtctctgtgattctgtaagttgcagggctgcagccctgctgcaggctgcgtgggcacggggtaggatggaggtcggatgtcctcgaagggcaaaacacagcctttggcttcgtcacagcaatggctgcagcacaccgcagtcacacyacactggagagagatggatttgatttcagctggaatactgggaaaaagttcttgtccaaaagagtggcggtgcagcggcacggctgcccggggaggggggggagtccccatctctgggggtcttccacagccgaggagat

SEQ ID NO: 64821 - DNA, 600 bp, Chicken  19866894331197_1
gtatctcggcttaaaagataagggtggcttctaacaatataaaagtcctgccactgtggtgattcatattatctttgtaattgggatatattgcactacagagtcttgctttataattaagtttgtttgacctttgggcactccgggggcctcccctagttagcccaaatgggtgatacaaagcacccacattgttggaaagtcttgaatgtaaagatttctgtatatgttcaacagtatctttttttcttgagtgttgcctgcagtttgcactttgctgcagaattctgtttttaaaaycaaagtatatacaccaatctgaattatgctaagaacatggtttatcataataatggccttcaaaatgtactattcaacagaaatattggcctgctcgagacacggtaaaaacatcatcttgcaattgctcaagaatctttccaaggatgtactccatctgtaaaactgctgatatctgcaaagaagagagatttcytcccaaatcatattttatgtttagaagatgataaaatcttctgtaccacaaatttttccagagactttttcccttctccccttttcacatccagaatgagataa

SEQ ID NO: 64822 - DNA, 600 bp, Chicken  19866894331197_2
ggaaagtcttgaatgtaaagatttctgtatatgttcaacagtatctttttttcttgagtgttgcctgcagtttgcactttgctgcagaattctgtttttaaaaycaaagtatatacaccaatctgaattatgctaagaacatggtttatcataataatggccttcaaaatgtactattcaacagaaatattggcctgctcgagacacggtaaaaacatcatcttgcaattgctcaagaatctttccaaggatgtactccatctgtaaaactgctgatatctgcaaagaagagagatttcytcccaaatcatattttatgtttagaagatgataaaatcttctgtaccacaaatttttccagagactttttcccttctccccttttcacatccagaatgagataaaaaatgacctgttctcaagctacttkaagtccagaattctttggaagatgaccagtgcccatgtaagacttctgcttacaatcatgcagcagtttttagtaatgtatagctacagatcttatttaaaatttccctaattaagaaaaacttctcactggataacaaggtcaagagcagtaaagtctaaaatctgggg

SEQ ID NO: 64823 - DNA, 600 bp, Chicken  19866894331197_3
tgctaagaacatggtttatcataataatggccttcaaaatgtactattcaacagaaatattggcctgctcgagacacggtaaaaacatcatcttgcaattgctcaagaatctttccaaggatgtactccatctgtaaaactgctgatatctgcaaagaagagagatttcytcccaaatcatattttatgtttagaagatgataaaatcttctgtaccacaaatttttccagagactttttcccttctccccttttcacatccagaatgagataaaaaatgacctgttctcaagctacttkaagtccagaattctttggaagatgaccagtgcccatgtaagacttctgcttacaatcatgcagcagtttttagtaatgtatagctacagatcttatttaaaatttccctaattaagaaaaacttctcactggataacaaggtcaagagcagtaaagtctaaaatctggggagcttctactagaaatgcaaatcctaaatttatcctcattgggttcaagtaatgcacaaaactgaaggctacactttgcaatggattattttactttcaagccataatgtaaattaccttcttttattgt

SEQ ID NO: 64824 - DNA, 600 bp, Chicken  19866894331199_1
gttttgactataaattctaaattttaactaactttccctggtaactttccctggtaaattgctgcatgactcttagaagcttttagagctccaagttgtctctgttattcaaacaagaatgttcctctagaactcatttgggaggttaagtaagtgtacctgtgaagtgtgtactggtccagtaaatctattgtaataccttcagagactcccagagggtggatgtatcaagtagcgtcctcatgtgtggtgcttatactccaggttcttcacgaatcactaatacagccctcaggactrgcatttagtggacttcacagtttttcagtcactgttgcatttccatggctgtttcctacgctttttgcagtttttccctgaagttttaatgaacattttcattcatgcagtttagagctgtcttgcttgtgatgcagttcaacaaaaccactcctgttccagaaaaaataatctgtgtaattgttgaactgttacatttgtccattataggagcaatgtacaatgagaacactaatgcaagtgttacaaaataagtatagtataaaatagttttgtaaaggtgagattcactttctattt

SEQ ID NO: 64825 - DNA, 600 bp, Chicken  19866894331204_1
gacaagttggttccaatttcttaagcccgaataccgccgggtttctggcagtaggaaagaaaacgcaggaatgcagtagctgaagaatgtgttcagctgcttaaacaagggatgctgaggaaaaaataggtcaattatatcaaaatatagtactgactaacttgcgatagtaacttgtggtgccttgtagtaacaatttggctttgatcttactttacaaatctcaagtaatatgcacatacgcattttgaaatgctttgcaaccaatcggcactgccacagctcgatttcgggttcttygcatctatttttatattaccaaccactgttaatgtgtgttttacacattacgtacggtgcgttacgctgtggtgtcacagatgcgacggtgctctgcaacgctgaacaagaaccagaaacaaacttcctaaagaaagataaaagccaactatttctgccagctgatgttcctgtcaactgattcagaaggaagttaacagttctccatcccagtcctgtagatgtttataaatagtcctatggatcgtgcgagtatgaagtatgaaacaaactttttctagtacctaatacaaattgtgg

SEQ ID NO: 64826 - DNA, 600 bp, Chicken  19866894331206_1
gtctttttgagcatcacttcttaaataaataaataaatatgatattaaaaaaaaaaaaaaaccaatttcatgctagggaagcttgaaactatggaaattaaagcttaaagctttgagagccccaccggggatggcaggcgtgtggtttgctccagagtgcccttcagcatcaagaggtaaaaccaactgtgtgatctccggtgcggtgctttgttaaccacacactgttctacccattcggtgttcctattcttttccttgttgaattactcacgttcacgagtggtttgtgaaagcagyatttccccagctgcaggaccagtgagaggagtaaataccatgagcgkgcaaatctcgtgtgtgacatcctgggatggctcaaatcccagctccacgtcaggtcgtctcactgcggatattatggcactcccagcttcagctccaggctggagagcccaccacaacagggtaatggactccatgcattatttttcaccacccgggtgattactcattgcctatttttgtaaagaaacgactgaagaaaggctctgaacagaggtctgaatgataaccaaaaaatcatcatcctctcaggag

SEQ ID NO: 64827 - DNA, 600 bp, Chicken  19866894331206_2
aaaaaaaaaaaaaaccaatttcatgctagggaagcttgaaactatggaaattaaagcttaaagctttgagagccccaccggggatggcaggcgtgtggtttgctccagagtgcccttcagcatcaagaggtaaaaccaactgtgtgatctccggtgcggtgctttgttaaccacacactgttctacccattcggtgttcctattcttttccttgttgaattactcacgttcacgagtggtttgtgaaagcagyatttccccagctgcaggaccagtgagaggagtaaataccatgagcgkgcaaatctcgtgtgtgacatcctgggatggctcaaatcccagctccacgtcaggtcgtctcactgcggatattatggcactcccagcttcagctccaggctggagagcccaccacaacagggtaatggactccatgcattatttttcaccacccgggtgattactcattgcctatttttgtaaagaaacgactgaagaaaggctctgaacagaggtctgaatgataaccaaaaaatcatcatcctctcaggagggtgaacttctcccccagtattagcaacatcaaggcgttgggcaata

SEQ ID NO: 64828 - DNA, 600 bp, Chicken  19866894331210_1
ccctagttctctgaaagatttgtttcagaatgatgagaaattcctttgatatcagatgcaatatttggacagcttgtggcactagaagtttttgtgagagctattttgaattttggcgttccagttttttgtttgttttgctttggttttatacattttttgatttgttgttgcatttcagctacaataaataaccagatctaggaaaacctatcacaaatttgtcttctttagatatttttaataaacagggcatatctgattatttgcatgtttaaaaaaaagaatgacattgaaacwtctttaccattactattaacatgaaagataacattacatttaaatataactctgtatggagtaaaatgttctgattgctatgtttggcaattgcaaataagtttttggagggtttaaattataaaatgatacttgtggggggatgttttttttatctgtatttctcttcttgtagtaaagagagaacatcaatgttcttataagttcatgtataaagtaagtgatcttaaataatttttgaatgatggccacatttatctccagaaaagtcaagattctcatttataccactcttgttat

SEQ ID NO: 64829 - DNA, 599 bp, Chicken  19866894331226_1
  misc_feature (1)..(177): n is any nucleotide
nnnnnnnnnnnnnnnnnnnnnnnnnnnnnnnnnnnnnnnnnnnnnnnnnnnnnnnnnnnnnnnnnnnnnnnnnnnnnnnnnnnnnnnnnnnnnnnnnnnnnnnnnnnnnnnnnnnnnnnnnnnnnnnnnnnnnnnnnnnnnnnnnnnnnnnnnnnnnnnnnnnnnnnnnnnnnnnnntggagtgctctgaaagaattcttcctatccaaaggatcttcaagctttttaccagacaggtctcttttggaaaacatccttgttttgtgccagctcacccaccctgctccgtggtcactagcwstgcagaagttttgccataggatcataaaatcaccaaggttggaagagatctccatgatcatctagtccaactgaccacctactactactatttccccactaaattatgttccttaatatgacatctaaatgtttcttgaacaccaaatctatatctatcacatcttaccacacagatggacctgcacctgggcagtcacgggcttgcatgtggccaagccaaacatcaccttctctgtctatctcccactcctgatctagaagcagaatctcacatccatgccatcataacttacagt

SEQ ID NO: 64830 - DNA, 599 bp, Chicken  19866894331226_2
  misc_feature (1)..(176): n is any nucleotide
nnnnnnnnnnnnnnnnnnnnnnnnnnnnnnnnnnnnnnnnnnnnnnnnnnnnnnnnnnnnnnnnnnnnnnnnnnnnnnnnnnnnnnnnnnnnnnnnnnnnnnnnnnnnnnnnnnnnnnnnnnnnnnnnnnnnnnnnnnnnnnnnnnnnnnnnnnnnnnnnnnnnnnnnnnnnnnnntggagtgctctgaaagaattcttcctatccaaaggatcttcaagctttttaccagacaggtctcttttggaaaacatccttgttttgtgccagctcacccaccctgctccgtggtcactagcwstgcagaagttttgccataggatcataaaatcaccaaggttggaagagatctccatgatcatctagtccaactgaccacctactactactatttccccactaaattatgttccttaatatgacatctaaatgtttcttgaacaccaaatctatatctatcacatcttaccacacagatggacctgcacctgggcagtcacgggcttgcatgtggccaagccaaacatcaccttctctgtctatctcccactcctgatctagaagcagaatctcacatccatgccatcataacttacagtc

SEQ ID NO: 64831 - DNA, 600 bp, Chicken  19866894331227_1
tttagttcaatggcaaacataatgctgaatgtctaatagaggagaaatgcttgagggatttttgcatggtggattttttaatctcttactgttttgcaaatacttttacgtacgtgtgtacaagtgaaagatgtgccttataagaatggactctcccagctgccactgtttttgtttgagggctaagaaaaacagagctctgctgtttgtgcgaggggcctgtatacgatgttcattagttaaagcattgctcagaaatgttaggaaactcaccgttagctgctggacttcacgcttctrttacatttatgctggggacagattcggcgtggttttctctaaaaacaaatgcactgctcaaagctggttttctgttctccttaatcctacgaaaccctcrccrcagtcatttgtattgtctgtgtctctgtcgctttcygtttggattaacacatgttctgtagcgttagcatttgcttacagcaaatgaccgaacggaagaacaatataacccacatttttacaaggcggtacttcaaaatcagatttgaaatcgtttctcttttctattgctgccttaagcacagtgctttctgctaa

SEQ ID NO: 64832 - DNA, 600 bp, Chicken  19866894331227_2
tacttttacgtacgtgtgtacaagtgaaagatgtgccttataagaatggactctcccagctgccactgtttttgtttgagggctaagaaaaacagagctctgctgtttgtgcgaggggcctgtatacgatgttcattagttaaagcattgctcagaaatgttaggaaactcaccgttagctgctggacttcacgcttctrttacatttatgctggggacagattcggcgtggttttctctaaaaacaaatgcactgctcaaagctggttttctgttctccttaatcctacgaaaccctcrccrcagtcatttgtattgtctgtgtctctgtcgctttcygtttggattaacacatgttctgtagcgttagcatttgcttacagcaaatgaccgaacggaagaacaatataacccacatttttacaaggcggtacttcaaaatcagatttgaaatcgtttctcttttctattgctgccttaagcacagtgctttctgctaatcgtaactaatgtaggaacttaaatagaggaggcacagtcatcttctgccaaggcgcttaaactggtcccgtgtgacttaaactgagcacttgctgcatt

SEQ ID NO: 64833 - DNA, 600 bp, Chicken  19866894331227_3
ttttacgtacgtgtgtacaagtgaaagatgtgccttataagaatggactctcccagctgccactgtttttgtttgagggctaagaaaaacagagctctgctgtttgtgcgaggggcctgtatacgatgttcattagttaaagcattgctcagaaatgttaggaaactcaccgttagctgctggacttcacgcttctrttacatttatgctggggacagattcggcgtggttttctctaaaaacaaatgcactgctcaaagctggttttctgttctccttaatcctacgaaaccctcrccrcagtcatttgtattgtctgtgtctctgtcgctttcygtttggattaacacatgttctgtagcgttagcatttgcttacagcaaatgaccgaacggaagaacaatataacccacatttttacaaggcggtacttcaaaatcagatttgaaatcgtttctcttttctattgctgccttaagcacagtgctttctgctaatcgtaactaatgtaggaacttaaatagaggaggcacagtcatcttctgccaaggcgcttaaactggtcccgtgtgacttaaactgagcacttgctgcattttc

SEQ ID NO: 64834 - DNA, 569 bp, Chicken  19866894331227_4
ataagaatggactctcccagctgccactgtttttgtttgagggctaagaaaaacagagctctgctgtttgtgcgaggggcctgtatacgatgttcattagttaaagcattgctcagaaatgttaggaaactcaccgttagctgctggacttcacgcttctrttacatttatgctggggacagattcggcgtggttttctctaaaaacaaatgcactgctcaaagctggttttctgttctccttaatcctacgaaaccctcrccrcagtcatttgtattgtctgtgtctctgtcgctttcygtttggattaacacatgttctgtagcgttagcatttgcttacagcaaatgaccgaacggaagaacaatataacccacatttttacaaggcggtacttcaaaatcagatttgaaatcgtttctcttttctattgctgccttaagcacagtgctttctgctaatcgtaactaatgtaggaacttaaatagaggaggcacagtcatcttctgccaaggcgcttaaactggtcccgtgtgacttaaactgagcacttgctgcattttcagcat

SEQ ID NO: 64835 - DNA, 600 bp, Chicken  19866894331228_1
gtaataaactgagatttaaattggcccatactgtctcccacgatacatccaggtatgctgccactgtcacctgaaaatgccacgtgaagtaatgatgtcatttgttctctcttgcttggcaatttctcctttttacctcttggcagtcgttttctctgtcagtacatttttcagttataaagtaagaaattgtccaggtttcagatgcgtgaaacaccctttagcttttcagatatatgggcaatcaagataaatccaataatgctgaaacttcctaacaaagcagtagctttgcctgasttgagcggctcgccagctctggcagcacagggatttctctggccacattctttgcagagagttaaacttctgagcagagtaatccctccatttcaatcacacgggtcagaaatgggtggcactgcaacatgtttgagttgggcagagagatctgtgctgagctgctctgtaacttaagtaaaatgcagtcagcactacggtagggaaggaattgtacagcttgtagtgatggtgctgctgagaaatgcatcccagctcctgcctgggacaggaaggggctgtgcctgtgctggttgggac

SEQ ID NO: 64836 - DNA, 600 bp, Chicken  19866894331229_1
aacctagcgctggaacagaatctccttatttctatcccactgaggcaagtgattctgaggacagctgattcacagacatcatctctccatccttagattatgagaatgagggtgaaagtgaaaaaactaaactgctttcagacccagtcatagtggaaatctacccataccacaaaccatctgccataactggaactaattagcactgattagctgttttcattacatctctggtccccagtgatccttctcctttcatatttctctgccagtaaggctgctttatttaattaacacatraggaagaggaatctgctagaagagtataacaatcattatagggaagctatactgcttctttagatttatcttcacccatcacacaaaatgaataaagcattcaataaaaaagaaagacagcatgtttaaagctgaaatttccaccaatcacatagtttattattgttaaaatattaagattttgggagatgagtctggtctaaaacaatgtggtttttagtgaatattataattactatcttcattaaattcacacattataaagttcttggattacttataaaagcctcctgcttcagg

SEQ ID NO: 64837 - DNA, 600 bp, Chicken  19866894331229_2
aaaaagaaagacagcatgtttaaagctgaaatttccaccaatcacatagtttattattgttaaaatattaagattttgggagatgagtctggtctaaaacaatgtggtttttagtgaatattataattactatcttcattaaattcacacattataaagttcttggattacttataaaagcctcctgcttcaggctataagcaaaatttcagccaaaggagcacagaagaaacattcgttgggctcatgctattccttaatgcctcactcacagtgttggtcctggtcattatcagaggyrgtgtgttaaaccaaayggaggcttgcctgacataaaatggcaattttgttatttcaaaaagctgtgcaataagatggcataattatgtaattcccttaacatcaacttgtctaacacaacttcactattaagccctgttttcatggcttgtggacagatttaactgcacaaataaataacacaataaaatttccatttgtttaccatgagatcctttagcatttgaatctattgggttgaagctttacaatcagaaagtgatttagtggtgtataaatatttgatttcagtctgtcttg

SEQ ID NO: 64838 - DNA, 600 bp, Chicken  19866894331229_3
aaaagaaagacagcatgtttaaagctgaaatttccaccaatcacatagtttattattgttaaaatattaagattttgggagatgagtctggtctaaaacaatgtggtttttagtgaatattataattactatcttcattaaattcacacattataaagttcttggattacttataaaagcctcctgcttcaggctataagcaaaatttcagccaaaggagcacagaagaaacattcgttgggctcatgctattccttaatgcctcactcacagtgttggtcctggtcattatcagaggyrgtgtgttaaaccaaayggaggcttgcctgacataaaatggcaattttgttatttcaaaaagctgtgcaataagatggcataattatgtaattcccttaacatcaacttgtctaacacaacttcactattaagccctgttttcatggcttgtggacagatttaactgcacaaataaataacacaataaaatttccatttgtttaccatgagatcctttagcatttgaatctattgggttgaagctttacaatcagaaagtgatttagtggtgtataaatatttgatttcagtctgtcttga

SEQ ID NO: 64839 - DNA, 600 bp, Chicken  19866894331229_4
gtttaaagctgaaatttccaccaatcacatagtttattattgttaaaatattaagattttgggagatgagtctggtctaaaacaatgtggtttttagtgaatattataattactatcttcattaaattcacacattataaagttcttggattacttataaaagcctcctgcttcaggctataagcaaaatttcagccaaaggagcacagaagaaacattcgttgggctcatgctattccttaatgcctcactcacagtgttggtcctggtcattatcagaggyrgtgtgttaaaccaaayggaggcttgcctgacataaaatggcaattttgttatttcaaaaagctgtgcaataagatggcataattatgtaattcccttaacatcaacttgtctaacacaacttcactattaagccctgttttcatggcttgtggacagatttaactgcacaaataaataacacaataaaatttccatttgtttaccatgagatcctttagcatttgaatctattgggttgaagctttacaatcagaaagtgatttagtggtgtataaatatttgatttcagtctgtcttgacaggaatgcttaatgc

SEQ ID NO: 64840 - DNA, 600 bp, Chicken  19866894331237_1
catgtttgttttcacatcaattatgctgtctctgaacagtaaactgagatggtctgaattgcaaccaattttcacattgtaaaaagcctctaagccacactcctctatcaatgtctacactcagctgcatggtggtgacatccttcagcgtaaacatgcagccacaggatagctctttcattaccaaacccagcctctctgtgcttggctctcactctctggcagatgcccagggagggacatggtccccatggggatgccaggaccatcccaacaggcatttggctcctttgccacctsaggggccagattccatccgaggagacccagcccgtgggtgccagctgtgcccaatggcagggcacccgctgcatgacccctaacccatcccaccaagccctgcccgtggcataggacctgcacgcccctggttcaaaccattaggactcctatcctaatttccgaaattcttgccattcttgcaaattacaartctgttttctggactcctctgccatccaccatcttgtgtcagtgaggtttagttttccagatctctggtacacaggagggtttcacagcctaggtaagctaagtgcg

SEQ ID NO: 64841 - DNA, 600 bp, Chicken  19866894331237_2
cctctctgtgcttggctctcactctctggcagatgcccagggagggacatggtccccatggggatgccaggaccatcccaacaggcatttggctcctttgccacctsaggggccagattccatccgaggagacccagcccgtgggtgccagctgtgcccaatggcagggcacccgctgcatgacccctaacccatcccaccaagccctgcccgtggcataggacctgcacgcccctggttcaaaccattaggactcctatcctaatttccgaaattcttgccattcttgcaaattacaartctgttttctggactcctctgccatccaccatcttgtgtcagtgaggtttagttttccagatctctggtacacaggagggtttcacagcctaggtaagctaagtgcgactcttgacaaattcacggaccacaatatgggaaagcaaagctcagtgggagggaaaagcagcacgagccaccacaacagcatgaggagagtgggaggtgctcagcacctgcggggttggaccatagggaagggaaccggtttgcacccttgcaccatagtattacctatagtatgtttatatccattaagat

SEQ ID NO: 64842 - DNA, 600 bp, Chicken  19866894331246_1
catacacgaagaaacactacctaggaccaaaatactgctgtcagtattgcagggcaggtgtgaatattatcttgaggtatttcttagtagatgtgaatttactgtgaagttatcgaaacttaagactatacttctgtcctagaagaaaaaaaaaaaaaaaaaaaaacgatttgaaaatgcttaatttgggactttttaatataaaattgcctggagatttttggattttttgcagagatcactttggactacgactctggcttaatcaatatattcatgagccttaggcttttgtgctcytgtttgttgccctgccacactgtttttgtgactggatgtcagctttgagaaatgacctgccttttcatatgagtttaggggtgtgtgtcatatttgggaagattttcattaaattctctctacagtaaaagttgtcataaaagcaacatattttaaaaagaggaaaaacaacaataaaagttttagcagcttgtaacaacttcagggacttgtcaagggtatcatactgataacttggaggcgtgtcagtgagaagatatttgagaaataaaggccaatggttgggaaatgcttttatta

SEQ ID NO: 64843 - DNA, 558 bp, Chicken  19866894331247_1
agatacccataggtcttgttgagtaacatgagtctcgttctcatatcctgttttcaaacagcggcagaggaatagcatttgtgctattcaaacacgatcttgcttatggtgcagtccctggagaaggcattagatgcaggtgttcccctttaaaacatcataatctgcttccttctttgatttcccatcttactgattaggatattcgcctgaaatatttggaaaaggggctttcctgctcagacgagtataaacctgggtcatccacttgctggaaagaagcctcagcagtaccaccaytacatggaaaacaaccatcacaagccctttcttttccaaagtcctaaaggcaaagggaactataactgcattttaacaaggaaacttacccagagactttccattcactccagtaacatctacaggctggagaaactgcacaaggacttgtcacattctggctcagttagacagacgtggccatactgtagctctttataggtgctgagagcttcatccacctggaaaagtgtctcagcatgtcaggcaaacacaaaa

SEQ ID NO: 64844 - DNA, 599 bp, Chicken  19866894331264_1
  misc_feature (1)..(36): n is any nucleotide
nnnnnnnnnnnnnnnnnnnnnnnnnnnnnnnnnnnntttgctctaaaaatggatttaactaatgttaaaaattaggctgatcactgaagcaatttcattttagttttaagaataacaccgactgatccatgctcagaaaacccatttgattaattcatgcctttaaataaacaaatggaaatgtcaaaaaagtgtaattgactgatgaaacaaagatggaaacaggtgatgcttgcagataaatagcaaattacaaatattcactgaaggtggaaaaaaatacacatggggaaaatttcyrtgcgtgaaaaataaaaaaawawaawaaaaaaaaagcaaaataggaaactatcaaaaacatgggagagtagctggtcaattaggtaccgtgtaaagatttccaattttcttgtagtaaattatttatttagcccctgcatgccatcaatatattttacaagtttaatacccaaattatagctacacacccatttatggccctgtaaatgagtcccgacttatcaatgtgaattcttgttctagggactgtcaaatttagattggatttggatgtattgcttttacccttatcaaggagg

SEQ ID NO: 64845 - DNA, 599 bp, Chicken  19866894331264_2
  misc_feature (1)..(35): n is any nucleotide
nnnnnnnnnnnnnnnnnnnnnnnnnnnnnnnnnnntttgctctaaaaatggatttaactaatgttaaaaattaggctgatcactgaagcaatttcattttagttttaagaataacaccgactgatccatgctcagaaaacccatttgattaattcatgcctttaaataaacaaatggaaatgtcaaaaaagtgtaattgactgatgaaacaaagatggaaacaggtgatgcttgcagataaatagcaaattacaaatattcactgaaggtggaaaaaaatacacatggggaaaatttcyrtgcgtgaaaaataaaaaaawawaawaaaaaaaaagcaaaataggaaactatcaaaaacatgggagagtagctggtcaattaggtaccgtgtaaagatttccaattttcttgtagtaaattatttatttagcccctgcatgccatcaatatattttacaagtttaatacccaaattatagctacacacccatttatggccctgtaaatgagtcccgacttatcaatgtgaattcttgttctagggactgtcaaatttagattggatttggatgtattgcttttacccttatcaaggaggt

SEQ ID NO: 64846 - DNA, 599 bp, Chicken  19866894331264_3
  misc_feature (1)..(15): n is any nucleotide
nnnnnnnnnnnnnnntttgctctaaaaatggatttaactaatgttaaaaattaggctgatcactgaagcaatttcattttagttttaagaataacaccgactgatccatgctcagaaaacccatttgattaattcatgcctttaaataaacaaatggaaatgtcaaaaaagtgtaattgactgatgaaacaaagatggaaacaggtgatgcttgcagataaatagcaaattacaaatattcactgaaggtggaaaaaaatacacatggggaaaatttcyrtgcgtgaaaaataaaaaaawawaawaaaaaaaaagcaaaataggaaactatcaaaaacatgggagagtagctggtcaattaggtaccgtgtaaagatttccaattttcttgtagtaaattatttatttagcccctgcatgccatcaatatattttacaagtttaatacccaaattatagctacacacccatttatggccctgtaaatgagtcccgacttatcaatgtgaattcttgttctagggactgtcaaatttagattggatttggatgtattgcttttacccttatcaaggaggtttgctagtgtggtattttat

SEQ ID NO: 64847 - DNA, 599 bp, Chicken  19866894331264_4
  misc_feature (1)..(13): n is any nucleotide
nnnnnnnnnnnnntttgctctaaaaatggatttaactaatgttaaaaattaggctgatcactgaagcaatttcattttagttttaagaataacaccgactgatccatgctcagaaaacccatttgattaattcatgcctttaaataaacaaatggaaatgtcaaaaaagtgtaattgactgatgaaacaaagatggaaacaggtgatgcttgcagataaatagcaaattacaaatattcactgaaggtggaaaaaaatacacatggggaaaatttcyrtgcgtgaaaaataaaaaaawawaawaaaaaaaaagcaaaataggaaactatcaaaaacatgggagagtagctggtcaattaggtaccgtgtaaagatttccaattttcttgtagtaaattatttatttagcccctgcatgccatcaatatattttacaagtttaatacccaaattatagctacacacccatttatggccctgtaaatgagtcccgacttatcaatgtgaattcttgttctagggactgtcaaatttagattggatttggatgtattgcttttacccttatcaaggaggtttgctagtgtggtattttattg

SEQ ID NO: 64848 - DNA, 599 bp, Chicken  19866894331264_5
  misc_feature (1)..(10): n is any nucleotide
nnnnnnnnnntttgctctaaaaatggatttaactaatgttaaaaattaggctgatcactgaagcaatttcattttagttttaagaataacaccgactgatccatgctcagaaaacccatttgattaattcatgcctttaaataaacaaatggaaatgtcaaaaaagtgtaattgactgatgaaacaaagatggaaacaggtgatgcttgcagataaatagcaaattacaaatattcactgaaggtggaaaaaaatacacatggggaaaatttcyrtgcgtgaaaaataaaaaaawawaawaaaaaaaaagcaaaataggaaactatcaaaaacatgggagagtagctggtcaattaggtaccgtgtaaagatttccaattttcttgtagtaaattatttatttagcccctgcatgccatcaatatattttacaagtttaatacccaaattatagctacacacccatttatggccctgtaaatgagtcccgacttatcaatgtgaattcttgttctagggactgtcaaatttagattggatttggatgtattgcttttacccttatcaaggaggtttgctagtgtggtattttattgcta

SEQ ID NO: 64849 - DNA, 600 bp, Chicken  19866894331269_1
accactttcctgttcagcaagctgtgttaggaaaaaatgtcccatcttgctaaaagtatttaacatgtcagtttattctactcacagtgtccccagaacagcagcacttgatggcattctgaacctcataatcttggtgggaattccctgctgaaaggccactttaacatggaggctactctaatacctttcatactgatggaccaatgtggataattttagtataaatgatggccagcctattaagaaaatgaactacagagcaatcgtagaattttgtagtaagtccaaatacacaamatgcccttaaaccaatgtcttgtttgagcttcatgattttatccccagactaccaaacttagagtcagcttagaaatcattccactacactgcactgatttgtttgactgtagagtaaacacactttaaatcagtcctgagtaaagatttttaacagattgtatctttcaacacttgtataaattgcagtggggtaaccactccctaaattagttttattagttttgtttggtttttttgtaattagcatcacgaactacctctctgaagttcattggatgtataaaccttcatcagaga

SEQ ID NO: 64850 - DNA, 600 bp, Chicken  19866894331275_1
agtgtttgacactgcagcagacccatctaatgattacattaatcatgaaaagtttcctactcgaattctgaaacattttccataaatgagaagtctaagctcataaatctaagctaagcacaagagtggaaagttacagaagtctttctgctcaaccttagctcacatcctgccactcaagagaagcataacgaaaaaaaaagcaagcaagcaaaatctttgcagaggaattgaggtgtgaaagaggggaacgcttctctttgcaaaacattctgaaggttttgatatcgcccctttgartcttagatttaacttaatgaacaaatacatttacagaaaagcagaaagtctgaaacatcaagctaggagaagacatgaagagaaaagtcaagggcctcagtgctctctcagacawgctcccacgaccaagtgaccycaaggcagcagcgtctctgcagatgctggcccaacaataacaactgaaagaattcccactatatttgtcattttaaaygcatcatactttgagagagcgcacaactggccagcattaaccccaaataccaagaatgggtattctcascccacagcctgctatcc

SEQ ID NO: 64851 - DNA, 600 bp, Chicken  19866894331275_2
aagcacaagagtggaaagttacagaagtctttctgctcaaccttagctcacatcctgccactcaagagaagcataacgaaaaaaaaagcaagcaagcaaaatctttgcagaggaattgaggtgtgaaagaggggaacgcttctctttgcaaaacattctgaaggttttgatatcgcccctttgartcttagatttaacttaatgaacaaatacatttacagaaaagcagaaagtctgaaacatcaagctaggagaagacatgaagagaaaagtcaagggcctcagtgctctctcagacawgctcccacgaccaagtgaccycaaggcagcagcgtctctgcagatgctggcccaacaataacaactgaaagaattcccactatatttgtcattttaaaygcatcatactttgagagagcgcacaactggccagcattaaccccaaataccaagaatgggtattctcascccacagcctgctatccctgcctttgaattgtcaacgttaaggcaaaagtgtttgtaggagaaaaaaaaaaaagtgaaatatgaacaaaaatgaaatctctgatggcaaaaaaaacccacacaacttttttt

SEQ ID NO: 64852 - DNA, 600 bp, Chicken  19866894331275_3
cagaagtctttctgctcaaccttagctcacatcctgccactcaagagaagcataacgaaaaaaaaagcaagcaagcaaaatctttgcagaggaattgaggtgtgaaagaggggaacgcttctctttgcaaaacattctgaaggttttgatatcgcccctttgartcttagatttaacttaatgaacaaatacatttacagaaaagcagaaagtctgaaacatcaagctaggagaagacatgaagagaaaagtcaagggcctcagtgctctctcagacawgctcccacgaccaagtgaccycaaggcagcagcgtctctgcagatgctggcccaacaataacaactgaaagaattcccactatatttgtcattttaaaygcatcatactttgagagagcgcacaactggccagcattaaccccaaataccaagaatgggtattctcascccacagcctgctatccctgcctttgaattgtcaacgttaaggcaaaagtgtttgtaggagaaaaaaaaaaaagtgaaatatgaacaaaaatgaaatctctgatggcaaaaaaaacccacacaactttttttttttattaataactgaaatag

SEQ ID NO: 64853 - DNA, 600 bp, Chicken  19866894331275_4
aatctttgcagaggaattgaggtgtgaaagaggggaacgcttctctttgcaaaacattctgaaggttttgatatcgcccctttgartcttagatttaacttaatgaacaaatacatttacagaaaagcagaaagtctgaaacatcaagctaggagaagacatgaagagaaaagtcaagggcctcagtgctctctcagacawgctcccacgaccaagtgaccycaaggcagcagcgtctctgcagatgctggcccaacaataacaactgaaagaattcccactatatttgtcattttaaaygcatcatactttgagagagcgcacaactggccagcattaaccccaaataccaagaatgggtattctcascccacagcctgctatccctgcctttgaattgtcaacgttaaggcaaaagtgtttgtaggagaaaaaaaaaaaagtgaaatatgaacaaaaatgaaatctctgatggcaaaaaaaacccacacaactttttttttttattaataactgaaatagatatttgaataaataaaaggcaaggggatagccaaaggaatacagctgggatgtttattttacatttagagatgtaga

SEQ ID NO: 64854 - DNA, 600 bp, Chicken  19866894331275_5
gatatcgcccctttgartcttagatttaacttaatgaacaaatacatttacagaaaagcagaaagtctgaaacatcaagctaggagaagacatgaagagaaaagtcaagggcctcagtgctctctcagacawgctcccacgaccaagtgaccycaaggcagcagcgtctctgcagatgctggcccaacaataacaactgaaagaattcccactatatttgtcattttaaaygcatcatactttgagagagcgcacaactggccagcattaaccccaaataccaagaatgggtattctcascccacagcctgctatccctgcctttgaattgtcaacgttaaggcaaaagtgtttgtaggagaaaaaaaaaaaagtgaaatatgaacaaaaatgaaatctctgatggcaaaaaaaacccacacaactttttttttttattaataactgaaatagatatttgaataaataaaaggcaaggggatagccaaaggaatacagctgggatgtttattttacatttagagatgtagagtttctgtacaatagagcacgaagatcatattctgaaacaggtgctagaatgatagagccaagtaagct

SEQ ID NO: 64855 - DNA, 600 bp, Chicken  19866894331276_1
ccttttatcatggacaaaaagtaggcaaagaagttcagctgaggcacagtaactcattgcactttgcaatatgaactaccaaaagtattattcttttccatttgttgctatccttactttctgaaaagatgaaaaagttaagagtagtgggaaaatggcagcagttaagaaggtcatactgcttcaggtttgtagaggaagaaatttctcaattcaaggaaaattagatggagggatgtggttgactccttcatgtatggtctacctccagaacagactgagtgcagacctgtgggcaamttttaagacactgtgtttccccatcactttgttgagctcactgacaccccttgatttggcagcatattgccaggtagaatctgtgctccttcgcttcagggaacaagaagttttgcctctgccatttgaggaagacaaactttgtcaatagcaacttccccacaagggtcttggcagaaggggtgggatgtgaggatttctgccgtaaggaaaatgtggtgtcctatcccctctgcaggaatgctggtggggatgaggtatttctttggagtgggagcctctggtgatgtgatagatgac

SEQ ID NO: 64856 - DNA, 596 bp, Chicken  19866894331278_1
catgacaaacatagatttgctttgtcttaaatggtatgtactaaatgaatgttccccaaactgaacaagattgactagtaaattagaagaaaaattggtgttattttacattttctgcttacctatggaaaagaaactcatttgtaagaagaaaactggaaaattgcttctttttctctagcaatcattctttgaggtcattccaaacagagtcaatacgtgtattctaaagtaacactgcaattcagtaggtgtgttgtcctagggaatcacattggtgtggtcttcacattgatgtgwaggtcatcatcctaccatttaatgatcacttaaaaaaatagagaaatattaaatataaaggagaatatgccctaatactgcacagatagaatcgcatatccttatataagtatgataaagttaacagggaaccataaaaacaaaagtatttcactcttgcaaacattgaaaactcaaagtttgtaattagttctgatgatacagacaacctggagtatgaaggtttctatatgaattttaagtgaaaataatcaaacaaaggcagaaaatgccatgatatctttctcacgctctca

SEQ ID NO: 64857 - DNA, 590 bp, Chicken  19866894331289_1
tgcaagcctactgctggtgtttgcaagactgtggtgtcagaaaggcttgagcagaccgtatgggttcgtggagtcaccttgctcttctcttgcatgtcttgacctctgcagtacagatatgagaacctgggatctgggctgagggcatgcattttaagaagattcttactattaggaaggtcccatcaatggctggggtggatcaattgaaggtttgctggccaccactgggaataggagtgaagaaaagggcatggcccaaagcaaaaccctgctaacctgcaaacgagcccatcattkctcttagccctatcaattgccaccaggtatcactttggtgagagaggcagaaaaggcaattgggctcaacctgccactgcctgttgggattctgaattgggaaagttctaactcttgtttcatgcaagtaagcatagaggaaggaaggcagcaaagggttggttgggaggtgtaactgcttctgccctgggtgtttgaggtcagatctgcagagggatccggcctgagctacatgaagtccctgcttgctgccctgctcagcgcaccactgctgcccccagcccctgcca

SEQ ID NO: 64858 - DNA, 600 bp, Chicken  19866894331294_1
tgttccacagatggagattctttcaaaaacaaattagccatcctaagctaaccaggctctaatggtgctgttaggacaaaaagataaaaaacaaacagtccagcaatattaattatattttttcctcttctgtcaatgtattccttgccagctggttgtgtcttacgtggacatgattgttagagtaataactgttagcctagcaatattctaaggcaaaattcagcctatgagttgctgaaaatgtccatctccaccatttgctgtgcaatatctggggccaaagcattctgtgcagcrcctttggaagaaatactgaagtattagtgcagaaatggtgaatcagagtattcttttttcccattgtgaatcttctgacgatatatggtgtgcactgctttgagttaatgcaaacatctctgtgaatcagggctcagccaatggacggccctacgcaagctaacagcgagcgagggagttcatctcttctgtttgataaggttttgttgcgttcatccagctcttgccttgcgtgtatggaagcagttaggttcctctgagcttcccttgtttcgatacaggaaaagaacgaagctgctc

SEQ ID NO: 64859 - DNA, 600 bp, Chicken  19866894331300_1
ggtgctctcctatagctaaaggtgttccgacaggggctgggctgtgcccacagcaccaacactgtgtttcgggggttctgcatcctccatcgctcccagtgccagccttactcaccagtatcacaagaggagggttgcaggctcccttgccgctccaattgggaattaaacagataggtgcttgtatttaaggtgtgtggttggtgcagaggtcttccagctcgagtggttttggaaggaggcaggcagccttctgtagctgctcagatccaaggtcttttttttgctacaggtaaggaraagaaagacattaaggcactacagacagatgtagaggacattgtaaagctctatgtttgtcttcctacagttgctttaatcagaagataatatctcagcctggaagaagctaagtctttaacattcctttggtatcattgctgtagggcctgcagctgggctgtgcattactgctggtggcatcaccatgggatgtgcatgtgctgaatgtaggatggtgctgagaccgttgtcctacacgaaggcaygtttgctttgcactgggataagactgatggccgccagctgagagcaggagca

SEQ ID NO: 64860 - DNA, 600 bp, Chicken  19866894331300_2
gccttctgtagctgctcagatccaaggtcttttttttgctacaggtaaggaraagaaagacattaaggcactacagacagatgtagaggacattgtaaagctctatgtttgtcttcctacagttgctttaatcagaagataatatctcagcctggaagaagctaagtctttaacattcctttggtatcattgctgtagggcctgcagctgggctgtgcattactgctggtggcatcaccatgggatgtgcatgtgctgaatgtaggatggtgctgagaccgttgtcctacacgaaggcaygtttgctttgcactgggataagactgatggccgccagctgagagcaggagcaaatattaagtaaagattgggataataacaaaggcagcagggctgagtttaakttcaggcttcgagacaggtttgccagcctctcagtgaaagggcacagcagtgaggagctgctcacccagagtgacccatgcaaagctgctgggagcagggagggcagggaactggagagcaccaggtgggtgctgatagcatcgctgtctggtatggtaagaggggaatggttaatcacacagtgctcttccttct

SEQ ID NO: 64861 - DNA, 600 bp, Chicken  19866894331300_3
atgtttgtcttcctacagttgctttaatcagaagataatatctcagcctggaagaagctaagtctttaacattcctttggtatcattgctgtagggcctgcagctgggctgtgcattactgctggtggcatcaccatgggatgtgcatgtgctgaatgtaggatggtgctgagaccgttgtcctacacgaaggcaygtttgctttgcactgggataagactgatggccgccagctgagagcaggagcaaatattaagtaaagattgggataataacaaaggcagcagggctgagtttaakttcaggcttcgagacaggtttgccagcctctcagtgaaagggcacagcagtgaggagctgctcacccagagtgacccatgcaaagctgctgggagcagggagggcagggaactggagagcaccaggtgggtgctgatagcatcgctgtctggtatggtaagaggggaatggttaatcacacagtgctcttccttctgcccggtgcagtcagggtggcagtctgtcacaggaaacactgtagctctgctaatcttcacagagctcaggtttgtttctcatttctgggggctggttttgagc

SEQ ID NO: 64862 - DNA, 600 bp, Chicken  19866894331314_1
aagataggaaagcacacacacaccaatagcctctccttgttgctgtcatttaatacacgacttcacctttctaggtaccaaaaagctggagttctaaagcacagcccctgctgaagagagatgtgtagctatatgttgatagtcctgtagacagtacaaggatttcttcatcttttctttgacggtgagtttgcatcctttttttcccatgatccccaaattttattcaagcttgtgcatgttacttctggagtttgcattgtccttgtgggaatataccaaaaatgctaaatctctttytgaacttgacatttagaagaatgtttcttccatagttttggaaaaagccttttgcttctcctggttccacaaataataattyrattatttcactgtgwgattatctataatctgtttcttcttctatacaactgatataagaagraaacaatcttaatactctgcagggagaggatcatacaaatgaccagcttctctgaaattctcaaattaaaacagttttatcacatttgcttttgctgatgtagaaaagctgcagaatatgagttaatcatgcaatacttattgtatgagagctat

SEQ ID NO: 64863 - DNA, 600 bp, Chicken  19866894331314_10
gtctaatagtgaccgtaatgaacaaacaatgaaccaaaccattaggattctttagtttctataaagccctcttcattatctggttcttatctctgttggcagtagattttttccagaagttattttgtcatttccaataaacccagttttctcatttatatttgtttctagtagttttctttttcttccattttgttgaattttaaagccaacagtaatcctctttaaattagattgttttattatttttagttgccctcygtctgctgactatttaataaaatatccttaatcagttcyagtgattattcatgcatttctgattacattctatctcttcttatgatgttgctcatatctgttttaagattagttaattttttttatctagagcagcaaaaatatgtattgttgataaggacttcttctgtacttgtgattgttgcaggaacactgtactggggatgctattgctcctcagttttgtgatcagctgttgtctaakttagggcatctaaaatagtattccatgacatgtttaagaaatgattgaaatagtctgtggtgccagtacagcatgtgacatcataacatgctgtg

SEQ ID NO: 64864 - DNA, 600 bp, Chicken  19866894331314_11
aagccaacagtaatcctctttaaattagattgttttattatttttagttgccctcygtctgctgactatttaataaaatatccttaatcagttcyagtgattattcatgcatttctgattacattctatctcttcttatgatgttgctcatatctgttttaagattagttaattttttttatctagagcagcaaaaatatgtattgttgataaggacttcttctgtacttgtgattgttgcaggaacactgtactggggatgctattgctcctcagttttgtgatcagctgttgtctaakttagggcatctaaaatagtattccatgacatgtttaagaaatgattgaaatagtctgtggtgccagtacagcatgtgacatcataacatgctgtgtgcccctggaatcttagtcagaacaaagtcagcattcatattctcaaagctaacacggctctgcgtgacatcatgctctatcatttggatagaagatgggacatccaagagtaaaaacatgccacccatgtagcttcatttacaatataaaaatgtatattttaactgaaaaaatgtgaaaatatctctcagataaggaaatcac

SEQ ID NO: 64865 - DNA, 600 bp, Chicken  19866894331314_2
aagctggagttctaaagcacagcccctgctgaagagagatgtgtagctatatgttgatagtcctgtagacagtacaaggatttcttcatcttttctttgacggtgagtttgcatcctttttttcccatgatccccaaattttattcaagcttgtgcatgttacttctggagtttgcattgtccttgtgggaatataccaaaaatgctaaatctctttytgaacttgacatttagaagaatgtttcttccatagttttggaaaaagccttttgcttctcctggttccacaaataataattyrattatttcactgtgwgattatctataatctgtttcttcttctatacaactgatataagaagraaacaatcttaatactctgcagggagaggatcatacaaatgaccagcttctctgaaattctcaaattaaaacagttttatcacatttgcttttgctgatgtagaaaagctgcagaatatgagttaatcatgcaatacttattgtatgagagctatctatattcaaaatattcttatggaaaatacaatttcagttagttaagattaaggcaatttgaagaaratagtacagtcaaca

SEQ ID NO: 64866 - DNA, 600 bp, Chicken  19866894331314_3
agctggagttctaaagcacagcccctgctgaagagagatgtgtagctatatgttgatagtcctgtagacagtacaaggatttcttcatcttttctttgacggtgagtttgcatcctttttttcccatgatccccaaattttattcaagcttgtgcatgttacttctggagtttgcattgtccttgtgggaatataccaaaaatgctaaatctctttytgaacttgacatttagaagaatgtttcttccatagttttggaaaaagccttttgcttctcctggttccacaaataataattyrattatttcactgtgwgattatctataatctgtttcttcttctatacaactgatataagaagraaacaatcttaatactctgcagggagaggatcatacaaatgaccagcttctctgaaattctcaaattaaaacagttttatcacatttgcttttgctgatgtagaaaagctgcagaatatgagttaatcatgcaatacttattgtatgagagctatctatattcaaaatattcttatggaaaatacaatttcagttagttaagattaaggcaatttgaagaaratagtacagtcaacaa

SEQ ID NO: 64867 - DNA, 600 bp, Chicken  19866894331314_4
gcacagcccctgctgaagagagatgtgtagctatatgttgatagtcctgtagacagtacaaggatttcttcatcttttctttgacggtgagtttgcatcctttttttcccatgatccccaaattttattcaagcttgtgcatgttacttctggagtttgcattgtccttgtgggaatataccaaaaatgctaaatctctttytgaacttgacatttagaagaatgtttcttccatagttttggaaaaagccttttgcttctcctggttccacaaataataattyrattatttcactgtgwgattatctataatctgtttcttcttctatacaactgatataagaagraaacaatcttaatactctgcagggagaggatcatacaaatgaccagcttctctgaaattctcaaattaaaacagttttatcacatttgcttttgctgatgtagaaaagctgcagaatatgagttaatcatgcaatacttattgtatgagagctatctatattcaaaatattcttatggaaaatacaatttcagttagttaagattaaggcaatttgaagaaratagtacagtcaacaaaatagatagctttgt

SEQ ID NO: 64868 - DNA, 600 bp, Chicken  19866894331314_5
tgtagacagtacaaggatttcttcatcttttctttgacggtgagtttgcatcctttttttcccatgatccccaaattttattcaagcttgtgcatgttacttctggagtttgcattgtccttgtgggaatataccaaaaatgctaaatctctttytgaacttgacatttagaagaatgtttcttccatagttttggaaaaagccttttgcttctcctggttccacaaataataattyrattatttcactgtgwgattatctataatctgtttcttcttctatacaactgatataagaagraaacaatcttaatactctgcagggagaggatcatacaaatgaccagcttctctgaaattctcaaattaaaacagttttatcacatttgcttttgctgatgtagaaaagctgcagaatatgagttaatcatgcaatacttattgtatgagagctatctatattcaaaatattcttatggaaaatacaatttcagttagttaagattaaggcaatttgaagaaratagtacagtcaacaaaatagatagctttgtctacatctgcgagaattttcatcaaatgacatgagaaggatttattc

SEQ ID NO: 64869 - DNA, 600 bp, Chicken  19866894331314_6
cacaaataataattyrattatttcactgtgwgattatctataatctgtttcttcttctatacaactgatataagaagraaacaatcttaatactctgcagggagaggatcatacaaatgaccagcttctctgaaattctcaaattaaaacagttttatcacatttgcttttgctgatgtagaaaagctgcagaatatgagttaatcatgcaatacttattgtatgagagctatctatattcaaaatattcttatggaaaatacaatttcagttagttaagattaaggcaatttgaagaaratagtacagtcaacaaaatagatagctttgtctacatctgcgagaattttcatcaaatgacatgagaaggatttattcttacccaacagcacaaatctagtgctggtgtctagtttttcaacatgtgttagatattttgaataggtatgttgctgaattataatatatgcaatatggttaggtaccaaaatgtaatgctcataaatgatgactgtaaaggcacattctgatctcctttatcctatctgacatatcagtaaggatgactaaatataactgaggatggaatttgtattgatc

SEQ ID NO: 64870 - DNA, 600 bp, Chicken  19866894331314_7
tggaatttgtattgatctttttgagtaagcttattattgccatgctttttgtgatgtgacatagataatgatcatggaggcatgtaaagaaatttaatattaaaaaaagcatccatttctcaacacatgacctggcatgtacaggtgaaaatgttggaaataggagggactgttctagcaaatgtttttttcaaaacaggtttagagctgtttcatagagattgatttatatggccactttgatcacttagtttgacatcccctgtaataaagaaaccctgaattaatttcccttctgtmaaagcactatctttcaaaaactagccaaacatgtttggtgtcaacgtctgcctgttaatctccttgcaagtcggtwttacaaaatctaagtaaaattcttgggcgacagaattttaataatgtatataggatatgataaagcagtgcattttccttctgttgtttaagtcagactgattgtcttttgacttttacaatgaaacatttccatttctgtatgccctcaaagacttctgtcaagacctctgcaatctataacatccctgaaatgtgctcatatgaaagaagtttgcatttcag

SEQ ID NO: 64871 - DNA, 600 bp, Chicken  19866894331314_8
gaggcatgtaaagaaatttaatattaaaaaaagcatccatttctcaacacatgacctggcatgtacaggtgaaaatgttggaaataggagggactgttctagcaaatgtttttttcaaaacaggtttagagctgtttcatagagattgatttatatggccactttgatcacttagtttgacatcccctgtaataaagaaaccctgaattaatttcccttctgtmaaagcactatctttcaaaaactagccaaacatgtttggtgtcaacgtctgcctgttaatctccttgcaagtcggtwttacaaaatctaagtaaaattcttgggcgacagaattttaataatgtatataggatatgataaagcagtgcattttccttctgttgtttaagtcagactgattgtcttttgacttttacaatgaaacatttccatttctgtatgccctcaaagacttctgtcaagacctctgcaatctataacatccctgaaatgtgctcatatgaaagaagtttgcatttcagtagaggctgcactgcttccaagtgcagatgcaatctgacctccctgctgctgcttcacctcctgtaattatacact

SEQ ID NO: 64872 - DNA, 600 bp, Chicken  19866894331314_9
cttcctaggtcttaccattattaaagagaattctgcctggtctaatagtgaccgtaatgaacaaacaatgaaccaaaccattaggattctttagtttctataaagccctcttcattatctggttcttatctctgttggcagtagattttttccagaagttattttgtcatttccaataaacccagttttctcatttatatttgtttctagtagttttctttttcttccattttgttgaattttaaagccaacagtaatcctctttaaattagattgttttattatttttagttgccctcygtctgctgactatttaataaaatatccttaatcagttcyagtgattattcatgcatttctgattacattctatctcttcttatgatgttgctcatatctgttttaagattagttaattttttttatctagagcagcaaaaatatgtattgttgataaggacttcttctgtacttgtgattgttgcaggaacactgtactggggatgctattgctcctcagttttgtgatcagctgttgtctaakttagggcatctaaaatagtattccatgacatgtttaagaaatgattgaaatagtct

SEQ ID NO: 64873 - DNA, 600 bp, Chicken  19866894331317_1
tctacaatgaattttatccaaagaggaaaacaaatgcagaaggctaaagtgctgaaaatcttattgaagatgcaagtgatctctactgaaagttattcataaaaaaggaggggtgggagaggaggaaatgcatcagtttttctatcttcaacatatatcataaaattcaattactgcaaaaatagacaaacaagttctaactacgcagcatatgatggtgttattaattgttctgtggtgtgttatacagtggttctaaacaacaagcttcaaatcttccaaattgttcaccacagtgcwttttttttttgtttgggctaagagttgaaaacatgcccccacaattacacctttgaaatgtttttcagaaatagtgaccctttgaacagagaaagtagaagagacaggggaaaaaaaaaaggaggaaatagccaccttacgcaataagcaatttaatatgttctctactgaaaatccttccagtctttaacctgtatgcaatatttcccttatttcttagcatgttttatatacaaacaaagaaaaatgaagacaggagacatagtggaataatgaaggacatctcagctttacaaagca

SEQ ID NO: 64874 - DNA, 600 bp, Chicken  19866894331318_1
gttgcaaaatgttgttagatttcatatgtgatcctttgcatatatgatcacttttattttttataatttctacttgaaacgccgtgatagtaagccctgaggttcaggattttcagctaggacatgtaggtgtacagaaatcattccacttatctaaagtctagtcaaggtgcttaacttctttggccctgaattcagcgcaggctgcccatgaaagccatctgactcctgagattttgttattgctggcttctgccaggtcagaaatttacaaggataaactttttgataatacttttrtgtcttctccctctgccacataaaactggattctatattatgtttattattgttaagagtccctgctctgtgtgtttaacatgtaaagaggtgagttcgtacttgtttcaggcctcagttgccagttaggaccagtcctcgtttacccatacaagtttatttactgtcagttcccttttccagttacaccagtatgttctgagggagcagaatctagagcatagcgtgtctccatttagccttttttttttttcttagcttcaactttgttttgtcacttaatatgatgaaaagaaattt

SEQ ID NO: 64875 - DNA, 600 bp, Chicken  19866894331323_1
tgccaagggctcctcatgttcacactgattttgtctgctgttggcacccagtgcttttaactacgaagaagtaaaagcaacagagctttctgcactaaccctcctgctattttatctctgtgcccctttatgggttcacagctggtcttttatcgcatgacccaacactgtacacaagtagagcttgaatgaaaacacagtctgatacctgttgagttcagcagtgatgtctgtagcagggctttgaccaagctcaacagagctgtatgctgtgtgcattagaactagaagattttcttyggaatcttgcataaaatgtatatataacaacgcttttccttattctgtcacccttcctgcattttcttctctaagaagctgtaacttatttgttgatgaggaagaaaccaaacatgtctcttaagctttttagatgataagagcaagaaattttgtatggatggattctagaagaccacaaatctctgcatatggaatacggctgctttctgtgaagtgtgaatgtgtattatatgtatattttttacactttatctagcagcagttgctatttatcatgtaatagcatttctgttaggc

SEQ ID NO: 64876 - DNA, 600 bp, Chicken  19866894331327_1
aacagtcttctatggtgattcctgattaagaacactgactaacagcaataaaaagccaaaccaaatcgaactttcagcctttaaaaatacaagttcctgtttgagataaaaacattaaaggctgtcctaaatagtgattgatcatttacttgggtgagacgagtgtaaaaaacaaagccgacattcagaaggcattgaaatatctctccgttctccttccagtgtcaggcattaacctcttaggaattaaaacaccagcgtgtggtacgcttggtggtaaagaagagaagccattctccrgtagatgagtaccaaaaagtaacattaaagccatacataatctagaaatagggtgacamgtctrttctacgaatacttgctracaagcatatacgtacacacctcagttaaagacacaagcacagaacaaaacccacaatgtgcagaactgtattaaattccattgaagttccgagccgcaggtctcatattttactaaaagagagaactacgatttccttggctttttagcccagctaccaaccccctgctgccagcacagcactgacagaagcctggctctgtctctgtgcggttcct

SEQ ID NO: 64877 - DNA, 600 bp, Chicken  19866894331327_2
accaaatcgaactttcagcctttaaaaatacaagttcctgtttgagataaaaacattaaaggctgtcctaaatagtgattgatcatttacttgggtgagacgagtgtaaaaaacaaagccgacattcagaaggcattgaaatatctctccgttctccttccagtgtcaggcattaacctcttaggaattaaaacaccagcgtgtggtacgcttggtggtaaagaagagaagccattctccrgtagatgagtaccaaaaagtaacattaaagccatacataatctagaaatagggtgacamgtctrttctacgaatacttgctracaagcatatacgtacacacctcagttaaagacacaagcacagaacaaaacccacaatgtgcagaactgtattaaattccattgaagttccgagccgcaggtctcatattttactaaaagagagaactacgatttccttggctttttagcccagctaccaaccccctgctgccagcacagcactgacagaagcctggctctgtctctgtgcggttcctctcccttcccctcgtctgctttgttactctcaaagacctgccggaaaaaccgtgtcctt

SEQ ID NO: 64878 - DNA, 600 bp, Chicken  19866894331327_3
atcgaactttcagcctttaaaaatacaagttcctgtttgagataaaaacattaaaggctgtcctaaatagtgattgatcatttacttgggtgagacgagtgtaaaaaacaaagccgacattcagaaggcattgaaatatctctccgttctccttccagtgtcaggcattaacctcttaggaattaaaacaccagcgtgtggtacgcttggtggtaaagaagagaagccattctccrgtagatgagtaccaaaaagtaacattaaagccatacataatctagaaatagggtgacamgtctrttctacgaatacttgctracaagcatatacgtacacacctcagttaaagacacaagcacagaacaaaacccacaatgtgcagaactgtattaaattccattgaagttccgagccgcaggtctcatattttactaaaagagagaactacgatttccttggctttttagcccagctaccaaccccctgctgccagcacagcactgacagaagcctggctctgtctctgtgcggttcctctcccttcccctcgtctgctttgttactctcaaagacctgccggaaaaaccgtgtccttacagg

SEQ ID NO: 64879 - DNA, 600 bp, Chicken  19866894331327_4
aaaaatacaagttcctgtttgagataaaaacattaaaggctgtcctaaatagtgattgatcatttacttgggtgagacgagtgtaaaaaacaaagccgacattcagaaggcattgaaatatctctccgttctccttccagtgtcaggcattaacctcttaggaattaaaacaccagcgtgtggtacgcttggtggtaaagaagagaagccattctccrgtagatgagtaccaaaaagtaacattaaagccatacataatctagaaatagggtgacamgtctrttctacgaatacttgctracaagcatatacgtacacacctcagttaaagacacaagcacagaacaaaacccacaatgtgcagaactgtattaaattccattgaagttccgagccgcaggtctcatattttactaaaagagagaactacgatttccttggctttttagcccagctaccaaccccctgctgccagcacagcactgacagaagcctggctctgtctctgtgcggttcctctcccttcccctcgtctgctttgttactctcaaagacctgccggaaaaaccgtgtccttacaggagatgagagaacaggcaa

SEQ ID NO: 64880 - DNA, 600 bp, Chicken  19866894331328_1
tgactgatgcaaagtggttttagttattgtcaacagtctacaggctgattcggcccggttccatgaccagtggagcagagggattttgcaaaaatccacacctctggaaaagggaaacagggaaccccaaaataattaaagaaaaaaaagcgagcggcaacgatctgaggagaaataaactaatttactaaatacactattggaatgcaagataacacactataatataatagaattagaattgaagcaaataaattaaaaatactgagagagtacatgaaagctgtaagccttacagtrgtgctgaggcaatgtgtgcggtcaggacaagaaacagggaggagagctgaaggaagtaagggacatcaggtgactttgccagaggttatatctcctctctgactgcaaagccccctggggtatgtagttcttctcttctggacaggtgcccagaactggagcattaacactaactcccagtgcattacatgatgttatgatgtggaataccagtaaccaaaaatcatcaaaccatgacatacattttaatttcatttagtggcaagccttaactgtgacaagcttgaattcttttgtttg

SEQ ID NO: 64881 - DNA, 567 bp, Chicken  19866894331337_1
attggatttatacaaagaattacaacagaaacctacaaaagcaatttttatgggatctggagatgaaatgtgaaaaactgcaaaacttgctgatgtggctgcatattgctcagactggcagctaatctccaatttgcagcagaggaagggatcaggacaatccacatattgaaggaaagagcagtttagtgttctatataccctgaaaaatcttttagattacactgccaagctgagggaaccagaatgctctgccttcaccttgtggagagaataaaaagtgaacctgacagttttccyactgagttttgccaatgtgtcttaaatcagggcaggtgtgtaataaactatcaaattcagtttgtagtctcctggatagttcactggaggtggtaattctaatgtacataccctgaggtgggaccagtagctcttgaatctaaggatttaggtcccataagttgtaattgattatttttatcttcctactgctcttcctgcactgaactgtatgtacatttctgaaaacaaattctatttctgatatggatatgagattcaacatta

SEQ ID NO: 64882 - DNA, 600 bp, Chicken  19866894331339_1
gactagcttggtgtttcaaagtttctgacaaagtcctttttttcccttaatgtattttaaagtagtacagtcttcatcctagtccagggaagaccaatttttatcgcattttcagagacagaaacacaagaacaaaggagatttatttgagaggggcacagtgaactaagcttcactaacccctattgtaaggagcatatttagagttgtatgaaccagatgtgactcccctcagcttcccttctgcacactggcattgcagctgcatcttgctttgacaacttcggtgtattaacaggkgttgaagtgtgacattgtttttacttctttcagtttcctttgatcttatggtctttctcctccagacagttcaattgtgagtgaaaatacaaggcaaaagtttttcttttggatgataagtgacatgtttttgcaactttatttgtaccttttcaagattacattgaatgtaataaagacagaaaataaacagtgtttttcagtgcaaaatatgaagaatggctaacaaaggctggtctgtgtctgttacatttgagatgagtagctggagaagtttcatttgtactgctgacaacatca

SEQ ID NO: 64883 - DNA, 599 bp, Chicken  19866894331351_1
  misc_feature (1)..(119): n is any nucleotide
nnnnnnnnnnnnnnnnnnnnnnnnnnnnnnnnnnnnnnnnnnnnnnnnnnnnnnnnnnnnnnnnnnnnnnnnnnnnnnnnnnnnnnnnnnnnnnnnnnnnnnnnnnnnnnnnnnnnnnncgaggccatgtgccatcgtgctgggtctgaggtgcccagggatgggctttgagcaacaccgggtgaaagccaaggctatgcaagcatcagaagatgtttaacgaccaggatttttgtttacggtgcacaaagggtaccacacgggcacctgaaaccatctctccactctcaggaaaaggasgggtcaagagtaagctagttcaccctactytgtaaatgaaacccacacagatctccctcaggtatggttaaattggtgcctttcattrcagcgtgtagcacgcttgttttggctttgacttaggaaaccagattttggtgcatcctgctgggatgtgccgacttcctgacaaccctgctctaccaacaagccacaaatgctgcttctttatgtgtgttctttgctgatcctggtttccacaccctgccaagaggcagtggcacatggccaaggcctgtagagtgcccagggtgtacctg

SEQ ID NO: 64884 - DNA, 599 bp, Chicken  19866894331351_2
  misc_feature (1)..(89): n is any nucleotide
nnnnnnnnnnnnnnnnnnnnnnnnnnnnnnnnnnnnnnnnnnnnnnnnnnnnnnnnnnnnnnnnnnnnnnnnnnnnnnnnnnnnnnnnncgaggccatgtgccatcgtgctgggtctgaggtgcccagggatgggctttgagcaacaccgggtgaaagccaaggctatgcaagcatcagaagatgtttaacgaccaggatttttgtttacggtgcacaaagggtaccacacgggcacctgaaaccatctctccactctcaggaaaaggasgggtcaagagtaagctagttcaccctactytgtaaatgaaacccacacagatctccctcaggtatggttaaattggtgcctttcattrcagcgtgtagcacgcttgttttggctttgacttaggaaaccagattttggtgcatcctgctgggatgtgccgacttcctgacaaccctgctctaccaacaagccacaaatgctgcttctttatgtgtgttctttgctgatcctggtttccacaccctgccaagaggcagtggcacatggccaaggcctgtagagtgcccagggtgtacctgtgcaatgtgatgggaagtacagatcagata

SEQ ID NO: 64885 - DNA, 599 bp, Chicken  19866894331351_3
  misc_feature (1)..(31): n is any nucleotide
nnnnnnnnnnnnnnnnnnnnnnnnnnnnnnncgaggccatgtgccatcgtgctgggtctgaggtgcccagggatgggctttgagcaacaccgggtgaaagccaaggctatgcaagcatcagaagatgtttaacgaccaggatttttgtttacggtgcacaaagggtaccacacgggcacctgaaaccatctctccactctcaggaaaaggasgggtcaagagtaagctagttcaccctactytgtaaatgaaacccacacagatctccctcaggtatggttaaattggtgcctttcattrcagcgtgtagcacgcttgttttggctttgacttaggaaaccagattttggtgcatcctgctgggatgtgccgacttcctgacaaccctgctctaccaacaagccacaaatgctgcttctttatgtgtgttctttgctgatcctggtttccacaccctgccaagaggcagtggcacatggccaaggcctgtagagtgcccagggtgtacctgtgcaatgtgatgggaagtacagatcagatatgggtgacttgrgagacaactgagaaagatggcagtcatagcctccaagaatgtgtca

SEQ ID NO: 64886 - DNA, 518 bp, Chicken  19866894331351_4
cccacacagatctccctcaggtatggttaaattggtgcctttcattrcagcgtgtagcacgcttgttttggctttgacttaggaaaccagattttggtgcatcctgctgggatgtgccgacttcctgacaaccctgctctaccaacaagccacaaatgctgcttctttatgtgtgttctttgctgatcctggtttccacaccctgccaagaggcagtggcacatggccaaggcctgtagagtgcccagggtgtacctgtgcaatgtgatgggaagtacagatcagatatgggtgacttgrgagacaactgagaaagatggcagtcatagcctccaagaatgtgtcatgaggtaatggataaaattgcaggacattgtttgcaaacccttatttttcctttttttaatgatgttctataatacagcaaggtgcgtcttctcccagcatgccttttaggcatagtgatgaagctaacagatccattagtctaaaacccgaacaggataattctaggcagg

SEQ ID NO: 64887 - DNA, 600 bp, Chicken  19866894331352_1
atactcataaatatctctcatggtctttaatatttttcatgaaatacattagaacataatctatattttgtggtgttttttttgtttgtttatttgtttttgtttgttttttgaaaatggagatcaggctcaatagccactacagaagagatacacagtaaggaggattccttaacagctgatgtttaaacttactttaatctgtgtgaattaatctaaacaaaagttgattttcaaaaagtatatattgataattgagcctctgttcatatgagataaaagaagtgaattgcttaaatyttctgaataattttaatatcaaagtaggagtagatgtgtttaaatatgagtgacagaatgacatctattcttctttctgtaaacgaatacactttggaaaaagttattaatttttctaattaaatatagcagaatatatttcaaagtagaaagcaaaagatggaagctttgtacttaaaaaataaccatctatcatttcattttaactctctcaggcatattctgcaaaggaagtcaaagatttgaaagcaatatcttgatgtcttaaagaaattaaatctcaagataccaaaagatctt

SEQ ID NO: 64888 - DNA, 600 bp, Chicken  19866894331352_2
aagcaaaagatggaagctttgtacttaaaaaataaccatctatcatttcattttaactctctcaggcatattctgcaaaggaagtcaaagatttgaaagcaatatcttgatgtcttaaagaaattaaatctcaagataccaaaagatctttttaatcattaattgtataagtaattcaaattggaaaaattgcaatctcacctgcagggaaaaaaaataaaaatatctcaagaaaggatttatgctaacacttagaaaaatctggtaattagaacaagcaggaggaggaatgctatgggytttttttttgttgtttgtttgtttgtttctttttaatgcatagttaagtaaaaatttgccattttcagcaaattctacattcacttgtgttcttgtagtaagaagtctttagcatggtaatcttatgagttcatcatcagcaagtttttatttagtatgagcatcacgtggttacattgaaagagctcttttgtgcaaaaaagagtatattttcatgtaactacaatttccccctgtcaacaagacccgcaattcagctttgttcagcaatagcaagtatgaacagtgggatctttcagt

SEQ ID NO: 64889 - DNA, 600 bp, Chicken  19866894331352_3; identical to SEQ ID NO: 64888

SEQ ID NO: 64890 - DNA, 600 bp, Chicken  19866894331366_1
tttaacattttctacctctgagaatttcacagggtcctttatgtccagcgactgcgcagcaagttccagcagctcttcagaactctccagggcattactacagttgctaagctgattctgaagaaaaaagaatattttcaggcattcatattaaaaaagttatttgctatgtactagtattacagctacatggctttgctgtgcctctttaattacttacaaggttagcttagctagtcaattgatacatggcaagtcttaactagaacttcactgtgattgacaaatacacagtggtayagaccacattctacaaacccaaaagggaaatacagctgaaccrgtatataaaaggcagatttgatttttaaggcatgtttctcacaacattaggtttacagaagccaagaaatgccgaagtccatatatgcacttatttctacctacagaactgtccttcatcaatgaacttctagcagtaacaaaaawgggaaggcattttattcctatccagatctagatttggcataggaatcctaaaaacaagtactacagtataatgaatgataaggaaagaggaacaaagaaagaagagcaata

SEQ ID NO: 64891 - DNA, 600 bp, Chicken  19866894331366_2
tccagcgactgcgcagcaagttccagcagctcttcagaactctccagggcattactacagttgctaagctgattctgaagaaaaaagaatattttcaggcattcatattaaaaaagttatttgctatgtactagtattacagctacatggctttgctgtgcctctttaattacttacaaggttagcttagctagtcaattgatacatggcaagtcttaactagaacttcactgtgattgacaaatacacagtggtayagaccacattctacaaacccaaaagggaaatacagctgaaccrgtatataaaaggcagatttgatttttaaggcatgtttctcacaacattaggtttacagaagccaagaaatgccgaagtccatatatgcacttatttctacctacagaactgtccttcatcaatgaacttctagcagtaacaaaaawgggaaggcattttattcctatccagatctagatttggcataggaatcctaaaaacaagtactacagtataatgaatgataaggaaagaggaacaaagaaagaagagcaataggaaattctttggaggatcaattgactattagacattaataaa

SEQ ID NO: 64892 - DNA, 600 bp, Chicken  19866894331366_3
atggctttgctgtgcctctttaattacttacaaggttagcttagctagtcaattgatacatggcaagtcttaactagaacttcactgtgattgacaaatacacagtggtayagaccacattctacaaacccaaaagggaaatacagctgaaccrgtatataaaaggcagatttgatttttaaggcatgtttctcacaacattaggtttacagaagccaagaaatgccgaagtccatatatgcacttatttctacctacagaactgtccttcatcaatgaacttctagcagtaacaaaaawgggaaggcattttattcctatccagatctagatttggcataggaatcctaaaaacaagtactacagtataatgaatgataaggaaagaggaacaaagaaagaagagcaataggaaattctttggaggatcaattgactattagacattaataaactaccatttccagtaaaaaaagtagtctgtaaggaacctctaacataactaacaatggatacaccccctaaacagattaattttgaatatttcacaagactgtaaacaaactgcaggtcaaagaagatgcacattttacacctggc

SEQ ID NO: 64893 - DNA, 599 bp, Chicken  19866894331367_1
  misc_feature (1)..(181): n is any nucleotide
nnnnnnnnnnnnnnnnnnnnnnnnnnnnnnnnnnnnnnnnnnnnnnnnnnnnnnnnnnnnnnnnnnnnnnnnnnnnnnnnnnnnnnnnnnnnnnnnnnnnnnnnnnnnnnnnnnnnnnnnnnnnnnnnnnnnnnnnnnnnnnnnnnnnnnnnnnnnnnnnnnnnnnnnnnnnnnnnnnnnnttgtgatctagttagttaaaataacccattgcaccattaagagcacgggcaggcagcctttgcagctggctgaatcctctgaagttaacgttaaggaactgtccaacactgtgcagtayaggagtgcattgtgctgagatctgtggccctctgtgcttcccccgagaaggcagatgactttaaggtgaaatcagtgcgttccccagatccatagatttttattttcactctattggtggtgatgatgacgatatcgtttttgcagaagtagattcaagtcagttaaggcgtcaactgtgtggtggcagccaagcagccattgaaagaatgatccattttggaagagarttgcaagcgatgagtgaacaactaagaagagaatgtggcaaaaayacagcaaataagaaaatgctcaagg

SEQ ID NO: 64894 - DNA, 600 bp, Chicken  19866894331367_2
gcaggcagcctttgcagctggctgaatcctctgaagttaacgttaaggaactgtccaacactgtgcagtayaggagtgcattgtgctgagatctgtggccctctgtgcttcccccgagaaggcagatgactttaaggtgaaatcagtgcgttccccagatccatagatttttattttcactctattggtggtgatgatgacgatatcgtttttgcagaagtagattcaagtcagttaaggcgtcaactgtgtggtggcagccaagcagccattgaaagaatgatccattttggaagagarttgcaagcgatgagtgaacaactaagaagagaatgtggcaaaaayacagcaaataagaaaatgctcaaggtatgctttgtcttgaaattgatgctaaggtgaacaacggcattgcccagacgaagcttctcatggcatgctacgtaacagtactgttttgcttaaacttctgtgatttcactgtgatttcttttggtctgagtccactgtggtgtagtaccgtctcttatcttgtccatgtagcacattcatggagaaaataacttcatattgtaatacagttaaaagcagagatgaatt

SEQ ID NO: 64895 - DNA, 600 bp, Chicken  19866894331367_3
aggaactgtccaacactgtgcagtayaggagtgcattgtgctgagatctgtggccctctgtgcttcccccgagaaggcagatgactttaaggtgaaatcagtgcgttccccagatccatagatttttattttcactctattggtggtgatgatgacgatatcgtttttgcagaagtagattcaagtcagttaaggcgtcaactgtgtggtggcagccaagcagccattgaaagaatgatccattttggaagagarttgcaagcgatgagtgaacaactaagaagagaatgtggcaaaaayacagcaaataagaaaatgctcaaggtatgctttgtcttgaaattgatgctaaggtgaacaacggcattgcccagacgaagcttctcatggcatgctacgtaacagtactgttttgcttaaacttctgtgatttcactgtgatttcttttggtctgagtccactgtggtgtagtaccgtctcttatcttgtccatgtagcacattcatggagaaaataacttcatattgtaatacagttaaaagcagagatgaatttagcgtgtccccttatctcatttctgaccatgtagcttggtcact

SEQ ID NO: 64896 - DNA, 600 bp, Chicken  19866894331367_4
tggagaaaataacttcatattgtaatacagttaaaagcagagatgaatttagcgtgtccccttatctcatttctgaccatgtagcttggtcactggagtcatagagtcatgtcatgtcatagagtcatgtcatgtcatagagtcatgtcatgtcatagagtcatgtcatgtcatagagtcatgtcatgtcatagagtcatgtcatgtcatagagtcacctctagcaagaattggtagaggtcagaagtgtgtgcaagtagcttgctgtgttttgagacttctctgagtcacaagtcaaartatgttaagaggcccaagttttcactagtgtaatgcagctgtgatgtaatcatcttcctgcaggatgcattcagtttacttgcatattcagatccgtggagcagccctgttggaaatcagcttgacccaattcagagagaacctgtgtgctccgtactcaatagtgcaatactaggtaagacttggtgggttttgtacgtggtacatctgtgcccttttagggaagcagggtagcacactgctgctcaccatacactgtttgctgggtctagcactgaggtggctgagcgatgaacaaag

SEQ ID NO: 64897 - DNA, 600 bp, Chicken  19866894331367_5
actagtgtaatgcagctgtgatgtaatcatcttcctgcaggatgcattcagtttacttgcatattcagatccgtggagcagccctgttggaaatcagcttgacccaattcagagagaacctgtgtgctccgtactcaatagtgcaatactaggtaagacttggtgggttttgtacgtggtacatctgtgcccttttagggaagcagggtagcacactgctgctcaccatacactgtttgctgggtctagcactgaggtggctgagcgatgaacaaagcttactgttattgaatgtcctgygagcagaagagagttttggrggtgtgyaaatgcagcggatacagtacttacatgtttttattggttcagagcaaagcacrgcttgctcagtaatagagctctgcagagaatttcaaagtgtgacttcattgttcccgctctgttttgccataagagtaagctttggaaggaagtgcatggatttggagttttgtagtacaagaaaataatgaaacaaagtgagatatttgaactgctgctgttaatcttcttccagagactcacaatctgccaaagcaaccaccgcttgcccggcaatgg

SEQ ID NO: 64898 - DNA, 594 bp, Chicken  19866894331367_6
atgtaatcatcttcctgcaggatgcattcagtttacttgcatattcagatccgtggagcagccctgttggaaatcagcttgacccaattcagagagaacctgtgtgctccgtactcaatagtgcaatactaggtaagacttggtgggttttgtacgtggtacatctgtgcccttttagggaagcagggtagcacactgctgctcaccatacactgtttgctgggtctagcactgaggtggctgagcgatgaacaaagcttactgttattgaatgtcctgygagcagaagagagttttggrggtgtgyaaatgcagcggatacagtacttacatgtttttattggttcagagcaaagcacrgcttgctcagtaatagagctctgcagagaatttcaaagtgtgacttcattgttcccgctctgttttgccataagagtaagctttggaaggaagtgcatggatttggagttttgtagtacaagaaaataatgaaacaaagtgagatatttgaactgctgctgttaatcttcttccagagactcacaatctgccaaagcaaccaccgcttgcccggcaatgggacaagcatcacag

SEQ ID NO: 64899 - DNA, 587 bp, Chicken  19866894331367_7
catcttcctgcaggatgcattcagtttacttgcatattcagatccgtggagcagccctgttggaaatcagcttgacccaattcagagagaacctgtgtgctccgtactcaatagtgcaatactaggtaagacttggtgggttttgtacgtggtacatctgtgcccttttagggaagcagggtagcacactgctgctcaccatacactgtttgctgggtctagcactgaggtggctgagcgatgaacaaagcttactgttattgaatgtcctgygagcagaagagagttttggrggtgtgyaaatgcagcggatacagtacttacatgtttttattggttcagagcaaagcacrgcttgctcagtaatagagctctgcagagaatttcaaagtgtgacttcattgttcccgctctgttttgccataagagtaagctttggaaggaagtgcatggatttggagttttgtagtacaagaaaataatgaaacaaagtgagatatttgaactgctgctgttaatcttcttccagagactcacaatctgccaaagcaaccaccgcttgcccggcaatgggacaagcatcacag

SEQ ID NO: 64900 - DNA, 534 bp, Chicken  19866894331367_8
gccctgttggaaatcagcttgacccaattcagagagaacctgtgtgctccgtactcaatagtgcaatactaggtaagacttggtgggttttgtacgtggtacatctgtgcccttttagggaagcagggtagcacactgctgctcaccatacactgtttgctgggtctagcactgaggtggctgagcgatgaacaaagcttactgttattgaatgtcctgygagcagaagagagttttggrggtgtgyaaatgcagcggatacagtacttacatgtttttattggttcagagcaaagcacrgcttgctcagtaatagagctctgcagagaatttcaaagtgtgacttcattgttcccgctctgttttgccataagagtaagctttggaaggaagtgcatggatttggagttttgtagtacaagaaaataatgaaacaaagtgagatatttgaactgctgctgttaatcttcttccagagactcacaatctgccaaagcaaccaccgcttgcccggcaatgggacaagcatcacag

SEQ ID NO: 64901 - DNA, 600 bp, Chicken  19866894331368_1
gcagcactgcgctcagagctggcctagttcaacagcttctctatagaactgcacccagagcttgagtaattcttgctgttgcaggaacagaggtgtttcttcatgcaaggtttgttctgctacttctaatctcaatcacaaaccttacaggtcactgttatcccctggctggttgtccctggctctcctgtctgcacggagcactgcgtgcagatacatccaccttcagcttcagcagaaggatttcagaggtcttccagctctgatgtgggacctcatctccttccctctccctgtgcrtgtrcaaggcatgtgtcagccctctttcagaaacatctcctgggtgaattttgtttatgattatggaatcacagaaatatgcaatgaaaaagtgtacttggttattccaaaaagcccttacagctcaaactcatctggtcagggaaaaccactagttcttcttatttaataataatttaattatttaattattctttgtcatcccaagtgatttgctagctggctttctcagagcatacaaactcttgaaagaattacggttgggcattacggtttaagctactcaaatagaaatgtgtg

SEQ ID NO: 64902 - DNA, 600 bp, Chicken  19866894331368_2
cactgcgctcagagctggcctagttcaacagcttctctatagaactgcacccagagcttgagtaattcttgctgttgcaggaacagaggtgtttcttcatgcaaggtttgttctgctacttctaatctcaatcacaaaccttacaggtcactgttatcccctggctggttgtccctggctctcctgtctgcacggagcactgcgtgcagatacatccaccttcagcttcagcagaaggatttcagaggtcttccagctctgatgtgggacctcatctccttccctctccctgtgcrtgtrcaaggcatgtgtcagccctctttcagaaacatctcctgggtgaattttgtttatgattatggaatcacagaaatatgcaatgaaaaagtgtacttggttattccaaaaagcccttacagctcaaactcatctggtcagggaaaaccactagttcttcttatttaataataatttaattatttaattattctttgtcatcccaagtgatttgctagctggctttctcagagcatacaaactcttgaaagaattacggttgggcattacggtttaagctactcaaatagaaatgtgtgagga

SEQ ID NO: 64903 - DNA, 584 bp, Chicken  19866894331369_1
gtctttgtagctgtcctagaaatgtctcttgaagcgtctggtgcagtgtttctctggactgttgcagctctgtacctgagtttacttttggccctctcctctgtccagagattttccagagttcactttagcgctcggggttttgtgggtgatgaaactggatgcaaaactccaccagcggcaatcactttaaatagaataagaacaagtctgcctttactgtgcagagcaggaacacagcaaggagaactcttctgagactttgaagccagctttcattagctgcttcagtactcatcrgaycccatcttgtagmagagtatgtctgtggggaaggtgctgtttcttgatgttgaccacaaactggaattccttagcagtaacaaagtaattgcattaacagggaggaggagagaatattttccttttggaggcaaaggttttcacaggttttattctgtcaggatgaggatccaatgcatcccattgaaaggagttgatttcagatgtcattttactgaattttctgccatcggacagcctgccaacttttttccccgcttctcagggggttcttactcttt

SEQ ID NO: 64904 - DNA, 581 bp, Chicken  19866894331369_2
tttgtagctgtcctagaaatgtctcttgaagcgtctggtgcagtgtttctctggactgttgcagctctgtacctgagtttacttttggccctctcctctgtccagagattttccagagttcactttagcgctcggggttttgtgggtgatgaaactggatgcaaaactccaccagcggcaatcactttaaatagaataagaacaagtctgcctttactgtgcagagcaggaacacagcaaggagaactcttctgagactttgaagccagctttcattagctgcttcagtactcatcrgaycccatcttgtagmagagtatgtctgtggggaaggtgctgtttcttgatgttgaccacaaactggaattccttagcagtaacaaagtaattgcattaacagggaggaggagagaatattttccttttggaggcaaaggttttcacaggttttattctgtcaggatgaggatccaatgcatcccattgaaaggagttgatttcagatgtcattttactgaattttctgccatcggacagcctgccaacttttttccccgcttctcagggggttcttactcttt

SEQ ID NO: 64905 - DNA, 568 bp, Chicken  19866894331369_3
tagaaatgtctcttgaagcgtctggtgcagtgtttctctggactgttgcagctctgtacctgagtttacttttggccctctcctctgtccagagattttccagagttcactttagcgctcggggttttgtgggtgatgaaactggatgcaaaactccaccagcggcaatcactttaaatagaataagaacaagtctgcctttactgtgcagagcaggaacacagcaaggagaactcttctgagactttgaagccagctttcattagctgcttcagtactcatcrgaycccatcttgtagmagagtatgtctgtggggaaggtgctgtttcttgatgttgaccacaaactggaattccttagcagtaacaaagtaattgcattaacagggaggaggagagaatattttccttttggaggcaaaggttttcacaggttttattctgtcaggatgaggatccaatgcatcccattgaaaggagttgatttcagatgtcattttactgaattttctgccatcggacagcctgccaacttttttccccgcttctcagggggttcttactcttt

SEQ ID NO: 64906 - DNA, 600 bp, Chicken  19866894331375_1
catctttacagtagtcttagtcttagacaaggaaaataaagttagaatatgttagaacggtgaagaaaaaaattattatttttctctacttccttctgttctgttcctctactagaggtcttgttgctctgctcatatgacatcaagcccaggcagcagaaaaatgcagccgaagggagtgttttgtttcatcgacccttccaagataaaggatgctattcacatccctagtctgcaatttggtcttcccagagtatcagcacttgtttttaggaagaatctgtagctgctgacacaacwmtttgcaatgttaagaggaaaaggagctgagatcagaaacagcctgtggagctcttgtttatcttcaccctcatccagaggttgacaggaaagaagagctaagctgcagtggggaaagagggagagttatattgttgaagctacagaaggatattctggttattaacagawcaaccacaatacttgctgagatgtaaattgcacagcatttccttttgagtgaaatctatgacattgcatcttcctatactctgtaatccttgtttgtgtaaatatcccaataagaaaggatactagggt

SEQ ID NO: 64907 - DNA, 600 bp, Chicken  19866894331375_2
atctttacagtagtcttagtcttagacaaggaaaataaagttagaatatgttagaacggtgaagaaaaaaattattatttttctctacttccttctgttctgttcctctactagaggtcttgttgctctgctcatatgacatcaagcccaggcagcagaaaaatgcagccgaagggagtgttttgtttcatcgacccttccaagataaaggatgctattcacatccctagtctgcaatttggtcttcccagagtatcagcacttgtttttaggaagaatctgtagctgctgacacaacwmtttgcaatgttaagaggaaaaggagctgagatcagaaacagcctgtggagctcttgtttatcttcaccctcatccagaggttgacaggaaagaagagctaagctgcagtggggaaagagggagagttatattgttgaagctacagaaggatattctggttattaacagawcaaccacaatacttgctgagatgtaaattgcacagcatttccttttgagtgaaatctatgacattgcatcttcctatactctgtaatccttgtttgtgtaaatatcccaataagaaaggatactagggtt

SEQ ID NO: 64908 - DNA, 600 bp, Chicken  19866894331375_3
gaagggagtgttttgtttcatcgacccttccaagataaaggatgctattcacatccctagtctgcaatttggtcttcccagagtatcagcacttgtttttaggaagaatctgtagctgctgacacaacwmtttgcaatgttaagaggaaaaggagctgagatcagaaacagcctgtggagctcttgtttatcttcaccctcatccagaggttgacaggaaagaagagctaagctgcagtggggaaagagggagagttatattgttgaagctacagaaggatattctggttattaacagawcaaccacaatacttgctgagatgtaaattgcacagcatttccttttgagtgaaatctatgacattgcatcttcctatactctgtaatccttgtttgtgtaaatatcccaataagaaaggatactagggtttatatggtatgaggagaagagagttcagcttccattaaatacttagaaaagttttccctttaaatacacaaatccaccctttagttttaaatccaactcctatttctctgtcctaagtattgattctacataaataagagaatcaaaatcaatgcaagtgtgattaaaca

SEQ ID NO: 64909 - DNA, 600 bp, Chicken  19866894331376_1
cggtttccaaagctccacttgtctctctagaagtgtttaggagcttatgtctcctgggaggtagtaaggtacctactgctaggagtaacaagaagggcgggatcacagcaccaggggtgtatttctcttcccagaggtttcagtgttagcattctttacatgtgaatatacatgtagggtctgttacggtgaatgtctggaaacagcatatgaacttttggcatttaccaatctttgaagtcagtgggagctttgtccggtgatctcacagggatttaacttctatctgtagataacatscaggaacggaaattctcttcgtctttaaggtccatagatttcttccaatcattccgtcagataaattctggagatacggagtagttattgactgttgtctcctggttttgaagcagaggttgggaaaatatataatatcaccccaaaataaagaggtgacatttgcaatggaccaaagaatagaaaaggctaaactaaaaagtagtttcagctttttaccttgaagtggcacctcagaatatgcttccagtttcaaattaaagtagcctggaaagcaacctgagatggtagcctgcagct

SEQ ID NO: 64910 - DNA, 600 bp, Chicken  19866894331376_2
tactaggttattgtgggaagtgagtgaagttgctgctcttaccttttctttcaacctgtattttgaaatggagaagtaagccagattgtctttttgaaacaaacaaacaaacaaaaacctatccaaacacaaaaaacacccatagcagaggaaatgtgttaacttaaaaaaaggtctctaattctgtcctgtggttcctgttgcagtgactgggtgactaacttgctagtactgctgtccagcctgcagggcactcagactcttccccctcctttttgctgttgctgctgcacaccccarctgktgagaacaattggctaaggcagaaggactccttccatctcatcaggtttcccccagaacattctagattgggcacctttgtggcaatatgatcattagctaccatctcaatatatttcagccactcaaaaccagtggctgtgaagagataattttgcttttcttgctagaaattattgcaagcttttttctttttctttttttttctttcacaaaacaatgcttgttgcttytttttttccttttttttttttttttttttttttgccaagcaatatatctctactgagctgtata

SEQ ID NO: 64911 - DNA, 600 bp, Chicken  19866894331376_3
aggttattgtgggaagtgagtgaagttgctgctcttaccttttctttcaacctgtattttgaaatggagaagtaagccagattgtctttttgaaacaaacaaacaaacaaaaacctatccaaacacaaaaaacacccatagcagaggaaatgtgttaacttaaaaaaaggtctctaattctgtcctgtggttcctgttgcagtgactgggtgactaacttgctagtactgctgtccagcctgcagggcactcagactcttccccctcctttttgctgttgctgctgcacaccccarctgktgagaacaattggctaaggcagaaggactccttccatctcatcaggtttcccccagaacattctagattgggcacctttgtggcaatatgatcattagctaccatctcaatatatttcagccactcaaaaccagtggctgtgaagagataattttgcttttcttgctagaaattattgcaagcttttttctttttctttttttttctttcacaaaacaatgcttgttgcttytttttttccttttttttttttttttttttttttgccaagcaatatatctctactgagctgtatatatg

SEQ ID NO: 64912 - DNA, 479 bp, Chicken  19866894331376_4
gtccagcctgcagggcactcagactcttccccctcctttttgctgttgctgctgcacaccccarctgktgagaacaattggctaaggcagaaggactccttccatctcatcaggtttcccccagaacattctagattgggcacctttgtggcaatatgatcattagctaccatctcaatatatttcagccactcaaaaccagtggctgtgaagagataattttgcttttcttgctagaaattattgcaagcttttttctttttctttttttttctttcacaaaacaatgcttgttgcttytttttttccttttttttttttttttttttttttgccaagcaatatatctctactgagctgtatatatgtacgggtgcatatgtggattttaacttcttaataccagatcagcaggtcatggagttcacacagtctgaggagagtcccacatcaagtctctacttgccttccctcgggag

SEQ ID NO: 64913 - DNA, 469 bp, Chicken  19866894331376_5
cagggcactcagactcttccccctcctttttgctgttgctgctgcacaccccarctgktgagaacaattggctaaggcagaaggactccttccatctcatcaggtttcccccagaacattctagattgggcacctttgtggcaatatgatcattagctaccatctcaatatatttcagccactcaaaaccagtggctgtgaagagataattttgcttttcttgctagaaattattgcaagcttttttctttttctttttttttctttcacaaaacaatgcttgttgcttytttttttccytttttttttttttttttttttttgccaagcaatatatctctactgagctgtatatatgtacgggtgcatatgtggattttaacttcttaataccagatcagcaggtcatggagttcacacagtctgaggagagtcccacatcaagtctctacttgccttccctcgggag

SEQ ID NO: 64914 - DNA, 600 bp, Chicken  19866894331378_1
gagatttagacccacatttcctctcatttaatataacaggagaattattttggagattatagggaatgtttcagatctcagctaaattggttaatatgcgtaatgataagatatgcagtgccttgtttacatagcatatttaggtcatgctacgcattaggactaatcgcatagaacagctaatgtctgatgtgctcccctgctctcctttcaatgatattttatatatatatatggaaggtaaatgggagatgaaaatgcatccaaacaatgaaatgtagtgttacactaaagtaataktaatctgtgtaaagttggatgaaaagaaaaatgtttttcaagttccttggagagtgtctgtgtactgagtatgctatagaaacaatttcatacagaaggtatataaaaaggttagatttaaaaaattttgatctgcatatagtggaatgatagctagtttagatcagaccataatgctttattcatataactgccttcaaatagaagatggaaaaggaacatttcttttgcatcgttgagcatctgctgtggggtacaaattttgacaaattgacatattttggtctgtaatatcttgtg

SEQ ID NO: 64915 - DNA, 408 bp, Chicken  19866894331378_2
ttgacatattttggtctgtaatatcttgtggaaaagagagaaatcctcctgggtattaagtactgcatacaatagctgaaaagaaatatgttgaaagttgtgcatattttaaattcagagctagcaaccaaggaatatacaaattggtgaaaaagatcaggatagttaattagttttatgtgaaatttactgtaaggatgcaaaccagtttctttttgagcagtggcatggaagcagcagcatcataagcattaaaggggacagattctggtcttgcggtcacagattgcagaaaaaaamaggaaaggaacactgcctggctcactgtactttgtcacaggaacgatttgtattcttagtttcagggcaatatttctttttgcctgacagctttccaggttaaaagga

SEQ ID NO: 64916 - DNA, 600 bp, Chicken  19866894331384_1
tttcctcccgccgtcttcgtacggccgcaaagcgcgccactgtgggctgaggagtttacgacagcgcggggctgtggggctgccggtatgttcggcgcggcggaggaagatgacgccgattttctggcccccgccaccgggtgagtggccgctggttgcccccccccaccccccgctggagagcacggcggccgggcaggctgcagccggctgccctcctgtgggccgggccctgaggtgttccgtgtgggccccctacttgacacagggagctcggggcgggcagccctcccctcagarcagcggagccgctgagctcagcagtttaagcgtgcagcgtgwttgttgttcctttcgttgtgtaactgcttactgctcggtgcttcccagccgtrctrctaactgcgtgtcctycccgagcagataccgctcccctgttgctccccttctcagcaaatggctgatttatgaaagatctccgggtcctatctcagtggtgctgtccttgcagaccctgcctcgcagctgggccgatgtgcttctgtcccactaccggagtagaaaagtttaaatgggcttaaagcattgaagctgtgaatg

SEQ ID NO: 64917 - DNA, 600 bp, Chicken  19866894331384_2
tgggctgaggagtttacgacagcgcggggctgtggggctgccggtatgttcggcgcggcggaggaagatgacgccgattttctggcccccgccaccgggtgagtggccgctggttgcccccccccaccccccgctggagagcacggcggccgggcaggctgcagccggctgccctcctgtgggccgggccctgaggtgttccgtgtgggccccctacttgacacagggagctcggggcgggcagccctcccctcagarcagcggagccgctgagctcagcagtttaagcgtgcagcgtgwttgttgttcctttcgttgtgtaactgcttactgctcggtgcttcccagccgtrctrctaactgcgtgtcctycccgagcagataccgctcccctgttgctccccttctcagcaaatggctgatttatgaaagatctccgggtcctatctcagtggtgctgtccttgcagaccctgcctcgcagctgggccgatgtgcttctgtcccactaccggagtagaaaagtttaaatgggcttaaagcattgaagctgtgaatgatgcgtctttcagcaataacagacttatctctagcattaagc

SEQ ID NO: 64918 - DNA, 600 bp, Chicken  19866894331384_3
cgcggcggaggaagatgacgccgattttctggcccccgccaccgggtgagtggccgctggttgcccccccccaccccccgctggagagcacggcggccgggcaggctgcagccggctgccctcctgtgggccgggccctgaggtgttccgtgtgggccccctacttgacacagggagctcggggcgggcagccctcccctcagarcagcggagccgctgagctcagcagtttaagcgtgcagcgtgwttgttgttcctttcgttgtgtaactgcttactgctcggtgcttcccagccgtrctrctaactgcgtgtcctycccgagcagataccgctcccctgttgctccccttctcagcaaatggctgatttatgaaagatctccgggtcctatctcagtggtgctgtccttgcagaccctgcctcgcagctgggccgatgtgcttctgtcccactaccggagtagaaaagtttaaatgggcttaaagcattgaagctgtgaatgatgcgtctttcagcaataacagacttatctctagcattaagcctgcccttctggcaggagggctttaagctttgatggaaggatgtgtttcctcg

SEQ ID NO: 64919 - DNA, 600 bp, Chicken  19866894331384_4
ggcggaggaagatgacgccgattttctggcccccgccaccgggtgagtggccgctggttgcccccccccaccccccgctggagagcacggcggccgggcaggctgcagccggctgccctcctgtgggccgggccctgaggtgttccgtgtgggccccctacttgacacagggagctcggggcgggcagccctcccctcagarcagcggagccgctgagctcagcagtttaagcgtgcagcgtgwttgttgttcctttcgttgtgtaactgcttactgctcggtgcttcccagccgtrctrctaactgcgtgtcctycccgagcagataccgctcccctgttgctccccttctcagcaaatggctgatttatgaaagatctccgggtcctatctcagtggtgctgtccttgcagaccctgcctcgcagctgggccgatgtgcttctgtcccactaccggagtagaaaagtttaaatgggcttaaagcattgaagctgtgaatgatgcgtctttcagcaataacagacttatctctagcattaagcctgcccttctggcaggagggctttaagctttgatggaaggatgtgtttcctcgaga

SEQ ID NO: 64920 - DNA, 600 bp, Chicken  19866894331384_5
gccgattttctggcccccgccaccgggtgagtggccgctggttgcccccccccaccccccgctggagagcacggcggccgggcaggctgcagccggctgccctcctgtgggccgggccctgaggtgttccgtgtgggccccctacttgacacagggagctcggggcgggcagccctcccctcagarcagcggagccgctgagctcagcagtttaagcgtgcagcgtgwttgttgttcctttcgttgtgtaactgcttactgctcggtgcttcccagccgtrctrctaactgcgtgtcctycccgagcagataccgctcccctgttgctccccttctcagcaaatggctgatttatgaaagatctccgggtcctatctcagtggtgctgtccttgcagaccctgcctcgcagctgggccgatgtgcttctgtcccactaccggagtagaaaagtttaaatgggcttaaagcattgaagctgtgaatgatgcgtctttcagcaataacagacttatctctagcattaagcctgcccttctggcaggagggctttaagctttgatggaaggatgtgtttcctcgagatatttaaagaagaaaa

SEQ ID NO: 64921 - DNA, 600 bp, Chicken  19866894331393_1
gttattaaaaacagtatacctaaggggagaaattctattgatttcatcagatgattacaaatatgtctgaattttgctaatatatagtacccaattataagggaaatacttcttggctttggaaactgatttctacaagagacctgtggctacactttttgcatcatgcattgggtcactcaagctgcttacccacttaactatagaaatcacacagctctccaagagaagcaaaagttacaaaatcctttatgatcagagtccctgtcttttttgagaatcccaaactcaaaaccaatyccagcatttgraagtagtgaaatcattgcaatttcatacaattgtataaaattttcagtaggtatgtcaggctcattactttattggttaagggctccattattgtaaattgctctaaatcctaacattctctgggtagacatacttcttccctactttgaggcaggacgtggtttacctagactaccccagaaatagatttgtctaaaaatatattcctaatttgcagcttgatatgcatccctaatcttccttcctgctatttcaactaactactcctcgtccaacagtctgtagaca

SEQ ID NO: 64922 - DNA, 600 bp, Chicken  19866894331393_2
cagtatacctaaggggagaaattctattgatttcatcagatgattacaaatatgtctgaattttgctaatatatagtacccaattataagggaaatacttcttggctttggaaactgatttctacaagagacctgtggctacactttttgcatcatgcattgggtcactcaagctgcttacccacttaactatagaaatcacacagctctccaagagaagcaaaagttacaaaatcctttatgatcagagtccctgtcttttttgagaatcccaaactcaaaaccaatyccagcatttgraagtagtgaaatcattgcaatttcatacaattgtataaaattttcagtaggtatgtcaggctcattactttattggttaagggctccattattgtaaattgctctaaatcctaacattctctgggtagacatacttcttccctactttgaggcaggacgtggtttacctagactaccccagaaatagatttgtctaaaaatatattcctaatttgcagcttgatatgcatccctaatcttccttcctgctatttcaactaactactcctcgtccaacagtctgtagacagcaatcaatat

SEQ ID NO: 64923 - DNA, 441 bp, Chicken  19866894331393_3
ttctctgggtagacatacttcttccctactttgaggcaggacgtggtttacctagactaccccagaaatagatttgtctaaaaatatattcctaatttgcagcttgatatgcatccctaatcttccttcctgctatttcaactaactactcctcgtccaacagtctgtagacagcaatcaatatgcagaaatcatttctgcatcacagtaaccatttttataaccatccatatgtcttcaaataccacctcccctccagtctcttccagatagaacagaggcaaattttcatcattttcwcacagttctttttcacttcatttgttgggcaaacacactctcattacccaattctttatgtctggtaccagaaactttgtacatgacagcacctccagaggcctatttcatcctaaactgtcctgcagcagcatactgtca

SEQ ID NO: 64924 - DNA, 600 bp, Chicken  19866894331413_1
tcagaaatgagactccagttctggcagcctcatcatcttgcctttgatgtaacagttggagcacatacctcaggcacaagagaccagggtcaatccccagttctgatggtggggattcacactcaaggaagttgttatccagcaaagtgctttaaccactaggtgaagggctactgggaggagggagaacatgggctgagcagagtcttccaaggccacatctctgtatggagagttagtccctggattaaatctgtgttctttttcacacctaggctaatactgtgggacactggagcrtgaggctccccagcaygctgagtgcatggctctgtggcaggcggcaggatagctctggcactgaaaaatggctagctctgaaagcagatcacacgttgatctgatccatatgtgcatggctgtgtttgcgtgtgtatatccacatgtaccaaatattaatcaacacaattagacagtggtcagagctaacgtgttaagcaataacaaggctgttgtctggtttgtcatctgctgtagttttcatgaatgtcagatcaatgccttttgtaatcatatgtgcttatgtaattgacccaggat

SEQ ID NO: 64925 - DNA, 600 bp, Chicken  19866894331413_2
agttctggcagcctcatcatcttgcctttgatgtaacagttggagcacatacctcaggcacaagagaccagggtcaatccccagttctgatggtggggattcacactcaaggaagttgttatccagcaaagtgctttaaccactaggtgaagggctactgggaggagggagaacatgggctgagcagagtcttccaaggccacatctctgtatggagagttagtccctggattaaatctgtgttctttttcacacctaggctaatactgtgggacactggagcrtgaggctccccagcaygctgagtgcatggctctgtggcaggcggcaggatagctctggcactgaaaaatggctagctctgaaagcagatcacacgttgatctgatccatatgtgcatggctgtgtttgcgtgtgtatatccacatgtaccaaatattaatcaacacaattagacagtggtcagagctaacgtgttaagcaataacaaggctgttgtctggtttgtcatctgctgtagttttcatgaatgtcagatcaatgccttttgtaatcatatgtgcttatgtaattgacccaggataacaccaattgggcta

SEQ ID NO: 64926 - DNA, 599 bp, Chicken  19866894331422_1
  misc_feature (1)..(284): n is any nucleotide
nnnnnnnnnnnnnnnnnnnnnnnnnnnnnnnnnnnnnnnnnnnnnnnnnnnnnnnnnnnnnnnnnnnnnnnnnnnnnnnnnnnnnnnnnnnnnnnnnnnnnnnnnnnnnnnnnnnnnnnnnnnnnnnnnnnnnnnnnnnnnnnnnnnnnnnnnnnnnnnnnnnnnnnnnnnnnnnnnnnnnnnnnnnnnnnnnnnnnnnnnnnnnnnnnnnnnnnnnnnnnnnnnnnnnnnnnnnnnnnnnnnnnnnnnnnnnnnnnnnnnnnnnnnnnnnnnnnnnnnnnnnncgttccacacagggarggctctcatccctgctctgtcttagcgacagctccctcctgtctttgcctctgtgcctagggcataactacatgatgattaatgggtcctcctggtctgcccacaccttctcccctgagggattctcatggaaagcaggttctcactcaaagctcygttaactttcatgttttgcctgctctcctgctcctgaaagattccagggcagcattctttgctggacagtggtggacatagtcatggtgatcactgatggagagttggcactcarctttggttcttgggcttagcagattttg

SEQ ID NO: 64927 - DNA, 599 bp, Chicken  19866894331422_2
  misc_feature (1)..(128): n is any nucleotide
nnnnnnnnnnnnnnnnnnnnnnnnnnnnnnnnnnnnnnnnnnnnnnnnnnnnnnnnnnnnnnnnnnnnnnnnnnnnnnnnnnnnnnnnnnnnnnnnnnnnnnnnnnnnnnnnnnnnnnnnnnnnnnnncgttccacacagggarggctctcatccctgctctgtcttagcgacagctccctcctgtctttgcctctgtgcctagggcataactacatgatgattaatgggtcctcctggtctgcccacaccttctcccctgagggattctcatggaaagcaggttctcactcaaagctcygttaactttcatgttttgcctgctctcctgctcctgaaagattccagggcagcattctttgctggacagtggtggacatagtcatggtgatcactgatggagagttggcactcarctttggttcttgggcttagcagattttggtgctggtgaaagataagggatcacaggggaaaatacttccttctgctacagtagaacaatctggtggatttaacactcygcagttattcrggggaggttcaggttggatactgggaaacaattcttctgtgcaagagtggtcgggcactggagca

SEQ ID NO: 64928 - DNA, 599 bp, Chicken  19866894331422_3
  misc_feature (1)..(13): n is any nucleotide
nnnnnnnnnnnnncgttccacacagggarggctctcatccctgctctgtcttagcgacagctccctcctgtctttgcctctgtgcctagggcataactacatgatgattaatgggtcctcctggtctgcccacaccttctcccctgagggattctcatggaaagcaggttctcactcaaagctcygttaactttcatgttttgcctgctctcctgctcctgaaagattccagggcagcattctttgctggacagtggtggacatagtcatggtgatcactgatggagagttggcactcarctttggttcttgggcttagcagattttggtgctggtgaaagataagggatcacaggggaaaatacttccttctgctacagtagaacaatctggtggatttaacactcygcagttattcrggggaggttcaggttggatactgggaaacaattcttctgtgcaagagtggtcgggcactggagcaggctgccctgggaggtggtggagtcatctggaggtgttcaagaaatgtgcagatgtggcactgagggacgtggattagtgggcaacatcggtggtaggtggatggttggatatga

SEQ ID NO: 64929 - DNA, 600 bp, Chicken  19866894331422_4
taatgggtcctcctggtctgcccacaccttctcccctgagggattctcatggaaagcaggttctcactcaaagctcygttaactttcatgttttgcctgctctcctgctcctgaaagattccagggcagcattctttgctggacagtggtggacatagtcatggtgatcactgatggagagttggcactcarctttggttcttgggcttagcagattttggtgctggtgaaagataagggatcacaggggaaaatacttccttctgctacagtagaacaatctggtggatttaacactcygcagttattcrggggaggttcaggttggatactgggaaacaattcttctgtgcaagagtggtcgggcactggagcaggctgccctgggaggtggtggagtcatctggaggtgttcaagaaatgtgcagatgtggcactgagggacgtggattagtgggcaacatcggtggtaggtggatggttggatatgatgatcttagaagtctttttccaaccataatggttctattctctggtcttgatgagtggcagggaaaaggagttttaatgctcagctctgaagaaatgagcatccttgta

SEQ ID NO: 64930 - DNA, 600 bp, Chicken  19866894331422_5
cctggtctgcccacaccttctcccctgagggattctcatggaaagcaggttctcactcaaagctcygttaactttcatgttttgcctgctctcctgctcctgaaagattccagggcagcattctttgctggacagtggtggacatagtcatggtgatcactgatggagagttggcactcarctttggttcttgggcttagcagattttggtgctggtgaaagataagggatcacaggggaaaatacttccttctgctacagtagaacaatctggtggatttaacactcygcagttattcrggggaggttcaggttggatactgggaaacaattcttctgtgcaagagtggtcgggcactggagcaggctgccctgggaggtggtggagtcatctggaggtgttcaagaaatgtgcagatgtggcactgagggacgtggattagtgggcaacatcggtggtaggtggatggttggatatgatgatcttagaagtctttttccaaccataatggttctattctctggtcttgatgagtggcagggaaaaggagttttaatgctcagctctgaagaaatgagcatccttgtagtttcttatcc

SEQ ID NO: 64931 - DNA, 600 bp, Chicken  19866894331427_1
tgcgctttatttatagactttttctttcttctgagacaaagcagaacatttacataaggggcaaggagaggtgatgatgaataaccatttcttgtgcagaccgaagtcctcattagacctgccagcagggatagatgtctgggtgtagcagagcaccagaattagcctgtatcatttaactgtctgaagtttaaactagcagcaggcggtcttctaggagttcagtgtttttcttcaaagcttctaaatgataacagacccagtttattccatctgaaaagtttcacagggcagaagcaygggcttagccttgtgcctgagctacatcctttcatctgggcktctgctcccagccttctcaatcacctcccagcccctcgatcccttcccagtgtgtgcagtgctgatgttgagggaggtggggccatgcttctgtctaaattttacagaggaaagaagcaaggcccacagaaagactaaatccccacagaggggacagaagcacctgacttttgccatttggtgcacgagaaaggcctttcactagacatctgtggacttatgcttaaggcactgatctgagatcacttggaaaactgt

SEQ ID NO: 64932 - DNA, 600 bp, Chicken  19866894331427_2
agaacatttacataaggggcaaggagaggtgatgatgaataaccatttcttgtgcagaccgaagtcctcattagacctgccagcagggatagatgtctgggtgtagcagagcaccagaattagcctgtatcatttaactgtctgaagtttaaactagcagcaggcggtcttctaggagttcagtgtttttcttcaaagcttctaaatgataacagacccagtttattccatctgaaaagtttcacagggcagaagcaygggcttagccttgtgcctgagctacatcctttcatctgggcktctgctcccagccttctcaatcacctcccagcccctcgatcccttcccagtgtgtgcagtgctgatgttgagggaggtggggccatgcttctgtctaaattttacagaggaaagaagcaaggcccacagaaagactaaatccccacagaggggacagaagcacctgacttttgccatttggtgcacgagaaaggcctttcactagacatctgtggacttatgcttaaggcactgatctgagatcacttggaaaactgtgagcagagcagggaagtgacagtgctacattgccaagccatc

SEQ ID NO: 64933 - DNA, 600 bp, Chicken  19866894331432_1
agccccaagaagcctttcacctcagcagtgtacaggctggggacagacagcctccccgtcatcacagtggccccacacacacaccactgatctcttctgccctctcttgcgcagtgtctgatggccagcagaaggtaccacaatgcctacagcagagctcttcactaatgtaaaagagaggccccaagaacagactgctaagtcagcacgaaagctattgcactagaatgccattttttccttcaccatcagcttttaatacaattactgtcaacacaagcatttctgctttggcatttrtgttatcagggtggcagtaagatcatttccttcttgaatactagatagaacatctgaacacatccagtgttgtttctgatgttgatttgcctatcatactcagatactacttgtgcacttcatatttttaatattcctgaacatgagcactcaggaataactgggacagagaacagacaccattacattatttcaagagttcactgcatgcaaattatcactgactcctcccttttggctgttccttcctcacgctcctcctggagaaactctgatgttgcatggtaaggaatcgtcagg

SEQ ID NO: 64934 - DNA, 599 bp, Chicken  19866894331441_1
  misc_feature (1)..(94): n is any nucleotide
nnnnnnnnnnnnnnnnnnnnnnnnnnnnnnnnnnnnnnnnnnnnnnnnnnnnnnnnnnnnnnnnnnnnnnnnnnnnnnnnnnnnnnnnnnnnnntggtggtgggcagagaggttgggttggttgctgatggcattgcaacgaaccaaagtgcagttatttatttatttgtgagttgattgtgcttttgtgcgtgtctacgtttatatagtgtgtggataagtgtgtcttaagtaagtcaacagattggagacgagctctgcccttcccgctgctggagacagtaaaatgtgcactctgartgctctgaagtgtgcrtttgtatatgtttatatccttatatatatatatatgcagggagtctgtaatcaaacacagctccatcaggctgatgcgttaacaaatgtcagatatgttcatgggtttgaataaaatcagtgttaccaatgaatgtgtggacactttattggtaaacatgcattagtcacttgtgccccaggtaggcctgaagtacgcagtgtgcctcttgtcctctctactgctgagcacccactgatgctgtttgactgcaaatggcaatcagagggggagactcaagcaa

SEQ ID NO: 64935 - DNA, 599 bp, Chicken  19866894331441_2
  misc_feature (1)..(78): n is any nucleotide
nnnnnnnnnnnnnnnnnnnnnnnnnnnnnnnnnnnnnnnnnnnnnnnnnnnnnnnnnnnnnnnnnnnnnnnnnnnnnntggtggtgggcagagaggttgggttggttgctgatggcattgcaacgaaccaaagtgcagttatttatttatttgtgagttgattgtgcttttgtgcgtgtctacgtttatatagtgtgtggataagtgtgtcttaagtaagtcaacagattggagacgagctctgcccttcccgctgctggagacagtaaaatgtgcactctgartgctctgaagtgtgcrtttgtatatgtttatatccttatatatatatatatgcagggagtctgtaatcaaacacagctccatcaggctgatgcgttaacaaatgtcagatatgttcatgggtttgaataaaatcagtgttaccaatgaatgtgtggacactttattggtaaacatgcattagtcacttgtgccccaggtaggcctgaagtacgcagtgtgcctcttgtcctctctactgctgagcacccactgatgctgtttgactgcaaatggcaatcagagggggagactcaagcaaagggttggagaaaagt

SEQ ID NO: 64936 - DNA, 600 bp, Chicken  19866894331441_3
gcgttaacaaatgtcagatatgttcatgggtttgaataaaatcagtgttaccaatgaatgtgtggacactttattggtaaacatgcattagtcacttgtgccccaggtaggcctgaagtacgcagtgtgcctcttgtcctctctactgctgagcacccactgatgctgtttgactgcaaatggcaatcagagggggagactcaagcaaagggttggagaaaagttcactgaatcatagaatcattaaggttggaaagacctctaagatcacccaatccaaccatcagcccacccccaccrtgcccactgcccacgtccctcagtgccacatccacacggctcatgaacacctccagggacggtgactccaccacctccctgggcagcctgtgccaccgcctcactgctcttgctgagaagaaatttctcttaatatccaacctgaatgttggaggaggaagcaatcacatttacttttaagaataactattttccatgctgcttggctgcggaaatggggaagcaaaggagcagagagggaggggatgcctttatccccagctctctctgggtgccattccctgggtggtggttggcagc

SEQ ID NO: 64937 - DNA, 599 bp, Chicken  19866894331442_1
  misc_feature (1)..(129): n is any nucleotide
nnnnnnnnnnnnnnnnnnnnnnnnnnnnnnnnnnnnnnnnnnnnnnnnnnnnnnnnnnnnnnnnnnnnnnnnnnnnnnnnnnnnnnnnnnnnnnnnnnnnnnnnnnnnnnnnnnnnnnnnnnnnnnnnnaactgacaccacctaatcacccagtttgtgcagcaaatctagatctacaagctcaaattctcaaatgacgtgctccaaaagcatgtcagagtacctggttgaaaatcccagcccctcctgccagggctcatcaccgtgggagtcagtgctctgctggtggagcacacaggwttccagcctcagtgctgtgctaaacgtagaaaggttagggtgttaaaaaaaggcattattagtgcctaagagctttaatgggttcttaattatatatacatgctgacaaacagaggaggatctgatgtctgctgctactggttgtttaattacctaaaaatgaagctttaagagcatttcttcataataaacttaatttctgtttctgcttttattaaatggtgatttcaaggtaaatcaaaattctcttcagctaggagatcattaaaacagcattgctgtgaaaatgtagcaagtga

SEQ ID NO: 64938 - DNA, 600 bp, Chicken  19866894331442_2
taatttctgtttctgcttttattaaatggtgatttcaaggtaaatcaaaattctcttcagctaggagatcattaaaacagcattgctgtgaaaatgtagcaagtgaccagcttgagagcatactgcttcaaaaaacttaaaacaaaatgcatcttcagagaaactgcttaagctgccttgaaaaccaatacttgtggaattgtgatcagcagtgataacggtgtgaaaaacttcctcatctgagatagctgaaccccaggatcccaaagcagcacagtttgtttttgttcattctgtccraggcttacaataatttttcagcacatttatcatctcagtcaaatttgactgatagtagagatgtcactcctgtttccaaaggtttcaagcgaaacraaaacaaaaacaaaaagacccacccaacrttcaggtagagaagggagggtcacctctcagtttccctgctgtcatgagctcatttttcattagaaatcggagaatctgtctgggagagagactttgttagtgcttgaagcgcaggaaaaagattcagtatgttctacctctatgtgatgctgaagtcaatcagccatgaggagc

SEQ ID NO: 64939 - DNA, 600 bp, Chicken  19866894331442_3
tagcaagtgaccagcttgagagcatactgcttcaaaaaacttaaaacaaaatgcatcttcagagaaactgcttaagctgccttgaaaaccaatacttgtggaattgtgatcagcagtgataacggtgtgaaaaacttcctcatctgagatagctgaaccccaggatcccaaagcagcacagtttgtttttgttcattctgtccraggcttacaataatttttcagcacatttatcatctcagtcaaatttgactgatagtagagatgtcactcctgtttccaaaggtttcaagcgaaacraaaacaaaaacaaaaagacccacccaacrttcaggtagagaagggagggtcacctctcagtttccctgctgtcatgagctcatttttcattagaaatcggagaatctgtctgggagagagactttgttagtgcttgaagcgcaggaaaaagattcagtatgttctacctctatgtgatgctgaagtcaatcagccatgaggagctatccataggcaatcaggcttaattaggttgagagctcaaaggtcaatgagctcatcagaatgaagcattatttaattacatagaagatgaattca

SEQ ID NO: 64940 - DNA, 600 bp, Chicken  19866894331442_4
cttcaaaaaacttaaaacaaaatgcatcttcagagaaactgcttaagctgccttgaaaaccaatacttgtggaattgtgatcagcagtgataacggtgtgaaaaacttcctcatctgagatagctgaaccccaggatcccaaagcagcacagtttgtttttgttcattctgtccraggcttacaataatttttcagcacatttatcatctcagtcaaatttgactgatagtagagatgtcactcctgtttccaaaggtttcaagcgaaacraaaacaaaaacaaaaagacccacccaacrttcaggtagagaagggagggtcacctctcagtttccctgctgtcatgagctcatttttcattagaaatcggagaatctgtctgggagagagactttgttagtgcttgaagcgcaggaaaaagattcagtatgttctacctctatgtgatgctgaagtcaatcagccatgaggagctatccataggcaatcaggcttaattaggttgagagctcaaaggtcaatgagctcatcagaatgaagcattatttaattacatagaagatgaattcagtctcataccagggaagtagygacagaac

SEQ ID NO: 64941 - DNA, 600 bp, Chicken  19866894331442_5
acccaacrttcaggtagagaagggagggtcacctctcagtttccctgctgtcatgagctcatttttcattagaaatcggagaatctgtctgggagagagactttgttagtgcttgaagcgcaggaaaaagattcagtatgttctacctctatgtgatgctgaagtcaatcagccatgaggagctatccataggcaatcaggcttaattaggttgagagctcaaaggtcaatgagctcatcagaatgaagcattatttaattacatagaagatgaattcagtctcataccagggaagtagygacagaacataagcaaatatctacatgcgtaatcaactatgcaagtcacgtcaaatgaaagctttgtcaatagttacaggcacattacattgtttttctaaacaaaactgcttttattccacctccttcactacctccctttaacaatcacttagccaatctgtccttgcttcactaaaagcaacagataagcacaaaaaatatttgaaagactaataggtgctaatgcaggggagacccagccctgtcttgggtgtaacgtgccattttcttcttttgctctgtatcacaaacaaagag

SEQ ID NO: 64942 - DNA, 600 bp, Chicken  19866894331448_1
cacttctaccagttgccagactattcctcctctgctgacacaaagaactcattagatacctttatgagccaaaaaatttcagcagaaaattaatgaaacaggaaggagaggggaaaggtaggaaggaagaggagacaggcctgctttagggctctacacagcttaccttccccacgtccccatggcataactaggggcctgaagtcaacatctcaattccttgaggtgggcaatattatctgtgcataataatagcaaaagtggtaaataactgcggaactccactgtgcaaaatgtagragaaaagcagttctgcactggatctgcattcagcctgtatttgtgatttaataggtttatttgcagttgtccaatctcaaacagcatggtcttccctgctgccagatggtgaatctcaaagccatttcctatattaaatatcctgttgcaatctggtctgctgaatgcaagtacaggacttctagaaaccaggtaataaccagtgtcctcaagaaatgtttgtgaatgtgccaatgagctctctttgcatatgtggtgctgtaccttgatggataattccaaagacatgtagaacatagg

SEQ ID NO: 64943 - DNA, 599 bp, Chicken  19866894331453_1
  misc_feature (1)..(161): n is any nucleotide
nnnnnnnnnnnnnnnnnnnnnnnnnnnnnnnnnnnnnnnnnnnnnnnnnnnnnnnnnnnnnnnnnnnnnnnnnnnnnnnnnnnnnnnnnnnnnnnnnnnnnnnnnnnnnnnnnnnnnnnnnnnnnnnnnnnnnnnnnnnnnnnnnnnnnnnnnnnnnnnnnttatttaaatataaagcacatgacaacataaatctttcagatacgtgactttctgagcaagaaaaacaacaaagcccaagcagacgttttgaaacctggacaacaatgacctgcatcagctttaacactgcaattattkttgtcctgtgttcatattttctttctcatgttttgaatcattgggtcatgagcaattgcaaaaatctttgtggactgacatggacacctgctggcccaattgctcccttctggctctcctgttgctgcttgggatgcctaccccccacaggtacacaatgcagctgcctggggaatctccctgcttgggaacatttgcaatttcccactgtggtggtttaaartgagatgagatggtgtctgggtggcagctacagactgtggcatctctggggcagtgggcaacacaaatacycstat

SEQ ID NO: 64944 - DNA, 600 bp, Chicken  19866894331453_2
aaaacaacaaagcccaagcagacgttttgaaacctggacaacaatgacctgcatcagctttaacactgcaattattkttgtcctgtgttcatattttctttctcatgttttgaatcattgggtcatgagcaattgcaaaaatctttgtggactgacatggacacctgctggcccaattgctcccttctggctctcctgttgctgcttgggatgcctaccccccacaggtacacaatgcagctgcctggggaatctccctgcttgggaacatttgcaatttcccactgtggtggtttaaartgagatgagatggtgtctgggtggcagctacagactgtggcatctctggggcagtgggcaacacaaatacycstatgagtcyggggaaagaargtyctctctgggcttccttgaatgtaagcgtgagtggagagagatagaatagcataaaccaagtgagggaaaaaattccctatgaatgcattgtctgtactgttactttggggtttggagggcatttctgtgagcagaacgaaaaaacactgcacagctgtgattgcaaggcagtctattatctgcattatctctccttaagatggg

SEQ ID NO: 64945 - DNA, 600 bp, Chicken  19866894331453_3
ttattkttgtcctgtgttcatattttctttctcatgttttgaatcattgggtcatgagcaattgcaaaaatctttgtggactgacatggacacctgctggcccaattgctcccttctggctctcctgttgctgcttgggatgcctaccccccacaggtacacaatgcagctgcctggggaatctccctgcttgggaacatttgcaatttcccactgtggtggtttaaartgagatgagatggtgtctgggtggcagctacagactgtggcatctctggggcagtgggcaacacaaatacycstatgagtcyggggaaagaargtyctctctgggcttccttgaatgtaagcgtgagtggagagagatagaatagcataaaccaagtgagggaaaaaattccctatgaatgcattgtctgtactgttactttggggtttggagggcatttctgtgagcagaacgaaaaaacactgcacagctgtgattgcaaggcagtctattatctgcattatctctccttaagatgggcaggaattcttcatttcatgcatcatttaaaacttgctacagtgatcccacaaagtcagtagctatgctaa

SEQ ID NO: 64946 - DNA, 600 bp, Chicken  19866894331453_4
attkttgtcctgtgttcatattttctttctcatgttttgaatcattgggtcatgagcaattgcaaaaatctttgtggactgacatggacacctgctggcccaattgctcccttctggctctcctgttgctgcttgggatgcctaccccccacaggtacacaatgcagctgcctggggaatctccctgcttgggaacatttgcaatttcccactgtggtggtttaaartgagatgagatggtgtctgggtggcagctacagactgtggcatctctggggcagtgggcaacacaaatacycstatgagtcyggggaaagaargtyctctctgggcttccttgaatgtaagcgtgagtggagagagatagaatagcataaaccaagtgagggaaaaaattccctatgaatgcattgtctgtactgttactttggggtttggagggcatttctgtgagcagaacgaaaaaacactgcacagctgtgattgcaaggcagtctattatctgcattatctctccttaagatgggcaggaattcttcatttcatgcatcatttaaaacttgctacagtgatcccacaaagtcagtagctatgctaact

SEQ ID NO: 64947 - DNA, 597 bp, Chicken  19866894331453_5
ctgtgttcatattttctttctcatgttttgaatcattgggtcatgagcaattgcaaaaatctttgtggactgacatggacacctgctggcccaattgctcccttctggctctcctgttgctgcttgggatgcctaccccccacaggtacacaatgcagctgcctggggaatctccctgcttgggaacatttgcaatttcccactgtggtggtttaaartgagatgagatggtgtctgggtggcagctacagactgtggcatctctggggcagtgggcaacacaaatacycstatgagtcyggggaaagaargtyctctctgggcttccttgaatgtaagcgtgagtggagagagatagaatagcataaaccaagtgagggaaaaaattccctatgaatgcattgtctgtactgttactttggggtttggagggcatttctgtgagcagaacgaaaaaacactgcacagctgtgattgcaaggcagtctattatctgcattatctctccttaagatgggcaggaattcttcatttcatgcatcatttaaaacttgctacagtgatcccacaaagtcagtagctatgctaactacaaaa

SEQ ID NO: 64948 - DNA, 586 bp, Chicken  19866894331453_6
ttttctttctcatgttttgaatcattgggtcatgagcaattgcaaaaatctttgtggactgacatggacacctgctggcccaattgctcccttctggctctcctgttgctgcttgggatgcctaccccccacaggtacacaatgcagctgcctggggaatctccctgcttgggaacatttgcaatttcccactgtggtggtttaaartgagatgagatggtgtctgggtggcagctacagactgtggcatctctggggcagtgggcaacacaaatacycstatgagtcyggggaaagaargtyctctctgggcttccttgaatgtaagcgtgagtggagagagatagaatagcataaaccaagtgagggaaaaaattccctatgaatgcattgtctgtactgttactttggggtttggagggcatttctgtgagcagaacgaaaaaacactgcacagctgtgattgcaaggcagtctattatctgcattatctctccttaagatgggcaggaattcttcatttcatgcatcatttaaaacttgctacagtgatcccacaaagtcagtagctatgctaactacaaaa

SEQ ID NO: 64949 - DNA, 583 bp, Chicken  19866894331453_7
tctttctcatgttttgaatcattgggtcatgagcaattgcaaaaatctttgtggactgacatggacacctgctggcccaattgctcccttctggctctcctgttgctgcttgggatgcctaccccccacaggtacacaatgcagctgcctggggaatctccctgcttgggaacatttgcaatttcccactgtggtggtttaaartgagatgagatggtgtctgggtggcagctacagactgtggcatctctggggcagtgggcaacacaaatacycstatgagtcyggggaaagaargtyctctctgggcttccttgaatgtaagcgtgagtggagagagatagaatagcataaaccaagtgagggaaaaaattccctatgaatgcattgtctgtactgttactttggggtttggagggcatttctgtgagcagaacgaaaaaacactgcacagctgtgattgcaaggcagtctattatctgcattatctctccttaagatgggcaggaattcttcatttcatgcatcatttaaaacttgctacagtgatcccacaaagtcagtagctatgctaactacaaaa

SEQ ID NO: 64950 - DNA, 600 bp, Chicken  19866894331455_1
acgacacttccctcctcttcctcaaaaagtggcttcaactacatataagtttggaagcaaaaggactttctcctttgctatttgatcccttgatgcaattggaagtgctgggaaggaagggctctgataatgctcacccactgaaggagggcagcacagctggagcccagtcctctcctgctattcccaaggcacccctaacagaataagcacgtcaggatcaagcatctattcctcctacaccagagataccgctcacaaatacaatttgaccaagtctgtttctcagcagcaccttgmctagccccagctgcttaggacaacagaatggccagaacataacaaaagctttactaattgtagctgatcattatcgagtacagcatggaatgtaaacagtagagctgtcaatgacagcactttgaactcaaagtgcaaactgtcagtggaggacaagaatgagatgacagcagaattccaatacccaaggatagtgaggaagaactactgaaaagcttaaataagcccattacagaygttcatagtgaggaacgataaactgggtctcttctgatcagtggtgggcatgaaatgggctcc

SEQ ID NO: 64951 - DNA, 600 bp, Chicken  19866894331455_2
ctacaccagagataccgctcacaaatacaatttgaccaagtctgtttctcagcagcaccttgmctagccccagctgcttaggacaacagaatggccagaacataacaaaagctttactaattgtagctgatcattatcgagtacagcatggaatgtaaacagtagagctgtcaatgacagcactttgaactcaaagtgcaaactgtcagtggaggacaagaatgagatgacagcagaattccaatacccaaggatagtgaggaagaactactgaaaagcttaaataagcccattacagaygttcatagtgaggaacgataaactgggtctcttctgatcagtggtgggcatgaaatgggctccccagggcagctgccacagcaccaaggcccctggagttcaagaagcattatgctcaatgctctcagacacagggtttgaatttcaggtggccctgtgaggagccaggggttgtacctgacccctgggggttccttccaatgtgagatgttctaagattcctttgttccctgagctctagcatactttatctcagtccaggtacaccctgatagtacgtgcaatgaataaagctaaagg

SEQ ID NO: 64952 - DNA, 600 bp, Chicken  19866894331457_1
tcctgatatccaacctaaacttaccctggtgcaacttgaggccatttcccctcatcctgtcacctgtcaccagggagaagagaccagccctgctctcgctgtaagcaaaggttgcattcttcactgccttggaataactttccactttttcagcccactgtggattttactgcactgtctcctgcttcatgatgggacaagtgaccaaaaaattgttcccattatgtaaggcacatcttgccatcacaatcacatattttttccccagcttcaatggagggtagaatattgttcttatarccttttcaaaatcaattaattttgcytagactgaatgctaccataaatttgaacaaaaatatcattcttttcagattatttcttgtgmtaaaaatcaactgtatttccyctgcttcctccaggctataggataaatctctgaccatttaatcttctcaccaacctttgtatcayggtgactgttgtatcaacacacatcaccattttcttgaagcgatataaaatgaagtcatgttttaccttagctagaagggctgggtttttgtctgggatgtaaaaccacccgacctgtcctgactt

SEQ ID NO: 64953 - DNA, 600 bp, Chicken  19866894331457_2
tggtgcaacttgaggccatttcccctcatcctgtcacctgtcaccagggagaagagaccagccctgctctcgctgtaagcaaaggttgcattcttcactgccttggaataactttccactttttcagcccactgtggattttactgcactgtctcctgcttcatgatgggacaagtgaccaaaaaattgttcccattatgtaaggcacatcttgccatcacaatcacatattttttccccagcttcaatggagggtagaatattgttcttatarccttttcaaaatcaattaattttgcytagactgaatgctaccataaatttgaacaaaaatatcattcttttcagattatttcttgtgmtaaaaatcaactgtatttccyctgcttcctccaggctataggataaatctctgaccatttaatcttctcaccaacctttgtatcayggtgactgttgtatcaacacacatcaccattttcttgaagcgatataaaatgaagtcatgttttaccttagctagaagggctgggtttttgtctgggatgtaaaaccacccgacctgtcctgacttacacacatagattgcacagccacctc

SEQ ID NO: 64954 - DNA, 600 bp, Chicken  19866894331457_3
cctgctctcgctgtaagcaaaggttgcattcttcactgccttggaataactttccactttttcagcccactgtggattttactgcactgtctcctgcttcatgatgggacaagtgaccaaaaaattgttcccattatgtaaggcacatcttgccatcacaatcacatattttttccccagcttcaatggagggtagaatattgttcttatarccttttcaaaatcaattaattttgcytagactgaatgctaccataaatttgaacaaaaatatcattcttttcagattatttcttgtgmtaaaaatcaactgtatttccyctgcttcctccaggctataggataaatctctgaccatttaatcttctcaccaacctttgtatcayggtgactgttgtatcaacacacatcaccattttcttgaagcgatataaaatgaagtcatgttttaccttagctagaagggctgggtttttgtctgggatgtaaaaccacccgacctgtcctgacttacacacatagattgcacagccacctctcctgatgacatcagtgcattaggagctcgggatatatacttgatttgcatttcatcgtgct

SEQ ID NO: 64955 - DNA, 600 bp, Chicken  19866894331457_4
ggttgcattcttcactgccttggaataactttccactttttcagcccactgtggattttactgcactgtctcctgcttcatgatgggacaagtgaccaaaaaattgttcccattatgtaaggcacatcttgccatcacaatcacatattttttccccagcttcaatggagggtagaatattgttcttatarccttttcaaaatcaattaattttgcytagactgaatgctaccataaatttgaacaaaaatatcattcttttcagattatttcttgtgmtaaaaatcaactgtatttccyctgcttcctccaggctataggataaatctctgaccatttaatcttctcaccaacctttgtatcayggtgactgttgtatcaacacacatcaccattttcttgaagcgatataaaatgaagtcatgttttaccttagctagaagggctgggtttttgtctgggatgtaaaaccacccgacctgtcctgacttacacacatagattgcacagccacctctcctgatgacatcagtgcattaggagctcgggatatatacttgatttgcatttcatcgtgcttttattcccacatggagtcac

SEQ ID NO: 64956 - DNA, 600 bp, Chicken  19866894331457_5
ctgtctcctgcttcatgatgggacaagtgaccaaaaaattgttcccattatgtaaggcacatcttgccatcacaatcacatattttttccccagcttcaatggagggtagaatattgttcttatarccttttcaaaatcaattaattttgcytagactgaatgctaccataaatttgaacaaaaatatcattcttttcagattatttcttgtgmtaaaaatcaactgtatttccyctgcttcctccaggctataggataaatctctgaccatttaatcttctcaccaacctttgtatcayggtgactgttgtatcaacacacatcaccattttcttgaagcgatataaaatgaagtcatgttttaccttagctagaagggctgggtttttgtctgggatgtaaaaccacccgacctgtcctgacttacacacatagattgcacagccacctctcctgatgacatcagtgcattaggagctcgggatatatacttgatttgcatttcatcgtgcttttattcccacatggagtcactccagtgatgtgatcaatattcactgtctctaaaaaacacattattttttcttcttaaaaggatt

SEQ ID NO: 64957 - DNA, 600 bp, Chicken  19866894331465_1
aaagatgacacatagactgccctactctaagagcagatgtcctatttgggctgaagactcatgattgatggctgtctaggcatgacccagggttacatgtaggtgatgatggcagtagagggcagtagtgtacatcacctttagtgctctcaaaacagaggcagtcctgctcgacatagggccatttcctggtggcctgaggaacaagaccaacagcaacttgctcattctgcaggggtccagaaaacaccagtttgaaatatttttgttttccaagtgaccattaatattccccaaaayttcatgaacatccatttcttcagtttttagcrcttctggtaaaaactgaggtttggggtgtgtgtccgtgatcacagcagtggatgccacctctgcagtcatattttcccaccgtgtgcatatgatgctgagcacgtgtgaatgcagggactcattgtggtggctgcctggagaactgagcttttccattttcagtgtaatggcaacatccaggaaactaccaagagctaccaatgtaaatgcagtgatagctccgggctgaagaacaaaggacaggaaaatgaaaggcaaagctgatga

SEQ ID NO: 64958 - DNA, 600 bp, Chicken  19866894331465_2
gcagatgtcctatttgggctgaagactcatgattgatggctgtctaggcatgacccagggttacatgtaggtgatgatggcagtagagggcagtagtgtacatcacctttagtgctctcaaaacagaggcagtcctgctcgacatagggccatttcctggtggcctgaggaacaagaccaacagcaacttgctcattctgcaggggtccagaaaacaccagtttgaaatatttttgttttccaagtgaccattaatattccccaaaayttcatgaacatccatttcttcagtttttagcrcttctggtaaaaactgaggtttggggtgtgtgtccgtgatcacagcagtggatgccacctctgcagtcatattttcccaccgtgtgcatatgatgctgagcacgtgtgaatgcagggactcattgtggtggctgcctggagaactgagcttttccattttcagtgtaatggcaacatccaggaaactaccaagagctaccaatgtaaatgcagtgatagctccgggctgaagaacaaaggacaggaaaatgaaaggcaaagctgatgagccatcctcagtattagcccttgtcactcatt

SEQ ID NO: 64959 - DNA, 600 bp, Chicken  19866894331470_1
agtattcttctgtccatgtaaaatggatcccttgtgtctgaatttaagtctctgtatattgttacttgtgcactggcttagaaatactttagaggcattatctaggagctttcatgacttgtaccacatatttcctctgcctccctgcacccacacgtccacgcatatatagcgagagatggaggatcggattctgatcggatttgtgctcatttgacacgaacaaaatgctctgtttatgcatttcttttccctcgaatgtaacctgaaagtcagttttggacccatcagatggcattyggtaaacagacacccaacaagtgctgtgctactgaggaagtcagggccacaygttgagcaaggagtgataaatggctgcatttggagccgagagctgtaaaacacaagcagcaatgtgtctggggctgatttccttgttcaatagggttgtttggacaattcattgctacagtggcatttactctggaatctgtagactgcattgtagagacatccatttcagtatcatctgtcatgagcagacttcgtgctttcccatttggattgctcttcatttaaagctctgaatggtggcgcgga

SEQ ID NO: 64960 - DNA, 600 bp, Chicken  19866894331470_2
tgtatattgttacttgtgcactggcttagaaatactttagaggcattatctaggagctttcatgacttgtaccacatatttcctctgcctccctgcacccacacgtccacgcatatatagcgagagatggaggatcggattctgatcggatttgtgctcatttgacacgaacaaaatgctctgtttatgcatttcttttccctcgaatgtaacctgaaagtcagttttggacccatcagatggcattyggtaaacagacacccaacaagtgctgtgctactgaggaagtcagggccacaygttgagcaaggagtgataaatggctgcatttggagccgagagctgtaaaacacaagcagcaatgtgtctggggctgatttccttgttcaatagggttgtttggacaattcattgctacagtggcatttactctggaatctgtagactgcattgtagagacatccatttcagtatcatctgtcatgagcagacttcgtgctttcccatttggattgctcttcatttaaagctctgaatggtggcgcggagtaggaagagaaaggccatatgcttctcattggggattctctaatcatctgc

SEQ ID NO: 64961 - DNA, 600 bp, Chicken  19866894331476_1
gcagtatggctgtgcagtagggctctgtgcaatagggctgtgcagtagggctgtgtgcagtatggctgtgcagtagggctctgtgcaatagggctgtgcagtagggctgtgtgcaatagggccgtgcaatagggctgtgcagtaagggctgtgtgcagtatggctgtgcagtagggctctgtgcaatagggccgtgcagtagggctgtgcagtagggcttctgccgcatgctgctctgccaggctctgctgcacactgctgcacaccaagccagccctggtgcagggagcaggtgtggcraagtccattttacaggcggggaactccctggcaatcggttgcaagatgcaggctgtgcctcatggccatcagcagcaagttggaggtggtgtgcacggtgttgctgggcactgtgttctatttagagctgcggggtttggtgctgcttgtcccacggtggtagaaaaaatctgtgttcagcatctgggctgctcaatccagatgggaggagcgtggtctcagtaacccctgcatgctgggaaatgcatctgcctatacaagggaaaggttcttgcctgtgtggaggggtgtcatgcaaac

SEQ ID NO: 64962 - DNA, 600 bp, Chicken  19866894331476_2
ggctgtgcctcatggccatcagcagcaagttggaggtggtgtgcacggtgttgctgggcactgtgttctatttagagctgcggggtttggtgctgcttgtcccacggtggtagaaaaaatctgtgttcagcatctgggctgctcaatccagatgggaggagcgtggtctcagtaacccctgcatgctgggaaatgcatctgcctatacaagggaaaggttcttgcctgtgtggaggggtgtcatgcaaacaacatagaagtatgcaagcagacagggatacattaacttccccaaacacrcggcctgctttcctttcccaaactctcctgtggcagggagaagagtaatgacggggctgtaacagggcagtgtgaggccctgatgcaggagagctgaggagcggttctcattgggatgctcttcattctgcacgagcactgccagaggctttagcgatgaatatactacagrtctttgttcaagagctgcatccctaaagctggagatgggcaccctaagcaggccattctggtgctcccgagatggggttggctgagatcctgcagtgcctgtcccatgcgggaagtcagaggcagtca

SEQ ID NO: 64963 - DNA, 600 bp, Chicken  19866894331476_3
taacccctgcatgctgggaaatgcatctgcctatacaagggaaaggttcttgcctgtgtggaggggtgtcatgcaaacaacatagaagtatgcaagcagacagggatacattaacttccccaaacacrcggcctgctttcctttcccaaactctcctgtggcagggagaagagtaatgacggggctgtaacagggcagtgtgaggccctgatgcaggagagctgaggagcggttctcattgggatgctcttcattctgcacgagcactgccagaggctttagcgatgaatatactacagrtctttgttcaagagctgcatccctaaagctggagatgggcaccctaagcaggccattctggtgctcccgagatggggttggctgagatcctgcagtgcctgtcccatgcgggaagtcagaggcagtcataagccatgagggatgcacacagcagtgcccagggctggctgctgagctgcaggttgagcgatgtcgtatgagcagctctgggttctgccttgctgtgtggggtgccgtgctcaccctgtgccctcttctcttgcaggattgtgacagaagggcctgggagctccctccact

SEQ ID NO: 64964 - DNA, 599 bp, Chicken  19866894331487_1
  misc_feature (1)..(279): n is any nucleotide
nnnnnnnnnnnnnnnnnnnnnnnnnnnnnnnnnnnnnnnnnnnnnnnnnnnnnnnnnnnnnnnnnnnnnnnnnnnnnnnnnnnnnnnnnnnnnnnnnnnnnnnnnnnnnnnnnnnnnnnnnnnnnnnnnnnnnnnnnnnnnnnnnnnnnnnnnnnnnnnnnnnnnnnnnnnnnnnnnnnnnnnnnnnnnnnnnnnnnnnnnnnnnnnnnnnnnnnnnnnnnnnnnnnnnnnnnnnnnnnnnnnnnnnnnnnnnnnnnnnnnnnnnnnnnnnnnnnnnnntgctcttcttagggaaaagaygtgtccctggcaaactgcctgtccatgtatggctgaaatgatacccatttcttggggtatagggatgtctcatcagaaagtgttgtgtaaaccagaccctgctgtcttccaagcactggataaccttggaattggagttcccctggcagcctttcagatagcgtgtaagagttcctgaactgtcacagggctccctaatgatgcttccagcatttctgatgcttcagaggtctgtagataaacagtatgaactatagaagcatgctgtcctttattatgtcaggacaatatagatacag

SEQ ID NO: 64965 - DNA, 600 bp, Chicken  19866894331487_2
gaaatttattaaacttgaaataaagcattcatccctgaatgaacatctccttttgtaagcttgcaggattttgctcatgggctttttaccgctattctcttgtttgaatgaatgtacccttaaggccaaaatccatattgctgagttattatgaaatacagactttgtctccgtgtgctcctacacttaacattgctcaacaaatgatacctgtgtggtaattttcaaatgaatgactggaaaaagacagagaggagaaagttatagctggtgggccgtttgtcatcacctgaagcgacrgcggggaaaatactgttttgtatattctaacactgatgtgtgtgccaccaggtattttttgttcgtgccattatcagcattggtatggatagcaacagcagcttacttgcagtgttagggattgtatgtacttgaacacattgtcgacagattttaagtgtgtatttaaaatctgttggggagaaatgcgattaggaaaaagcaaattttctcacatggtgaattttttaatcctaaagttcaagttcaagctttctcagcatattggtacgaggaattacccattaattaaataacatg

SEQ ID NO: 64966 - DNA, 600 bp, Chicken  19866894331493_1
tggagaccaaacagtgggtgtgagtacagtgaggtggcgggtggtgtgttttggcagtggtgacagttacagtgggtaacttccgctgatgcagatttttatgagcacagcatgcaggtcttgttcattgctggtgaaaatgctaatggtggtaactgtgttcaaaaacattgttttgaaagatttgaagatgagaatttgcactatcaaatagcgctgttgtgctctttgtatgtgttgtagcttccatggaagtacataggaggcattactgtcagagtcacctatgtagttcacacyatgtgttttgtgatataaataacagtatattatatgaaagcacatgataagaagaaataggaaacgctgattattttctaaaaacctcagtatgattttactggtcacaaatatatatcaggtatttactttcaccacagtattaacaaggtgattgcatgattgctaatttgtattaaacttctgtagattttgaaagacttagtacagcaccactttaaaagaagagacagtcacagttggctgtggatctaagtctactgttttgatctaaggagctctctcatatggcactcagtc

SEQ ID NO: 64967 - DNA, 600 bp, Chicken  19866894331494_1
aaaacctctccttgtggtagtagaaggtgaggggaagaaaaacaacaaacagacttccgaaagaaaatttccactaaactcttctcattataaccttgctacccacacttgggatgctaagtcttgtttagaaatgatacaatccttttcaaaaacagaaagaccaacaacattgtgttctgtgaagtatggcaatgcattacttttcagctttttgtcaacagtgctctggtctcaagcaagaaagaggaaaagctgattttcccctcaggctgcattaacagtgcaaatatccagcayctcttgctttgagtaaattgcagatggatagcagtaaaacgtgatgaagatgcaagatacagaacttcagtaaagtggatttggaattgttacattagctataggtagtaagccctgagacaggtacaggaagcatcccaaaggttctctctaaaaactagctttkgtagaaggtttttaagcatgtagagtgacttgatcaagacataagaaaacctttgcatctttgcagatgttcagaactggctcttagggagaggagaagtgactagtgagacctattattgaaaagctggaagc

SEQ ID NO: 64968 - DNA, 600 bp, Chicken  19866894331494_2
acaacattgtgttctgtgaagtatggcaatgcattacttttcagctttttgtcaacagtgctctggtctcaagcaagaaagaggaaaagctgattttcccctcaggctgcattaacagtgcaaatatccagcayctcttgctttgagtaaattgcagatggatagcagtaaaacgtgatgaagatgcaagatacagaacttcagtaaagtggatttggaattgttacattagctataggtagtaagccctgagacaggtacaggaagcatcccaaaggttctctctaaaaactagctttkgtagaaggtttttaagcatgtagagtgacttgatcaagacataagaaaacctttgcatctttgcagatgttcagaactggctcttagggagaggagaagtgactagtgagacctattattgaaaagctggaagcaagtcttcctgcttgctatgcaagtactgtttgtgtgctccttggtggctgtgagatccctggctgttcatgtgttctgcctggatatctctgcagcccctttgacatggagtgatttgatttttttgtggaacacattcattgtttgtaggaaaataaagcaaga

SEQ ID NO: 64969 - DNA, 600 bp, Chicken  19866894331495_1
agggggtttctccttgccaagaggtgtgcctttctctttccctccattcttttcctttttttgctcttcagcctgacaagatagagaaactaagttgtcattgtagcctttgtgaagaacaaagggcagagtgctataaaatcgatttatttatttgaatacttttccttttcagagttataatgctgtagtgaagttttattcttcgtaaacacatcatttagtttattacattctcaataaattatagtgttaagagtccacattaataacgtggataacggcagaaggatgagtgargaatcactgtccttcggttactgtcacwacagtacctgcagtcagaaaccttccctggcctgaagtgaaatcagaccaaarttcaatttctgttaagcctttagcatctctgttaacacttgagtaaggtgtaaaatagtaccagcgctattttgtctttgatgtaagtatctgtctactataaacaagaaccaacagccttgtgctcatttcacacaggatattacttagccattctcattattttcaaataaaacctccaacgtttaagtttactcagtaatttgagagtaaagaatg

SEQ ID NO: 64970 - DNA, 600 bp, Chicken  19866894331495_2
cctttctctttccctccattcttttcctttttttgctcttcagcctgacaagatagagaaactaagttgtcattgtagcctttgtgaagaacaaagggcagagtgctataaaatcgatttatttatttgaatacttttccttttcagagttataatgctgtagtgaagttttattcttcgtaaacacatcatttagtttattacattctcaataaattatagtgttaagagtccacattaataacgtggataacggcagaaggatgagtgargaatcactgtccttcggttactgtcacwacagtacctgcagtcagaaaccttccctggcctgaagtgaaatcagaccaaarttcaatttctgttaagcctttagcatctctgttaacacttgagtaaggtgtaaaatagtaccagcgctattttgtctttgatgtaagtatctgtctactataaacaagaaccaacagccttgtgctcatttcacacaggatattacttagccattctcattattttcaaataaaacctccaacgtttaagtttactcagtaatttgagagtaaagaatgaataaagatggtgatagtgacctaaagt

SEQ ID NO: 64971 - DNA, 600 bp, Chicken  19866894331495_3
tagagaaactaagttgtcattgtagcctttgtgaagaacaaagggcagagtgctataaaatcgatttatttatttgaatacttttccttttcagagttataatgctgtagtgaagttttattcttcgtaaacacatcatttagtttattacattctcaataaattatagtgttaagagtccacattaataacgtggataacggcagaaggatgagtgargaatcactgtccttcggttactgtcacwacagtacctgcagtcagaaaccttccctggcctgaagtgaaatcagaccaaarttcaatttctgttaagcctttagcatctctgttaacacttgagtaaggtgtaaaatagtaccagcgctattttgtctttgatgtaagtatctgtctactataaacaagaaccaacagccttgtgctcatttcacacaggatattacttagccattctcattattttcaaataaaacctccaacgtttaagtttactcagtaatttgagagtaaagaatgaataaagatggtgatagtgacctaaagtctcacattatacacctaaggagcttagatcaagtaaaacatttaaataatcca

SEQ ID NO: 64972 - DNA, 600 bp, Chicken  19866894331496_1
gaccttggaactagtttccgtaacggtttcatgaaggatcttgttctctttttcaatatctttcactcttgcctcgctgctcacttgagatctttgtcgcagggataagaccacttgattcaggtgatcattttcttgtttaaggtcctttatctacataaacaaaacaaaaagtaagtcatgcaagtgctacacattcatcatagtttagttctaaagtagctagctgcttgttagtaaaaacatccatttaacacaagaaaaatttctgagctaaaccaacgaccataactaaaaaaytgctacctctggtaccttggcactctaatgaactgaaaaatggtgctgtgttcttcctaccaggaaaggtctaagcagagagataaaggagacaaaaggcctccagggaacactctggagaggatgatttgttattaatcatatgttaccttttcatttaggtttacatccctgtctttgtgatctgaagacccaaattttctctggtaagacttaagaaactcagcaagtatggaaaatttgtagcaattatgtatctcattaaggatacactttcaatgaaagcagtacattgacgta

SEQ ID NO: 64973 - DNA, 600 bp, Chicken  19866894331503_1
aaaatactgagcattcaaaataattacattgttccaaagtaaaaaatcacagcacattcatcctgagatccctaatgaagacctagatgtaattaagcattagtaagtcctattaaaatactggtctactctgaaaattggtatccttactaaggtttatgtctttgttctccactttgatcactgttacatgaaatgctttctatgaaaattagctgagttttctttctgaaacgttattcctctttcagcttcccatcattacctggagacatggcctttcagtctaagtcagcttcrtctcttctctctgcagatcagtgaatttaaaactgcctcttcacttagccacttccttgggactctgaaatgcagctagcctgtcacatcttctcttggatagctcatcacaaatttaactgaggaaaatgaaacctcttcatcttccctatctaattctcaaaactcttgcagtctgctactgttggcactgtcactgtcgctttgtcaacctggacacaacacagggtttatttttctcctttctccaaacaccatggtcacaygtacatccaaaagcatttccttttcaagcaaatt

SEQ ID NO: 64974 - DNA, 600 bp, Chicken  19866894331503_2
tggagacatggcctttcagtctaagtcagcttcrtctcttctctctgcagatcagtgaatttaaaactgcctcttcacttagccacttccttgggactctgaaatgcagctagcctgtcacatcttctcttggatagctcatcacaaatttaactgaggaaaatgaaacctcttcatcttccctatctaattctcaaaactcttgcagtctgctactgttggcactgtcactgtcgctttgtcaacctggacacaacacagggtttatttttctcctttctccaaacaccatggtcacaygtacatccaaaagcatttccttttcaagcaaattgtagactgatgctttgcacgccaatattcagcatctcctcgtctctcacagtgaaaaccactagaattcttttctcttccttccttttgcctgtatttctcctttttctactgaatgaagttgaaagccagtgtctttctgaaacagctgtcccactctgctgaaattctgcatgagttcacactttctgctgctgaacctgagacgttacagctactggctgaggctttgcatgatttcaccttgccctacttctctgagtttgt

SEQ ID NO: 64975 - DNA, 600 bp, Chicken  19866894331513_1
gaaatagcaaagtctgcaggttttaatttttgtttagtccacataaacaaagagatcaaaacgtttagctaaaatcacgatgttgttgcaaggacagtgtgaactggttacaaactattatttggagctgagagagccttcacaatactgttgctgaagaactctttaggctttcacattctgtccaactgcctctttagctttctgcttccccttgtccgataaatactgataaaaactcaccaacaacctcccattgagatagagatcaaacctcccatagtaaaaataaagctttgyatcagttccttcataagggctctgttcaagctaaatctttatggggagaaagaaaccaccaacattgttatctgaaatcaactctttcctcacattaaaattaacctaatgatactcccatatcacttcagttaaaagaatgtgaccaacactgggcttccttggtcacacttgaagcttttttttttttccccagaatctcagatatcagacttaatcctcctacctgcatttcctggatactttttcattattccaaaagtaaaagcaataaataatttcatttatgataggcatatt

SEQ ID NO: 64976 - DNA, 600 bp, Chicken  19866894331521_1
taaaacagtaggaaatcgaactttgacctactgtggaaggttgacgaggtgaagttggcattgcacgttggaatgtttaacatattctgtgcgtcaatattttgatttcgtattcatttgataaataatgcagcgagaacagaaaaaaggtgcatatgaaccttctctgacattggttgcaacagtgaaaagaaatagactttcagtgcctggaatgtcagttgccacacatactaacaattacacagaaaaatccctcagacagcaaaatgtaaaattatcttcttataagttactctwctgttgtactggaaaagcttaaataaacttgcatttcatttgcatatgctgcaaagtgagaaatgtatctctagtctatttgttttttgtggtattggaactgggcattttcaaaactaacacagatgaaggatgatcctcaaactgagtcaaaatttgtgtttcttatgtatgtacacagacagggagagggagggggagaaagagaaagattggaagtaagagctgaatatctgtagcttatccagatccctgggaggaatctcactggagatgtgaattctcatcaaccacaaaaaa

SEQ ID NO: 64977 - DNA, 600 bp, Chicken  19866894331521_2
gttgtactggaaaagcttaaataaacttgcatttcatttgcatatgctgcaaagtgagaaatgtatctctagtctatttgttttttgtggtattggaactgggcattttcaaaactaacacagatgaaggatgatcctcaaactgagtcaaaatttgtgtttcttatgtatgtacacagacagggagagggagggggagaaagagaaagattggaagtaagagctgaatatctgtagcttatccagatccctgggaggaatctcactggagatgtgaattctcatcaaccacaaaaaatygagagcaccttccctgaccccataaaatgctctgtttgagtgtctttactccctccctttggatgtgctttgtcacttcttttctgaacagaagcagctagtactgtgagagataaaagaattaaatccatattcaatataatgatgaatcaatctttgaaaaatacgaatgaaaccccacccttaggtttataaagaaaaatggttgaagtcaagcccagcttaatcaaaagccgattttctatgttgttttcataatatatgtagataagaggagttggaaatagttaatggtaatac

SEQ ID NO: 64978 - DNA, 600 bp, Chicken  19866894331529_1
aagataagaggccactggaattgttcaagcaatactcaaatgccaagtttagctcgtgtggacatcagcaagatctggcataggagtggtggactccagcaggctcctcttattctgttgtgtaggagattagacacctgcttcttccttacaaactgaagagcctttcagctcctcacacattaccagctgtgtgtgacccctgagctcatggcagtaatacaacccttggatcaccaccagcttctcagaagccattctaagttttcaccaaatctggtgtgtgggacaaaatgctcygtagagtctggacttctgtgtagaaaagggctaggagattcagtggatatataggaagaagcatactactgtcctgtatctcagcactaaaaggctctcacccatgcccctgccacatcttgctgttgaagccatggctcagctgcattcccatgtgctgaataccaaaaccacaagcacctaagaagaaaacacaaggtgtggtagctctagccactgagatctcctgtaccttgaatcaggtaggccagcaggtagaagaaacaagtgccacctgcagctgcagaatcagtgttcttg

SEQ ID NO: 64979 - DNA, 599 bp, Chicken  19866894331535_1
  misc_feature (1)..(35): n is any nucleotide
nnnnnnnnnnnnnnnnnnnnnnnnnnnnnnnnnnntcccttaaatatctcagctacctaaaatgacttcagtaataatcattcctaaaggactaattttgctctgggactcttcagtaaccaaattcagtctcttagtatctcgaatcaccaccttgcgcagttctacgtgcagtgcgctgttattccagaagcctcctctttgctattctcatagctacttttgtcgttgatttttaactgtgtgaatttttgtattatcacatttcaattcatttttattattctgattctcagattmagtgaattcttcctcagacattcttcagcattcaacaattgtttatttattaagraaataggtgcatatcgtatactttttagagttcttgaaatttatcaagtgaaagaataagatgatgtgaaaaaaccttactatttataaagctcagatattcatattttgtcatcttaccaataaatggatataaaaactgaagagttgaaagtattagataacctaaaaagccatatgtttttctgaccagctcttgataggtgttggtactggagagatttcctcctttgatcagtaatata

SEQ ID NO: 64980 - DNA, 600 bp, Chicken  19866894331535_2
cctaaaatgacttcagtaataatcattcctaaaggactaattttgctctgggactcttcagtaaccaaattcagtctcttagtatctcgaatcaccaccttgcgcagttctacgtgcagtgcgctgttattccagaagcctcctctttgctattctcatagctacttttgtcgttgatttttaactgtgtgaatttttgtattatcacatttcaattcatttttattattctgattctcagattmagtgaattcttcctcagacattcttcagcattcaacaattgtttatttattaagraaataggtgcatatcgtatactttttagagttcttgaaatttatcaagtgaaagaataagatgatgtgaaaaaaccttactatttataaagctcagatattcatattttgtcatcttaccaataaatggatataaaaactgaagagttgaaagtattagataacctaaaaagccatatgtttttctgaccagctcttgataggtgttggtactggagagatttcctcctttgatcagtaatataatggaataatctgttaaaatataaaatttctgttaaaggctagcaattaattaatg

SEQ ID NO: 64981 - DNA, 600 bp, Chicken  19866894331537_1
attaatcctgtagctggcctaaaaggaatggatttctagccataactgagattgggaaaaattgatttccatgttcttgttgactgaataagataaaaacaactgccttggtgcttattacctggccaagtattcagatctgtgctgctgagctgcagttggtttgaatgcgagcaccgctccagcccgatgctgatgaaaagggacttttcaggaaccaaaccttaagccttcctcctgttgcaaatgggacttgcagcagagcatggctcctgaatacgcggtggctctgcgtaggcrcccggctgggtgctttgatctttcagccagaaccgccgaggcacttctgataatcaaaaatgtgggaggggggaaggacrgagggtcatttctctgcatcagagagctgctgctagagatggcgcgtgccgtgccacctggttgctggctgctcattcaagctcctgaacgatgacttaagctctttggggtaactgctgctttctggcactcagagtggtccattgcattgaaggagagaggtagtggttggcctgtgctgttggtgaaagtgctggcaccagccttaaatggtatgga

SEQ ID NO: 64982 - DNA, 600 bp, Chicken  19866894331537_2
tgactgaataagataaaaacaactgccttggtgcttattacctggccaagtattcagatctgtgctgctgagctgcagttggtttgaatgcgagcaccgctccagcccgatgctgatgaaaagggacttttcaggaaccaaaccttaagccttcctcctgttgcaaatgggacttgcagcagagcatggctcctgaatacgcggtggctctgcgtaggcrcccggctgggtgctttgatctttcagccagaaccgccgaggcacttctgataatcaaaaatgtgggaggggggaaggacrgagggtcatttctctgcatcagagagctgctgctagagatggcgcgtgccgtgccacctggttgctggctgctcattcaagctcctgaacgatgacttaagctctttggggtaactgctgctttctggcactcagagtggtccattgcattgaaggagagaggtagtggttggcctgtgctgttggtgaaagtgctggcaccagccttaaatggtatggagcttgcaccatccagtggacttctctgaagttgtttcctctagatatacaaatctcatttccaaagaagccgccttttca

SEQ ID NO: 64983 - DNA, 600 bp, Chicken  19866894331537_3
gggattaataaacatatgccatgttttgggttggaagtgctccttgtttccccagcttctgttgaaaggcagcacaaaagatgggggaaaacgtgcgtggcctgatctttccaaattcttccaggccatatgggctgccccatcccattgggtgctgtgctgtacaggagacctgacctcagctcaggcagggatgtgggcagctgtgatgccagggtggctctggggtggtgggatgtggctggtgatgtgttgtgaaggagctctcgtgtttaggagaagagtgaagagatggcaccygggaaggactttgcatctcactgttaacaaataagcagctaacaggattttttcatcttaagcctggtgtccggtgcaccactgtgcattaatcagactccaaccatgactacagaataggacccttcagcttggcctaattcttttcccacttctgtcttgctttacgtacacctggaaccgtctatgaaagtcaacccaagcacctcttccaacacctggggctacgggtgaccttctaggctttgctgttacaccatttcaggagccctccttccccctggggctggctctgcttgg

SEQ ID NO: 64984 - DNA, 600 bp, Chicken  19866894331537_4
gtgcaccactgtgcattaatcagactccaaccatgactacagaataggacccttcagcttggcctaattcttttcccacttctgtcttgctttacgtacacctggaaccgtctatgaaagtcaacccaagcacctcttccaacacctggggctacgggtgaccttctaggctttgctgttacaccatttcaggagccctccttccccctggggctggctctgcttggaagcggcggaggtaagcaatgcaaactcaatttgaggtctggcagatccaaacaaacgctgcttagatccccrgtttctcgtgccgtggattagcccrtgtgaaatggtaaatccccgtcctaaaattcctcaggcaaactgggaatygtggcagttttcaactgactgcaaacagatcacttgataactccccrtattattgacataactctagaaatacgctgcaaagtgtaaataataaatgtgtagtatctgcactggagcaagtaaacaccgcctgatgttgtctgatatttcactggcaaggtgtcctcagcgatgctccagcagaataattttccaaacgagtggcttgcgtgacaggtggatgtg

SEQ ID NO: 64985 - DNA, 600 bp, Chicken  19866894331537_5
tccaaccatgactacagaataggacccttcagcttggcctaattcttttcccacttctgtcttgctttacgtacacctggaaccgtctatgaaagtcaacccaagcacctcttccaacacctggggctacgggtgaccttctaggctttgctgttacaccatttcaggagccctccttccccctggggctggctctgcttggaagcggcggaggtaagcaatgcaaactcaatttgaggtctggcagatccaaacaaacgctgcttagatccccrgtttctcgtgccgtggattagcccrtgtgaaatggtaaatccccgtcctaaaattcctcaggcaaactgggaatygtggcagttttcaactgactgcaaacagatcacttgataactccccrtattattgacataactctagaaatacgctgcaaagtgtaaataataaatgtgtagtatctgcactggagcaagtaaacaccgcctgatgttgtctgatatttcactggcaaggtgtcctcagcgatgctccagcagaataattttccaaacgagtggcttgcgtgacaggtggatgtgctgagctaatgcagccacgcacgga

SEQ ID NO: 64986 - DNA, 600 bp, Chicken  19866894331537_6
ccacttctgtcttgctttacgtacacctggaaccgtctatgaaagtcaacccaagcacctcttccaacacctggggctacgggtgaccttctaggctttgctgttacaccatttcaggagccctccttccccctggggctggctctgcttggaagcggcggaggtaagcaatgcaaactcaatttgaggtctggcagatccaaacaaacgctgcttagatccccrgtttctcgtgccgtggattagcccrtgtgaaatggtaaatccccgtcctaaaattcctcaggcaaactgggaatygtggcagttttcaactgactgcaaacagatcacttgataactccccrtattattgacataactctagaaatacgctgcaaagtgtaaataataaatgtgtagtatctgcactggagcaagtaaacaccgcctgatgttgtctgatatttcactggcaaggtgtcctcagcgatgctccagcagaataattttccaaacgagtggcttgcgtgacaggtggatgtgctgagctaatgcagccacgcacggagctgctggatctgggagaggaggtgtggggcagcgtggctcctttgctgg

SEQ ID NO: 64987 - DNA, 600 bp, Chicken  19866894331537_7
aacccaagcacctcttccaacacctggggctacgggtgaccttctaggctttgctgttacaccatttcaggagccctccttccccctggggctggctctgcttggaagcggcggaggtaagcaatgcaaactcaatttgaggtctggcagatccaaacaaacgctgcttagatccccrgtttctcgtgccgtggattagcccrtgtgaaatggtaaatccccgtcctaaaattcctcaggcaaactgggaatygtggcagttttcaactgactgcaaacagatcacttgataactccccrtattattgacataactctagaaatacgctgcaaagtgtaaataataaatgtgtagtatctgcactggagcaagtaaacaccgcctgatgttgtctgatatttcactggcaaggtgtcctcagcgatgctccagcagaataattttccaaacgagtggcttgcgtgacaggtggatgtgctgagctaatgcagccacgcacggagctgctggatctgggagaggaggtgtggggcagcgtggctcctttgctggggctgccagcaagcagcccaccgcaggtcccctcctgcagctctgaa

SEQ ID NO: 64988 - DNA, 600 bp, Chicken  19866894331540_1
taagcatgacacacaagcaaatatacgtgtataaatttatatatctatgtgtgattctgtatatgtttcttggagcagaattgcaaagctgaaattagaataagcagtctgtgtaggtcccctccactttttttctgttttgttttgttttgttgaatttcccaattaatatgcttaatgctatttacagaggtttctagaacaatgctctggttctcagcacctcctctccctgcatttttatgggatctcagtccaaacttagctaagggtattgtaggacttcacttaagcctgatwcagggctcatgagatggacgagattcctggagggttttcatcttctcaggtttccaaatattaacaagcagttcacaactgccctgccctatacataggttttctagcatctggaagtagctcactttttacctgagggatgtttgtggaaggatggcctgtgggggcgtcacatcttgttcacacgtgcacaaaatggcagtccagagctttatgcttttttttttgtcaaacatctggtctcttatggattttacccccaaatcctgtagatttggctgattttatctgcagagcaaa

SEQ ID NO: 64989 - DNA, 599 bp, Chicken  19866894331547_1
  misc_feature (1)..(160): n is any nucleotide
nnnnnnnnnnnnnnnnnnnnnnnnnnnnnnnnnnnnnnnnnnnnnnnnnnnnnnnnnnnnnnnnnnnnnnnnnnnnnnnnnnnnnnnnnnnnnnnnnnnnnnnnnnnnnnnnnnnnnnnnnnnnnnnnnnnnnnnnnnnnnnnnnnnnnnnnnnnnnnnnaacacattggattccatttggaatccaaggaacagaagacgaaaaacacccagagctcgcagctatgggcagatgggtgcgggaaggcagagccatgcttcgcaatggcaggaaatgagcacacactcacggggaggcgrggggggggggtgtggacgacagtacctggaagctgagggctggaaaatcagtcagggcttgctgttttcccttgcctccttcctcctgggctgctgcgggacggagcctatagaaggctgcttcctttcatagtcatcggcggcggcacaggatgcttctcatttcgggtgttgtttgtttgtttcagccccggttctggcacacrtcgcccgccagccctcccgtgtaggtaatgatgtcatttttccatgtattcccccttttcgcagactgtatatggaaacacgcagaggttcat

SEQ ID NO: 64990 - DNA, 600 bp, Chicken  19866894331547_2
cacccagagctcgcagctatgggcagatgggtgcgggaaggcagagccatgcttcgcaatggcaggaaatgagcacacactcacggggaggcgrggggggggggtgtggacgacagtacctggaagctgagggctggaaaatcagtcagggcttgctgttttcccttgcctccttcctcctgggctgctgcgggacggagcctatagaaggctgcttcctttcatagtcatcggcggcggcacaggatgcttctcatttcgggtgttgtttgtttgtttcagccccggttctggcacacrtcgcccgccagccctcccgtgtaggtaatgatgtcatttttccatgtattcccccttttcgcagactgtatatggaaacacgcagaggttcatttctggcgtttaatgggaacgcatcgccggccccaaacggggtcgttttattagcactttgctcagaaaaaaaaagtgagtcaggattgagccctgttaacactaatgtgaatttaatttaggagaagctcgaaaattaatgtcatttgttaaatatccatttcccctaaaaggcaattctctgccaacaacaacaacaaaaaaact

SEQ ID NO: 64991 - DNA, 600 bp, Chicken  19866894331571_1
cccccccaaactcctgagttattaacatggataagagattaatttgctagaaggcatttgtctttgccaggagagcaagcacatgcacagctctgacatgcagtgctcagaacttcattgagctgcaccagtgatgaactgcaattcctttagccaaagcaatttgcaccactggtgtctcaaagcagcagattaattgcacccagcccagacaatcttctctgctattgcacagtcagggtaagtcactgatctggagaggactgagcacatttgtggcagttccagggtaattcagcrtgtggccatacgtgaggtgctgatggctgcgctgccctcctcatctgcagtgccactgctgggcacccatgagtgagatctcagcatctccagtgcccggcctgggggtgaggagcaaccaggggcagctgccaaggtgatacattgaatgttccacgttaaatggtctaaaatatatatatgtatattatatatatattaaaaaaataaaatatatatatatakagagagagagagagcgccaaatgcttatgaaaatctctcccccggattaatggttgccattaccgctgaggggta

SEQ ID NO: 64992 - DNA, 600 bp, Chicken  19866894331571_2
tattgcacagtcagggtaagtcactgatctggagaggactgagcacatttgtggcagttccagggtaattcagcrtgtggccatacgtgaggtgctgatggctgcgctgccctcctcatctgcagtgccactgctgggcacccatgagtgagatctcagcatctccagtgcccggcctgggggtgaggagcaaccaggggcagctgccaaggtgatacattgaatgttccacgttaaatggtctaaaatatatatatgtatattatatatatattaaaaaaataaaatatatatatatakagagagagagagagcgccaaatgcttatgaaaatctctcccccggattaatggttgccattaccgctgaggggtaattgcacgtgatactactttaattattaagcatgaagctgcccagctgagttactgtagcccctaactgcctactccagtgtttacaatctcttcaccattccctgttcttccctctcactcaccataaatgtttatttaataatcctggaagaccttttaagctttctgggtttaatgtttgctaaacaccctgtcactttcacttctattgagaattccctgg

SEQ ID NO: 64993 - DNA, 600 bp, Chicken  19866894331573_1
cgtaactagttaaacaatttagttatttaattattaactggctaggtttgccctaaggaaaaagcctgtatgactaattattttaatggaaaaaactacagctgccactgtaaagtggcactagtaactagcaaacactagtttgcagggggctacccttagctgatgtgttttaggtggattgaaaagcaggagatgggaagaaggataaaagtacaattaagaacagttcacagtgcagaaattatgagtgtaagtgccaagttgttagtcctgcatgctgctcacctccaaaggccraagggactgttgtacctgtgtgaagtccttggacttgtagtataactgaatatacactgaatataactgagtatacactgaaccactgtaggctgtcctacattcttgttcttaatctaacagaaattttatctgataaatgctgagcattttgatatttttgagtatacttttaatcatttctgccagagctaatttcttcagatagttcatatctcagctctgctaattaattaacattgtccttcactcagtggaatcagagcacccccacaaaaggggaggatttggctgtatgga

SEQ ID NO: 64994 - DNA, 600 bp, Chicken  19866894331578_1
acagctcctcaggccatgtttgtaggttataagtcaaagtccaccttcagagcttgtttctatgttgcatttattgcaatgccacagtgatttgccaaggaagcctctgagataccaatgccaggtttatcctgctaatgatcatcttgaggattgctgctgcattttctgcatcacaaataacattcttttcatcaccctgatacccatatgttaaatagtgtgtctaggtgaatattcttatataaggatctgcagcaacttagttcagtaagtattctgtatttcagaagattcccrctattaataatgagaaaatcttttcctggtatattctacagctgaacactgagttgcaggtttcctcaggtatgtgattaacatgaatctaagcctgactcattctgggtgaatgcagtgattcttgactaaaaaatattaaaaatactaaaaaaagatataatttgctcttgtgtgtgcagcattttttctggcagtcatgcagtgagcagtaatgctaaagattaacagtgcagaaaaaggcctaatcaggcatttgtacagtgttttggtctaagataagttctgatatgctcagca

SEQ ID NO: 64995 - DNA, 600 bp, Chicken  19866894331588_1
aactccccgggcagtgccaagcgctgggtctgacctggcagcaggactgtggctcccactgggctgagctcactgagcggagggttggtgggagctctgttctcactgaagagcagtgttagctcatcttcccaagcccaagttgtgctttgcacactgagcagcaatagctgcagcgatctctgaaagctgttccactggatgaaaaataatgaggtgttaaaatcataaccacagctcattgctcttctggctgcccaggtgagggtctgtgtccctgactgcgttaacactgctggygctgtgagaacagtgcttctcccagccctccccccctcctgtggccctccctggggaaagggctgtgaggggaaacggacctgagataaaatcaattaattgcctttgcattctctgataaatgcagtgcagagagtgcctacatcgaaatacaaatgaactaagccagcagcagaaggctgaaaggaaacatcgcccygggagcagggggagcagagggcagcatgagggtcgcgtgcagtggggggctgtggtctggggggtgaagggggctgaggaattacccagagcatacagtgg

SEQ ID NO: 64996 - DNA, 600 bp, Chicken  19866894331588_2
ggatgaaaaataatgaggtgttaaaatcataaccacagctcattgctcttctggctgcccaggtgagggtctgtgtccctgactgcgttaacactgctggygctgtgagaacagtgcttctcccagccctccccccctcctgtggccctccctggggaaagggctgtgaggggaaacggacctgagataaaatcaattaattgcctttgcattctctgataaatgcagtgcagagagtgcctacatcgaaatacaaatgaactaagccagcagcagaaggctgaaaggaaacatcgcccygggagcagggggagcagagggcagcatgagggtcgcgtgcagtggggggctgtggtctggggggtgaagggggctgaggaattacccagagcatacagtggagggagttcagtccaaaatgctgaatacaaattgtgttctgtgagttcatctcctccaggtttgctgttccctacaggcggcgctgccatgagtgcgagtcagtgggcagatgctctttgcatcccacggtccagttctgttrcaccatggtgctgtcctgcagggcagagyaaagggacacggagcgagcagcagcat

SEQ ID NO: 64997 - DNA, 600 bp, Chicken  19866894331588_3
atcgaaatacaaatgaactaagccagcagcagaaggctgaaaggaaacatcgcccygggagcagggggagcagagggcagcatgagggtcgcgtgcagtggggggctgtggtctggggggtgaagggggctgaggaattacccagagcatacagtggagggagttcagtccaaaatgctgaatacaaattgtgttctgtgagttcatctcctccaggtttgctgttccctacaggcggcgctgccatgagtgcgagtcagtgggcagatgctctttgcatcccacggtccagttctgttrcaccatggtgctgtcctgcagggcagagyaaagggacacggagcgagcagcagcatgagggcagctcctccccaggagagatgggaggtgggggcactcagtgttgcatttgtttggagtttgggacatttttggtgtgtcgggtgactaaacagtcaccatggtaacagtcatcagttaatgaacagaacggagtaaaggatccgacataaatgtcagcgcgtgaaatagatgcggcggggcggcagcgtggggtgctcagtgccatgccctataggatggggctcacagccggggctg

SEQ ID NO: 64998 - DNA, 600 bp, Chicken  19866894331588_4
cagaaggctgaaaggaaacatcgcccygggagcagggggagcagagggcagcatgagggtcgcgtgcagtggggggctgtggtctggggggtgaagggggctgaggaattacccagagcatacagtggagggagttcagtccaaaatgctgaatacaaattgtgttctgtgagttcatctcctccaggtttgctgttccctacaggcggcgctgccatgagtgcgagtcagtgggcagatgctctttgcatcccacggtccagttctgttrcaccatggtgctgtcctgcagggcagagyaaagggacacggagcgagcagcagcatgagggcagctcctccccaggagagatgggaggtgggggcactcagtgttgcatttgtttggagtttgggacatttttggtgtgtcgggtgactaaacagtcaccatggtaacagtcatcagttaatgaacagaacggagtaaaggatccgacataaatgtcagcgcgtgaaatagatgcggcggggcggcagcgtggggtgctcagtgccatgccctataggatggggctcacagccggggctgaggggtgtgggggccctgaagtgagggca

SEQ ID NO: 64999 - DNA, 600 bp, Chicken  19866894331590_1
tgataacatgcaaacactgaatagatgcacatagagacaaatttaggattcagacaaaaatacaagcattatccatatttttcctaagatttgaagggatcagtttcttaacatttaccagtaaagtttctcacaacataaacattgttaccttctcaaaaccaagcataactacctcttcactgcccaaagctgctgggatttacaatttgcgtacagcctactgaggggtcccagccagggtctgtttcataagcaaaggagaagccaggcatcagtacttacaggattatttacgtwtctgaatccagaaaggaagctgtatgttagaagcacttcgtagaggttaggaattaatttagagctccaaatcagatgtccactccggataagaggcgggatttcatgtataatttctccttggcattttctattagctaacttgaatgctcagtaactgtcagccttgtgtacaattttctatttcatgcctaaggaatatggcacttaactggtrtcataaaaattaattacaggagcgctgtgcagctggccagtagygttcattctgaatgctggagtacattgcaattctgcata

SEQ ID NO: 65000 - DNA, 588 bp, Chicken  19866894331590_2
agcctactgaggggtcccagccagggtctgtttcataagcaaaggagaagccaggcatcagtacttacaggattatttacgtwtctgaatccagaaaggaagctgtatgttagaagcacttcgtagaggttaggaattaatttagagctccaaatcagatgtccactccggataagaggcgggatttcatgtataatttctccttggcattttctattagctaacttgaatgctcagtaactgtcagccttgtgtacaattttctatttcatgcctaaggaatatggcacttaactggtrtcataaaaattaattacaggagcgctgtgcagctggccagtagygttcattctgaatgctggagtacattgcaattctgcatagaactcagccattttagctaatttcatgtgacagaactggaaaaaaatctctcttttcataaaattaagatttacttattcatacaaacatttaaaagctagaatgaagataaacacaactacagatcaaagcattctgtatttaaaacgctgaaggaattccttgcattttcagtattggtaacagtgattttcagagtgcacg

SEQ ID NO: 65001 - DNA, 544 bp, Chicken  19866894331590_3
gagaagccaggcatcagtacttacaggattatttacgtwtctgaatccagaaaggaagctgtatgttagaagcacttcgtagaggttaggaattaatttagagctccaaatcagatgtccactccggataagaggcgggatttcatgtataatttctccttggcattttctattagctaacttgaatgctcagtaactgtcagccttgtgtacaattttctatttcatgcctaaggaatatggcacttaactggtrtcataaaaattaattacaggagcgctgtgcagctggccagtagygttcattctgaatgctggagtacattgcaattctgcatagaactcagccattttagctaatttcatgtgacagaactggaaaaaaatctctcttttcataaaattaagatttacttattcatacaaacatttaaaagctagaatgaagataaacacaactacagatcaaagcattctgtatttaaaacgctgaaggaattccttgcattttcagtattggtaacagtgattttcagagtgcacg

SEQ ID NO: 65002 - DNA, 599 bp, Chicken  19866894331593_1
  misc_feature (1)..(23): n is any nucleotide
nnnnnnnnnnnnnnnnnnnnnnnatgggattagttttattttagttagtaatattgttctggctacaactgaaagggcaagagtcagttttttagacataggagttcctgtgtgagtacctgttattcttaatgtataactgtagttagtttaaggacctgtctatgtattctctttcttttcttcttgttaaaggcttttgccagatttggagggctgtctacgagaaacgatttacaactgagtttaatttgcaaatagacattgcatgagtcattatgtcatgttgcactgaacacrtattgttcaacaataattagaaagggtaatgtatgaacagcaaggtttcgttttttacaagagaatcagagaacccttctaatgtaagtcacactggagatagagtttccttaggttatacacccagatgcttaaacagagtaattttctcttctaaaatytgttaattgaatcaacatgtaaaagcaccgtgctatatgaatgttgaaaagcattagcttgaatatgaagatgtgtcacttcggaacgtctagacttacattagatttccatcagattggagtgggtgagaaaaatat

SEQ ID NO: 65003 - DNA, 600 bp, Chicken  19866894331593_2
tctatgtattctctttcttttcttcttgttaaaggcttttgccagatttggagggctgtctacgagaaacgatttacaactgagtttaatttgcaaatagacattgcatgagtcattatgtcatgttgcactgaacacrtattgttcaacaataattagaaagggtaatgtatgaacagcaaggtttcgttttttacaagagaatcagagaacccttctaatgtaagtcacactggagatagagtttccttaggttatacacccagatgcttaaacagagtaattttctcttctaaaatytgttaattgaatcaacatgtaaaagcaccgtgctatatgaatgttgaaaagcattagcttgaatatgaagatgtgtcacttcggaacgtctagacttacattagatttccatcagattggagtgggtgagaaaaatattaaggtttagaaattcatagtgaaagttattgagcttgcaacatcaatttgcaatgctcaaatagtcagttcaagttcaaacaagtaagagtgctgctatgactctcccaatggatagcactgctggaaacacttcctgtactcaacagcagatgggctttc

SEQ ID NO: 65004 - DNA, 599 bp, Chicken  19866894331605_1
  misc_feature (1)..(15): n is any nucleotide
nnnnnnnnnnnnnnntgaatctcaagcgcagcctctccattgaactcatcatgagactgtcccgtctcttcctgaggagcctctaacctctaactcagtcactaattgccacccaaacctttaggttaatgcagtgggacaccatttagagtcatagaatgggttgaaggaaccttaaagcccatctagctccaaaccccctgctgtggggagggctaccgatcaggctgcccaggacccctggctttgagcacctccaggagtagggcgtacacagcttatctgggcagcctgttcagygcctcaccatcctcactgtgaatattttcttctaatataaatctaacctcttttagtttaaagtcacttccctttgttytgtcactacactctctgataaagtccctccccatccttcctgtggatcccttttatgtactagaaggccacagtgaggtctccctggagctttctactgtccaggcaagcaaacccagctccctcagcctatcttcataagaaaccacaagtttgtccgcacaagcttgccgagtctccagaggagtccatcctggccaagaagttaagaaatgtcagat

SEQ ID NO: 65005 - DNA, 600 bp, Chicken  19866894331605_2
cctctaacctctaactcagtcactaattgccacccaaacctttaggttaatgcagtgggacaccatttagagtcatagaatgggttgaaggaaccttaaagcccatctagctccaaaccccctgctgtggggagggctaccgatcaggctgcccaggacccctggctttgagcacctccaggagtagggcgtacacagcttatctgggcagcctgttcagygcctcaccatcctcactgtgaatattttcttctaatataaatctaacctcttttagtttaaagtcacttccctttgttytgtcactacactctctgataaagtccctccccatccttcctgtggatcccttttatgtactagaaggccacagtgaggtctccctggagctttctactgtccaggcaagcaaacccagctccctcagcctatcttcataagaaaccacaagtttgtccgcacaagcttgccgagtctccagaggagtccatcctggccaagaagttaagaaatgtcagatagatacagagcacttgggatgtatggttgtacagagctcataaagcagatggaaagattcagctctgacttcaatcaact

SEQ ID NO: 65006 - DNA, 600 bp, Chicken  19866894331607_1
tgccagtttcaagcatttgcttttctggcaaaaaaaatctcatttagaaaattctgcaaatgtgtgtgccattctgtgaactctgtgtctctggactatttattttttcctttaagtcctacatattgccaggctgcactcagcataacatcatattaattctgcactctaacagaccctatgtgctcactgagattccatcaaaaataaattgagatgaatacttgtggtttgtctaagcacatattgactcaatggcctaatggcaaaacacaaggaaatagaagaaatgcacagcayacacaatgtaagatgatcatgagagcatagctcaaaacataaaaagggacagaatacctatctaaaacagaagtaaattagtgtttctgctctagctatgtatgattcattaaaaccagaagaaatatacttccttttttatatcatcctcctcatcccacttttccaaagatagtttatacttacagtaatgatccaaatagatagatggatagatccaatagatcacttatattaattttctgttctccagaaaactttcagtagtatgacattcactggaggaagattctcttcaca

SEQ ID NO: 65007 - DNA, 600 bp, Chicken  19866894331609_1
tcaggagttagaaggattctgcaataaatgatttccttaaaagttcagtctggtctcactgcgtacaagtgaatcattttatttggaatttatttgcatttgttgcattatgcaactgcaataatccaaatttctcctcagaaaacacattagagccatgttcaagtgcaacagaaagcgtgatggtagaatcctggtctcctgtcagtagatgccttcactagccttccaagttaacatgcattttcatgtattttaaaaatgacttattgccaaattctcatctttgactttaaaaakaaagttacagtaaagaacatggaccaaaatttagctaccaaaggaaaaccatagcaatctatatgcatctttctgctgatctcattcaactgaatacaaccaacataatagcctcagcagcctggacatcaaaactgttatttcaagaaatttagcctttcaccttattactgcaggtctacaaacacatgtggtttttgtcaatcaaaatgctgactctgctttaattttaaacatacggatgtcattctctttttcctcagaggcatggatgcaactgaagaaaacattaagtttctg

SEQ ID NO: 65008 - DNA, 600 bp, Chicken  19866894331615_1
atcacgcgggcagaagcagcacaagccccagctcaaagggagccatggctctcccagcctggagcctcacatcagtccctagcagctcagggacagggctgggactctgccaggcacagggccaacttttgcccagggatgagtagaagacgccaggagcttttgcctagccaagacagctctctggatcccttgtgatccttcaaaactgaggagctcacgagtaagatagcctggagttctggaaggggagtgggactggtgctgggatgctctgtacataaatccctcatggccacwcatgaggggttggctcttaccttgtgcagctgggacactgtttggaaggaagctgccttcttacgtttctccttggaccctggtttgtgaggttcctctgtcgggttaaaatatggattaagtacatcagcaaagcatcagcttgctttgaaggactccatagcacctccaagcacctctgcactgaaaatgtcagtgatatgcccacagcccctgctctctgtaaagcagagatagtaactcccagctgcagacttagcctgacaaaaactcctctcacagcatccagctctgtgtgtc

SEQ ID NO: 65009 - DNA, 600 bp, Chicken  19866894331617_1
aagatttttttttttatatttacacaattatattcacatggaaaaacaaacaaacaaacaaaaaaaccagactgttgtgactaaatttttcttacgcaatactctctagtgtcagtggagtttcaggaggaaatgttttggcctttcattttaatgatgtgaatgcactggagcagaaacagaaaatttgttaaagctgaccagtatagtgcatgtgtatttacctgttctttgccaacttttttgttgttgttcttgttgttgtgaggacatctgtgcactagactgaaaggccatttygattaaaactgctggaatgcaggtatacccttaaasaattcagtaaaaaccttaagaaggaaaaacaatccttttgaaaggactcaatcgtcatttataagggagctgatctcacccartagatttgtaagctgataattagccagaaacaggaaggtccatcattcggtaatttgatgaataaaggctgccaaccaagatctcttggcacggcacatcaacctgcagagcttactacagatggcatgacagtgcctgaccatctgattaagtcaggaggtgatgatgaaaaagcagtat

SEQ ID NO: 65010 - DNA, 600 bp, Chicken  19866894331617_2
catggaaaaacaaacaaacaaacaaaaaaaccagactgttgtgactaaatttttcttacgcaatactctctagtgtcagtggagtttcaggaggaaatgttttggcctttcattttaatgatgtgaatgcactggagcagaaacagaaaatttgttaaagctgaccagtatagtgcatgtgtatttacctgttctttgccaacttttttgttgttgttcttgttgttgtgaggacatctgtgcactagactgaaaggccatttygattaaaactgctggaatgcaggtatacccttaaasaattcagtaaaaaccttaagaaggaaaaacaatccttttgaaaggactcaatcgtcatttataagggagctgatctcacccartagatttgtaagctgataattagccagaaacaggaaggtccatcattcggtaatttgatgaataaaggctgccaaccaagatctcttggcacggcacatcaacctgcagagcttactacagatggcatgacagtgcctgaccatctgattaagtcaggaggtgatgatgaaaaagcagtatgagctccagacaatattttctaattcttcaaaagct

SEQ ID NO: 65011 - DNA, 600 bp, Chicken  19866894331617_3
gtttcaggaggaaatgttttggcctttcattttaatgatgtgaatgcactggagcagaaacagaaaatttgttaaagctgaccagtatagtgcatgtgtatttacctgttctttgccaacttttttgttgttgttcttgttgttgtgaggacatctgtgcactagactgaaaggccatttygattaaaactgctggaatgcaggtatacccttaaasaattcagtaaaaaccttaagaaggaaaaacaatccttttgaaaggactcaatcgtcatttataagggagctgatctcacccartagatttgtaagctgataattagccagaaacaggaaggtccatcattcggtaatttgatgaataaaggctgccaaccaagatctcttggcacggcacatcaacctgcagagcttactacagatggcatgacagtgcctgaccatctgattaagtcaggaggtgatgatgaaaaagcagtatgagctccagacaatattttctaattcttcaaaagcttcagaaatgaagggtagaatctccatatcctccaccatgaatttcaggagagggagagaaactcggtcccaggccagtgctgg

SEQ ID NO: 65012 - DNA, 599 bp, Chicken  19866894331624_1
  misc_feature (1)..(96): n is any nucleotide
nnnnnnnnnnnnnnnnnnnnnnnnnnnnnnnnnnnnnnnnnnnnnnnnnnnnnnnnnnnnnnnnnnnnnnnnnnnnnnnnnnnnnnnnnnnnnnnntgacctctgggcaaacgggccccactgaacaccttgtgacaggaagcagaagtaccaactgataaaaacctctttctagttaacaaggaaagtttcaacccttgtttctgttacactttagaagagtggttatgtgagactgaaaatgggagctaaaaagaaatcatcgcttgtcatcaccacaatcctcaaagtcatccaaayggtcagaggaragttcaagttcaccacattactttccttccccaccctctggagccaaggtctggtaaaagcattcaattgatgctataaaagaaaaagcttaagacgtgaattttcctaggaaaactcatcrggtctcttctccactggactacacgcaagagacagcactgacatacagtttggaaaggcagaaaagggcttgggcagctctcaacatccaagaagcccttccaggaacagagccgatgggactgtgtctgaggtatgaactagctatgctttagcagagtcaaaag

SEQ ID NO: 65013 - DNA, 599 bp, Chicken  19866894331624_2
  misc_feature (1)..(85): n is any nucleotide
nnnnnnnnnnnnnnnnnnnnnnnnnnnnnnnnnnnnnnnnnnnnnnnnnnnnnnnnnnnnnnnnnnnnnnnnnnnnnnnnnnnnntgacctctgggcaaacgggccccactgaacaccttgtgacaggaagcagaagtaccaactgataaaaacctctttctagttaacaaggaaagtttcaacccttgtttctgttacactttagaagagtggttatgtgagactgaaaatgggagctaaaaagaaatcatcgcttgtcatcaccacaatcctcaaagtcatccaaayggtcagaggaragttcaagttcaccacattactttccttccccaccctctggagccaaggtctggtaaaagcattcaattgatgctataaaagaaaaagcttaagacgtgaattttcctaggaaaactcatcrggtctcttctccactggactacacgcaagagacagcactgacatacagtttggaaaggcagaaaagggcttgggcagctctcaacatccaagaagcccttccaggaacagagccgatgggactgtgtctgaggtatgaactagctatgctttagcagagtcaaaagatgctctactt

SEQ ID NO: 65014 - DNA, 600 bp, Chicken  19866894331624_3
gacaggaagcagaagtaccaactgataaaaacctctttctagttaacaaggaaagtttcaacccttgtttctgttacactttagaagagtggttatgtgagactgaaaatgggagctaaaaagaaatcatcgcttgtcatcaccacaatcctcaaagtcatccaaayggtcagaggaragttcaagttcaccacattactttccttccccaccctctggagccaaggtctggtaaaagcattcaattgatgctataaaagaaaaagcttaagacgtgaattttcctaggaaaactcatcrggtctcttctccactggactacacgcaagagacagcactgacatacagtttggaaaggcagaaaagggcttgggcagctctcaacatccaagaagcccttccaggaacagagccgatgggactgtgtctgaggtatgaactagctatgctttagcagagtcaaaagatgctctacttgaaagcatttctatggcagctatcggcttctcaccaagtcccgctgatcctcctgcactaagtccatcttgtgcactagacaaaagatctttgcgtcgggagagttctgaagaattgcctcca

SEQ ID NO: 65015 - DNA, 418 bp, Chicken  19866894331624_4
tcccgctgactggtgaagtagttctccataaaggtgtcctgtctgaggaggagcagagcaacagaacaaggagactcccattagagcaaccgggcttcaggaaggtcaggaaaagtgttgtgaaatatcccctgctagagatgtttacgtgctgagctgcaaaccccaccacaggagtccagaaaaagagccccccagacagctaacttccccaggatataaggctccctaagcgtttccaactgagcacagtaggacgctcctgaagagcatctgcttcccagtctctcataagaagckkmmgcttcctacagcacacagctgctgctcggggctagcacaaacaaagctgcatcgcttttacagagctgcatacaaaaaaaaaaagccacaacagcagtaaaaccatcagtacagc

SEQ ID NO: 65016 - DNA, 417 bp, Chicken  19866894331624_5
cccgctgactggtgaagtagttctccataaaggtgtcctgtctgaggaggagcagagcaacagaacaaggagactcccattagagcaaccgggcttcaggaaggtcaggaaaagtgttgtgaaatatcccctgctagagatgtttacgtgctgagctgcaaaccccaccacaggagtccagaaaaagagccccccagacagctaacttccccaggatataaggctccctaagcgtttccaactgagcacagtaggacgctcctgaagagcatctgcttcccagtctctcataagaagckkmmgcttcctacagcacacagctgctgctcggggctagcacaaacaaagctgcatcgcttttacagagctgcatacaaaaaaaaaaagccacaacagcagtaaaaccatcagtacagc

SEQ ID NO: 65017 - DNA, 416 bp, Chicken  19866894331624_6
ccgctgactggtgaagtagttctccataaaggtgtcctgtctgaggaggagcagagcaacagaacaaggagactcccattagagcaaccgggcttcaggaaggtcaggaaaagtgttgtgaaatatcccctgctagagatgtttacgtgctgagctgcaaaccccaccacaggagtccagaaaaagagccccccagacagctaacttccccaggatataaggctccctaagcgtttccaactgagcacagtaggacgctcctgaagagcatctgcttcccagtctctcataagaagckkmmgcttcctacagcacacagctgctgctcggggctagcacaaacaaagctgcatcgcttttacagagctgcatacaaaaaaaaaaagccacaacagcagtaaaaccatcagtacagc

SEQ ID NO: 65018 - DNA, 415 bp, Chicken  19866894331624_7
cgctgactggtgaagtagttctccataaaggtgtcctgtctgaggaggagcagagcaacagaacaaggagactcccattagagcaaccgggcttcaggaaggtcaggaaaagtgttgtgaaatatcccctgctagagatgtttacgtgctgagctgcaaaccccaccacaggagtccagaaaaagagccccccagacagctaacttccccaggatataaggctccctaagcgtttccaactgagcacagtaggacgctcctgaagagcatctgcttcccagtctctcataagaagckkmmgcttcctacagcacacagctgctgctcggggctagcacaaacaaagctgcatcgcttttacagagctgcatacaaaaaaaaaaagccacaacagcagtaaaaccatcagtacagc

SEQ ID NO: 65019 - DNA, 599 bp, Chicken  19866894331644_1
  misc_feature (1)..(174): n is any nucleotide
nnnnnnnnnnnnnnnnnnnnnnnnnnnnnnnnnnnnnnnnnnnnnnnnnnnnnnnnnnnnnnnnnnnnnnnnnnnnnnnnnnnnnnnnnnnnnnnnnnnnnnnnnnnnnnnnnnnnnnnnnnnnnnnnnnnnnnnnnnnnnnnnnnnnnnnnnnnnnnnnnnnnnnnnnnnnnnggtatttagaaacataaaaataggagtagtgtctaaatgtgggggcttacttcagaagtccttacttggcaaagaaaatatcagctccttgggagttttgcatgatgtgaaggcttgctgataggyctrtggctatttttttgtttgtttactcaaaggcaatttgtttatttctgctatatcttactgtatatcrttatwattcaatggcagctgtgtattattattattcaatggcaagtggttatatgaacagtcctacagtggtataaatcaagtgtctggctctgtgtgttcacttgcattatctgaatttctcaaacttgctttttttacatactacgtgcaagcctctcctcctctcatatctgcacaaggagatttatttggcagtaaaaaygtccacttaaattgaaagttccgtt

SEQ ID NO: 65020 - DNA, 599 bp, Chicken  19866894331644_2
  misc_feature (1)..(171): n is any nucleotide
nnnnnnnnnnnnnnnnnnnnnnnnnnnnnnnnnnnnnnnnnnnnnnnnnnnnnnnnnnnnnnnnnnnnnnnnnnnnnnnnnnnnnnnnnnnnnnnnnnnnnnnnnnnnnnnnnnnnnnnnnnnnnnnnnnnnnnnnnnnnnnnnnnnnnnnnnnnnnnnnnnnnnnnnnnnggtatttagaaacataaaaataggagtagtgtctaaatgtgggggcttacttcagaagtccttacttggcaaagaaaatatcagctccttgggagttttgcatgatgtgaaggcttgctgataggyctrtggctatttttttgtttgtttactcaaaggcaatttgtttatttctgctatatcttactgtatatcrttatwattcaatggcagctgtgtattattattattcaatggcaagtggttatatgaacagtcctacagtggtataaatcaagtgtctggctctgtgtgttcacttgcattatctgaatttctcaaacttgctttttttacatactacgtgcaagcctctcctcctctcatatctgcacaaggagatttatttggcagtaaaaaygtccacttaaattgaaagttccgttatt

SEQ ID NO: 65021 - DNA, 599 bp, Chicken  19866894331644_3
  misc_feature (1)..(104): n is any nucleotide
nnnnnnnnnnnnnnnnnnnnnnnnnnnnnnnnnnnnnnnnnnnnnnnnnnnnnnnnnnnnnnnnnnnnnnnnnnnnnnnnnnnnnnnnnnnnnnnnnnnnnnnnggtatttagaaacataaaaataggagtagtgtctaaatgtgggggcttacttcagaagtccttacttggcaaagaaaatatcagctccttgggagttttgcatgatgtgaaggcttgctgataggyctrtggctatttttttgtttgtttactcaaaggcaatttgtttatttctgctatatcttactgtatatcrttatwattcaatggcagctgtgtattattattattcaatggcaagtggttatatgaacagtcctacagtggtataaatcaagtgtctggctctgtgtgttcacttgcattatctgaatttctcaaacttgctttttttacatactacgtgcaagcctctcctcctctcatatctgcacaaggagatttatttggcagtaaaaaygtccacttaaattgaaagttccgttatttactttatagaagtgaataaccttcaataaatcagtcttctttctcttttctattattatttattgt

SEQ ID NO: 65022 - DNA, 599 bp, Chicken  19866894331644_4
  misc_feature (1)..(99): n is any nucleotide
nnnnnnnnnnnnnnnnnnnnnnnnnnnnnnnnnnnnnnnnnnnnnnnnnnnnnnnnnnnnnnnnnnnnnnnnnnnnnnnnnnnnnnnnnnnnnnnnnnnggtatttagaaacataaaaataggagtagtgtctaaatgtgggggcttacttcagaagtccttacttggcaaagaaaatatcagctccttgggagttttgcatgatgtgaaggcttgctgataggyctrtggctatttttttgtttgtttactcaaaggcaatttgtttatttctgctatatcttactgtatatcrttatwattcaatggcagctgtgtattattattattcaatggcaagtggttatatgaacagtcctacagtggtataaatcaagtgtctggctctgtgtgttcacttgcattatctgaatttctcaaacttgctttttttacatactacgtgcaagcctctcctcctctcatatctgcacaaggagatttatttggcagtaaaaaygtccacttaaattgaaagttccgttatttactttatagaagtgaataaccttcaataaatcagtcttctttctcttttctattattatttattgtttaca

SEQ ID NO: 65023 - DNA, 600 bp, Chicken  19866894331644_5
catgatgtgaaggcttgctgataggyctrtggctatttttttgtttgtttactcaaaggcaatttgtttatttctgctatatcttactgtatatcrttatwattcaatggcagctgtgtattattattattcaatggcaagtggttatatgaacagtcctacagtggtataaatcaagtgtctggctctgtgtgttcacttgcattatctgaatttctcaaacttgctttttttacatactacgtgcaagcctctcctcctctcatatctgcacaaggagatttatttggcagtaaaaaygtccacttaaattgaaagttccgttatttactttatagaagtgaataaccttcaataaatcagtcttctttctcttttctattattatttattgtttacattacattaacaggcatgtcttccttctgtaaagccttccatctttaatccaccaaagtggggaaaacgtgatgttgaaatacagttgaagcaaagcagcagctgaacctctgcatttgttctgcactgatgggtgaggggctgctctgtgtagtcattcagcatcaggaattgccattgttcgcttgctttctgaggaga

SEQ ID NO: 65024 - DNA, 600 bp, Chicken  19866894331644_6
gttatttactttatagaagtgaataaccttcaataaatcagtcttctttctcttttctattattatttattgtttacattacattaacaggcatgtcttccttctgtaaagccttccatctttaatccaccaaagtggggaaaacgtgatgttgaaatacagttgaagcaaagcagcagctgaacctctgcatttgttctgcactgatgggtgaggggctgctctgtgtagtcattcagcatcaggaattgccattgttcgcttgctttctgaggagagaattacttcttcaaagggatrctcagtgcccagaagaggaggaggacagtctctgggagagacattttactgctgctgcagttcaagatggaatggcagcaagcagactgcttgctgcagtagaagtcctgcataaacctctgaggcagctcagaacaccatgtgcaagaatccaggtgcccatctgtaaccctcgacacctacatgttttaaaagcatgactcaagtgtcttctgggaggaggatttaggcccttggtcactgctgtataccctgaactttgcagtgctctggcttggtgtagggatgagcaatcacatg

SEQ ID NO: 65025 - DNA, 600 bp, Chicken  19866894331645_1
attctcttccaactcccaagctctgcaacagcgcacttgaatgccttcaataaacacttcagctctcttaccagtgctccgttacgggaaacaaaggctgccttgctgattccctgcttatggctctcactggcggactgaggtctgaacaattacatgggctccaatgattgctggagcccctgctgacagcttctggcactctggacgtgggagagacactgtggagacacgacttgggtgcacgcagctgcctgcctgctgctcacactgctatggagtgggggaataccggcaccygacacgcaaagccaggatgtgcacactgccaggggacgggtaggagatgctacgtgacatacacaaccactgctgtccccgtggagagccgtaattgaggctggccttgactgagagccgtcaacagttttgtgagatggaaagttaatgtttctacctaaaaatgccgtaaaatagaaattttacactgstattttgagcagtgaagaatgtaagaagcaaatacgggctcggagtacacccaggtgcagtgaatgtatactgatgtgctttgctccacggcagcagctgtggggggcc

SEQ ID NO: 65026 - DNA, 600 bp, Chicken  19866894331645_2
gcttctggcactctggacgtgggagagacactgtggagacacgacttgggtgcacgcagctgcctgcctgctgctcacactgctatggagtgggggaataccggcaccygacacgcaaagccaggatgtgcacactgccaggggacgggtaggagatgctacgtgacatacacaaccactgctgtccccgtggagagccgtaattgaggctggccttgactgagagccgtcaacagttttgtgagatggaaagttaatgtttctacctaaaaatgccgtaaaatagaaattttacactgstattttgagcagtgaagaatgtaagaagcaaatacgggctcggagtacacccaggtgcagtgaatgtatactgatgtgctttgctccacggcagcagctgtggggggccgataaccaccgctcactgcccaagcagtgcgagggaccatgcggacccaaaggctcggctggcttgtcctgccctggggaatacagacacccacacagcaggcaccgaggaagcaatgcagmtctgaaagcaaggagaaaccctgccctccctgtcacagccgggcaggaaacgtcagcacgctccaattc

SEQ ID NO: 65027 - DNA, 600 bp, Chicken  19866894331645_3
aacagttttgtgagatggaaagttaatgtttctacctaaaaatgccgtaaaatagaaattttacactgstattttgagcagtgaagaatgtaagaagcaaatacgggctcggagtacacccaggtgcagtgaatgtatactgatgtgctttgctccacggcagcagctgtggggggccgataaccaccgctcactgcccaagcagtgcgagggaccatgcggacccaaaggctcggctggcttgtcctgccctggggaatacagacacccacacagcaggcaccgaggaagcaatgcagmtctgaaagcaaggagaaaccctgccctccctgtcacagccgggcaggaaacgtcagcacgctccaattctttgtgcccagaacacgtgccaaaatctgagcggtccttcttcccaaaaccacgcaggaaacatatgcccttctcggcgtgccacacrctgcagaagcccattttctccctctggctgaggagcagcagcatctcttgccaaggctcgtgcaaaaagcggcaggtcaggagctaagctgagggctaacagtgccaccgttacgtgctgcacaccggggagcaggaagctat

SEQ ID NO: 65028 - DNA, 600 bp, Chicken  19866894331645_4
cggcagcagctgtggggggccgataaccaccgctcactgcccaagcagtgcgagggaccatgcggacccaaaggctcggctggcttgtcctgccctggggaatacagacacccacacagcaggcaccgaggaagcaatgcagmtctgaaagcaaggagaaaccctgccctccctgtcacagccgggcaggaaacgtcagcacgctccaattctttgtgcccagaacacgtgccaaaatctgagcggtccttcttcccaaaaccacgcaggaaacatatgcccttctcggcgtgccacacrctgcagaagcccattttctccctctggctgaggagcagcagcatctcttgccaaggctcgtgcaaaaagcggcaggtcaggagctaagctgagggctaacagtgccaccgttacgtgctgcacaccggggagcaggaagctattccagggcacacctgcacacctcatgcaccacacagcaacgygtgatggggggtggaacataacatttatttgctgcatcagttgttcagtgtaagatacgcgcgaggttttgggtaagtaaagatctgcttttttgggtgctgaacccgggcgaga

SEQ ID NO: 65029 - DNA, 600 bp, Chicken  19866894331645_5
gcaggaaacgtcagcacgctccaattctttgtgcccagaacacgtgccaaaatctgagcggtccttcttcccaaaaccacgcaggaaacatatgcccttctcggcgtgccacacrctgcagaagcccattttctccctctggctgaggagcagcagcatctcttgccaaggctcgtgcaaaaagcggcaggtcaggagctaagctgagggctaacagtgccaccgttacgtgctgcacaccggggagcaggaagctattccagggcacacctgcacacctcatgcaccacacagcaacgygtgatggggggtggaacataacatttatttgctgcatcagttgttcagtgtaagatacgcgcgaggttttgggtaagtaaagatctgcttttttgggtgctgaacccgggcgagacagcgactgctcatctgcatcactcttacagtgatttattatctcttggtataactgctgagcggtgagcactgtggattcacaacgttctgtcgatcagagcaacacggcgtactgagagctgtttaacactctgcagaatgctcagagaaagaatgaacagttgcgagagttacaacagaatt

SEQ ID NO: 65030 - DNA, 600 bp, Chicken  19866894331647_1
caaagagagctaggcataagcatgtcgtctattacaatgggatgtggaaatgcagcgtctcttttggaatgctgaaatgttccaaatgatacttgtaattattgcatatcctgcactcttggcaacactgaatcctccagggtgttcattttcttctttctctcaattttaaaagccttactcttgttttgcatcaaaatgaaacttaatttctaaaactcaaatgtgttgctgtgccatccctaattacattactaaagaacagtactcccaactgcacctagcaaatacttgcttttyctaccttgaacctttgtactgttttcaaatggcttcaaaagaacagatgcttgcttttcatcttcccattaccaacttatatatatatattattcagtttggttaataatcaaacaacttaaaatatttctggcacaataccttgcattgcaagaaatttcatcccaagaaagcttttatatttttggtgataacaattcataatcatgcctcttgaaatgccttgtgtaagtacacaaaatgtacaaacaggtaaagaatgtagaatgatacccgggaattctgaactcacgtggtctg

SEQ ID NO: 65031 - DNA, 599 bp, Chicken  19866894331652_1
  misc_feature (1)..(92): n is any nucleotide
nnnnnnnnnnnnnnnnnnnnnnnnnnnnnnnnnnnnnnnnnnnnnnnnnnnnnnnnnnnnnnnnnnnnnnnnnnnnnnnnnnnnnnnnnnnncgaagattttatgctaatagaaaatcctgcttcatgttcacatgcaaagggttgccccatagagatcttgaagctcgtacaagatttactggatgaggtttttcagtgacagcactatgcaatccatgctggcaaattaagggagttcctcacaagggaatccttcagaggacacaaagaggaaagtggtaagagcaggtacagcggrgagatcagcagctggacaagattgcaggaatgtgaacagatgcagttcaaaagcaaccagagagaaaggagcacaactttgtactccccagattgagattttgctgcagaggattatctctatcctgcwccagaaagcagtgacagatcagaggaagctgcccagacryagactcatacttggcccagggcggagctgacatggtctgaactcacctctaatttacagcacagggcccagcggtgtgcacacacccttagcagctgcacgtgggatctcctcatccctcagaaacacag

SEQ ID NO: 65032 - DNA, 600 bp, Chicken  19866894331652_2
tcacatgcaaagggttgccccatagagatcttgaagctcgtacaagatttactggatgaggtttttcagtgacagcactatgcaatccatgctggcaaattaagggagttcctcacaagggaatccttcagaggacacaaagaggaaagtggtaagagcaggtacagcggrgagatcagcagctggacaagattgcaggaatgtgaacagatgcagttcaaaagcaaccagagagaaaggagcacaactttgtactccccagattgagattttgctgcagaggattatctctatcctgcwccagaaagcagtgacagatcagaggaagctgcccagacryagactcatacttggcccagggcggagctgacatggtctgaactcacctctaatttacagcacagggcccagcggtgtgcacacacccttagcagctgcacgtgggatctcctcatccctcagaaacacagcctgttcctattccctaccctggaggaccttacccccagactggattcacatcagcccaacacaacaagtaaggctaatattcttgcatagtttgacgtagccatgcttgatatgcatatcacaaataga

SEQ ID NO: 65033 - DNA, 600 bp, Chicken  19866894331652_3
gtacaagatttactggatgaggtttttcagtgacagcactatgcaatccatgctggcaaattaagggagttcctcacaagggaatccttcagaggacacaaagaggaaagtggtaagagcaggtacagcggrgagatcagcagctggacaagattgcaggaatgtgaacagatgcagttcaaaagcaaccagagagaaaggagcacaactttgtactccccagattgagattttgctgcagaggattatctctatcctgcwccagaaagcagtgacagatcagaggaagctgcccagacryagactcatacttggcccagggcggagctgacatggtctgaactcacctctaatttacagcacagggcccagcggtgtgcacacacccttagcagctgcacgtgggatctcctcatccctcagaaacacagcctgttcctattccctaccctggaggaccttacccccagactggattcacatcagcccaacacaacaagtaaggctaatattcttgcatagtttgacgtagccatgcttgatatgcatatcacaaatagaagagccatctactttgtttaaaaaatcagcttccacgga

SEQ ID NO: 65034 - DNA, 600 bp, Chicken  19866894331652_4
tacaagatttactggatgaggtttttcagtgacagcactatgcaatccatgctggcaaattaagggagttcctcacaagggaatccttcagaggacacaaagaggaaagtggtaagagcaggtacagcggrgagatcagcagctggacaagattgcaggaatgtgaacagatgcagttcaaaagcaaccagagagaaaggagcacaactttgtactccccagattgagattttgctgcagaggattatctctatcctgcwccagaaagcagtgacagatcagaggaagctgcccagacryagactcatacttggcccagggcggagctgacatggtctgaactcacctctaatttacagcacagggcccagcggtgtgcacacacccttagcagctgcacgtgggatctcctcatccctcagaaacacagcctgttcctattccctaccctggaggaccttacccccagactggattcacatcagcccaacacaacaagtaaggctaatattcttgcatagtttgacgtagccatgcttgatatgcatatcacaaatagaagagccatctactttgtttaaaaaatcagcttccacggaa

SEQ ID NO: 65035 - DNA, 600 bp, Chicken  19866894331658_1
gcagcaccaccagctgcaaatacaggtgctgggagacagcaggcacaggtagctgagggtcactggccacccctggggcttgctgtccccgtgccagcagtccccatcccagcagtccccatcccatgccagcagttcccttccagtcccagtggaagtcctcatcccataccagccattcccattccatgctggtggttctccccatcctataccagcagttcccatctcatgccagcagtgcccatcccatgctaccagtcctcatcccaggctggtggcagtccccatcccatgccrgcagtgcccgtcccatgccaytgagtgtycccatcccacactcactccttccctggaggatttgatgccagttattaaaaatggcccaagctgacagatgtgactcaggaacattatgtaaactttgtaggaaaatgacctgaatccatggctgaaggctctggctggttctccagctgcaaaagagccttgtctatttttatcacccctgggctttcaaagccctcttttaactacagcttatttgataacacacatcttttaaaaagaaaagagttaaaaaaaaataaaaataaatga

SEQ ID NO: 65036 - DNA, 600 bp, Chicken  19866894331658_2
acaggtgctgggagacagcaggcacaggtagctgagggtcactggccacccctggggcttgctgtccccgtgccagcagtccccatcccagcagtccccatcccatgccagcagttcccttccagtcccagtggaagtcctcatcccataccagccattcccattccatgctggtggttctccccatcctataccagcagttcccatctcatgccagcagtgcccatcccatgctaccagtcctcatcccaggctggtggcagtccccatcccatgccrgcagtgcccgtcccatgccaytgagtgtycccatcccacactcactccttccctggaggatttgatgccagttattaaaaatggcccaagctgacagatgtgactcaggaacattatgtaaactttgtaggaaaatgacctgaatccatggctgaaggctctggctggttctccagctgcaaaagagccttgtctatttttatcacccctgggctttcaaagccctcttttaactacagcttatttgataacacacatcttttaaaaagaaaagagttaaaaaaaaataaaaataaatgaagaagaaaaggggaaaaaatc

SEQ ID NO: 65037 - DNA, 600 bp, Chicken  19866894331658_3
tgggagacagcaggcacaggtagctgagggtcactggccacccctggggcttgctgtccccgtgccagcagtccccatcccagcagtccccatcccatgccagcagttcccttccagtcccagtggaagtcctcatcccataccagccattcccattccatgctggtggttctccccatcctataccagcagttcccatctcatgccagcagtgcccatcccatgctaccagtcctcatcccaggctggtggcagtccccatcccatgccrgcagtgcccgtcccatgccaytgagtgtycccatcccacactcactccttccctggaggatttgatgccagttattaaaaatggcccaagctgacagatgtgactcaggaacattatgtaaactttgtaggaaaatgacctgaatccatggctgaaggctctggctggttctccagctgcaaaagagccttgtctatttttatcacccctgggctttcaaagccctcttttaactacagcttatttgataacacacatcttttaaaaagaaaagagttaaaaaaaaataaaaataaatgaagaagaaaaggggaaaaaatcccaaagaa

SEQ ID NO: 65038 - DNA, 600 bp, Chicken  19866894331665_1
aaataaaaagagaaaagttggaaaaaaaaagtttagagtaaacagcaaaaatcaggccatcagacagacacctagagcagtcagaaacaccatgctttgtacctgtactgaatcaagacaatccagctattctacctcatgagtctccacggcaagtaggaaaaaaaaaatcatttattttaactaataagaaaatacatgctgctgcagcctgaactaactgctagtactgagttcccataagaaaccacgccaaagagagttgaaatgaacacttctggtcatctttcaaggacagastagacacaagcaccagctgtgcagcagtagcctttcacacacattacctactgtgtttatactgcttttggacaacatattaagacttgcctctttcactattggttttactttccttgattttgctttcatataatatttaccttacacatataagttttccactcaagaaggaaaaaaaaaaacaaaacaaattcacttagtagtgctttccaagtattttgccagatgataaatttatttcacagtgccagactgccctgtgctatttgcatctgacaatacaagatcctctggaag

SEQ ID NO: 65039 - DNA, 600 bp, Chicken  19866894331666_1
atggggccttatggggccgtatggggccttatggggccgtatggggtttctcacctggaagcggaggatgttggcgtaggtctgcgccaggctgggggcggagaagggggggcggccctattgtgctctatggggccttatggggctctatggggccttatggggctctatggaccttatggggctctatgggaccttatggggctctatgggccttattgggttctatgggccttatggggctgtatgggccttatggggttctatgggactgtatggggccttatggggttctatggsccttatggggctctatggggccttatggggctctatgggccttatggggctgtatggggccttatggggccttatgggttctatgggccttatggggctgtatggggctctatgggccttatggggttctatgggaccttatggggccttatgggcttctatgggccttatggggctctatggggccctatggggctctatgggccttatggggttctatgggccttatggggttctatggtgccctatgggccttatggggctctatgggactgtatggggccttatggggctctatgg

SEQ ID NO: 65040 - DNA, 600 bp, Chicken  19866894331673_1
ctaaattatggagaggtaattatgaaggtctctgtcagagttgcatttcatcttctctgttgatgtgtggtatacacttctagatgatgcaccaaatctgtctgtgagcgccctgctctgagaactgagcatctcttcctgtgtgatgcaggtgtggagcagtgtgctgaccaggggggctgtagtgagggtaaaggtgtttccagccctgttgcaccgctttgtggcagctgggaactgctaatttcagctgatgtctcattttaatttgtgatgatttacttaaatgatgcctgctcsttggtcacaggctgctcattgactatcagatggcaacgcagctcaagcttggctgttaaaaatgatttgaggcaacaacgccaaggaaagagtaattggtgcagaggttttcagaggggggaggaggggagtttattgcatctgtgctgtgtctgaggcagccgtctgttttagtgctgctagctcttattctgctagacacgacactgatggatagctggtctccattgctcctaagtcttcttgaagaagcttgtgaggcttttatttaggataactcttagtaaagtctctgttcag

SEQ ID NO: 65041 - DNA, 600 bp, Chicken  19866894331674_1
gtttttttcttgcatgttctcatttgtgactgaggactttttttttttttttttaactgatgctgacagaagggagattttgcacatgaaaaatattcttgcctcctcacagcttaaaaaaataatagctgcaatgagcaagaaaggtataaaaagcagatgctcaagtggtgtaaattaatgcaacttggatagtaacaccaatttaccatagctgaggatagcatcccagagagtctccttgttattcatttttctattacatatccttgctaggtcagaaagttcccatttttcatsaatagttcctgcaagagttacttggaggtgatgaatgaaaccctagaagattcgttcttatctagttgacttgctgtatccagcttcttcgccctactgcgcaaatacaggcaggtttgaaaaaatggacaatgagaaggctgaggtattcaacttttttgccacagtcttcagtattaactgctgttcacaaagcctttgagcagatgagtaagaaggcagggactgaggaagaaatgtctctcccactgcaagcaaagacgaggtgtgtgaccacctgaggaacctgaacatacataa

SEQ ID NO: 65042 - DNA, 600 bp, Chicken  19866894331675_1
tagctatgttttactcatttatattttgttcatttttctcttttgaactattatttacattcacccattatgtagtctattttattaaaatgtggggtaaattttcaaagacacattggtatttacacatttatttaatttaaaattaaacatcagtaggtgtttgtttgctgtatctctacctatattctttttctcctcatgtgaggtttctagagtagtctttccatagggctacagagtattcagaacacctagaaaatagggcctggaaaagaaggctagttaaaatccattttyacaatatttatcttgctttcctccttgagtaatttcaggtagatttttcccctctttatttatcagaataaaattaataattacaacaagcaacagaaagaagtattgtcgtaatttcttcactacaccagcactcccccttttgtctctctcttttcaaataagaagaatattttctttgggagacaagtgatgattttttaattttcaataatgcatttgttccttcatatttttgctacaactttattttgtttttggtggtggtgttgttttggtttgctttttttattttttact

SEQ ID NO: 65043 - DNA, 600 bp, Chicken  19866894331682_1
ttctatgctatgaatttggggatttttcagaaatgagttctttgttacagacaaattaaaaaaaaaatcatgaaaaactgcagcacggtgtttagttatttttaacactagtgtgtatacaagttgtaataacatctttaaagattttctggaacagcagttaaatactgatgcactcagtgcaatggagtctaaactttcccctctctttatcctgctgggtaaaggggagataaaagctgcaactgctgttccacagaagactgagatgtaagcaaaaacctataataaagtaaccaygctacttcattccattttcaccatacttccttaccttgttgcaatatggacattcaccaaagatgacattaaagctctgtctgctggaaggaagaccttgtagccactgcaacacaagtaagtaaattaaaatcatctcttcgtggagaattttgcaaacttagttcatcygagatgcatctgcacagtgcgtgtcacgtcagtctgtataaccacagtgaggaaggctcacttccacrctgagcttattttacgaatttcagattggaacacaagaggaagcacagtggcttttctagc

SEQ ID NO: 65044 - DNA, 600 bp, Chicken  19866894331682_2
tgcactcagtgcaatggagtctaaactttcccctctctttatcctgctgggtaaaggggagataaaagctgcaactgctgttccacagaagactgagatgtaagcaaaaacctataataaagtaaccaygctacttcattccattttcaccatacttccttaccttgttgcaatatggacattcaccaaagatgacattaaagctctgtctgctggaaggaagaccttgtagccactgcaacacaagtaagtaaattaaaatcatctcttcgtggagaattttgcaaacttagttcatcygagatgcatctgcacagtgcgtgtcacgtcagtctgtataaccacagtgaggaaggctcacttccacrctgagcttattttacgaatttcagattggaacacaagaggaagcacagtggcttttctagcgacgctcatgggattttgcttcatctgtaattttaggtgtgcgatgcttattttttttataacgtgtcagtcagtgccattaattactgtacctcatacaggcaagcctgatgaaaaggttgtcygcatcggggctcattgcacacttgatctggcgtggtgccattgagg

SEQ ID NO: 65045 - DNA, 600 bp, Chicken  19866894331682_3
ctgcaactgctgttccacagaagactgagatgtaagcaaaaacctataataaagtaaccaygctacttcattccattttcaccatacttccttaccttgttgcaatatggacattcaccaaagatgacattaaagctctgtctgctggaaggaagaccttgtagccactgcaacacaagtaagtaaattaaaatcatctcttcgtggagaattttgcaaacttagttcatcygagatgcatctgcacagtgcgtgtcacgtcagtctgtataaccacagtgaggaaggctcacttccacrctgagcttattttacgaatttcagattggaacacaagaggaagcacagtggcttttctagcgacgctcatgggattttgcttcatctgtaattttaggtgtgcgatgcttattttttttataacgtgtcagtcagtgccattaattactgtacctcatacaggcaagcctgatgaaaaggttgtcygcatcggggctcattgcacacttgatctggcgtggtgccattgaggcggtaggcatagcagattccacagtccttagtaaagtcctgaaagcacaccatttgaggttcaaaagg

SEQ ID NO: 65046 - DNA, 600 bp, Chicken  19866894331682_4
attaaaatcatctcttcgtggagaattttgcaaacttagttcatcygagatgcatctgcacagtgcgtgtcacgtcagtctgtataaccacagtgaggaaggctcacttccacrctgagcttattttacgaatttcagattggaacacaagaggaagcacagtggcttttctagcgacgctcatgggattttgcttcatctgtaattttaggtgtgcgatgcttattttttttataacgtgtcagtcagtgccattaattactgtacctcatacaggcaagcctgatgaaaaggttgtcygcatcggggctcattgcacacttgatctggcgtggtgccattgaggcggtaggcatagcagattccacagtccttagtaaagtcctgaaagcacaccatttgaggttcaaaaggaagaaaaagggctgagacagagaaacattttcatctatttgttttttgttttgcaccttttctcatgtagaattactaaacatttctgccttcaacgtgtattttttacattatggtattaacggtgagagcagttgccagatgaacaggactgctaggttatattttatcctctcactgcattac

SEQ ID NO: 65047 - DNA, 600 bp, Chicken  19866894331683_1
tacatgttgtcctcgtggcacgctgctgtcattgcaaacctgatttactgcaaaggaatctctttgagagcgtggtgttgcaaagggatttggggtgtgttttggtaagcacaaaagtggtgtttttcttcaactttgcaatcgttcctaacatacataggaataaaatagatcttgaagatcagaaaagacatacattgcttgtagacatcaacttgtagttcatcgtttatgagcatacacaaatcctgcatgggtaaatggttggctttgggtgactgcagtccaactgttgaattytgtayraataggttcaattttcccatattattccagggaaacatgatgtatatgctgctttattgccttatcccaagcctggatagagaggactgtgtaacccctaaaggagagaggaagtgtgcagttgtgcacttcaggtgggagctgaatcacagcttctccctctcctcctcttgtcttgcctagagtgaccaaatccactgggaaggatcaagaaatgatccaggcagaaaggaacagggggaaatgtgtccaggttgggtcactgttggatcaacacaagggaaggacgtgagg

SEQ ID NO: 65048 - DNA, 600 bp, Chicken  19866894331683_2
gttgtcctcgtggcacgctgctgtcattgcaaacctgatttactgcaaaggaatctctttgagagcgtggtgttgcaaagggatttggggtgtgttttggtaagcacaaaagtggtgtttttcttcaactttgcaatcgttcctaacatacataggaataaaatagatcttgaagatcagaaaagacatacattgcttgtagacatcaacttgtagttcatcgtttatgagcatacacaaatcctgcatgggtaaatggttggctttgggtgactgcagtccaactgttgaattytgtayraataggttcaattttcccatattattccagggaaacatgatgtatatgctgctttattgccttatcccaagcctggatagagaggactgtgtaacccctaaaggagagaggaagtgtgcagttgtgcacttcaggtgggagctgaatcacagcttctccctctcctcctcttgtcttgcctagagtgaccaaatccactgggaaggatcaagaaatgatccaggcagaaaggaacagggggaaatgtgtccaggttgggtcactgttggatcaacacaagggaaggacgtgaggtggag

SEQ ID NO: 65049 - DNA, 600 bp, Chicken  19866894331683_3
ttgtcctcgtggcacgctgctgtcattgcaaacctgatttactgcaaaggaatctctttgagagcgtggtgttgcaaagggatttggggtgtgttttggtaagcacaaaagtggtgtttttcttcaactttgcaatcgttcctaacatacataggaataaaatagatcttgaagatcagaaaagacatacattgcttgtagacatcaacttgtagttcatcgtttatgagcatacacaaatcctgcatgggtaaatggttggctttgggtgactgcagtccaactgttgaattytgtayraataggttcaattttcccatattattccagggaaacatgatgtatatgctgctttattgccttatcccaagcctggatagagaggactgtgtaacccctaaaggagagaggaagtgtgcagttgtgcacttcaggtgggagctgaatcacagcttctccctctcctcctcttgtcttgcctagagtgaccaaatccactgggaaggatcaagaaatgatccaggcagaaaggaacagggggaaatgtgtccaggttgggtcactgttggatcaacacaagggaaggacgtgaggtggagc

SEQ ID NO: 65050 - DNA, 600 bp, Chicken  19866894331688_1
gacacatcacgaggtaaaaaagcattagacagggacaaagtattagcctcgtaaaatccgaagttgagtcacttgtctttcatagaaagtaataaatagtaaaattaatggcatacatctgtgttaaagagttgtgcagaatattagcatattgtagcagacggctaaagaggaatccctttgctactcctgtgttgggggatgtgctaccatccaatggtcataattgctccactttttctttggaatgaagaggtgccttagagatgtctgcacccaaaaaatcaccagtgaattaaracatattcatccccttcagtggtaatgacagtctagagtgagagtgcgttttatagtcatagagtcaatgcaatacaattcatgtgatgtcttatttttaatgtggtatttctgaagagtcacaccagtgcctcttttggaaccatggtgttttttccatctaaaacacccttcagttacatgatttgaagtagttcagcaactacaatgagaacatttaacttctgtataataaacgttgttcttccagagcgtacatagcagtgcactcaacaaagaaatcactcaagtatcaacctc

SEQ ID NO: 65051 - DNA, 599 bp, Chicken  19866894331690_1
  misc_feature (1)..(195): n is any nucleotide
nnnnnnnnnnnnnnnnnnnnnnnnnnnnnnnnnnnnnnnnnnnnnnnnnnnnnnnnnnnnnnnnnnnnnnnnnnnnnnnnnnnnnnnnnnnnnnnnnnnnnnnnnnnnnnnnnnnnnnnnnnnnnnnnnnnnnnnnnnnnnnnnnnnnnnnnnnnnnnnnnnnnnnnnnnnnnnnnnnnnnnnnnnnnnnnnnnntctctgtcctggtgctgctgtgcctgctaccaatctaaatgctgcttcttagttgtatgcttttggccgcattaaaaagaaacgtaccttcatgttgcacacaayttccttcctattcccagtctccaaatgctctggcctctcccagagcttatgtggctcactactttattcatgttgttttcctacaaaatccttctgttttaaagtcagacaggcaacttgtctaagatagcaatattatgtgattcaatgcatcttctggctasaaacagcaagactttgctcttaaatctttgtggttgaatgctgtactagagttgcacaatatgaaacacaagggacaatactgaaacttcagtcactactttgtacatctgtctcatctgtgcttatgctttttc

SEQ ID NO: 65052 - DNA, 599 bp, Chicken  19866894331690_2
  misc_feature (1)..(31): n is any nucleotide
nnnnnnnnnnnnnnnnnnnnnnnnnnnnnnntctctgtcctggtgctgctgtgcctgctaccaatctaaatgctgcttcttagttgtatgcttttggccgcattaaaaagaaacgtaccttcatgttgcacacaayttccttcctattcccagtctccaaatgctctggcctctcccagagcttatgtggctcactactttattcatgttgttttcctacaaaatccttctgttttaaagtcagacaggcaacttgtctaagatagcaatattatgtgattcaatgcatcttctggctasaaacagcaagactttgctcttaaatctttgtggttgaatgctgtactagagttgcacaatatgaaacacaagggacaatactgaaacttcagtcactactttgtacatctgtctcatctgtgcttatgctttttcctacagaattgataagcttcaaacagaagagaataacagccttccgcaaaaacctaattgaaatggcagaactggaaataaagcatgcaaaggtgtgttctttagaatttaacagaggtagcttgagagaagtgaataatgtgcaacttatgacttgctggatt

SEQ ID NO: 65053 - DNA, 600 bp, Chicken  19866894331693_1
ataataaaaacaaacatttactgttctgcatgtatgagatcccattgaatttcaacatgtgatattcgaagagtgttttattttacgactgaaaaaataccctaatggggtagaattagataaatgccagggcatttatcaggaattcacaaagtccagaagtttgctttacatttgaggaataagttctgtaattttgtggatgtgaaactgcattttttaattaagtaaacatatatttaactcattctaaatgtcaaacctcctcccaaaccaggagccacaagtaattttccacayttgaaagcttcagcttgttccctactgtcttagcacaatatagattgcatgaagttttatctctaagtcagaataaaatctaacgctgctacaagctcagatgtaagactcgattcagccttttattaaaaaaawtatatagtatcatttcagatgccacactatattcaagacattgctttagagctgaaagatgtgatacaggaactgtggctgactgacatctttctagagcaataacagcacacctactgggatgacctaacaattttaggtagcactgtacatctatatgtgaaa

SEQ ID NO: 65054 - DNA, 600 bp, Chicken  19866894331693_2
ttatcaggaattcacaaagtccagaagtttgctttacatttgaggaataagttctgtaattttgtggatgtgaaactgcattttttaattaagtaaacatatatttaactcattctaaatgtcaaacctcctcccaaaccaggagccacaagtaattttccacayttgaaagcttcagcttgttccctactgtcttagcacaatatagattgcatgaagttttatctctaagtcagaataaaatctaacgctgctacaagctcagatgtaagactcgattcagccttttattaaaaaaawtatatagtatcatttcagatgccacactatattcaagacattgctttagagctgaaagatgtgatacaggaactgtggctgactgacatctttctagagcaataacagcacacctactgggatgacctaacaattttaggtagcactgtacatctatatgtgaaaactgaattaagcccaggtgtcttttagttgcttacattatgataattaagttccaatgttaaatattggcattcagatttgaaactcacttttgccctaagtgtccaaagttaacttagatactaagtttataat

SEQ ID NO: 65055 - DNA, 472 bp, Chicken  19866894331693_3
atcatttcagatgccacactatattcaagacattgctttagagctgaaagatgtgatacaggaactgtggctgactgacatctttctagagcaataacagcacacctactgggatgacctaacaattttaggtagcactgtacatctatatgtgaaaactgaattaagcccaggtgtcttttagttgcttacattatgataattaagttccaatgttaaatattggcattcagatttgaaactcacttttgccctaagtgtccaaagttaacttagatactaagtttataatactgattrgactcaaaagccccaagtttaccagaattctctagcatgtcctttcctcttacataatagagagtaaaagaatttttctgtacatcatgaaatcttccacaagtgttcaatgagaactctcatgtatagattaatgagtagtgctgtttattgaagcaataggttacagatt

SEQ ID NO: 65056 - DNA, 599 bp, Chicken  19866894331694_1
  misc_feature (1)..(48): n is any nucleotide
nnnnnnnnnnnnnnnnnnnnnnnnnnnnnnnnnnnnnnnnnnnnnnnnagatggttgagtcaagcaaaagttgaagccatgaaataaatgcactgttcatctatatgtgcatcaatgcatacagcaggtgtgggcccaggcacagacacagcagagatgtgctgcacgtggcacagccaccagtgcatgtacaagtggaagtgatactccagcatggtccaaacccggcgataaatctcctgtatggctcctcttgttgcagtgtacacaactctactgctcagcgggacaatctgccasggaggggacagacagaccaggaatccctcttctcacagctgacaacacccaggcagctgcattctggcaatcatcagcagctcccccagcactctgtgcagggccccctaagaatgtaaccaaatggtactggctgccaagccccccccccaaggacaaggggtatttgttggagccaccggagtccctaggaaggasgaaggacccacacatggcatccatcccctgttacattccctctagccagctatcctgcccacagcccccrgcagccatccagcacaccaggcattcccacc

SEQ ID NO: 65057 - DNA, 600 bp, Chicken  19866894331694_2
aagtgatactccagcatggtccaaacccggcgataaatctcctgtatggctcctcttgttgcagtgtacacaactctactgctcagcgggacaatctgccasggaggggacagacagaccaggaatccctcttctcacagctgacaacacccaggcagctgcattctggcaatcatcagcagctcccccagcactctgtgcagggccccctaagaatgtaaccaaatggtactggctgccaagccccccccccaaggacaaggggtatttgttggagccaccggagtccctaggaaggasgaaggacccacacatggcatccatcccctgttacattccctctagccagctatcctgcccacagcccccrgcagccatccagcacaccaggcattcccaccctcagcatgactgacccacagtagggatgagaagtctgtgacctgtgtaagatcaccagggaaccagagaggtyggcagaaaaggatgacatcagggaaagccaaccagagcagggcagacagcacctccagctgcccaacaaggctttgagctctcctcatcagggcccttcccaataggtcacctccggcattggag

SEQ ID NO: 65058 - DNA, 600 bp, Chicken  19866894331694_3
caactctactgctcagcgggacaatctgccasggaggggacagacagaccaggaatccctcttctcacagctgacaacacccaggcagctgcattctggcaatcatcagcagctcccccagcactctgtgcagggccccctaagaatgtaaccaaatggtactggctgccaagccccccccccaaggacaaggggtatttgttggagccaccggagtccctaggaaggasgaaggacccacacatggcatccatcccctgttacattccctctagccagctatcctgcccacagcccccrgcagccatccagcacaccaggcattcccaccctcagcatgactgacccacagtagggatgagaagtctgtgacctgtgtaagatcaccagggaaccagagaggtyggcagaaaaggatgacatcagggaaagccaaccagagcagggcagacagcacctccagctgcccaacaaggctttgagctctcctcatcagggcccttcccaataggtcacctccggcattggaggcaggaaggtggccagcagctccacatcagcagccttttgtcacctgtgacaccaggtctggcagaggac

SEQ ID NO: 65059 - DNA, 600 bp, Chicken  19866894331694_4
tcagcagctcccccagcactctgtgcagggccccctaagaatgtaaccaaatggtactggctgccaagccccccccccaaggacaaggggtatttgttggagccaccggagtccctaggaaggasgaaggacccacacatggcatccatcccctgttacattccctctagccagctatcctgcccacagcccccrgcagccatccagcacaccaggcattcccaccctcagcatgactgacccacagtagggatgagaagtctgtgacctgtgtaagatcaccagggaaccagagaggtyggcagaaaaggatgacatcagggaaagccaaccagagcagggcagacagcacctccagctgcccaacaaggctttgagctctcctcatcagggcccttcccaataggtcacctccggcattggaggcaggaaggtggccagcagctccacatcagcagccttttgtcacctgtgacaccaggtctggcagaggacaagatggatgcaatgggcttggtgaccccaacatcctgagacccttcatgacagtgggattcctcgtgaagttccagccacatctccgcgtgttgaagcggcacc

SEQ ID NO: 65060 - DNA, 599 bp, Chicken  19866894331698_1
  misc_feature (1)..(35): n is any nucleotide
nnnnnnnnnnnnnnnnnnnnnnnnnnnnnnnnnnntatgattctatgactctatgtttatcatacatttcataagaatttttaaaggttattttttacttctggttgtgaaaggtctttttttttttttttttttttttttaatggggcattctttatagttacattttatgacaaagttcattaaaattgttaatacgtcatttgaatttttaagtttcgctagcatattgaaccctttcagtcaatgaggaactgttaaatctgcctgtaaatactctaagggaagaaaggacagagkctggatgcacagccattatttgccctgggatatgaccatagcagggtgaaggagcagcacagaggatggagaatgggcattgctgtcagttccagcagtccacatctgtcactccttcctcctcacactcttcccctgctccagaatggggtccttcccatgggaagcaatccttcaagaactgctacagcacgggtcctctgcaaggtaccatccataaacaggagactgctccagcatggtcccttctgcatggatacagctccagcctgctcctgtgctggctggcttcagcttcc

SEQ ID NO: 65061 - DNA, 600 bp, Chicken  19866894331699_1
cctgcaacgcactctgtcgcatttcataattgcctttttgcagaggttcttattgagtaatgcctattttgatgaaaaattacaccacaaacagccaacggggaaggaaataaataattgctaataaatgtcaaagcagattagcaaatgacaaaggccaagaaagaacctttttcttttttttttctttttcttttttttttttcctttttgtcttggaaaataactgtgggtttactgcagagattgtatgtaatggaatcgatcccaataccttgcaggggaggtagtgctcggtcrtttcctcagctggcttagtgctgtctgcctcctccgtgggctgcagcaagcctggaaaatggtcttctcttctgtgaagtgagaaaaagcagacggaacgtggtgggtttcttctgagcacacggggggtcrtggggtaaatggttctacctgctcccgtgttggaaaatttggggttatggcatccccaagctctygtatcagtgatgtttggtataaaagaagcctctaggcaaagaaaagctggggagatcagaactgcaaatcttaaataaagatcaaaacaagcaagaatggtga

SEQ ID NO: 65062 - DNA, 600 bp, Chicken  19866894331699_2
aaagcagattagcaaatgacaaaggccaagaaagaacctttttcttttttttttctttttcttttttttttttcctttttgtcttggaaaataactgtgggtttactgcagagattgtatgtaatggaatcgatcccaataccttgcaggggaggtagtgctcggtcrtttcctcagctggcttagtgctgtctgcctcctccgtgggctgcagcaagcctggaaaatggtcttctcttctgtgaagtgagaaaaagcagacggaacgtggtgggtttcttctgagcacacggggggtcrtggggtaaatggttctacctgctcccgtgttggaaaatttggggttatggcatccccaagctctygtatcagtgatgtttggtataaaagaagcctctaggcaaagaaaagctggggagatcagaactgcaaatcttaaataaagatcaaaacaagcaagaatggtgataatcgtcatgaatatggcagtgctgttactttgctggccgctggtgtttgggattttcagccctgcatggggtttctctgcatttccaagtttcagacatgccgtccacccacagctcatccctttctgga

SEQ ID NO: 65063 - DNA, 600 bp, Chicken  19866894331699_3
ttttttttcctttttgtcttggaaaataactgtgggtttactgcagagattgtatgtaatggaatcgatcccaataccttgcaggggaggtagtgctcggtcrtttcctcagctggcttagtgctgtctgcctcctccgtgggctgcagcaagcctggaaaatggtcttctcttctgtgaagtgagaaaaagcagacggaacgtggtgggtttcttctgagcacacggggggtcrtggggtaaatggttctacctgctcccgtgttggaaaatttggggttatggcatccccaagctctygtatcagtgatgtttggtataaaagaagcctctaggcaaagaaaagctggggagatcagaactgcaaatcttaaataaagatcaaaacaagcaagaatggtgataatcgtcatgaatatggcagtgctgttactttgctggccgctggtgtttgggattttcagccctgcatggggtttctctgcatttccaagtttcagacatgccgtccacccacagctcatccctttctggaaggaaaagcacagatccatttggccagtgcaccccttcagcgacgcctttgatttaaggacccat

SEQ ID NO: 65064 - DNA, 600 bp, Chicken  19866894331702_1
ccattcctaccatctgtgtggtcatctatattgcactgtccttatgctaagttcttgccttcaaactctgtgatgtgcctaggttgctcaaaggaggcagaattttcagcaggtaccctgtgattcctctcatgctgggtgtttcattagagctccctcatcatcgttatcgtcccttcttcagtttctctgttgtgatgtacacaaagcccagttccaacctggagatgcaccaggtccagccccagcctcgctgcccccacaccatgcacagctgagtcctggggtgcactgcctggwgtcaaggcagggaatgctacgtggtgtgtatgcctgtacagagtgtttggaaatagagaggaacaagatgacttgtgagcattgctactatgtgatggaggttgttaggcctagcttcagtagggaaggtttcttagtattttwtctctctacatctggaggatggagctccctgctcagcctgagcccatggggagggtggatctgtgacaacagtgtgcaccaacccaatctgcagcgctgagctcttttacgggaagggctgtgtgcaggttttgcaaagaccatgcttcgtccaaa

SEQ ID NO: 65065 - DNA, 600 bp, Chicken  19866894331702_2
cattagagctccctcatcatcgttatcgtcccttcttcagtttctctgttgtgatgtacacaaagcccagttccaacctggagatgcaccaggtccagccccagcctcgctgcccccacaccatgcacagctgagtcctggggtgcactgcctggwgtcaaggcagggaatgctacgtggtgtgtatgcctgtacagagtgtttggaaatagagaggaacaagatgacttgtgagcattgctactatgtgatggaggttgttaggcctagcttcagtagggaaggtttcttagtattttwtctctctacatctggaggatggagctccctgctcagcctgagcccatggggagggtggatctgtgacaacagtgtgcaccaacccaatctgcagcgctgagctcttttacgggaagggctgtgtgcaggttttgcaaagaccatgcttcgtccaaaaaatgttgcatactatgtgtagtgttaataggctcttgtggatgtcagggagtcctttccatgtttcatgtttcataaatgttataaaaataccgaggcttaataagtgtcatggaacacccgggaaggactctgccatcgttc

SEQ ID NO: 65066 - DNA, 599 bp, Chicken  19866894331704_1
  misc_feature (1)..(184): n is any nucleotide
nnnnnnnnnnnnnnnnnnnnnnnnnnnnnnnnnnnnnnnnnnnnnnnnnnnnnnnnnnnnnnnnnnnnnnnnnnnnnnnnnnnnnnnnnnnnnnnnnnnnnnnnnnnnnnnnnnnnnnnnnnnnnnnnnnnnnnnnnnnnnnnnnnnnnnnnnnnnnnnnnnnnnnnnnnnnnnnnnnnnnnnntgctcctctcctggaggcaatggcaagctccttctttccttacatggatgtctgtctctgcttccaggaagcccccagatgtgcttctgaatgaccaaagcctggggaaggactcrtgcccatcccagagggcactggtagcttttccatgcagatactcaacaacgtgctttgacttctggttagccctgccatggtcaggcagtcggagtagttgttttttggaagacccttccaaatcaactctttcattccattctattccactccatcccactccactgaaagccatgtgcaggacagaccccagctttggagcagaagtattccccttggagcagcaccaggtcaacatgagcagtacggggctttggcygtgtggcttctgggagtgcatgaggtggggatgtgaaat

SEQ ID NO: 65067 - DNA, 600 bp, Chicken  19866894331704_2
agatgtgcttctgaatgaccaaagcctggggaaggactcrtgcccatcccagagggcactggtagcttttccatgcagatactcaacaacgtgctttgacttctggttagccctgccatggtcaggcagtcggagtagttgttttttggaagacccttccaaatcaactctttcattccattctattccactccatcccactccactgaaagccatgtgcaggacagaccccagctttggagcagaagtattccccttggagcagcaccaggtcaacatgagcagtacggggctttggcygtgtggcttctgggagtgcatgaggtggggatgtgaaatatggacagagagcactcatcggctcctgagacaaaagatgacttggagagaccccatggtgctgggaagtgaagggcttttcttttgtctccaaraaagtaaggggacaatgccagttagggctccagagaggcagcaatgtactttggcagccccttagccgctccgttcaagggttagcccagcttaaacgctgtaaactgcaaaggaaacccagaatgacaaacaattgtaggaacctgaaagaccaagttcctctgg

SEQ ID NO: 65068 - DNA, 538 bp, Chicken  19866894331704_3
gtagttgttttttggaagacccttccaaatcaactctttcattccattctattccactccatcccactccactgaaagccatgtgcaggacagaccccagctttggagcagaagtattccccttggagcagcaccaggtcaacatgagcagtacggggctttggcygtgtggcttctgggagtgcatgaggtggggatgtgaaatatggacagagagcactcatcggctcctgagacaaaagatgacttggagagaccccatggtgctgggaagtgaagggcttttcttttgtctccaaraaagtaaggggacaatgccagttagggctccagagaggcagcaatgtactttggcagccccttagccgctccgttcaagggttagcccagcttaaacgctgtaaactgcaaaggaaacccagaatgacaaacaattgtaggaacctgaaagaccaagttcctctggatttcatgggaagtgtggttttaaatattccaacctgtctgtctggggggaagtgggcaataaatagcagcc

SEQ ID NO: 65069 - DNA, 600 bp, Chicken  19866894331705_1
caaattattttgtaccaggacaactgctatcagattcatgttttttccatacgtttttaacagatcaagactctgtaaaagggagataatttgaattatcagcagaaaaatcagaagtgtgaatattgcatttcacatgggaacgctgctgatatccgtgtgtttcattccacaaagccacagagctgccgtaacacagaaagactcacaacaaacttggaatatttgtggctatgtaaacatttattcttctaaaacacttggcctgaaaatattcctatttgtattaaaataaatagrtaaataaataagttgcagtgcttaaaatattggaaagcaaagatgaagaaattattcagaatccattaatattttgttctgtgaatccttttgccaagagagcgataataaattcaactcctattctatactattattatctttattatatttactattattttatatakagagagagaaattaaatgacatagggaaattcttgatagagtgagtggtgaggtgctggaacagcctgtacagagaggctgtggatgctctttccctggaggtgttcaaggccaggttggatggggccct

SEQ ID NO: 65070 - DNA, 600 bp, Chicken  19866894331705_2
cacaaagccacagagctgccgtaacacagaaagactcacaacaaacttggaatatttgtggctatgtaaacatttattcttctaaaacacttggcctgaaaatattcctatttgtattaaaataaatagrtaaataaataagttgcagtgcttaaaatattggaaagcaaagatgaagaaattattcagaatccattaatattttgttctgtgaatccttttgccaagagagcgataataaattcaactcctattctatactattattatctttattatatttactattattttatatakagagagagaaattaaatgacatagggaaattcttgatagagtgagtggtgaggtgctggaacagcctgtacagagaggctgtggatgctctttccctggaggtgttcaaggccaggttggatggggccctgggaaacctggtctggtattaaatgtggaggctgttggccctgcatgtggctggggcattggatcttgttgattcttgaggtcacttccaacccaagccattctattattttgtgatgattctataccctactaggtttcattttagcttctcrtggagttaaaagkaag

SEQ ID NO: 65071 - DNA, 600 bp, Chicken  19866894331705_3
ctattattttatatakagagagagaaattaaatgacatagggaaattcttgatagagtgagtggtgaggtgctggaacagcctgtacagagaggctgtggatgctctttccctggaggtgttcaaggccaggttggatggggccctgggaaacctggtctggtattaaatgtggaggctgttggccctgcatgtggctggggcattggatcttgttgattcttgaggtcacttccaacccaagccattctattattttgtgatgattctataccctactaggtttcattttagcttctcrtggagttaaaagkaagcagagtcataggaacgtaagactcctgcccayrtatttatccaaacacacagttttggagacagcctaattctgtcaactattacacctgttaagaattaaacccaaaagcatatgtttgacctacacttctctgagaaaatgttgttacactctctgtgctacgaggatagtactgagagcaggaataaagaagacggaattgggacaaaagcagattaagttggctgaattcccttgaatttgtaacattttgatgaaaggtagagttctacatatcactgg

SEQ ID NO: 65072 - DNA, 600 bp, Chicken  19866894331705_4
takagagagagaaattaaatgacatagggaaattcttgatagagtgagtggtgaggtgctggaacagcctgtacagagaggctgtggatgctctttccctggaggtgttcaaggccaggttggatggggccctgggaaacctggtctggtattaaatgtggaggctgttggccctgcatgtggctggggcattggatcttgttgattcttgaggtcacttccaacccaagccattctattattttgtgatgattctataccctactaggtttcattttagcttctcrtggagttaaaagkaagcagagtcataggaacgtaagactcctgcccayrtatttatccaaacacacagttttggagacagcctaattctgtcaactattacacctgttaagaattaaacccaaaagcatatgtttgacctacacttctctgagaaaatgttgttacactctctgtgctacgaggatagtactgagagcaggaataaagaagacggaattgggacaaaagcagattaagttggctgaattcccttgaatttgtaacattttgatgaaaggtagagttctacatatcactggtttagcttcagca

SEQ ID NO: 65073 - DNA, 600 bp, Chicken  19866894331705_5
ttgatagagtgagtggtgaggtgctggaacagcctgtacagagaggctgtggatgctctttccctggaggtgttcaaggccaggttggatggggccctgggaaacctggtctggtattaaatgtggaggctgttggccctgcatgtggctggggcattggatcttgttgattcttgaggtcacttccaacccaagccattctattattttgtgatgattctataccctactaggtttcattttagcttctcrtggagttaaaagkaagcagagtcataggaacgtaagactcctgcccayrtatttatccaaacacacagttttggagacagcctaattctgtcaactattacacctgttaagaattaaacccaaaagcatatgtttgacctacacttctctgagaaaatgttgttacactctctgtgctacgaggatagtactgagagcaggaataaagaagacggaattgggacaaaagcagattaagttggctgaattcccttgaatttgtaacattttgatgaaaggtagagttctacatatcactggtttagcttcagcaaaaccatagccaaggcctgctcttgtttattaatc

SEQ ID NO: 65074 - DNA, 600 bp, Chicken  19866894331705_6
tgatagagtgagtggtgaggtgctggaacagcctgtacagagaggctgtggatgctctttccctggaggtgttcaaggccaggttggatggggccctgggaaacctggtctggtattaaatgtggaggctgttggccctgcatgtggctggggcattggatcttgttgattcttgaggtcacttccaacccaagccattctattattttgtgatgattctataccctactaggtttcattttagcttctcrtggagttaaaagkaagcagagtcataggaacgtaagactcctgcccayrtatttatccaaacacacagttttggagacagcctaattctgtcaactattacacctgttaagaattaaacccaaaagcatatgtttgacctacacttctctgagaaaatgttgttacactctctgtgctacgaggatagtactgagagcaggaataaagaagacggaattgggacaaaagcagattaagttggctgaattcccttgaatttgtaacattttgatgaaaggtagagttctacatatcactggtttagcttcagcaaaaccatagccaaggcctgctcttgtttattaatcc

SEQ ID NO: 65075 - DNA, 600 bp, Chicken  19866894331713_1
aactttaaatatagtcaaaccattcatggcagtgataacagctttttaaaggccagtatggactaaattgcttttcagggaagagaatctgcacagtgaactggaaaatccatgagcttttaacacagttcttaccatttgatttgagaaactttcatctacttatggcacgctgggactcgatgtgatggagcagaatacaggtgcttcaccttttcatgctgctattatcagagtatctgcataattaatttcgaccttttctccttcttccaggtagggtaaataacatgcctaaamaaagttttcatttcagcacgaatagtaagtataacattgcacatgtcgatgtayattttgcaaaacctggtgagtaagataatactatggaaatgccattatgctgcctttttctctgccaggagtgcttcttgatttgtcagggaacatttacaaaaccaaagcatcattttctaaaggcttgtaataaatcaatggatcataatggttttcgaccagaatatctacttatgtagtcataggtgagtcattcagtaggttttaaaagatgttctaatgtgtaggaaacagattgattgt

SEQ ID NO: 65076 - DNA, 600 bp, Chicken  19866894331713_2
agtatggactaaattgcttttcagggaagagaatctgcacagtgaactggaaaatccatgagcttttaacacagttcttaccatttgatttgagaaactttcatctacttatggcacgctgggactcgatgtgatggagcagaatacaggtgcttcaccttttcatgctgctattatcagagtatctgcataattaatttcgaccttttctccttcttccaggtagggtaaataacatgcctaaamaaagttttcatttcagcacgaatagtaagtataacattgcacatgtcgatgtayattttgcaaaacctggtgagtaagataatactatggaaatgccattatgctgcctttttctctgccaggagtgcttcttgatttgtcagggaacatttacaaaaccaaagcatcattttctaaaggcttgtaataaatcaatggatcataatggttttcgaccagaatatctacttatgtagtcataggtgagtcattcagtaggttttaaaagatgttctaatgtgtaggaaacagattgattgtgagtacaggtaaattacaccagtctgtcctaagttcttatgttactgcagacaa

SEQ ID NO: 65077 - DNA, 600 bp, Chicken  19866894331714_1
aggatgacctggcagccaagagggcaaattgcatttggactgaactaaacacagtgtagccatccagtcaaaagaggtttttttcccactatatttagcactgatacaacctcaccttgaatactgtgcgattgcaggctccacaatatgaaatagatttttagatatttgaatacgtctagaagaggccaacaaatatagtaagaggactggaaggcacgtcctttgtggcatggctgaagacacctcattgctctctgcggcctcctgagggaaggaactggatagggaggtgccagyctcttctctggaaatgagaatgtgcaggaatagcacaaagctgtgccaggggaggctcacactggacattaggaacttttttttttttttactgtgagggtggtcaagcactgtagcagacttcctggagtagtggttgataccctgtgcctgtcagtgttcaagagacatttgaacaatgctttaacttttgtttaggcctacattagttaagcacccacattaatttcagattggaatattacatatttctgggggtaccccttgactcagtggagttatcttttaaaactcaaagga

SEQ ID NO: 65078 - DNA, 600 bp, Chicken  19866894331730_1
aagaatgtacatcctcacaaaagcagaacagaaaaaggaggagtgggggagggaagcaaccatctgaagtccagactccttccatcaggattaaaatctacagttactagggcaggtaggaaattgcatccatgaggagggaagaaatgatggtaaaatgcacaactgctcttggctgcgtcaacctgcagtgtggccccagcagggcagttgaaagactcgctgaggggagacttccatggtgttttgagcatgtgagcagttacggtgagtcactgctgagctaaaacagtgcctagmgatgcctctgggttgaaccattttgtaagcctctatagtacagacgttattcttcctgtttcttctcttggcagcactaacatgttgtgacagtgatgttgctggctcctgctattaatccagccttctcggagatgtaaaaatcacactgtatctggggcgagatgggcagccagattaatccttgtgttgtagttagcttttctgagtcatgtcataatatgatagctcttgtgtgcaagggttacaaactgggtgtgatgtgactgggagctccttttccattgcaatccagtgctg

SEQ ID NO: 65079 - DNA, 600 bp, Chicken  19866894331731_1
cttcccttatccaccaacattataaccccacggtaaaggccgcagagttgtcaggcatgggttgcgcatagtgaatacgttttggctgtccccggttgcctctgtacaccttagcgtagtttccaggaggatctgctccgtgatcttgctgagcatagaggtgagtctgactggactgtagctcaccaagtcttctctttttccaagtggggtttatgtttccccttttccattcactgggaacttcaccggagtactgtgacttctggaatacgatggatagcgtcttagcaactttayttaccagttccctcaggacctgctgatacatctcacaagatcccatggactttcacatcttcagattccttagatggtctcaggatggcaaacctcatttacctttaattttagttaagtctgggtacaaaagtccctagaaattaaatgattcagagtcatagaaagaatatgattggttgagatgaaaacctttagaatagaagtgaaatacttaaaatgtccaatgcttaagtggattaaatgctaaattttgtctgttatttctgaggatgtattctgtattatccatggattttc

SEQ ID NO: 65080 - DNA, 600 bp, Chicken  19866894331731_2
atctcacaagatcccatggactttcacatcttcagattccttagatggtctcaggatggcaaacctcatttacctttaattttagttaagtctgggtacaaaagtccctagaaattaaatgattcagagtcatagaaagaatatgattggttgagatgaaaacctttagaatagaagtgaaatacttaaaatgtccaatgcttaagtggattaaatgctaaattttgtctgttatttctgaggatgtattctgtattatccatggattttctgttcttttcagttttttcatatctcctrtaggatgcttagagaaacgttggtacttcttgtttctgacagttgctgtgttgaattttgaaggaaagtaattaatctctaaatcacctttaatttaccatatttaaaggactaaaggaccagaggaagagtaagacagctggttcttcaagatgttcttaaaatgcatatacagtcttctaaaatagagaattaagagttgagtctctgagaaaatagaggcctttatctcttgattcagctgtcctcagacacgccccccatatactttgcagtccttcagacactcaggataaatat

SEQ ID NO: 65081 - DNA, 599 bp, Chicken  19866894331741_1
  misc_feature (1)..(158): n is any nucleotide
nnnnnnnnnnnnnnnnnnnnnnnnnnnnnnnnnnnnnnnnnnnnnnnnnnnnnnnnnnnnnnnnnnnnnnnnnnnnnnnnnnnnnnnnnnnnnnnnnnnnnnnnnnnnnnnnnnnnnnnnnnnnnnnnnnnnnnnnnnnnnnnnnnnnnnnnnnnnnntaagtgttgcttggacttgtaggtctaagtacacacaggactgtgtaccctaagtgttagattactattttctcagggagtaatactaataagcttgagctgtgagcactgaatgagttggactgttatttttattttatcwtgctttcctgttttagcattcattaatgactgttttcccttatcagtagtggtgtttttggttttttgtttttttcccctgttagtattttcttgcactgtaatagttggtttgcatgaaatgggagtgctcatatcataaagattgcaaggacgtacctttaggaatycaragtccaggcttctaaataactgttccacagctgaaattttggggagatgaggaggagggtagagtgtctgatactgtctgtcattctgtctctctctttctgtctttgaaaaaagcttttctaaatt

SEQ ID NO: 65082 - DNA, 600 bp, Chicken  19866894331741_2
tggacttgtaggtctaagtacacacaggactgtgtaccctaagtgttagattactattttctcagggagtaatactaataagcttgagctgtgagcactgaatgagttggactgttatttttattttatcwtgctttcctgttttagcattcattaatgactgttttcccttatcagtagtggtgtttttggttttttgtttttttcccctgttagtattttcttgcactgtaatagttggtttgcatgaaatgggagtgctcatatcataaagattgcaaggacgtacctttaggaatycaragtccaggcttctaaataactgttccacagctgaaattttggggagatgaggaggagggtagagtgtctgatactgtctgtcattctgtctctctctttctgtctttgaaaaaagcttttctaaattacttttccctttttgtcttcatctctaacagtgatcatatttgacaagatccagaaaagaccttccagctttggctttaggctgcaggtattttagcagctggaaattcgtccttgtaatgtcttgtctgtgctgtaggacacagtagatcatattacagagaagtagaa

SEQ ID NO: 65083 - DNA, 600 bp, Chicken  19866894331741_3
acttgtaggtctaagtacacacaggactgtgtaccctaagtgttagattactattttctcagggagtaatactaataagcttgagctgtgagcactgaatgagttggactgttatttttattttatcwtgctttcctgttttagcattcattaatgactgttttcccttatcagtagtggtgtttttggttttttgtttttttcccctgttagtattttcttgcactgtaatagttggtttgcatgaaatgggagtgctcatatcataaagattgcaaggacgtacctttaggaatycaragtccaggcttctaaataactgttccacagctgaaattttggggagatgaggaggagggtagagtgtctgatactgtctgtcattctgtctctctctttctgtctttgaaaaaagcttttctaaattacttttccctttttgtcttcatctctaacagtgatcatatttgacaagatccagaaaagaccttccagctttggctttaggctgcaggtattttagcagctggaaattcgtccttgtaatgtcttgtctgtgctgtaggacacagtagatcatattacagagaagtagaaagg

SEQ ID NO: 65084 - DNA, 599 bp, Chicken  19866894331744_1
  misc_feature (1)..(124): n is any nucleotide
nnnnnnnnnnnnnnnnnnnnnnnnnnnnnnnnnnnnnnnnnnnnnnnnnnnnnnnnnnnnnnnnnnnnnnnnnnnnnnnnnnnnnnnnnnnnnnnnnnnnnnnnnnnnnnnnnnnnnnnnnnnnatgaatgaaagatgcccacagaatcaaaacaaaattacagcagtgcagaaaagatgaccagtgaagcaaagtcaaaatgattgtttgatgcagaaatttgaagagctggggagtaaaggatgatttgttcttcaatatgttgttaggaaaatagaaaagcctcctgtgcgtctgckgagggatgagtaagtagtaataggctttatctgtagcaatggacagtagaagaagtaagaaaagttaagtatatttaagtactattacaggctactgagaaaaatcactagaggttcatcattagaaattttaattacaggttaataacaaatattttccagttmcattttgtataatttctggaagtcttgtccagcattatccttaagatgtacttcaagctatctcaaagtactgtgaaggatacacaggtacagctttaggctgttaatatgatactatataggatgccattttc

SEQ ID NO: 65085 - DNA, 600 bp, Chicken  19866894331744_2
agtgcagaaaagatgaccagtgaagcaaagtcaaaatgattgtttgatgcagaaatttgaagagctggggagtaaaggatgatttgttcttcaatatgttgttaggaaaatagaaaagcctcctgtgcgtctgckgagggatgagtaagtagtaataggctttatctgtagcaatggacagtagaagaagtaagaaaagttaagtatatttaagtactattacaggctactgagaaaaatcactagaggttcatcattagaaattttaattacaggttaataacaaatattttccagttmcattttgtataatttctggaagtcttgtccagcattatccttaagatgtacttcaagctatctcaaagtactgtgaaggatacacaggtacagctttaggctgttaatatgatactatataggatgccattttctaataaakaagttaygcgacaggttgaagtaaaccgtactgaacttgtatgtctaaaagactgaagcttaaattggagtaacctggaaaaagaagggctgatatttttggcataattgtgtaaaaatgcatttctgtgttcctgcaagctagtcatttaggtaaaa

SEQ ID NO: 65086 - DNA, 600 bp, Chicken  19866894331744_3
gagtaagtagtaataggctttatctgtagcaatggacagtagaagaagtaagaaaagttaagtatatttaagtactattacaggctactgagaaaaatcactagaggttcatcattagaaattttaattacaggttaataacaaatattttccagttmcattttgtataatttctggaagtcttgtccagcattatccttaagatgtacttcaagctatctcaaagtactgtgaaggatacacaggtacagctttaggctgttaatatgatactatataggatgccattttctaataaakaagttaygcgacaggttgaagtaaaccgtactgaacttgtatgtctaaaagactgaagcttaaattggagtaacctggaaaaagaagggctgatatttttggcataattgtgtaaaaatgcatttctgtgttcctgcaagctagtcatttaggtaaaattttcaggaatagctttgtgtgagtctcttgctagatcccratttccaatatcctgaacacttacagatatagtggtctggtcccagacaaataatttaatgtctctagtcagcttttaaatgttcatttatgaatacattt

SEQ ID NO: 65087 - DNA, 600 bp, Chicken  19866894331744_4
tagtaataggctttatctgtagcaatggacagtagaagaagtaagaaaagttaagtatatttaagtactattacaggctactgagaaaaatcactagaggttcatcattagaaattttaattacaggttaataacaaatattttccagttmcattttgtataatttctggaagtcttgtccagcattatccttaagatgtacttcaagctatctcaaagtactgtgaaggatacacaggtacagctttaggctgttaatatgatactatataggatgccattttctaataaakaagttaygcgacaggttgaagtaaaccgtactgaacttgtatgtctaaaagactgaagcttaaattggagtaacctggaaaaagaagggctgatatttttggcataattgtgtaaaaatgcatttctgtgttcctgcaagctagtcatttaggtaaaattttcaggaatagctttgtgtgagtctcttgctagatcccratttccaatatcctgaacacttacagatatagtggtctggtcccagacaaataatttaatgtctctagtcagcttttaaatgttcatttatgaatacattttacctgg
